United States Patent Application Publication US 2017/0114356 A1 - sequence listing, part 34

SEQ ID NO: 45117 - DNA, 1919 bp, Zea Mays
actataataggttctctcgagccttcgccgccaagagcccgatacccgccgtcctccctgctcctgctgccgcgtgcccctctccggccacccgccgccggcgcagtgtccatgaactagcacctctttcttcgcccggtacccattcagttcgtccgcctccttctcttcgagtttgggtgcccatggagaccagcagtgcgcccgccgccgccaccgaggccggctggtacgtgcttggaccgaaccaggagggcgtcggaccctacgcgcttgctgagcttcgagaacatttcgcaaacggttatttcaatgagagcacaatgctctgggcagaagggaggaaggaatggatgccactctcgtccatctctgagctacactccgcagtcgcagcgaaggatcaatctgaacaagatgctccagatgttgatgatgattttgagaaatttcagaaggaggttatcgaagccgagacagaggtgaaggccttgaaaggcaatgatgtggaccagcaagatgatgagcggccagcaaccccccctgatggagaggaagaatttactgatgatgatggcaccatttacaaatgggaccgtactttgagggcatgggttcctcaaaatgatgcatctggtagcaaggaagattacgctgttgaagagatgacttttgcagttgaggaggaaatatttcaggcacccgatatcctgggtcctgcattagaagaaatcaacaatctacctgaaagcaaaaataaaggatcagataaagcagaaatgagaggagacaaaaagcggaaatcttatgagaatccagctgagaaaaagctaacaaacctccggacagttggtttgatctcaaagtaaacacacatgtctatgtaactggtttgcctgatgatgtcacagtggaggagattgtggaggtattttccaagtgcggaataataaaggaggacccagagactaaaaagccacgagtgaagatttatactgatagagaaaccggcaggaagaagggtgatgccttggtgacatatttcaaggagccttctgtagctttagcggttcaattgttggatgggacaccattccgtcctggtggtaagactcatatgtctgtaagtccagccaaatttgagcagaaaggtgatgttttcgtttcaaagaaaactgacaagcaaaagaagaggaagataaagaaggttgaggacaaaatgcttggatggggtgggcatgacgataagaagctgatgattcctgctacagtaattttaaggcacatgttcactcctgctgagctgagagctgatgaagagcttcttcctgagcttgaggctgatgttagagaggaatgcatcaagtttggtccggtggataatgtcaaggtttgtgaaaatcatccacaaggtgtcatattggtgagattcaaagacaggaaagatggtgccaaatgcatagagaagatgaacggcagatggtttgctggacggcaaatccatgcgagcgaagacgatggctctgttaaccatgctcttatccgtgattacgacgcggaggtgtcaaggctggatcgatttggacaagagctagaagagtccacatagagtgtatatatacacacacacaccagggattagagtaggtgtgttacctcattcataggtaggttcgcctgattgaacatgagaaagaagttattggatacacctgctaataagagtagtgaccggcttgcagagctggtgatatcatcactagcgaagtagcagcacactgctttctcaaatgtgttgtttaatgaatgagaagctcatatcgatactattaacctcggctccctatgaaagtacagtgggcatttctatctgaaatgtgggaatttttatatgcattactggcttgttcgtactggtt

SEQ ID NO: 45118 - DNA, 2488 bp, Zea Mays
  misc_feature (1)..(2): n is a, c, g, or t
nntcgtcgccgacccctcctccctccccgcgtcccccgacaagccatccgcggccatgatcaccgcgctggacctctaccacgtgctgacggcggtggtgccgctgtacgtggccatgacgctggcgtacggctccgtccgctggtggcgcatcttcacgccggaccagtgctccgggatcaaccgcttcgtggcgctcttcgccgtgccgctcctctccttccacttcatctccaccaacgaccccttcgccatgaacctgcgcttcctggccgccgacacgctgcagaaggtggccgtcctcgcgctgctggcgctggcctcccgcggcctctcctccccgcgcgcgctcgggctcgactggagcatcacgctcttctccctctccacgctccccaacacgctcgtcatgggcatcccgctgctgcgaggcatgtacggcgcgtcgtcggccggcacgctcatggtccaggtcgtcgtcctccagtgcatcatctggtacacgctcatgctcttcctcttcgagtaccgcgccgcgcgcgcgctcgtcctcgaccagttccccgacggcgccgccgcgtccatcgtctccttccgcgtcgactccgacgtcgtctcgctcgccaggggggacgtcgagctcgaggccgagcccgacggcgtcgccggcgccggcgccgtctcctcccgcggcggggacgccgggcgggtgcgcgtcaccgtgcgcaagtccaccagctcgcgctccgaggccgcgtgctcgcactcgcactcccagaccatgcagccccgtgtgtccaacctctccggcgtggagatctactcgctgcagtcgtcgcgcaaccccaccccgcgcgggtccagcttcaaccacgccgacttcttcaacatcgtcggcgccgccgccaagggaggcggaggagcggcgggggacgaggagaagggcgcatgcggcggcggcggcggaggacactcgccgcagccgcaggccgtcgccgtgccggccaagaggaaggacctgcacatgctcgtctggagctccagcgcctcgcccgtgtccgagcgcgccgccgtgcacgtcttcggcgccggcggcgctgaccatgccgacgtcctcgccaaaggagcccaggcctacgacgagtacgggcgcgacgactacagcagcaggacgaagaacgggagcggcggcgcggacaagggcgggccgacgctgtcgaagctggggtccaactcgacggcgcagctgtaccccaaggacgacggcgaggggagggcggcggcggtggcgatgccgccggcgagcgtgatgacgcggctcatcctcatcatggtgtggaggaagctgatccggaaccccaacacctactccagcctcatcggcgtcgtctggtccctggtctcctacaggtggggcatcgagatgccagcgatcatcgcccggtcgatttcgatcctgtcggacgcgggtctcgggatggccatgttcagcctaggcctgttcatggcgctgcagccgaggatcatcgcgtgcgggaacaagctggcggccatcgcgatgggcgtccggttcgtcgcaggccccgcggtcatggccgccgcctccatcgccgtcggtctgcgcggcgtcctcctccacatcgccatcgtccaggctgctctgcctcaggggatcgtgccgttcgtgttcgccaaggagtacggcgttcatcccgacatcctgagcacagcgtatggtccaataacatcgcatggtttcatcacttgccatagttaacgggaaaaaaaagcagaagcaatcgatgacgacgcactgaattcactatgattcattactaatgatggtgtgttcatgcagtgcagtcaaagaaccactaataagcactgatctaggacagcatcagcatgattgattgcttgttttctcctgacaatctgcatttcttactacacagtgtgccttcactcatccatccagatgatcatacaacactactgatgcatcttttttttttgattctgctgcagcgtgatcttcgggatgctcatcgctctgcccatcaccctggtctactacatcttgctggggctgtgagcctctctcgctcgcttcttcagcgtgcggaaggcgccatgctgtggtgtatcggccccacatgaaatttctgatgagcattagcgattactattagcttaggtagggaaacgaaagatagctccgacgacagcgatctattcagtgattcagtgagtgaggcattgcgatctgtcaaacatgctgacctgcggtcgaagaatcgatatatatatatcttatcttgcttcatgctgtctgaagataaacattatatatcttgtttcctttggagaaatattagcaattttagcaatatgatttgtgtgcttcgtccatcgaatttattaattataggcagtcgaactaagctgtcgaggtatactatgtagtgacgaaaggcttgaccagaag

SEQ ID NO: 45119 - DNA, 2098 bp, Zea Mays
atcatccaaggtcgaagatatagtcaggtttgtaaacatttgaggaatatatggacaaccaccttccgtgcgatggatgacataaaggaaactgtgcgaactgccggtgacagtttgtgccgagccgtaagctcattgacaattaggctctgtgatatatcactaacttctacttctgaggcaaacgaaacgatgaacattgtgctgccatacttgctttctgagggcatactcagtaaagtatcaagtgttcaaaaagctgctattagtttggtcatgaagcttgctaagggtgctggtcctgcccttcgtcctcatctgccagaacttgttagttgtatgcttgaatgtttgtcaagtctggaagatcaaaggttgaattatgttgagatgcatgcagggaatgctggcatcaaaacagataagcttgaaactttgcgcatagctgttgctaaagattctccaatgtgggaaactcttgatatctgtataaaagttgttgacaagaattcacttgatctattggttcctcgcctggctcaaatgattagatcagctgttggcttaaatacaagggttggtgttgctagtttcataactctattggtgcagaaggtcatggttgacatcaaaccattcgcagcagtcttaatgaagttattgcatagtgcagttctggaggaaaggagttctgccgctaaaaaggccttcgcgtcctcttgtgctactgttttgaaatacgctagtcctccccaggctcagaagcttatcgaagatactacgtctctgcattcaggtgggaaaaacgatcagttgtctggtgcaattcttattaaagcctacttgagcaatgcatcggatattcttggtggatataatgcggtggttatccctgtaatttttgtgtcgagaaactctgtttcagatttgatgatgataaagacaccagtgctttatatgaagaactttgggaggatattcctagtagtgaaagagtaaccctaacactatatttaccagaaattgtatctcttttatgtgatggcatgtcattgtcatcatgggctggtaaaagaaagtcagccaaggctataaagaagctatgtgatgttctaggagaacccctttcagcacactaccagaatattctcaaatcacttctgaaagaattgccaggtcgattttgggagggaaaagatgctattctggatgcattggcttcattgtgtgcttgctgtcatgttgctataactgcagaagactcctgcttgccaagtgttatactaaattgtgtttgtgctgcatgcagtaggaaatcaaaattgtaccgtgaagcagctttcttgtgtttacacaaagtgattacggcattcagagatccaggatttttcaatagtgtgtttccaatgctgttcgaggtttctaaccaatctgccatctcgaagacaaagggctctgctgaactagatgaaagtgaaggtgcttctgtttctctggataaagtgctcaattgtgcaacatcttgcatcagtgttgcttttccacaggatattatcaaccaaaagaagaatgttgtagaattaatattgaattctctcttgcctgaggagagttggcaagttaaactatcatccttcttgtgtatcaaggagttgtgcctcaaatttgacaattctggtgatagtaacacatggcctcaagacacagcttacttggttgaggagctatttcatttggtatcaccgaaattagtagactccataagattagtaaagattgctcaggttcacgttgctgcatcggagtgccttcttgatttgagcaaactgtacagagacttcccgctgtcgaacagaacagaggccaagttcgaggatgaactcacagagctctgcgagtctgaaaaaagcgaacaagcaaaggcgattctgaaggaatgcctggccattcttaaagctctccctggagtaaccatgacgacggattagaaaccagaagagggaacacgcaaagttctcatggtgattgtaaactcgttccgatacatagtaaagttctcttggtgattcgaaactcattcggatgtatgcatgtggta

SEQ ID NO: 45120 - DNA, 2046 bp, Zea Mays
atcctgtcttgctcttgcagacatcatccaaggtcgaagatatagtcaggtttgtaaacatttgaggaatatatggacaaccaccttccgtgcgatggatgacataaaggaaactgtgcgaactgccggtgacagtttgtgccgagccgtaagctcattgacaattaggctctgtgatatatcactaacttctacttctgaggcaaacgaaacgatgaacattgtgctgccatacttgctttctgagggcatactcagtaaagtatcaagtgttcaaaaagctgctattagtttggtcatgaagcttgctaagggtgctggtcctgcccttcgtcctcatctgccagaacttgttagttgtatgcttgaatgtttgtcaagtctggaagatcaaaggttgaattatgttgagatgcatgcagggaatgctggcatcaaaacagataagcttgaaactttgcgcatagctgttgctaaagattctccaatgtgggaaactcttgatatctgtataaaagttgttgacaagaattcacttgatctattggttcctcgcctggctcaaatgattagatcagctgttggcttaaatacaagggttggtgttgctagtttcataactctattggtgcagaaggtcatggttgacatcaaaccattcgcagcagtcttaatgaagttattgcatagtgcagttctggaggaaaggagttctgccgctaaaaaggccttcgcgtcctcttgtgctactgttttgaaatacgctagtcctccccaggctcagaagcttatcgaagatactacgtctctgcattcaggtgggaaaaacgatcagttgtctggtgcaattcttattaaagcctacttgagcaatgcatcggatattcttggtggatataatgcggtggttatccctgtaatttttgtgtcgagatttgatgatgataaagacaccagtgctttatatgaagaactttgggaggatattcctagtagtgaaagagtaaccctaacactatatttaccagaaattgtatctcttttatgtgatggcatgtcattgtcatcatgggctggtaaaagaaagtcagccaaggctataaagaagctatgtgatgttctaggagaacccctttcagcacactaccagaatattctcaaatcacttctgaaagaattgccaggtcgattttgggagggaaaagatgctattctggatgcattggcttcattgtgtgcttgctgtcatgttgctataactgcagaagactcctgcttgccaagtgttatactaaattgtgtttgtgctgcatgcagtaggaaatcaaaattgtaccgtgaagcagctttcttgtgtttacacaaagtgattacggcattcagagatccaggatttttcaatagtgtgtttccaatgctgttcgaggtttctaaccaatctgccatctcgaagacaaagggctctgctgaactagatgaaagtgaaggtgcttctgtttctctggataaagtgctcaattgtgcaacatcttgcatcagtgttgcttttccacaggatattatcaaccaaaagaagaatgttgtagaattaatattgaattctctcttgcctgaggagagttggcaagttaaactatcatccttcttgtgtatcaaggagttgtgcctcaaatttgacaattctggtgatagtaacacatggcctcaagacacagcttacttggttgaggaggttcacgttgctgcatcggagtgccttcttgatttgagcaaactgtacagagacttcccgctgtcgaacagaacagaggccaagttcgaggatgaactcacagagctctgcgagtctgaaaaaagcgaacaagcaaaggcgattctgaaggaatgcctggccattcttaaagctctccctggagtaaccatgacgacggattagaaaccagaagagggaacacgcaaagttctcatggtgattgtaaactcgttccgatacatagtaaagttctcttggtgattcgaaactcattcggatgtatgcatgtggta

SEQ ID NO: 45121 - DNA, 2163 bp, Zea Mays
catcctgtcttgctcttgcagacatcatccaaggtcgaagatatagtcaggtttgtaaacatttgaggaatatatggacaaccaccttccgtgcgatggatgacataaaggaaactgtgcgaactgccggtgacagtttgtgccgagccgtaagctcattgacaattaggctctgtgatatatcactaacttctacttctgaggcaaacgaaacgatgaacattgtgctgccatacttgctttctgagggcatactcagtaaagtatcaagtgttcaaaaagctgctattagtttggtcatgaagcttgctaagggtgctggtcctgcccttcgtcctcatctgccagaacttgttagttgtatgcttgaatgtttgtcaagtctggaagatcaaaggttgaattatgttgagatgcatgcagggaatgctggcatcaaaacagataagcttgaaactttgcgcatagctgttgctaaagattctccaatgtgggaaactcttgatatctgtataaaagttgttgacaagaattcacttgatctattggttcctcgcctggctcaaatgattagatcagctgttggcttaaatacaagggttggtgttgctagtttcataactctattggtgcagaaggtcatggttgacatcaaaccattcgcagcagtcttaatgaagttattgcatagtgcagttctggaggaaaggagttctgccgctaaaaaggccttcgcgtcctcttgtgctactgttttgaaatacgctagtcctccccaggctcagaagcttatcgaagatactacgtctctgcattcaggtgggaaaaacgatcagttgtctggtgcaattcttattaaagcctacttgagcaatgcatcggatattcttggtggatataatgcggtggttatccctgtaatttttgtgtcgagatttgatgatgataaagacaccagtgctttatatgaagaactttgggaggatattcctagtagtgaaagagtaaccctaacactatatttaccagaaattgtatctcttttatgtgatggcatgtcattgtcatcatgggctggtaaaagaaagtcagccaaggctataaagaagctatgtgatgttctaggagaacccctttcagcacactaccagaatattctcaaatcacttctgaaagaattgccaggtcgattttgggagggaaaagatgctattctggatgcattggcttcattgtgtgcttgctgtcatgttgctataactgcagaagactcctgcttgccaagtgttatactaaattgtgtttgtgctgcatgcagtaggaaatcaaaattgtaccgtgaagcagctttcttgtgtttacacaaaaaatgtaccttttagcatcatgctaaagatttattagttttttcttgagggtgttcaacttattttgccattttctgagtgcaaggtgattacggcattcagagatccaggatttttcaatagtgtgtttccaatgctgttcgaggtttctaaccaatctgccatctcgaagacaaagggctctgctgaactagatgaaagtgaaggtgcttctgtttctctggataaagtgctcaattgtgcaacatcttgcatcagtgttgcttttccacaggatattatcaaccaaaagaagaatgttgtagaattaatattgaattctctcttgcctgaggagagttggcaaggagttgtgcctcaaatttgacaattctggtgatagtaacacatggcctcaagacacagcttacttggttgaggagctatttcatttggtatcaccgaaattagtagactccataagattagtaaagattgctcaggttcacgttgctgcatcggagtgccttcttgatttgagcaaactgtacagagacttcccgctgtcgaacagaacagaggccaagttcgaggatgaactcacagagctctgcgagtctgaaaaaagcgaacaagcaaaggcgattctgaaggaatgcctggccattcttaaagctctccctggagtaaccatgacgacggattagaaaccagaagagggaacacgcaaagttctcatggtgattgtaaactcgttccgatacatagtaaagttctcttggtgattcgaaactcattcggatgtatgcatgtggta

SEQ ID NO: 45122 - DNA, 2099 bp, Zea Mays
tgcatcctgtcttgctcttgcagacatcatccaaggtcgaagatatagtcaggtttgtaaacatttgaggaatatatggacaaccaccttccgtgcgatggatgacataaaggaaactgtgcgaactgccggtgacagtttgtgccgagccgtaagctcattgacaattaggctctgtgatatatcactaacttctacttctgaggcaaacgaaacgatgaacattgtgctgccatacttgctttctgagggcatactcagtaaagtatcaagtgttcaaaaagctgctattagtttggtcatgaagcttgctaagggtgctggtcctgcccttcgtcctcatctgccagaacttgttagttgtatgcttgaatgtttgtcaagtctggaagatcaaaggttgaattatgttgagggaatgctggcatcaaaacagataagcttgaaactttgcgcatagctgttgctaaagattctccaatgtgggaaactcttgatatctgtataaaagttgttgacaagaattcacttgatctattggttcctcgcctggctcaaatgattagatcagctgttggcttaaatacaagggttggtgttgctagtttcataactctattggtgcagaaggtcatggttgacatcaaaccattcgcagcagtcttaatgaagttattgcatagtgcagttctggaggaaaggagttctgccgctaaaaaggccttcgcgtcctcttgtgctactgttttgaaatacgctagtcctccccaggctcagaagcttatcgaagatactacgtctctgcattcaggtgggaaaaacgatcagttgtctggtgcaattcttattaaagcctacttgagcaatgcatcggatattcttggtggatataatgcggtggttatccctgtaatttttgtgtcgagatttgatgatgataaagacaccagtgctttatatgaagaactttgggaggatattcctagtagtgaaagagtaaccctaacactatatttaccagaaattgtatctcttttatgtgatggcatgtcattgtcatcatgggctggtaaaagaaagtcagccaaggctataaagaagctatgtgatgttctaggagaacccctttcagcacactaccagaatattctcaaatcacttctgaaagaattgccaggtcgattttgggagggaaaagatgctattctggatgcattggcttcattgtgtgcttgctgtcatgttgctataactgcagaagactcctgcttgccaagtgttatactaaattgtgtttgtgctgcatgcagtaggaaatcaaaattgtaccgtgaagcagctttcttgtgtttacacaaagtgattacggcattcagagatccaggatttttcaatagtgtgtttccaatgctgttcgaggtttctaaccaatctgccatctcgaagacaaagggctctgctgaactagatgaaagtgaaggtgcttctgtttctctggataaagtgctcaattgtgcaacatcttgcatcagtgttgcttttccacaggatattatcaaccaaaagaagaatgttgtagaattaatattgaattctctcttgcctgaggagagttggcaagttaaactatcatccttcttgtgtatcaaggagttgtgcctcaaatttgacaattctggtgatagtaacacatggcctcaagacacagcttacttggttgaggagctatttcatttggtatcaccgaaattagtagactccataagattagtaaagattgctcaggttcacgttgctgcatcggagtgccttcttgatttgagcaaactgtacagagacttcccgctgtcgaacagaacagaggccaagttcgaggatgaactcacagagctctgcgagtctgaaaaaagcgaacaagcaaaggcgattctgaaggaatgcctggccattcttaaagctctccctggagtaaccatgacgacggattagaaaccagaagagggaacacgcaaagttctcatggtgattgtaaactcgttccgatacatagtaaagttctcttggtgattcgaaactcattcggatgtatgcatgtggta

SEQ ID NO: 45123 - DNA, 2194 bp, Zea Mays
tgcatcctgtcttgctcttgcagacatcatccaaggtcgaagatatagtcaggtttgtaaacatttgaggaatatatggacaaccaccttccgtgcgatggatgacataaaggaaactgtgcgaactgccggtgacagtttgtgccgagccgtaagctcattgacaattaggctctgtgatatatcactaacttctacttctgaggcaaacgaaacgatgaacattgtgctgccatacttgctttctgagggcatactcagtaaagtatcaagtgttcaaaaagctgctattagtttggtcatgaagcttgctaagggtgctggtcctgcccttcgtcctcatctgccagaacttgttagttgtatgcttgaatgtttgtcaagtctggaagatcaaaggttgaattatgttgagatgcatgcagggaatgctggcatcaaaacagataagcttgaaactttgcgcatagctgttgctaaagattctccaatgtgggaaactcttgatatctgtataaaagttgttgacaagaattcacttgatctattggttcctcgcctggctcaaatgattagatcagctgttggcttaaatacaagggttggtgttgctagtttcataactctattggtgcagaaggtcatggttgacatcaaaccattcgcagcagtcttaatgaagttattgcatagtgcagttctggaggaaaggagttctgccgctaaaaaggccttcgcgtcctcttgtgctactgttttgaaatacgctagtcctccccaggctcagaagcttatcgaagatactacgtctctgcattcaggtgggaaaaacgatcagttgtctggtgcaattcttattaaagcctacttgagcaatgcatcggatattcttggtggatataatgcggtggttatccctgtaatttttgtgtcgagatttgatgatgataaagacaccagtgctttatatgaagaactttgggaggatattcctagtagtgaaagagtaaccctaacactatatttaccagaaattgtatctcttttatgtgatggcatgtcattgtcatcatgggctggtaaaagaaagtcagccaaggctataaagaagctatgtgatgttctaggagaacccctttcagcacactaccagaatattctcaaatcacttctgaaagaattgccaggtcgattttgggagggaaaagatgctattctggatgcattggcttcattgtgtgcttgctgtcatgttgctataactgcagaagactcctgcttgccaagtgttatactaaattgtgtttgtgctgcatgcagtaggaaatcaaaattgtaccgtgaagcagctttcttgtgtttacacaaaaaatgtaccttttagcatcatgctaaagatttattagttttttcttgagggtgttcaacttattttgccattttctgagtgcaaggtgattacggcattcagagatccaggatttttcaatagtgtgtttccaatgctgttcgaggtttctaaccaatctgccatctcgaagacaaagggctctgctgaactagatgaaagtgaaggtgcttctgtttctctggataaagtgctcaattgtgcaacatcttgcatcagtgttgcttttccacaggatattatcaaccaaaagaagaatgttgtagaattaatattgaattctctcttgcctgaggagagttggcaagttaaactatcatccttcttgtgtatcaaggagttgtgcctcaaatttgacaattctggtgatagtaacacatggcctcaagacacagcttacttggttgaggagctatttcatttggtatcaccgaaattagtagactccataagattagtaaagattgctcaggttcacgttgctgcatcggagtgccttcttgatttgagcaaactgtacagagacttcccgctgtcgaacagaacagaggccaagttcgaggatgaactcacagagctctgcgagtctgaaaaaagcgaacaagcaaaggcgattctgaaggaatgcctggccattcttaaagctctccctggagtaaccatgacgacggattagaaaccagaagagggaacacgcaaagttctcatggtgattgtaaactcgttccgatacatagtaaagttctcttggtgattcgaaactcattcggatgtatgcatgtggta

SEQ ID NO: 45124 - DNA, 1942 bp, Zea Mays
ttgcatcctgtcttgctcttgcagacatcatccaaggtcgaagatatagtcaggtttgtaaacatttgaggaatatatggacaaccaccttccgtgcgatggatgacataaaggaaactgtgcgaactgccggtgacagtttgtgccgagccgtaagctcattgacaattaggctctgtgatatatcactaacttctacttctgaggcaaacgaaacgatgaacattgtgctgccatacttgctttctgagggcatactcagtaaagtatcaagtgttcaaaaagctgctattagtttggtcatgaagcttgctaagggtgctggtcctgcccttcgtcctcatctgccagaacttgttagttgtatgcttgaatgtttgtcaagtctggaagatcaaaggttgaattatgttgagatgcatgcagggaatgctggcatcaaaacagataagcttgaaactttgcgcatagctgttgctaaagattctccaatgtgggaaactcttgatatctgtataaaagttgttgacaagaattcacttgatctattggttcctcgcctggctcaaatgattagatcagctgttggcttaaatacaagggttggtgttgctagtttcataactctattggtgcagaaggtcatggttgacatcaaaccattcgcagcagtcttaatgaagttattgcatagtgcagttctggaggaaaggagttctgccgctaaaaaggccttcgcgtcctcttgtgctactgttttgaaatacgctagtcctccccaggctcagaagcttatcgaagatactacgtctctgcattcaggtgggaaaaacgatcagttgtctggtgcaattcttattaaagcctacttgagcaatgcatcggatattcttggtggatataatgcggtggttatccctgtaatttttgtgtcgagatttgatgatgataaagacaccagtgctttatatgaagaactttgggaggatattcctagtagtgaaagagtaaccctaacactatatttaccagaaattgtatctcttttatgtgatggcatgtcattgtcatcatgggctggtaaaagaaagtcagccaaggctataaagaagctatgtgatgttctaggagaacccctttcagcacactaccagaatattctcaaatcacttctgaaagaattgccaggtcgattttgggaggtgattacggcattcagagatccaggatttttcaatagtgtgtttccaatgctgttcgaggtttctaaccaatctgccatctcgaagacaaagggctctgctgaactagatgaaagtgaaggtgcttctgtttctctggataaagtgctcaattgtgcaacatcttgcatcagtgttgcttttccacaggatattatcaaccaaaagaagaatgttgtagaattaatattgaattctctcttgcctgaggagagttggcaagttaaactatcatccttcttgtgtatcaaggagttgtgcctcaaatttgacaattctggtgatagtaacacatggcctcaagacacagcttacttggttgaggagctatttcatttggtatcaccgaaattagtagactccataagattagtaaagattgctcaggttcacgttgctgcatcggagtgccttcttgatttgagcaaactgtacagagacttcccgctgtcgaacagaacagaggccaagttcgaggatgaactcacagagctctgcgagtctgaaaaaagcgaacaagcaaaggcgattctgaaggaatgcctggccattcttaaagctctccctggagtaaccatgacgacggattagaaaccagaagagggaacacgcaaagttctcatggtgattgtaaactcgttccgatacatagtaaagttctcttggtgattcgaaactcattcggatgtatgcatgtggta

SEQ ID NO: 45125 - DNA, 2110 bp, Zea Mays
ttgcatcctgtcttgctcttgcagacatcatccaaggtcgaagatatagtcaggtttgtaaacatttgaggaatatatggacaaccaccttccgtgcgatggatgacataaaggaaactgtgcgaactgccggtgacagtttgtgccgagccgtaagctcattgacaattaggctctgtgatatatcactaacttctacttctgaggcaaacgaaacgatgaacattgtgctgccatacttgctttctgagggcatactcagtaaagtatcaagtgttcaaaaagctgctattagtttggtcatgaagcttgctaagggtgctggtcctgcccttcgtcctcatctgccagaacttgttagttgtatgcttgaatgtttgtcaagtctggaagatcaaaggttgaattatgttgagatgcatgcagggaatgctggcatcaaaacagataagcttgaaactttgcgcatagctgttgctaaagattctccaatgtgggaaactcttgatatctgtataaaagttgttgacaagaattcacttgatctattggttcctcgcctggctcaaatgattagatcagctgttggcttaaatacaagggttggtgttgctagtttcataactctattggtgcagaaggtcatggttgacatcaaaccattcgcagcagtcttaatgaagttattgcatagtgcagttctggaggaaaggagttctgccgctaaaaaggccttcgcgtcctcttgtgctactgttttgaaatacgctagtcctccccaggctcagaagcttatcgaagatactacgtctctgcattcaggtgggaaaaacgatcagttgtctggtgcaattcttattaaagcctacttgagcaatgcatcggatattcttggtggatataatgcggtggttatccctgtaatttttgtgtcgagatttgatgatgataaagacaccagtgctttatatgaagaactttgggaggatattcctagtagtgaaagagtaaccctaacactatatttaccagaaattgtatctcttttatgtgatggcatgtcattgtcatcatgggctggtaaaagaaagtcagccaaggctataaagaagctatgtgatgttctaggagaacccctttcagcacactaccagaatattctcaaatcacttctgaaagaattgccaggtcgattttgggagggaaaagatgctattctggatgcattggcttcattgtgtgcttgctgtcatgttgctataactgcagaagactcctgcttgccaagtgttatactaaattgtgtttgtgctgcatgcagtaggaaatcaaaattgtaccgtgaagcagctttcttgtgtttacacaaagtgattacggcattcagagatccaggatttttcaatagtgtgtttccaatgctgttcgaggtttctaaccaatctgccatctcgaagacaaagggctctgctgaactagatgaaagtgaaggtgcttctgtttctctggataaagtgctcaattgtgcaacatcttgcatcagtgttgcttttccacaggatattatcaaccaaaagaagaatgttgtagaattaatattgaattctctcttgcctgaggagagttggcaagttaaactatcatccttcttgtgtatcaaggagttgtgcctcaaatttgacaattctggtgatagtaacacatggcctcaagacacagcttacttggttgaggagctatttcatttggtatcaccgaaattagtagactccataagattagtaaagattgctcaggttcacgttgctgcatcggagtgccttcttgatttgagcaaactgtacagagacttcccgctgtcgaacagaacagaggccaagttcgaggatgaactcacagagctctgcgagtctgaaaaaagcgaacaagcaaaggcgattctgaaggaatgcctggccattcttaaagctctccctggagtaaccatgacgacggattagaaaccagaagagggaacacgcaaagttctcatggtgattgtaaactcgttccgatacatagtaaagttctcttggtgattcgaaactcattcggatgtatgcatgtggta

SEQ ID NO: 45126 - DNA, 5480 bp, Zea Mays
tcctcggcgtccaccgccgccgccgcggagcagacagacgcagagaggatggatgccctggatcggatgctcacgcggctggccctcgccgacgacgcgcacctcgcgccggtgctcgcccgcgtcctcccctacgccgtcacctcactggcgtcccccgcgccggccgtccgaaagctcgttatggaaattcttagtcacattaacaaaagggtgaaacacaggccagagatatcactgccaatgctggagttatggaagatctatactgaacccacttcctcaacaatggtccgaaacttttgtatcctatatattgagatggcgtttgaacgcctgccgactgaggagaaaggaaacatcgcgcctgatcttttaattaatatatcaaatattccacctcagcatcaagggatcatcttgcgacttgtaacaaaggctattggtgaatgtaacacacataaggtggatgagacgattgcatcaaaatatcgagtaataaccgaatccagtgatggtcttttatttgctgacttctgttttcacacattattgtatcaagcaccacctcaaggcagtggatgcccagcaggactgtcagttgtccaatcagaacgtgtcaccgggaaacaacccctaaaaattgacgtacttgcatcaagaaagctaggaatcttaaatgtcatcgaagctatgaacttcacacctgagattgtctaccctctttatttatctgcttcttcagatagccaagatgcagtttctaagaaaggagacgagttcttaaagcgcaaagcttcaacagtgaatttagaagatcccgaccttatcaagagactgttcacactgttcaacggcactgtgggtgcagaaaatatagctgcagagctgaaagtttctccagcacatgcttcattgcgtatgcggcttatgagtgttttctgccgatcagttgctgcagcaaatgcatttccacacacacttcaatgtatcttcggctgcatctacggaagtggaactacttcaaggctaaagcagttaggaatggagttcactgtctgggttttcaaacatgcagtaactgaccagctaaagttaatcggtccagttattcttagtggaatattgcgctcccttgatggttcttcaactgcagaaacagattctactggtagagataccaaaatatttgcatatcaggctatcggtttgcttgcatctcgcatgccaaatttattcagtgataaaactgacatggctatacgactttttactgctttgagattggaggatcaatctcttcgtttgacaattcaagaggcagctacttcccttgctacatcatataagcgtgcttccacgatagtactgaaggatcttgagtcacttcttctggaaaattgtgaagcggagcaaagtgaggttcgcttttctgctataagatgggcaacaacattgtacgatacacgacattgttcaagccggtacatttgcatgattggggcttcagatgttaaactggacataagggaaatggctctagctggtctaaatcttatgaatgatgggaggcaatcatctgcagggtctgttgatttcagctatcctgatataaaggagatgataaattatatctgttgtcagcgacctcagttgctgcattctgatgagcagacaaatggaaaattgcttttcccttcaaaaacatttgtttcaatgatcaagtttctgatgaagtgttttgagtctagtgataacttgaaacttttgcaagaagatccatctcattctgctgtagcaaaaatgtgtgtcatcttggaacatgccatgtcatatgaagggtctagtgaactgcatgcgctggccttgaagtcattggtggacctttcttctcgtgaaccaaagttggtgtcattgaggtatgcagaacgcataaattggctaagatctcttttgggtcatgttgattctgatgcccgtgaagctgtgtcacgcctgcttggtattgcttcttcagctctttcaacctcttctgcactaaatcttctgtctgagctcacttcaactctcagtcaaaaccgtccatcaagatttgaaaattaccatggtgttctttgtgcgatcgggtacctaacagctggtgctttgaagcaatcttgtataactgaggatatggtaaaaaatgtagttgatattcttgtaaaagtagttacttctgaaggttcggcattagcatctgttgcaatggaatctcttggtcacattggtctgcgttgtgcattgccttccatcaaccaaaactcttctacaggtacactattaagcgttctccgtgagaggctgactaagcttctttctgaaaatgatactaaagctcaacagaaaattcttgtatcattgggccacatatcttggaatgagatgtcctttcctcacctgaatgatgcgttagacttgatttttagtctttcacgttctaaggtagaagatgtactttttgctgcgggggaggctctatctttcatatggggagaagttcctgtgacagcagatgtgatattggagacgaactttgtttccctttcccaggccacaaactaccttactggtgatgcatctctagtctcgagtaactcctatgaaaaaagtggctgtgaagaagcacactcaattgcacgagaagaaattattaaaaagttgttcgaaacactaatttatagcagtagaaaagaagaacgctgtgcaggtactgtctggttggtgtcactgacgatgtactgtggccgacataaaaaaatcctagaactacttccacaaatccaggaagccctttcacatcttcttggtgatccaaatgagcttacacaagatttggcatctcaaggaatgagtattgtgtatgagcttggtgatgcatctatgaaagaagagctggttcatgctctagtgaacacactgactggtgctgcaagaaagaaaaaagccattaagttgatggaggattctgaggtctttcaagaaggcacaattggcaataatcctactggagggaaacttagcacgtacaaggagctgtgcagtcttgccaatgagatggggcaacctgacctgatatacaagttcatggatctagctaattatcaggctgctctcaattccaaaaggggtgctgcttttggattttccaagatagccaaacaagctggcgaggcacttcaaccttatctgaataccttaattcctaggcttgtccggtaccaacatgaccctgataaaaacatccaggcgtgttacggacgttttatgttattgggcctcccaaaggtttgtaaacatttgaggaatatatggacaaccaccttccgtgcgatggatgacataaaggaaactgtgcgaactgccggtgacagtttgtgccgagccgtaagctcattgacaattaggctctgtgatatatcactaacttctacttctgaggcaaacgaaacgatgaacattgtgctgccatacttgctttctgagggcatactcagtaaagtatcaagtgttcaaaaagctgctattagtttggtcatgaagcttgctaagggtgctggtcctgcccttcgtcctcatctgccagaacttgttagttgtatgcttgaatgtttgtcaagtctggaagatcaaaggttgaattatgttgagatgcatgcagggaatgctggcatcaaaacagataagcttgaaactttgcgcatagctgttgctaaagattctccaatgtgggaaactcttgatatctgtataaaagttgttgacaagaattcacttgatctattggttcctcgcctggctcaaatgattagatcagctgttggcttaaatacaagggttggtgttgctagtttcataactctattggtgcagaaggtcatggttgacatcaaaccattcgcagcagtcttaatgaagttattgcatagtgcagttctggaggaaaggagttctgccgctaaaaaggccttcgcgtcctcttgtgctactgttttgaaatacgctagtcctccccaggctcagaagcttatcgaagatactacgtctctgcattcaggtgggaaaaacgatcagttgtctggtgcaattcttattaaagcctacttgagcaatgcatcggatattcttggtggatataatgcggtggttatccctgtaatttttgtgtcgagaaactctgtttcagatttgatgatgataaagacaccagtgctttatatgaagaactttgggaggatattcctagtagtgaaagagtaaccctaacactatatttaccagaaattgtatctcttttatgtgatggcatgtcattgtcatcatgggctggtaaaagaaagtcagccaaggctataaagaagctatgtgatgttctaggagaacccctttcagcacactaccagaatattctcaaatcacttctgaaagaattgccaggtcgattttgggagggaaaagatgctattctggatgcattggcttcattgtgtgcttgctgtcatgttgctataactgcagaagactcctgcttgccaagtgttatactaaattgtgtttgtgctgcatgcagtaggaaatcaaaattgtaccgtgaagcagctttcttgtgtttacacaaaaaatgtaccttttagcatcatgctaaagatttattagttttttcttgagggtgttcaacttattttgccattttctgagtgcaaggtgattacggcattcagagatccaggatttttcaatagtgtgtttccaatgctgttcgaggtttctaaccaatctgccatctcgaagacaaagggctctgctgaactagatgaaagtgaaggtgcttctgtttctctggataaagtgctcaattgtgcaacatcttgcatcagtgttgcttttccacaggatattatcaaccaaaagaagaatgttgtagaattaatattgaattctctcttgcctgaggagagttggcaagttaaactatcatccttcttgtgtatcaaggagttgtgcctcaaatttgacaattctggtgatagtaacacatggcctcaagacacagcttacttggttgaggagctatttcatttggtatcaccgaaattagtagactccataagattagtaaagattgctcaggttcacgttgctgcatcggagtgccttcttgatttgagcaaactgtacagagacttcccgctgtcgaacagaacagaggccaagttcgaggatgaactcacagagctctgcgagtctgaaaaaagcgaacaagcaaaggcgattctgaaggaatgcctggccattcttaaagctctccctggagtaaccatgacgacggattagaaaccagaagagggaacacgcaaagttctcatggtgattgtaaactcgttccgatacatagtaaagttctcttggtgattcgaaactcattcggatgtatgcatgtggta

SEQ ID NO: 45127 - DNA, 5553 bp, Zea Mays
tcctcggcgtccaccgccgccgccgcggagcagacagacgcagagaggatggatgccctggatcggatgctcacgcggctggccctcgccgacgacgcgcacctcgcgccggtgctcgcccgcgtcctcccctacgccgtcacctcactggcgtcccccgcgccggccgtccgaaagctcgttatggaaattcttagtcacattaacaaaagggtgaaacacaggccagagatatcactgccaatgctggagttatggaagatctatactgaacccacttcctcaacaatggtccgaaacttttgtatcctatatattgagatggcgtttgaacgcctgccgactgaggagaaaggaaacatcgcgcctgatcttttaattaatatatcaaatattccacctcagcatcaagggatcatcttgcgacttgtaacaaaggctattggtgaatgtaacacacataaggtggatgagacgattgcatcaaaatatcgagtaataaccgaatccagtgatggtcttttatttgctgacttctgttttcacacattattgtatcaagcaccacctcaaggcagtggatgcccagcaggactgtcagttgtccaatcagaacgtgtcaccgggaaacaacccctaaaaattgacgtacttgcatcaagaaagctaggaatcttaaatgtcatcgaagctatgaacttcacacctgagattgtctaccctctttatttatctgcttcttcagatagccaagatgcagtttctaagaaaggagacgagttcttaaagcgcaaagcttcaacagtgaatttagaagatcccgaccttatcaagagactgttcacactgttcaacggcactgtgggtgcagaaaatatagctgcagagctgaaagtttctccagcacatgcttcattgcgtatgcggcttatgagtgttttctgccgatcagttgctgcagcaaatgcatttccacacacacttcaatgtatcttcggctgcatctacggaagtggaactacttcaaggctaaagcagttaggaatggagttcactgtctgggttttcaaacatgcagtaactgaccagctaaagttaatcggtccagttattcttagtggaatattgcgctcccttgatggttcttcaactgcagaaacagattctactggtagagataccaaaatatttgcatatcaggctatcggtttgcttgcatctcgcatgccaaatttattcagtgataaaactgacatggctatacgactttttactgctttgagattggaggatcaatctcttcgtttgacaattcaagaggcagctacttcccttgctacatcatataagcgtgcttccacgatagtactgaaggatcttgagtcacttcttctggaaaattgtgaagcggagcaaagtgaggttcgcttttctgctataagatgggcaacaacattgtacgatacacgacattgttcaagccggtacatttgcatgattggggcttcagatgttaaactggacataagggaaatggctctagctggtctaaatcttatgaatgatgggaggcaatcatctgcagggtctgttgatttcagctatcctgatataaaggagatgataaattatatctgttgtcagcgacctcagttgctgcattctgatgagcagacaaatggaaaattgcttttcccttcaaaaacatttgtttcaatgatcaagtttctgatgaagtgttttgagtctagtgataacttgaaacttttgcaagaagatccatctcattctgctgtagcaaaaatgtgtgtcatcttggaacatgccatgtcatatgaagggtctagtgaactgcatgcgctggccttgaagtcattggtggacctttcttctcgtgaaccaaagttggtgtcattgaggtatgcagaacgcataaattggctaagatctcttttgggtcatgttgattctgatgcccgtgaagctgtgtcacgcctgcttggtattgcttcttcagctctttcaacctcttctgcactaaatcttctgtctgagctcacttcaactctcagtcaaaaccgtccatcaagatttgaaaattaccatggtgttctttgtgcgatcgggtacctaacagctggtgctttgaagcaatcttgtataactgaggatatggtaaaaaatgtagttgatattcttgtaaaagtagttacttctgaaggttcggcattagcatctgttgcaatggaatctcttggtcacattggtctgcgttgtgcattgccttccatcaaccaaaactcttctacaggttaaacatgttaaccaaacctatactgcttatgggttgtgctattcaccatctatgatgctattttttgattatttttgccttcaggtacactattaagcgttctccgtgagaggctgactaagcttctttctgaaaatgatactaaagctcaacagaaaattcttgtatcattgggccacatatcttggaatgagatgtcctttcctcacctgaatgatgcgttagacttgatttttagtctttcacgttctaaggtagaagatgtactttttgctgcgggggaggctctatctttcatatggggagaagttcctgtgacagcagatgtgatattggagacgaactttgtttccctttcccaggccacaaactaccttactggtgatgcatctctagtctcgagtaactcctatgaaaaaagtggctgtgaagaagcacactcaattgcacgagaagaaattattaaaaagttgttcgaaacactaatttatagcagtagaaaagaagaacgctgtgcaggtactgtctggttggtgtcactgacgatgtactgtggccgacataaaaaaatcctagaactacttccacaaatccaggaagccctttcacatcttcttggtgatccaaatgagcttacacaagatttggcatctcaaggaatgagtattgtgtatgagcttggtgatgcatctatgaaagaagagctggttcatgctctagtgaacacactgactggtgctgcaagaaagaaaaaagccattaagttgatggaggattctgaggtctttcaagaaggcacaattggcaataatcctactggagggaaacttagcacgtacaaggagctgtgcagtcttgccaatgagatggggcaacctgacctgatatacaagttcatggatctagctaattatcaggctgctctcaattccaaaaggggtgctgcttttggattttccaagatagccaaacaagctggcgaggcacttcaaccttatctgaataccttaattcctaggcttgtccggtaccaacatgaccctgataaaaacatccaggcgtgttacggacgttttatgttattgggcctcccaaaggtttgtaaacatttgaggaatatatggacaaccaccttccgtgcgatggatgacataaaggaaactgtgcgaactgccggtgacagtttgtgccgagccgtaagctcattgacaattaggctctgtgatatatcactaacttctacttctgaggcaaacgaaacgatgaacattgtgctgccatacttgctttctgagggcatactcagtaaagtatcaagtgttcaaaaagctgctattagtttggtcatgaagcttgctaagggtgctggtcctgcccttcgtcctcatctgccagaacttgttagttgtatgcttgaatgtttgtcaagtctggaagatcaaaggttgaattatgttgagatgcatgcagggaatgctggcatcaaaacagataagcttgaaactttgcgcatagctgttgctaaagattctccaatgtgggaaactcttgatatctgtataaaagttgttgacaagaattcacttgatctattggttcctcgcctggctcaaatgattagatcagctgttggcttaaatacaagggttggtgttgctagtttcataactctattggtgcagaaggtcatggttgacatcaaaccattcgcagcagtcttaatgaagttattgcatagtgcagttctggaggaaaggagttctgccgctaaaaaggccttcgcgtcctcttgtgctactgttttgaaatacgctagtcctccccaggctcagaagcttatcgaagatactacgtctctgcattcaggtgggaaaaacgatcagttgtctggtgcaattcttattaaagcctacttgagcaatgcatcggatattcttggtggatataatgcggtggttatccctgtaatttttgtgtcgagatttgatgatgataaagacaccagtgctttatatgaagaactttgggaggatattcctagtagtgaaagagtaaccctaacactatatttaccagaaattgtatctcttttatgtgatggcatgtcattgtcatcatgggctggtaaaagaaagtcagccaaggctataaagaagctatgtgatgttctaggagaacccctttcagcacactaccagaatattctcaaatcacttctgaaagaattgccaggtcgattttgggagggaaaagatgctattctggatgcattggcttcattgtgtgcttgctgtcatgttgctataactgcagaagactcctgcttgccaagtgttatactaaattgtgtttgtgctgcatgcagtaggaaatcaaaattgtaccgtgaagcagctttcttgtgtttacacaaaaaatgtaccttttagcatcatgctaaagatttattagttttttcttgagggtgttcaacttattttgccattttctgagtgcaaggtgattacggcattcagagatccaggatttttcaatagtgtgtttccaatgctgttcgaggtttctaaccaatctgccatctcgaagacaaagggctctgctgaactagatgaaagtgaaggtgcttctgtttctctggataaagtgctcaattgtgcaacatcttgcatcagtgttgcttttccacaggatattatcaaccaaaagaagaatgttgtagaattaatattgaattctctcttgcctgaggagagttggcaagttaaactatcatccttcttgtgtatcaaggagttgtgcctcaaatttgacaattctggtgatagtaacacatggcctcaagacacagcttacttggttgaggagctatttcatttggtatcaccgaaattagtagactccataagattagtaaagattgctcaggttcacgttgctgcatcggagtgccttcttgatttgagcaaactgtacagagacttcccgctgtcgaacagaacagaggccaagttcgaggatgaactcacagagctctgcgagtctgaaaaaagcgaacaagcaaaggcgattctgaaggaatgcctggccattcttaaagctctccctggagtaaccatgacgacggattagaaaccagaagagggaacacgcaaagttctcatggtgattgtaaactcgttccgatacatagtaaagttctcttggtgattcgaaactcattcggatgtatgcatgtggta

SEQ ID NO: 45128 - DNA, 5482 bp, Zea Mays
tcctcggcgtccaccgccgccgccgcggagcagacagacgcagagaggatggatgccctggatcggatgctcacgcggctggccctcgccgacgacgcgcacctcgcgccggtgctcgcccgcgtcctcccctacgccgtcacctcactggcgtcccccgcgccggccgtccgaaagctcgttatggaaattcttagtcacattaacaaaagggtgaaacacaggccagagatatcactgccaatgctggagttatggaagatctatactgaacccacttcctcaacaatggtccgaaacttttgtatcctatatattgagatggcgtttgaacgcctgccgactgaggagaaaggaaacatcgcgcctgatcttttaattaatatatcaaatattccacctcagcatcaagggatcatcttgcgacttgtaacaaaggctattggtgaatgtaacacacataaggtggatgagacgattgcatcaaaatatcgagtaataaccgaatccagtgatggtcttttatttgctgacttctgttttcacacattattgtatcaagcaccacctcaaggcagtggatgcccagcaggactgtcagttgtccaatcagaacgtgtcaccgggaaacaacccctaaaaattgacgtacttgcatcaagaaagctaggaatcttaaatgtcatcgaagctatgaacttcacacctgagattgtctaccctctttatttatctgcttcttcagatagccaagatgcagtttctaagaaaggagacgagttcttaaagcgcaaagcttcaacagtgaatttagaagatcccgaccttatcaagagactgttcacactgttcaacggcactgtgggtgcagaaaatatagctgcagagctgaaagtttctccagcacatgcttcattgcgtatgcggcttatgagtgttttctgccgatcagttgctgcagcaaatgcatttccacacacacttcaatgtatcttcggctgcatctacggaagtggaactacttcaaggctaaagcagttaggaatggagttcactgtctgggttttcaaacatgcagtaactgaccagctaaagttaatcggtccagttattcttagtggaatattgcgctcccttgatggttcttcaactgcagaaacagattctactggtagagataccaaaatatttgcatatcaggctatcggtttgcttgcatctcgcatgccaaatttattcagtgataaaactgacatggctatacgactttttactgctttgagattggaggatcaatctcttcgtttgacaattcaagaggcagctacttcccttgctacatcatataagcgtgcttccacgatagtactgaaggatcttgagtcacttcttctggaaaattgtgaagcggagcaaagtgaggttcgcttttctgctataagatgggcaacaacattgtacgatacacgacattgttcaagccggtacatttgcatgattggggcttcagatgttaaactggacataagggaaatggctctagctggtctaaatcttatgaatgatgggaggcaatcatctgcagggtctgttgatttcagctatcctgatataaaggagatgataaattatatctgttgtcagcgacctcagttgctgcattctgatgagcagacaaatggaaaattgcttttcccttcaaaaacatttgtttcaatgatcaagtttctgatgaagtgttttgagtctagtgataacttgaaacttttgcaagaagatccatctcattctgctgtagcaaaaatgtgtgtcatcttggaacatgccatgtcatatgaagggtctagtgaactgcatgcgctggccttgaagtcattggtggacctttcttctcgtgaaccaaagttggtgtcattgaggtatgcagaacgcataaattggctaagatctcttttgggtcatgttgattctgatgcccgtgaagctgtgtcacgcctgcttggtattgcttcttcagctctttcaacctcttctgcactaaatcttctgtctgagctcacttcaactctcagtcaaaaccgtccatcaagatttgaaaattaccatggtgttctttgtgcgatcgggtacctaacagctggtgctttgaagcaatcttgtataactgaggatatggtaaaaaatgtagttgatattcttgtaaaagtagttacttctgaaggttcggcattagcatctgttgcaatggaatctcttggtcacattggtctgcgttgtgcattgccttccatcaaccaaaactcttctacaggttaaacatgttaaccaaacctatactgcttatgggttgtgctattcaccatctatgatgctattttttgattatttttgccttcaggtacactattaagcgttctccgtgagaggctgactaagcttctttctgaaaatgatactaaagctcaacagaaaattcttgtatcattgggccacatatcttggaatgagatgtcctttcctcacctgaatgatgcgttagacttgatttttagtctttcacgttctaaggtagaagatgtactttttgctgcgggggaggctctatctttcatatggggagaagttcctgtgacagcagatgtgatattggagacgaactttgtttccctttcccaggccacaaactaccttactggtgatgcatctctagtctcgagtaactcctatgaaaaaagtggctgtgaagaagcacactcaattgcacgagaagaaattattaaaaagttgttcgaaacactaatttatagcagtagaaaagaagaacgctgtgcaggtactgtctggttggtgtcactgacgatgtactgtggccgacataaaaaaatcctagaactacttccacaaatccaggaagccctttcacatcttcttggtgatccaaatgagcttacacaagatttggcatctcaaggaatgagtattgtgtatgagcttggtgatgcatctatgaaagaagagctggttcatgctctagtgaacacactgactggtgctgcaagaaagaaaaaagccattaagttgatggaggattctgaggtctttcaagaaggcacaattggcaataatcctactggagggaaacttagcacgtacaaggagctgtgcagtcttgccaatgagatggggcaacctgacctgatatacaagttcatggatctagctaattatcaggctgctctcaattccaaaaggggtgctgcttttggattttccaagatagccaaacaagctggcgaggcacttcaaccttatctgaataccttaattcctaggcttgtccggtaccaacatgaccctgataaaaacatccaggcgtgttacggacgttttatgttattgggcctcccaaaggtttgtaaacatttgaggaatatatggacaaccaccttccgtgcgatggatgacataaaggaaactgtgcgaactgccggtgacagtttgtgccgagccgtaagctcattgacaattaggctctgtgatatatcactaacttctacttctgaggcaaacgaaacgatgaacattgtgctgccatacttgctttctgagggcatactcagtaaagtatcaagtgttcaaaaagctgctattagtttggtcatgaagcttgctaagggtgctggtcctgcccttcgtcctcatctgccagaacttgttagttgtatgcttgaatgtttgtcaagtctggaagatcaaaggttgaattatgttgagatgcatgcagggaatgctggcatcaaaacagataagcttgaaactttgcgcatagctgttgctaaagattctccaatgtgggaaactcttgatatctgtataaaagttgttgacaagaattcacttgatctattggttcctcgcctggctcaaatgattagatcagctgttggcttaaatacaagggttggtgttgctagtttcataactctattggtgcagaaggtcatggttgacatcaaaccattcgcagcagtcttaatgaagttattgcatagtgcagttctggaggaaaggagttctgccgctaaaaaggccttcgcgtcctcttgtgctactgttttgaaatacgctagtcctccccaggctcagaagcttatcgaagatactacgtctctgcattcaggtgggaaaaacgatcagttgtctggtgcaattcttattaaagcctacttgagcaatgcatcggatattcttggtggatataatgcggtggttatccctgtaatttttgtgtcgagaaactctgtttcagatttgatgatgataaagacaccagtgctttatatgaagaactttgggaggatattcctagtagtgaaagagtaaccctaacactatatttaccagaaattgtatctcttttatgtgatggcatgtcattgtcatcatgggctggtaaaagaaagtcagccaaggctataaagaagctatgtgatgttctaggagaacccctttcagcacactaccagaatattctcaaatcacttctgaaagaattgccaggtcgattttgggagggaaaagatgctattctggatgcattggcttcattgtgtgcttgctgtcatgttgctataactgcagaagactcctgcttgccaagtgttatactaaattgtgtttgtgctgcatgcagtaggaaatcaaaattgtaccgtgaagcagctttcttgtgtttacacaaagtgattacggcattcagagatccaggatttttcaatagtgtgtttccaatgctgttcgaggtttctaaccaatctgccatctcgaagacaaagggctctgctgaactagatgaaagtgaaggtgcttctgtttctctggataaagtgctcaattgtgcaacatcttgcatcagtgttgcttttccacaggatattatcaaccaaaagaagaatgttgtagaattaatattgaattctctcttgcctgaggagagttggcaagttaaactatcatccttcttgtgtatcaaggagttgtgcctcaaatttgacaattctggtgatagtaacacatggcctcaagacacagcttacttggttgaggagctatttcatttggtatcaccgaaattagtagactccataagattagtaaagattgctcaggttcacgttgctgcatcggagtgccttcttgatttgagcaaactgtacagagacttcccgctgtcgaacagaacagaggccaagttcgaggatgaactcacagagctctgcgagtctgaaaaaagcgaacaagcaaaggcgattctgaaggaatgcctggccattcttaaagctctccctggagtaaccatgacgacggattagaaaccagaagagggaacacgcaaagttctcatggtgattgtaaactcgttccgatacatagtaaagttctcttggtgattcgaaactcattcggatgtatgcatgtggta

SEQ ID NO: 45129 - DNA, 5371 bp, Zea Mays
gcggagatggcggagccatcggcctcctcggcgtccaccgccgccgccgcggagcagacagacgcagagaggatggatgccctggatcggatgctcacgcggctggccctcgccgacgacgcgcacctcgcgccggtgctcgcccgcgtcctcccctacgccgtcacctcactggcgtcccccgcgccggccgtccgaaagctcgttatggaaattcttagtcacattaacaaaagggtgaaacacaggccagagatatcactgccaatgctggagttatggaagatctatactgaacccacttcctcaacaatggtccgaaacttttgtatcctatatattgagatggcgtttgaacgcctgccgactgaggagaaaggaaacatcgcgcctgatcttttaattaatatatcaaatattccacctcagcatcaagggatcatcttgcgacttgtaacaaaggctattggtgaatgtaacacacataaggtggatgagacgattgcatcaaaatatcgagtaataaccgaatccagtgatggtcttttatttgctgacttctgttttcacacattattgtatcaagcaccacctcaaggcagtggatgcccagcaggactgtcagttgtccaatcagaacgtgtcaccgggaaacaacccctaaaaattgacgtacttgcatcaagaaagctaggaatcttaaatgtcatcgaagctatgaacttcacacctgagattgtctaccctctttatttatctgcttcttcagatagccaagatgcagtttctaagaaaggagacgagttcttaaagcgcaaagcttcaacagtgaatttagaagatcccgaccttatcaagagactgttcacactgttcaacggcactgtgggtgcagaaaatatagctgcagagctgaaagtttctccagcacatgcttcattgcgtatgcggcttatgagtgttttctgccgatcagttgctgcagcaaatgcatttccacacacacttcaatgtatcttcggctgcatctacggaagtggaactacttcaaggctaaagcagttaggaatggagttcactgtctgggttttcaaacatttattcttagtggaatattgcgctcccttgatggttcttcaactgcagaaacagattctactggtagagataccaaaatatttgcatatcaggctatcggtttgcttgcatctcgcatgccaaatttattcagtgataaaactgacatggctatacgactttttactgctttgagattggaggatcaatctcttcgtttgacaattcaagaggcagctacttcccttgctacatcatataagcgtgcttccacgatagtactgaaggatcttgagtcacttcttctggaaaattgtgaagcggagcaaagtgaggttcgcttttctgctataagatgggcaacaacattgtacgatacacgacattgttcaagccggtacatttgcatgattggggcttcagatgttaaactggacataagggaaatggctctagctggtctaaatcttatgaatgatgggaggcaatcatctgcagggtctgttgatttcagctatcctgatataaaggagatgataaattatatctgttgtcagcgacctcagttgctgcattctgatgagcagacaaatggaaaattgcttttcccttcaaaaacatttgtttcaatgatcaagtttctgatgaagtgttttgagtctagtgataacttgaaacttttgcaagaagatccatctcattctgctgtagcaaaaatgtgtgtcatcttggaacatgccatgtcatatgaagggtctagtgaactgcatgcgctggccttgaagtcattggtggacctttcttctcgtgaaccaaagttggtgtcattgaggtatgcagaacgcataaattggctaagatctcttttgggtcatgttgattctgatgcccgtgaagctgtgtcacgcctgcttggtattgcttcttcagctctttcaacctcttctgcactaaatcttctgtctgagctcacttcaactctcagtcaaaaccgtccatcaagatttgaaaattaccatggtgttctttgtgcgatcgggtacctaacagctggtgctttgaagcaatcttgtataactgaggatatggtaaaaaatgtagttgatattcttgtaaaagtagttacttctgaaggttcggcattagcatctgttgcaatggaatctcttggtcacattggtctgcgttgtgcattgccttccatcaaccaaaactcttctacaggtacactattaagcgttctccgtgagaggctgactaagcttctttctgaaaatgatactaaagctcaacagaaaattcttgtatcattgggccacatatcttggaatgagatgtcctttcctcacctgaatgatgcgttagacttgatttttagtctttcacgttctaaggtagaagatgtactttttgctgcgggggaggctctatctttcatatggggagaagttcctgtgacagcagatgtgatattggagacgaactttgtttccctttcccaggccacaaactaccttactggtgatgcatctctagtctcgagtaactcctatgaaaaaagtggctgtgaagaagcacactcaattgcacgagaagaaattattaaaaagttgttcgaaacactaatttatagcagtagaaaagaagaacgctgtgcaggtactgtctggttggtgtcactgacgatgtactgtggccgacataaaaaaatcctagaactacttccacaaatccaggaagccctttcacatcttcttggtgatccaaatgagcttacacaagatttggcatctcaaggaatgagtattgtgtatgagcttggtgatgcatctatgaaagaagagctggttcatgctctagtgaacacactgactggtgctgcaagaaagaaaaaagccattaagttgatggaggattctgaggtctttcaagaaggcacaattggcaataatcctactggagggaaacttagcacgtacaaggagctgtgcagtcttgccaatgagatggggcaacctgacctgatatacaagttcatggatctagctaattatcaggctgctctcaattccaaaaggggtgctgcttttggattttccaagatagccaaacaagctggcgaggcacttcaaccttatctgaataccttaattcctaggcttgtccggtaccaacatgaccctgataaaaacatccaggcgtgttacggacgttttatgttattgggcctcccaaaggtttgtaaacatttgaggaatatatggacaaccaccttccgtgcgatggatgacataaaggaaactgtgcgaactgccggtgacagtttgtgccgagccgtaagctcattgacaattaggctctgtgatatatcactaacttctacttctgaggcaaacgaaacgatgaacattgtgctgccatacttgctttctgagggcatactcagtaaagtatcaagtgttcaaaaagctgctattagtttggtcatgaagcttgctaagggtgctggtcctgcccttcgtcctcatctgccagaacttgttagttgtatgcttgaatgtttgtcaagtctggaagatcaaaggttgaattatgttgagatgcatgcagggaatgctggcatcaaaacagataagcttgaaactttgcgcatagctgttgctaaagattctccaatgtgggaaactcttgatatctgtataaaagttgttgacaagaattcacttgatctattggttcctcgcctggctcaaatgattagatcagctgttggcttaaatacaagggttggtgttgctagtttcataactctattggtgcagaaggtcatggttgacatcaaaccattcgcagcagtcttaatgaagttattgcatagtgcagttctggaggaaaggagttctgccgctaaaaaggccttcgcgtcctcttgtgctactgttttgaaatacgctagtcctccccaggctcagaagcttatcgaagatactacgtctctgcattcaggtgggaaaaacgatcagttgtctggtgcaattcttattaaagcctacttgagcaatgcatcggatattcttggtggatataatgcggtggttatccctgtaatttttgtgtcgagatttgatgatgataaagacaccagtgctttatatgaagaactttgggaggatattcctagtagtgaaagagtaaccctaacactatatttaccagaaattgtatctcttttatgtgatggcatgtcattgtcatcatgggctggtaaaagaaagtcagccaaggctataaagaagctatgtgatgttctaggagaacccctttcagcacactaccagaatattctcaaatcacttctgaaagaattgccaggtcgattttgggagggaaaagatgctattctggatgcattggcttcattgtgtgcttgctgtcatgttgctataactgcagaagactcctgcttgccaagtgttatactaaattgtgtttgtgctgcatgcagtaggaaatcaaaattgtaccgtgaagcagctttcttgtgtttacacaaagtgattacggcattcagagatccaggatttttcaatagtgtgtttccaatgctgttcgaggtttctaaccaatctgccatctcgaagacaaagggctctgctgaactagatgaaagtgaaggtgcttctgtttctctggataaagtgctcaattgtgcaacatcttgcatcagtgttgcttttccacaggatattatcaaccaaaagaagaatgttgtagaattaatattgaattctctcttgcctgaggagagttggcaagttaaactatcatccttcttgtgtatcaaggagttgtgcctcaaatttgacaattctggtgatagtaacacatggcctcaagacacagcttacttggttgaggagctatttcatttggtatcaccgaaattagtagactccataagattagtaaagattgctcaggttcacgttgctgcatcggagtgccttcttgatttgagcaaactgtacagagacttcccgctgtcgaacagaacagaggccaagttcgaggatgaactcacagagctctgcgagtctgaaaaaagcgaacaagcaaaggcgattctgaaggaatgcctggccattcttaaagctctccctggagtaaccatgacgacggattagaaaccagaagagggaacacgcaaagttctcatggtgattgtaaactcgttccgatacatagtaaagttctcttggtgattcgaaactcattcggatgtatgcatgtggta

SEQ ID NO: 45130 - DNA, 5460 bp, Zea Mays
gactgtcctcaccttcttgcgccggaagaagcaaacgccggcgattctaacccaaccaggcggagatggcggagccatcggcctcctcggcgtccaccgccgccgccgcggagcagacagacgcagagaggatggatgccctggatcggatgctcacgcggctggccctcgccgacgacgcgcacctcgcgccggtgctcgcccgcgtcctcccctacgccgtcacctcactggcgtcccccgcgccggccgtccgaaagctcgttatggaaattcttagtcacattaacaaaagggtgaaacacaggccagagatatcactgccaatgctggagttatggaagatctatactgaacccacttcctcaacaatggtccgaaacttttgtatcctatatattgagatggcgtttgaacgcctgccgactgaggagaaaggaaacatcgcgcctgatcttttaattaatatatcaaatattccacctcagcatcaagggatcatcttgcgacttgtaacaaaggctattggtgaatgtaacacacataaggtggatgagacgattgcatcaaaatatcgagtaataaccgaatccagtgatggtcttttatttgctgacttctgttttcacacattattgtatcaagcaccacctcaaggcagtggatgcccagcaggactgtcagttgtccaatcagaacgtgtcaccgggaaacaacccctaaaaattgacgtacttgcatcaagaaagctaggaatcttaaatgtcatcgaagctatgaacttcacacctgagattgtctaccctctttatttatctgcttcttcagatagccaagatgcagtttctaagaaaggagacgagttcttaaagcgcaaagcttcaacagtgaatttagaagatcccgaccttatcaagagactgttcacactgttcaacggcactgtgggtgcagaaaatatagctgcagagctgaaagtttctccagcacatgcttcattgcgtatgcggcttatgagtgttttctgccgatcagttgctgcagcaaatgcatttccacacacacttcaatgtatcttcggctgcatctacggaagtggaactacttcaaggctaaagcagttaggaatggagttcactgtctgggttttcaaacattaactgaccagctaaagttaatcggtccagttattcttagtggaatattgcgctcccttgatggttcttcaactgcagaaacagattctactggtagagataccaaaatatttgcatatcaggctatcggtttgcttgcatctcgcatgccaaatttattcagtgataaaactgacatggctatacgactttttactgctttgagattggaggatcaatctcttcgtttgacaattcaagaggcagctacttcccttgctacatcatataagcgtgcttccacgatagtactgaaggatcttgagtcacttcttctggaaaattgtgaagcggagcaaagtgaggttcgcttttctgctataagatgggcaacaacattgtacgatacacgacattgttcaagccggtacatttgcatgattggggcttcagatgttaaactggacataagggaaatggctctagctggtctaaatcttatgaatgatgggaggcaatcatctgcagggtctgttgatttcagctatcctgatataaaggagatgataaattatatctgttgtcagcgacctcagttgctgcattctgatgagcagacaaatggaaaattgcttttcccttcaaaaacatttgtttcaatgatcaagtttctgatgaagtgttttgagtctagtgataacttgaaacttttgcaagaagatccatctcattctgctgtagcaaaaatgtgtgtcatcttggaacatgccatgtcatatgaagggtctagtgaactgcatgcgctggccttgaagtcattggtggacctttcttctcgtgaaccaaagttggtgtcattgaggtatgcagaacgcataaattggctaagatctcttttgggtcatgttgattctgatgcccgtgaagctgtgtcacgcctgcttggtattgcttcttcagctctttcaacctcttctgcactaaatcttctgtctgagctcacttcaactctcagtcaaaaccgtccatcaagatttgaaaattaccatggtgttctttgtgcgatcgggtacctaacagctggtgctttgaagcaatcttgtataactgaggatatggtaaaaaatgtagttgatattcttgtaaaagtagttacttctgaaggttcggcattagcatctgttgcaatggaatctcttggtcacattggtctgcgttgtgcattgccttccatcaaccaaaactcttctacaggtacactattaagcgttctccgtgagaggctgactaagcttctttctgaaaatgatactaaagctcaacagaaaattcttgtatcattgggccacatatcttggaatgagatgtcctttcctcacctgaatgatgcgttagacttgatttttagtctttcacgttctaaggtagaagatgtactttttgctgcgggggaggctctatctttcatatggggagaagttcctgtgacagcagatgtgatattggagacgaactttgtttccctttcccaggccacaaactaccttactggtgatgcatctctagtctcgagtaactcctatgaaaaaagtggctgtgaagaagcacactcaattgcacgagaagaaattattaaaaagttgttcgaaacactaatttatagcagtagaaaagaagaacgctgtgcaggtactgtctggttggtgtcactgacgatgtactgtggccgacataaaaaaatcctagaactacttccacaaatccaggaagccctttcacatcttcttggtgatccaaatgagcttacacaagatttggcatctcaaggaatgagtattgtgtatgagcttggtgatgcatctatgaaagaagagctggttcatgctctagtgaacacactgactggtgctgcaagaaagaaaaaagccattaagttgatggaggattctgaggtctttcaagaaggcacaattggcaataatcctactggagggaaacttagcacgtacaaggagctgtgcagtcttgccaatgagatggggcaacctgacctgatatacaagttcatggatctagctaattatcaggctgctctcaattccaaaaggggtgctgcttttggattttccaagatagccaaacaagctggcgaggcacttcaaccttatctgaataccttaattcctaggcttgtccggtaccaacatgaccctgataaaaacatccaggcgtgttacggacgttttatgttattgggcctcccaaaggtttgtaaacatttgaggaatatatggacaaccaccttccgtgcgatggatgacataaaggaaactgtgcgaactgccggtgacagtttgtgccgagccgtaagctcattgacaattaggctctgtgatatatcactaacttctacttctgaggcaaacgaaacgatgaacattgtgctgccatacttgctttctgagggcatactcagtaaagtatcaagtgttcaaaaagctgctattagtttggtcatgaagcttgctaagggtgctggtcctgcccttcgtcctcatctgccagaacttgttagttgtatgcttgaatgtttgtcaagtctggaagatcaaaggttgaattatgttgagatgcatgcagggaatgctggcatcaaaacagataagcttgaaactttgcgcatagctgttgctaaagattctccaatgtgggaaactcttgatatctgtataaaagttgttgacaagaattcacttgatctattggttcctcgcctggctcaaatgattagatcagctgttggcttaaatacaagggttggtgttgctagtttcataactctattggtgcagaaggtcatggttgacatcaaaccattcgcagcagtcttaatgaagttattgcatagtgcagttctggaggaaaggagttctgccgctaaaaaggccttcgcgtcctcttgtgctactgttttgaaatacgctagtcctccccaggctcagaagcttatcgaagatactacgtctctgcattcaggtgggaaaaacgatcagttgtctggtgcaattcttattaaagcctacttgagcaatgcatcggatattcttggtggatataatgcggtggttatccctgtaatttttgtgtcgagatttgatgatgataaagacaccagtgctttatatgaagaactttgggaggatattcctagtagtgaaagagtaaccctaacactatatttaccagaaattgtatctcttttatgtgatggcatgtcattgtcatcatgggctggtaaaagaaagtcagccaaggctataaagaagctatgtgatgttctaggagaacccctttcagcacactaccagaatattctcaaatcacttctgaaagaattgccaggtcgattttgggagggaaaagatgctattctggatgcattggcttcattgtgtgcttgctgtcatgttgctataactgcagaagactcctgcttgccaagtgttatactaaattgtgtttgtgctgcatgcagtaggaaatcaaaattgtaccgtgaagcagctttcttgtgtttacacaaagtgattacggcattcagagatccaggatttttcaatagtgtgtttccaatgctgttcgaggtttctaaccaatctgccatctcgaagacaaagggctctgctgaactagatgaaagtgaaggtgcttctgtttctctggataaagtgctcaattgtgcaacatcttgcatcagtgttgcttttccacaggatattatcaaccaaaagaagaatgttgtagaattaatattgaattctctcttgcctgaggagagttggcaagttaaactatcatccttcttgtgtatcaaggagttgtgcctcaaatttgacaattctggtgatagtaacacatggcctcaagacacagcttacttggttgaggagctatttcatttggtatcaccgaaattagtagactccataagattagtaaagattgctcaggttcacgttgctgcatcggagtgccttcttgatttgagcaaactgtacagagacttcccgctgtcgaacagaacagaggccaagttcgaggatgaactcacagagctctgcgagtctgaaaaaagcgaacaagcaaaggcgattctgaaggaatgcctggccattcttaaagctctccctggagtaaccatgacgacggattagaaaccagaagagggaacacgcaaagttctcatggtgattgtaaactcgttccgatacatagtaaagttctcttggtgattcgaaactcattcggatgtatgcatgtggta

SEQ ID NO: 45131 - DNA, 5490 bp, Zea Mays
ctcgaacccaactcagccgccacttcgactgtcctcaccttcttgcgccggaagaagcaaacgccggcgattctaacccaaccaggcggagatggcggagccatcggcctcctcggcgtccaccgccgccgccgcggagcagacagacgcagagaggatggatgccctggatcggatgctcacgcggctggccctcgccgacgacgcgcacctcgcgccggtgctcgcccgcgtcctcccctacgccgtcacctcactggcgtcccccgcgccggccgtccgaaagctcgttatggaaattcttagtcacattaacaaaagggtgaaacacaggccagagatatcactgccaatgctggagttatggaagatctatactgaacccacttcctcaacaatggtccgaaacttttgtatcctatatattgagatggcgtttgaacgcctgccgactgaggagaaaggaaacatcgcgcctgatcttttaattaatatatcaaatattccacctcagcatcaagggatcatcttgcgacttgtaacaaaggctattggtgaatgtaacacacataaggtggatgagacgattgcatcaaaatatcgagtaataaccgaatccagtgatggtcttttatttgctgacttctgttttcacacattattgtatcaagcaccacctcaaggcagtggatgcccagcaggactgtcagttgtccaatcagaacgtgtcaccgggaaacaacccctaaaaattgacgtacttgcatcaagaaagctaggaatcttaaatgtcatcgaagctatgaacttcacacctgagattgtctaccctctttatttatctgcttcttcagatagccaagatgcagtttctaagaaaggagacgagttcttaaagcgcaaagcttcaacagtgaatttagaagatcccgaccttatcaagagactgttcacactgttcaacggcactgtgggtgcagaaaatatagctgcagagctgaaagtttctccagcacatgcttcattgcgtatgcggcttatgagtgttttctgccgatcagttgctgcagcaaatgcatttccacacacacttcaatgtatcttcggctgcatctacggaagtggaactacttcaaggctaaagcagttaggaatggagttcactgtctgggttttcaaacatgcagtaactgaccagctaaagttaatcggtccagttattcttagtggaatattgcgctcccttgatggttcttcaactgcagaaacagattctactggtagagataccaaaatatttgcatatcaggctatcggtttgcttgcatctcgcatgccaaatttattcagtgataaaactgacatggctatacgactttttactgctttgagattggaggatcaatctcttcgtttgacaattcaagaggcagctacttcccttgctacatcatataagcgtgcttccacgatagtactgaaggatcttgagtcacttcttctggaaaattgtgaagcggagcaaagtgaggttcgcttttctgctataagatgggcaacaacattgtacgatacacgacattgttcaagccggtacatttgcatgattggggcttcagatgttaaactggacataagggaaatggctctagctggtctaaatcttatgaatgatgggaggcaatcatctgcagggtctgttgatttcagctatcctgatataaaggagatgataaattatatctgttgtcagcgacctcagttgctgcattctgatgagcagacaaatggaaaattgcttttcccttcaaaaacatttgtttcaatgatcaagtttctgatgaagtgttttgagtctagtgataacttgaaacttttgcaagaagatccatctcattctgctgtagcaaaaatgtgtgtcatcttggaacatgccatgtcatatgaagggtctagtgaactgcatgcgctggccttgaagtcattggtggacctttcttctcgtgaaccaaagttggtgtcattgaggtatgcagaacgcataaattggctaagatctcttttgggtcatgttgattctgatgcccgtgaagctgtgtcacgcctgcttggtattgcttcttcagctctttcaacctcttctgcactaaatcttctgtctgagctcacttcaactctcagtcaaaaccgtccatcaagatttgaaaattaccatggtgttctttgtgcgatcgggtacctaacagctggtgctttgaagcaatcttgtataactgaggatatggtaaaaaatgtagttgatattcttgtaaaagtagttacttctgaaggttcggcattagcatctgttgcaatggaatctcttggtcacattggtctgcgttgtgcattgccttccatcaaccaaaactcttctacaggtacactattaagcgttctccgtgagaggctgactaagcttctttctgaaaatgatactaaagctcaacagaaaattcttgtatcattgggccacatatcttggaatgagatgtcctttcctcacctgaatgatgcgttagacttgatttttagtctttcacgttctaaggtagaagatgtactttttgctgcgggggaggctctatctttcatatggggagaagttcctgtgacagcagatgtgatattggagacgaactttgtttccctttcccaggccacaaactaccttactggtgatgcatctctagtctcgagtaactcctatgaaaaaagtggctgtgaagaagcacactcaattgcacgagaagaaattattaaaaagttgttcgaaacactaatttatagcagtagaaaagaagaacgctgtgcaggtactgtctggttggtgtcactgacgatgtactgtggccgacataaaaaaatcctagaactacttccacaaatccaggaagccctttcacatcttcttggtgatccaaatgagcttacacaagatttggcatctcaaggaatgagtattgtgtatgagcttggtgatgcatctatgaaagaagagctggttcatgctctagtgaacacactgactggtgctgcaagaaagaaaaaagccattaagttgatggaggattctgaggtctttcaagaaggcacaattggcaataatcctactggagggaaacttagcacgtacaaggagctgtgcagtcttgccaatgagatggggcaacctgacctgatatacaagttcatggatctagctaattatcaggctgctctcaattccaaaaggggtgctgcttttggattttccaagatagccaaacaagctggcgaggcacttcaaccttatctgaataccttaattcctaggcttgtccggtaccaacatgaccctgataaaaacatccaggcgtgttacggacgttttatgttattgggcctcccaaaggtttgtaaacatttgaggaatatatggacaaccaccttccgtgcgatggatgacataaaggaaactgtgcgaactgccggtgacagtttgtgccgagccgtaagctcattgacaattaggctctgtgatatatcactaacttctacttctgaggcaaacgaaacgatgaacattgtgctgccatacttgctttctgagggcatactcagtaaagtatcaagtgttcaaaaagctgctattagtttggtcatgaagcttgctaagggtgctggtcctgcccttcgtcctcatctgccagaacttgttagttgtatgcttgaatgtttgtcaagtctggaagatcaaaggttgaattatgttgagatgcatgcagggaatgctggcatcaaaacagataagcttgaaactttgcgcatagctgttgctaaagattctccaatgtgggaaactcttgatatctgtataaaagttgttgacaagaattcacttgatctattggttcctcgcctggctcaaatgattagatcagctgttggcttaaatacaagggttggtgttgctagtttcataactctattggtgcagaaggtcatggttgacatcaaaccattcgcagcagtcttaatgaagttattgcatagtgcagttctggaggaaaggagttctgccgctaaaaaggccttcgcgtcctcttgtgctactgttttgaaatacgctagtcctccccaggctcagaagcttatcgaagatactacgtctctgcattcaggtgggaaaaacgatcagttgtctggtgcaattcttattaaagcctacttgagcaatgcatcggatattcttggtggatataatgcggtggttatccctgtaatttttgtgtcgagatttgatgatgataaagacaccagtgctttatatgaagaactttgggaggatattcctagtagtgaaagagtaaccctaacactatatttaccagaaattgtatctcttttatgtgatggcatgtcattgtcatcatgggctggtaaaagaaagtcagccaaggctataaagaagctatgtgatgttctaggagaacccctttcagcacactaccagaatattctcaaatcacttctgaaagaattgccaggtcgattttgggagggaaaagatgctattctggatgcattggcttcattgtgtgcttgctgtcatgttgctataactgcagaagactcctgcttgccaagtgttatactaaattgtgtttgtgctgcatgcagtaggaaatcaaaattgtaccgtgaagcagctttcttgtgtttacacaaagtgattacggcattcagagatccaggatttttcaatagtgtgtttccaatgctgttcgaggtttctaaccaatctgccatctcgaagacaaagggctctgctgaactagatgaaagtgaaggtgcttctgtttctctggataaagtgctcaattgtgcaacatcttgcatcagtgttgcttttccacaggatattatcaaccaaaagaagaatgttgtagaattaatattgaattctctcttgcctgaggagagttggcaagttaaactatcatccttcttgtgtatcaaggagttgtgcctcaaatttgacaattctggtgatagtaacacatggcctcaagacacagcttacttggttgaggagctatttcatttggtatcaccgaaattagtagactccataagattagtaaagattgctcaggttcacgttgctgcatcggagtgccttcttgatttgagcaaactgtacagagacttcccgctgtcgaacagaacagaggccaagttcgaggatgaactcacagagctctgcgagtctgaaaaaagcgaacaagcaaaggcgattctgaaggaatgcctggccattcttaaagctctccctggagtaaccatgacgacggattagaaaccagaagagggaacacgcaaagttctcatggtgattgtaaactcgttccgatacatagtaaagttctcttggtgattcgaaactcattcggatgtatgcatgtggta

SEQ ID NO: 45132 - DNA, 4767 bp, Zea Mays
tcctcggcgtccaccgccgccgccgcggagcagacagacgcagagaggatggatgccctggatcggatgctcacgcggctggccctcgccgacgacgcgcacctcgcgccggtgctcgcccgcgtcctcccctacgccgtcacctcactggcgtcccccgcgccggccgtccgaaagctcgttatggaaattcttagtcacattaacaaaagggtgaaacacaggccagagatatcactgccaatgctggagttatggaagatctatactgaacccacttcctcaacaatggtccgaaacttttgtatcctatatattgagatggcgtttgaacgcctgccgactgaggagaaaggaaacatcgcgcctgatcttttaattaatatatcaaatattccacctcagcatcaagggatcatcttgcgacttgtaacaaaggctattggtgaatgtaacacacataaggtggatgagacgattgcatcaaaatatcgagtaataaccgaatccagtgatggtcttttatttgctgacttctgttttcacacattattgtatcaagcaccacctcaaggcagtggatgcccagcaggactgtcagttgtccaatcagaacgtgtcaccgggaaacaacccctaaaaattgacgtacttgcatcaagaaagctaggaatcttaaatgtcatcgaagctatgaacttcacacctgagattgtctaccctctttatttatctgcttcttcagatagccaagatgcagtttctaagaaaggagacgagttcttaaagcgcaaagcttcaacagtgaatttagaagatcccgaccttatcaagagactgttcacactgttcaacggcactgtgggtgcagaaaatatagctgcagagctgaaagtttctccagcacatgcttcattgcgtatgcggcttatgagtgttttctgccgatcagttgctgcagcaaatgcatttccacacacacttcaatgtatcttcggctgcatctacggaagtggaactacttcaaggctaaagcagttaggaatggagttcactgtctgggttttcaaacatgcagtaactgaccagctaaagttaatcggtccagttattcttagtggaatattgcgctcccttgatggttcttcaactgcagaaacagattctactggtagagataccaaaatatttgcatatcaggctatcggtttgcttgcatctcgcatgccaaatttattcagtgataaaactgacatggctatacgactttttactgctttgagattggaggatcaatctcttcgtttgacaattcaagaggcagctacttcccttgctacatcatataagcgtgcttccacgatagtactgaaggatcttgagtcacttcttctggaaaattgtgaagcggagcaaagtgaggttcgcttttctgctataagatgggcaacaacattgtacgatacacgacattgttcaagccggtacatttgcatgattggggcttcagatgttaaactggacataagggaaatggctctagctggtctaaatcttatgaatgatgggaggcaatcatctgcagggtctgttgatttcagctatcctgatataaaggagatgataaattatatctgttgtcagcgacctcagttgctgcattctgatgagcagacaaatggaaaattgcttttcccttcaaaaacatttgtttcaatgatcaagtttctgatgaagtgttttgagtctagtgataacttgaaacttttgcaagaagatccatctcattctgctgtagcaaaaatgtgtgtcatcttggaacatgccatgtcatatgaagggtctagtgaactgcatgcgctggccttgaagtcattggtggacctttcttctcgtgaaccaaagttggtgtcattgaggtatgcagaacgcataaattggctaagatctcttttgggtcatgttgattctgatgcccgtgaagctgtgtcacgcctgcttggtattgcttcttcagctctttcaacctcttctgcactaaatcttctgtctgagctcacttcaactctcagtcaaaaccgtccatcaagatttgaaaattaccatggtgttctttgtgcgatcgggtacctaacagctggtgctttgaagcaatcttgtataactgaggatatggtaaaaaatgtagttgatattcttgtaaaagtagttacttctgaaggttcggcattagcatctgttgcaatggaatctcttggtcacattggtctgcgttgtgcattgccttccatcaaccaaaactcttctacaggttaaacatgttaaccaaacctatactgcttatgggttgtgctattcaccatctatgatgctattttttgattatttttgccttcaggtacactattaagcgttctccgtgagaggctgactaagcttctttctgaaaatgatactaaagctcaacagaaaattcttgtatcattgggccacatatcttggaatgagatgtcctttcctcacctgaatgatgcgttagacttgatttttagtctttcacgttctaaggtagaagatgtactttttgctgcgggggaggctctatctttcatatggggagaagttcctgtgacagcagatgtgatattggagacgaactttgtttccctttcccaggccacaaactaccttactggtgatgcatctctagtctcgagtaactcctatgaaaaaagtggctgtgaagaagcacactcaattgcacgagaagaaattattaaaaagttgttcgaaacactaatttatagcagtagaaaagaagaacgctgtgcaggtactgtctggttggtgtcactgacgatgtactgtggccgacataaaaaaatcctagaactacttccacaaatccaggaagccctttcacatcttcttggtgatccaaatgagcttacacaagatttggcatctcaaggaatgagtattgtgtatgagcttggtgatgcatctatgaaagaagagctggttcatgctctagtgaacacactgactggtgctgcaagaaagaaaaaagccattaagttgatggaggattctgaggtctttcaagaaggcacaattggcaataatcctactggagggaaacttagcacgtacaaggagctgtgcagtcttgccaatgagatggggcaacctgacctgatatacaagttcatggatctagctaattatcaggctgctctcaattccaaaaggggtgctgcttttggattttccaagatagccaaacaagctggcgaggcacttcaaccttatctgaataccttaattcctaggcttgtccggtaccaacatgaccctgataaaaacatccaggcgtgttacggacgttttatgttattgggcctcccaaaggtttgtaaacatttgaggaatatatggacaaccaccttccgtgcgatggatgacataaaggaaactgtgcgaactgccggtgacagtttgtgccgagccgtaagctcattgacaattaggctctgtgatatatcactaacttctacttctgaggcaaacgaaacgatgaacattgtgctgccatacttgctttctgagggcatactcagtaaagtatcaagtgttcaaaaagctgctattagtttggtcatgaagcttgctaagggtgctggtcctgcccttcgtcctcatctgccagaacttgttagttgtatgcttgaatgtttgtcaagtctggaagatcaaaggttgaattatgttgagatgcatgcagggaatgctggcatcaaaacagataagcttgaaactttgcgcatagctgttgctaaagattctccaatgtgggaaactcttgatatctgtataaaagttgttgacaagaattcacttgatctattggttcctcgcctggctcaaatgattagatcagctgttggcttaaatacaagggttggtgttgctagtttcataactctattggtgcagaaggtcatggttgacatcaaaccattcgcagcagtcttaatgaagttattgcatagtgcagttctggaggaaaggagttctgccgctaaaaaggccttcgcgtcctcttgtgctactgttttgaaatacgctagtcctccccaggctcagaagcttatcgaagatactacgtctctgcattcaggtgggaaaaacgatcagttgtctggtgcaattcttattaaagcctacttgagcaatgcatcggatattcttggtggatataatgcggtggttatccctgtaatttttgtgtcgagatttgatgatgataaagacaccagtgctttatatgaagaactttgggaggatattcctagtagtgaaagagtaaccctaacactatatttaccagaaattgtatctcttttatgtgatggcatgtcattgtcatcatgggctggtaaaagaaagccaaggctataaagaagctatgtgatgttctaggagaacccctttcagcacactaccagaatattctcaaatcacttctgaaagaattgccaggtcgattttgggagggaaaagatgctattctggatgcattggcttcattgtgtgcttgctgtcatgttgctataactgcagaagactcctgcttgccaagtgttatactaaattgtgtttgtgctgcatgcagtaggaaatcaaaattgtaccgtgaagcagctttcttgtgtttacacaaaaaatgtaccttttagcatcatgctaaagatttattagtttttt

SEQ ID NO: 45133 - DNA, 1996 bp, Zea Mays
aacacatgcagggttcagttcagtgttcagacacgacgaggtttccacggcacacacacactatatatagactgccattgcctacacactgtgggcaccaccaccaccatcttttgcactctctcaagtcacaaagcttccctacgtactcacaagtcacaagggttagcagttagctacctagctcaagctcgccagccagcatcatggacgtgcaggtgcagcggagcttcgtgatacccgcgccgcagtcggagccgtcggcggaggtgccgctgacggtgttcgacctcgtcgcgcccgcctaccacgtcaccgtgctgttcgcctacgccgcgcccaaccccaccgacgccgccctcctggacgcgctcgccgccacgctcccgcgcttcccgctcctcaccgcgcgcctcgtcgtcgccgacgccgacgagcgccgacgcccgttcttcgtcacggggagaggcggcgcgggcgcgctcgttgtcgaggccaccgtggcgtccgcgctctccgaccacctcccgctcgcgcccgcgccggagctcgcgcgcctgcacgtgccggtcggcggcgacgtggctccgccgccaccgcacatgctcatgctccagatcaaccgcttcgcgtgcgggggcctcgtcatcgcctcgtcctcgtaccaccaggccgcggacggctactccatgtccaccttcttccacgcgtgggccgacgccgtccgcgccaacaacaaacacgacactctactaccggcggcgccgccggcaccggcgccgtacggcccgggcgccatcacgccgcgccggccgccgcggtgcgagttcgagcaccgcggcaccgagttcctgcgcgccgaggacgccgccgccggcaggccggcgccggcccgggtggacccttcggagatcgccaacgtgctgctgcacctcccgagcgacttcgtggcggcgctcaaggcctcagctgcgccgccgcagggacagggccggtggtacacgaccttcgaggccgtgtcggcgcacctgtggcggaagatcacgctggcgcgcgggcgcgccgacgacgcgtcgcgcacggcgctgaacgcggcggtgaacggccgcgcgcgcctcggcgccgacgccctggcgcggggcttcttcggcaacgcggtcctcacggcgagcgccgccacctgcgcccgggacctggcgcggggcgccctggccgacgcggcggcgctgatccgcgcggccgtgcgcgcgcgcgaccgccagtacttccagtccttcgtcgacttcggggagctgcacctgcacggcggcgaggagctgctggagcccacggtcggggacgaggacaacgtgctgctcccggacgtcgcgtccgacagctggctgcacctggagctgcaccgcctggactttgggtgcggcggacggctggccgggatcctgccggcgaaggtcccgctggacggggtggtcgtgctcatacccagcctgcggaaaggaggcggcgtcgacgcgttcgtggcgctgtgggacaagcatgccaaggagcttatggatattgcttacaccatggactagaaaacaactccgtgtcactcatggaggatgaaaacacacacgtcgccaccaaaattatttactgcctaagcatgcgggaaaggaataatatatatatttctcacaagtcaataaagttttatttaaatatatacagtactaattatgtccgaaattctcaacatatatggttgatacgaaaaaatggaatagaggataagcgtgttgttctatatatgcaaagttgtctaggtttgtcatcttaatccagctaggtcgggtcactcaaggcagctagctaggctgccgtacagatctgtccagatcaattccctcatgtgaagtcagttcgatagctttccggatcaggccgtccaggcctagcacggcatatttcgaacatatattccttatgctcgaaattcccgacaaaaatgttg

SEQ ID NO: 45134 - DNA, 2509 bp, Zea Mays
cactgccatggcggcggcccgacccgctcgcccactcggcgctgctccgcctcctcgcccgcgcccgccgatttggacgccgcggacgccgcactacgctgcatgtccctcgcgggggccgcgcccacgcgcgggagcctcggcgcgctcgccgccgcctacgcggacgccggcatggaagagaaagccgccgaggcgtgcgcgcgcgccagggaactgcacggcgcgctccccgacgcgccggactgcaactgcctgctcaggctcctcgtggagcgccgacggtgggagcgcgcccgggggctgtacggcgagatgctcgtccgggagggcggcgcggatgactacagcacctgcgtcatggtccgcgggctgtgcttggaagggcgggtggaggaggggaggggcctcattgaggccaggtggggagaagggtgcgtcccgggtgccgttttctacaatgtgctcatcgacgggtactgccggcgtggggacatcgggagggggctgctgctgttgggcgagatggagacgaaggggatcatcccaaccgtggttacgtatggtgctatcattcactggcttgggaggaaaggcgatttgacgaaggttgagagcttacttggggagatgagggcgagagggctgtcccccaacgtgcagatttacaacaccgtgatcaatgcattgtgcaaatgccggtcggcgtcacaggcatcagatatgctgaaccaaatggtcaaaagcaggtttaacccagatgtcgtcacgtttaatactatgatagcagggttttgccgggaaggggatgttcgagaggctctgaaacttttgagggaggccattaggagggggttggaaccgaatcagttaagctatacgcctttgattcatggcttctgcgtcagaggagaggcgatggttgcatcagatttgcttgtggaaatgatggggagagggcatactccggacatgatcacacttggagcattgattcatggcctcgttgtttctgggcaggttaatgatgccttgattgttcgggagaagatggcagagagacaggtgatgcctgatgctaacatatataatgtgctgatcagtggcctatgcaagaaacggatgctttctgcagctaagaaccttcttgaagagatgcttgagcaaaaagtccagcctgataaatttatatatactactctgattgatgggttcgttaggagtgacaaactcagtgatgcgaggaaaatattcgaattcatggaagaaaaagcctgccctgatattgttgcctacaatgttatgataaaaggatattgtaagtttggaatgatgaaagaggcggttacatgcatgagcagcatgagaaaggctgggtgtatcccagatgagtttacatatactacacttgtcgatggctacgctaaaaaaggtgacataagtgcatcacttaggcttttatgtgatatgatgaagcgaagatgcaagccgaatatttttacatatgcatcactaatatgtggatactgcaacatcggtgacacatacagtgcagaagatttatttgcaaagatgcagtctgagggtctatttcccaatgttgtacactacacagttctaattggtagtctctttaagaaagataaagtgatccaagctgcagcgtactttgagcatatgctgcttaaccattgccctcctaatgatgctacagtgcattatttagtgaatgggctcgtaaactgtaggcacggtatggtcaactcaaaccgcagtgatactaaacaggctcacgagaagagtgcccttttagatgtattcaggggattgatttctgatggattggacccaaggatttcagcgtacaatgctataatcttcagcttgtgtagacataatatgcttgggaaggcaatggacctgaaagataagatgtctaacaaaggctgcttgccagaccctataaccttcctttcacttctttatggattttcttctgctggagaatcagggaaatggaggagtgccttacctaatgaatttcagcaggatgaatttgagataatcaccaagtacatggcattattcaatcagcatgtaactagttcagttgtaggtgaagtctctaggattttacagttatattctgaggagtttcagttcctcaaacaaccagagcagagattcgctggttcctgacccccacaatgtcatggtttacctggcacttggaatcaagcaatgaatttcaagaccgcaagtgcaatctgcaaggcaaagtttccggtggggatcgtccttgaaggtacgcgaattaaatcagccgctccctcgttacagccagcagcactgttgaaactttttcccccccacctgtaatgttagacattagccaaaaacataaagttatttcccgtctgcatatatacttgtgtacatagctgctgaccccataccgagcttctgaccgtgttagcatctagcgcaagaggcatcccgcatgacaata

SEQ ID NO: 45135 - DNA, 1223 bp, Zea Mays
cgaagcagatagtttagttaaattttacactctgatcgagtggccaatattgaatcgatcaagtgcatccatttctctatgcgcaaaatccaagatggtcatgcagatgacttcatggttataaggttatttttttagtaccgatgatgtgctcaaaacatattgtactgtaagtaacatgaagttcccctatggaacttctctgtagcgtttgaacaaatgaagtattgctagtaggctatctcactctcaagactttcgatgtaacagtggcacatagtttggtaatggtaatgatgccttttgggcaatcctgtttgctggagtttggatccagctgggtactgattctgtgtgatttgatattcttaacttgatcttcgtagtcaaaacaatttgtgcaagattttcatataccattttattcaagccatgagacgaatgtttcttcattcgtgtgaccttaaaaggccagtgctaacttgtgttccttttcctctccctttttctgactagtacgaagcacacctatatcagattcagtatttcctttctatgtcctgtacagtctgcttttcttgataaaaatatgctaatttctgtttctgccctttcaggacccaaggaatttacttctgtgttttacagtcttcagaactggagagcaatatttgagaggtttgatcgtgatcgaagtggcaggatcgacatgtcagaactgcgcgatgctcttctcagtctcggatattctgtgtctccaactgtccttgatctgcttgtgtctaaatttgacaagactgggggcaagagcaaagcaatcgaatatgacaacttcattgaatgctgcctcactgttaaggggctgacagagaagttcaaggagaaggacaccgcctactctgggtcggcgactttcacctacgaggccttcatgctgaccgtgctgcctttcctcattgcgtagtggcagtccactccgccgctcaaaacaagctttataagcttttccaatagtactgtaatattatgcctgctgtaaagagatttatgttcgcagagttgtttttagacgagttgttttgattctggatttaacttgtgttgtgaatcataaagttgctctgaaatggagaatgtacctgttggttgaacagatgctttgtggttgtggtatgtggttggtattggtggctctagggatggcaatgggtaagctatctact

SEQ ID NO: 45136 - DNA, 735 bp, Zea Mays
gatgacttgcgtgcatatgggattaagttccagtactgaccatgcgctgtacatactgcaaggaacgtggagttcttgttggcagcctttattgtagaccatgaaccttcttttatagtgtgtcaacaggacccaaggaatttacttctgtgttttacagtcttcagaactggagagcaatatttgagaggtttgatcgtgatcgaagtggcaggatcgacatgtcagaactgcgcgatgctcttctcagtctcggatattctgtgtctccaactgtccttgatctgcttgtgtctaaatttgacaagactgggggcaagagcaaagcaatcgaatatgacaacttcattgaatgctgcctcactgttaaggggctgacagagaagttcaaggagaaggacaccgcctactctgggtcggcgactttcacctacgaggccttcatgctgaccgtgctgcctttcctcattgcgtagtggcagtccactccgccgctcaaaacaagctttataagcttttccaatagtactgtaatattatgcctgctgtaaagagatttatgttcgcagagttgtttttagacgagttgttttgattctggatttaacttgtgttgtgaatcataaagttgctctgaaatggagaatgtacctgttggttgaacagatgctttgtggttgtggtatgtggttggtattggtggctctagggatggcaatgggtaagctatctact

SEQ ID NO: 45137 - DNA, 1646 bp, Zea Mays
aaggaaacctgcccgttgctttgctccccccttcggcatctctacctgcgtgcgtcaccggcatttaatcccgcgttccattccgaacagcgagcacaaccaccgctgctgcgatctcgccgtctccctcctccacgccgtctcggtctccctcccatggccggctacccgcctcccggctccggctacccctacggtcccggcgggggctacggcgccccgccgccgccctacggctcctcgcccgcgccctccgccccgccgtacggcgagaagccgcccaaggaaggcaagacctcgacctcctccgcgcccccctactacggcgcgcctcccccatcctacggcgcgccgcccccctcccagccctacggcggcgggggcgggggcgggggcgggtacgggtacggcgcctcgcagccgccgccctacggcggcgccccgcagcagcagcccccgtacgggggcggggccccggcagggttcggcagcccgttcgcgtcgctggtgccctccgcgttcccgcccggcaccgaccccaacgtcgtggcctgcttccaggcggccgaccgcgacggcagcggcatgatcgacgacaaggagctgcagtccgcgctgtccgggtacaaccagagcttcagcctccgcaccgtccacctcctcatgtacctcttcaccaacaccaacgtccgcaagatcggacccaaggaatttacttctgtgttttacagtcttcagaactggagagcaatatttgagaggtttgatcgtgatcgaagtggcaggatcgacatgtcagaactgcgcgatgctcttctcagtctcggatattctgtgtctccaactgtccttgatctgcttgtgtctaaatttgacaagactgggggcaagagcaaagcaatcgaatatgacaacttcattgagtaaggacctcccttcaatctaactgctgctcgtttcttaacaatgtttgctgcaccttatcagtaaggaaattattgtattttcgcagtgttgttgtcatggatgttcataactggcctgatatcatcagcctatgagtaataaagttattttataactagttaaaggattactttgactgatatgtcaatgaactgccctgctaagttcagctatggtttctgatgcaagactattgacatgtctaaaactgattttttttatgtcctatctgcattcagtttgccctgtacctcaactactgaccgtgttttcttttttctttctttacctatgcagatgctgcctcactgttaaggggctgacagagaagttcaaggagaaggacaccgcctactctgggtcggcgactttcacctacgaggccttcatgctgaccgtgctgcctttcctcattgcgtagtggcagtccactccgccgctcaaaacaagctttataagcttttccaatagtactgtaatattatgcctgctgtaaagagatttatgttcgcagagttgtttttagacgagttgttttgattctggatttaacttgtgttgtgaatcataaagttgctctgaaatggagaatgtacctgttggttgaacagatgctttgtggttgtggtatgtggttggtattggtggctctagggatggcaatgggtaagctatctact

SEQ ID NO: 45138 - DNA, 1679 bp, Zea Mays
tcccgttgcaacgcacgggcactaacctagtatacatatacatattatattattatatttagctttaggataaaaatgattatgaaatatttatatgaaataaaaaatattaaccaataacaaatgttaccctagactagttgtagaaaaggaaaaatcttcactagtgatggaataattaaagacaattgtttctgttatgataataatggaagcagaatgaagaacagaaaaaagagtaaaataaaaaagaagccatggcaaaataagagttaaaaaaagtgaaggagaaagaagaacgagccagtttcatagcccgctttctgttgaaaacaaaaatcggcccgatagggcacgccgagagaagcaagctgtaaaaacagccccgaaccgaagaactgttctcctgcgttcgtttctcttctcgacggggacgaccgccagagccgccgccttacgtccagctgccacggtacttcatcgggccctttgccggtgcaggcggcgcagcacccaccgcaccaggctataaatggcaggaaggcaccgggcaccccgacaataccatgatgaacctcgaggataccgtgatggtccaccacctccacttccacgaccaagacctctctcaccgcgtcgcatggcagaggaactgtctaggcgccgtgctgagatccgtagaatccatgaggacaatcagcgtctggcggatgaaattgttagtctcaagcaaaccatgccgcgtttgcaagaagacctccgaatctcaagccaggctgttccaaagctccgggcagagaaagagctcgagtcgagggagctgactcagaggaacctgaagctggaagctgagctgcgtgccttagaacccctcaggcaagacgctctgcatctgcgatctgaagcaagtaaactgcagtctctgaggcaagagttggctgcgaaggttcaaggcctatcaaaagagcttgaacttcagaagtctgaaagccagaaaatgactgctttggtagctgaacgtgatgcgctgtgtcaagaactgctccaggctagggcgaaccttgagtttgagaagaaggcgaagccagagctgactgcgcaggttcaggcaatggagaaggatcttgtggctatggctcaggaggcggagaagctgagggctgatatcgcgaagagaaacacacctactagtttcagcagccgtggaacgtatggagcctcgttgtcgactcctgggatgggtttgcaaggcatgtatgatggcggcggctattctatggctgggagccgctacggcagtggcactggggcttggagctcgcacgatccccatggctacccgcatctttaactgtgcttctgaccggtgttttctcctgaacagctccctgagtaccttggctaagtttcttgtagtagtataacttgtggtgcaccattgctacccttcctctggtcaatacacaacaatataccaactttggttgtcttggttgttttttcccctactgcacacggtgacgctgttgtgagcattagatgtttggccactcggccgttttgccgtggtgagttttggcttaattcattattaggtaacaggcctgtaagctgtatagtaagaataacacaagatcctctaggacctagccaatgcattgtagctacctcaaagtctc

SEQ ID NO: 45139 - DNA, 2547 bp, Zea Mays
gcggaactgagtgtcgatcaccgactcgaatcgcggaggccggtacctggggatgagggttcaggacgaggacgtggacgacgatggcgaggtgaccgcgccaccgcagcacctggtgttcgcctactacttcaccggccacggcttcgggcacgccacccgcgccctcgaggtggtgaggcacctggtcgccgcggggcatgacgtgcacgtggtcaccgccgcgcccgagttcgtcttcaccatagagatcgcctcccccagcctccacatctgcaaggtcctgctcgactgcggcgccgtccaggccgacaccctcaccgtggaccgcctcgcctcgctcaagaagtgcagtaccaccagacgactgtggtgccccgggagtccatcctcaagaccgaggcggagtggctcaactccatcaaggccttgctccatggatggtcccagcgaagccgaccacgcctcccagcatcgccatgcccgcacctccaaccatcctcgccgacaagctagtgtccccgtccacatccgagatcctcacgcccgggccttggatggaagcccagaatcgccttccatcggggattctacaccacgcgtcgcgccccctccccgcacgcaagcccccgcctgcgcattctccgccaccccatcccctgtccagcgtgtgtgccatggcctccctcgaccagcggcacgcatacgccatcacccctcccaactgctcccacccgagattgtcgctgtccccatctatgcatcaggtctgcgcccgccgaggctgccctcgtcctccccaacggcaaatcgcgatgattatgcccccatccacgcgccgcttccccagttcagcatcaaagttggttgtcttgcaaaacagcttccccaacattttctgaaatctctccaaacaaagaagccacttatgaaaaagcttattggctgcttcacgcgctctttgtttttcaaccatactgtgacttgtgttttgttctatgatgttgtggctataaccaagtggaggtttatggagctaaaggaacatatgcaaggagattttggtgctgaaaatgaagcatatgaaaggtatacacagaatgttaggttattggaggaaacatggtgtcccatggaagatgctgatgttgagcctgaagctgaagcagcttttcttcagaggaaggaaggatggacttgctggtttcggaggcaaatgtgaggttgaagtcgggtaatgaaattgccaatggcttcaactatcttggagcagaagctgaagaaattgccgatgaggatggaaaaccatatgatccaaatgaggacgatcatctaaacccaatgaagttcagcacaaagcatatcagctatttggaaaggagaagccgagaagggttcctctattgataggtcaactggaatggagatgaagccgagcgatcaagagtcagctgcatcagtagcatggccttactctatcctagagttgtgcactatatggaggttgatgaagactttgctgcaaagatcgatgatgaaatcacctctttgaatcaggagagagctcttttatcttcaagaaaggtagcatactttggcacaatttgctatggaagtggctagagaatcacaagtgaggaatgttgaaggatgaattggagcagaaaattaagtattggtggatgttgtggctataaacaagtggaggtttatggagctaaaggaagacatgcaaggagatttcgttgctaaaaatgaagcatatgaggtatacacaaaatgttgggttactggaggaaacattgtctcccatggaagatgcagacgttgaagcctgaagctgaagcaatttttcttcagaggaaggaaggacagacttgcttgtttcggggggcaaaggtgaggctaaagttggataacgaaattgttggtgccttcaactatcttggagcagaagctaaagaaactgcttgagagtcaaagcgcagatgaggatgacaaaccatctgatccaaattaggacgatcatctaaacccaatgaagtttagcacaaagtagaagatggagagagaagctgaagcttaaatgagctgcttggtaagctggctaggacacggattgaggacgacctgaagccttgccgtgatcttattgagcagctgtttggaaaggagaagggttgacagatcaactggaatggagatgaagccgagcgatcaagagtcagctgcagcagcagtagcacgaccttactccatcctagagttgtgcactaggtggaggttgatgaagactttgccgcaaagatcgatgatgaatttctcgtcgttgaatcaggtggcacagctatgaatctggaatgtggaccaatcgtcatgtgactaattctgtttaaatcacttttttcttctaggagagagctcttttatattcatgaaagatagcctacttactttggcacaatttgctatgaaagtggacagagcatcacaactgaggaatgtatgttcatttaatggtataataataatggcatttgccttgtc

SEQ ID NO: 45140 - DNA, 2965 bp, Zea Mays
cgttcgtcccgagctcaatcccccgcgcgcggccccgagcaatccgccgtcgcaagcatgagcaagccaaagtttgtctctggcggaggtttggtacgcacgcaatcctactccccccgcctccccctacctgctccgaatcggataggctcgatggcgatgtgatgataagtagcagattgctcggggccgctccccagtcgagcgagagtgaagagtagtagcggagcggagcggaactgagtgtcgatcaccgactcgaatcgcggaggccggtacctggggatgagggttcaggacgaggacgtggacgacgatggcgaggtgaccgcgccaccgcagcacctggtgttcgcctactacttcaccggccacggcttcgggcacgccacccgcgccctcgaggtggtgaggcacctggtcgccgcggggcatgacgtgcacgtggtcaccgccgcgcccgagttcgtcttcaccatagagatcgcctcccccagcctccacatctgcaaggtcctgctcgactgcggcgccgtccaggccgacaccctcaccgtggaccgcctcgcctcgctcaagaagtaccaccagacgactgtggtgccccgggagtccatcctcaagaccgaggcggagtggctcaactccatcaaggccttgctccatggatggtcccagcgaagccgaccacgcctcccagcatcgccatgcccgcacctccaaccatcctcgccgacaagctagtgtccccgtccacatccgagatcctcacgcccgggccttggatggaagcccagaatcgccttccatcggggattctacaccacgcgtcgcgccccctccccgcacgcaagcccccgcctgcgcattctccgccaccccatcccctgtccagcgtgtgtgccatggcctccctcgaccagcggcacgcatacgccatcacccctcccaactgctcccacccgagattgtcgctgtccccatctatgcatcaggtctgcgcccgccgaggctgccctcgtcctccccaacggcaaatcgcgatgattatgcccccatccacgcgccgcttccccagttcagcatcaaagttggttgtcttgcaaaacagcttccccaacattttctgaaatctctccaaacaaagaagccacttatgaaaaagcttattggctgcttcacgcgctctttgtttttcaaccatactgtgacttgtgttttgttctatgatgttgtggctataaccaagtggaggtttatggagctaaaggaacatatgcaaggagattttggtgctgaaaatgaagcatatgaaaggtatacacagaatgttaggttattggaggaaacatggtgtcccatggaagatgctgatgttgagcctgaagctgaagcagcttttcttcagaggaaggaaggatggacttgctggtttcggaggcaaatgtgaggttgaagtcgggtaatgaaattgccaatggcttcaactatcttggagcagaagctgaagaaattgccgatgaggatggaaaaccatatgatccaaatgaggacgatcatctaaacccaatgaagttcagcacaaagcatatcagctatttggaaaggagaagccgagaagggttcctctattgataggtcaactggaatggagatgaagccgagcgatcaagagtcagctgcatcagtagcatggccttactctatcctagagttgtgcactatatggaggttgatgaagactttgctgcaaagatcgatgatgaaatcacctctttgaatcaggtggcacagctatgaatctggaatctggcccaatcgccatgtgactaattctgtttaaattatctttttcaaggagagagctcttttatcttcaagaaaggtagcatactttggcacaatttgctatggaagtggctagagaatcacaagtgaggaatgttgaaggatgaattggagcagaaaattaagtattggtggtgaggatgttgaaatctgcatggaaatttcctcaaaacctgagagcttcaaatgttattggctgcttcacgcgctctttgtttttcaaccatactgtgacttgtgttttgttctaggatgttgtggctataaacaagtggaggtttatggagctaaaggaagacatgcaaggagatttcgttgctaaaaatgaagcatatgaggtatacacaaaatgttgggttactggaggaaacattgtctcccatggaagatgcagacgttgaagcctgaagctgaagcaatttttcttcagaggaaggaaggacagacttgcttgtttcggggggcaaaggtgaggctaaagttggataacgaaattgttggtgccttcaactatcttggagcagaagctaaagaaactgcttgagagtcaaagcgcagatgaggatgacaaaccatctgatccaaattaggacgatcatctaaacccaatgaagtttagcacaaagtagaagatggagagagaagctgaagcttaaatgagctgcttggtaagctggctaggacacggattgaggacgacctgaagccttgccgtgatcttattgagcagctgtttggaaaggagaagggttgacagatcaactggaatggagatgaagccgagcgatcaagagtcagctgcagcagcagtagcacgaccttactccatcctagagttgtgcactaggtggaggttgatgaagactttgccgcaaagatcgatgatgaatttctcgtcgttgaatcaggtggcacagctatgaatctggaatgtggaccaatcgtcatgtgactaattctgtttaaatcacttttttcttctaggagagagctcttttatattcatgaaagatagcctacttactttggcacaatttgctatgaaagtggacagagcatcacaactgaggaatgtatgttcatttaatggtataataataatggcatttgccttgtc

SEQ ID NO: 45141 - DNA, 2266 bp, Zea Mays
aatacctccaccaacatcctccacttttgtgtggctggtggtgccaaagaatctcttatctctggcaacagcgcatcactcacacaatctgtcactccccgacacgcgcacgagctccactccccactccgcacccaacccaaggcgccactgccatggacgcgggcggtccgccgccgctgttcctcctgggcgccgtgctggccgcggcgctggggtggctgctcgtggtctggcgggcggcggcggggcggcggcggtccgcgtcggcgcggctgccgccggggagcacggggctgccgctcatcggggagacgctgcggctcatcgcggcgtacaagtcgccgaacccggagccgttcatcgacgagcgcgtggcgcggcacggcagcggggtgttcacgacgcacgtgttcggcgagcgcaccgtgttctccgccgacccggccttcaaccgcctgctgctggccgcggagggccgcgccgtgagctgcagctacccgtcgtccatcgccacgctgctgggcccgcggtcgctgctgctcacctcgggccccgcgcacaagcgcctccactcgctcacgctgacccgcctcggccgcccggcctcgccgccgctgctggcgcacatcgaccgcctcgtcctcgccaccatgaggggctgggaccgccccggcgccggcgccatgcgcctcctcgacgaggccaagaagatcaccttcaacctcaccgtgtggcagctcgtcagcatcgagcctgggccgtggaccgagagcgtccggcgcgagtacgtgaagctcgtcgacggcttcttctccatccccttccccttcgcctccctcctcccgttcaccgtctacggccaggccctcaaggcgaggaagaaggtggccggagctcttcgggaggtggtaaggaagaggatggacgacaaggcggaggacgactgtggcgccagtaagaagaacggggagaagaaggacatggtggaggagctcctcgaagcggagggcgggagcttctccgtggaggagatggtggacttctgcctgtccctgctggtggctgggtacgagaccacctccgtgctcatgacgctcgccgtcaagttcctcaccgagacacccaccgcactggcgcagctcaaggaagagcacgacagcatcagaggggtaaaaggcaaaggccaagctctggaatggagcgattacaagtcgatgccgtttacacaatgcgtgataagcgaaacgctgcgcgtggccaacctgatcagcggggtgttcaggcgtgcgaacaccgacatccacttcaaaggctacgtgatcccaaagggctgcaagatcttcgcgtcgttccgagccgtgcaccttagcctggaccactacgagaacgcccggaccttcgacccttggagatggcagcagagcgcggaaggggccagtctgttcacgccgttcggcggcgggccgcggctgtgcccgggctacgagctcgcccgggtggtggtttccgtcttcctccaccacctcgtcacgcgctttagctgggaggaagccgaggaggacaggattgtcttcttccccaccacgcggaccctcaagggataccccatcatcctacggcggcgaccggattgcgatgatctctgacctcatggctatgttctccccccttatcttcttcggatcaaggccgaaggctaagcattagatagagtaaggtggatgtcgtggctagtaggtgcatggtggtttctgccactcactcactcactcactctgttgtctgtttgttcctgttcctctctgttttctcttgctctgtaacctggacctggtacgagtcagcagccagcagcaaactcgcgttttgcctgtaaaatctaaaatctgatatgagatgcagatgcccccgcgactgagacggaagactgatgagacagaccatggggacgtcctgcggtgccggtgccgccgctcccttcatgctcgtgcatgcaacgttgttagctaggctgtcgcggtcgtcgccgaccccgcacatgtcgtcgttcctatgaggagaatgatgttgcttgtaagagcatctctacccgtgcacagtacctcaaataggtgcactatatagggccagtttggcagcctgcttcctcgcgtggaattcgcatttttccctgtgtcggcggcccacgcgggattttttcacgggtacggcactagcatgtttggaaggtagcctcgcagagttattggcccggtctcggccc

SEQ ID NO: 45142 - DNA, 153 bp, Zea Mays
gcggcccttgcttgccagaagccgcccggcgggttgagcccggcttggtacgtgacgctcgccgcaaggatcccgagcagaagcaggtacctttgcagcgtgccttggacgttgtgcacccaggtctccacaggcttgcagaagaacaccaga

SEQ ID NO: 45143 - DNA, 916 bp, Zea Mays
gccttttggggtggagttgggcgactttgcctccctttataagttctgggcggtcgtagtttgcttatctcgggttgcttgggctgtcgcgttccatgggccatggtcaagggtagtcgtcgccgatgaggcgatcacattgccacctgttaggctgcttcgatcgagctctttgtctcctctccctttccttcaggcgtcttcggggagttgcgatgtttcccgcgcagcgcaagcggccaccgaggtcgagatcaagctgcttcgtgccgcatctaggatatcatcgatttcggcgttcacatgggagctgtggtggcgctgctgatgagggagatttgcttttggatgaagggcgagaagacccgctggaaggtcacaacgaggtggccagtcatgttgtgattagggtgtcagctcattacatcgtgcgtgacgcacgttgatcgcgatgtatcgtgcctcggtgctgctttcctaaagtaataaagtgaacttcgttgcgtgacttttcgtgtcgcagggccctagagtctctcctcctccccctccccctcccctttttctgcgtgagcctttccgagtatcttccctcatttaaagacaagagagggggcacgagtgaccttgtccgcgggtctcattattcggtgcctccttttgcccatgaactgaagtagacctcccacgggggattgttcgaggaaatggtttgaccgccccgcccttgtctcagggttttctcttatcccccttgatgctaaagtgatttggaccaaggcattgagaaagcaacacctcataaagaagacattatgatttttaaaagacatctttacaatgttgttttatgtttacttttaaggaaagtgggtgacttaatgataggatcaatggatggcttcaaaactttgag

SEQ ID NO: 45144 - DNA, 2067 bp, Zea Mays
gaccatcaaagtgacacaggttgcgatgtttccaaataatccaggcccagatgcagttcagtttatagtgaaccacgcaacggtagaagttatattctgtgtgccccaaactctaagcgctattttaagctttattactcaaatgccgtgtgttcgtcttattgtggtggttggtggagatgattcaaatatgccatctgcaccagcaactactgaatgcaaaattatgacgtacaacaggctacacaatgagggaaagatgagtcctcaaacttttcgtccaccaaaacctgaagatatagccactatctgctacaccagtggcactactggcacaccaaagggagctgtactttctcatgagaacttaattgcaaatgtagcagggtcaagtttaggcattaagttttacccctctgatgtctatttgtatcactcctcaggtacatctcgtatctacctttggctcacatctatgagagagctaaccaggttgcattgcttcactatggtgttgccattggattctaccaaggggataacttgaagctgatggatgatttggctgttctgagaccaacaatattcgcaagtgttccccggttatataacaaaatttatgctgcaattacaaatgctgtgaaggagtctggggggttgagagaaaggttgtatcatactgcatacaatgccaagcgacatgcaatgataaatggtagaaacccatcacctatgtgggacaagttggtatttaacaaaattaaagctagacttggtggacgaatgaggcttatgacttcaggtgcttctccattgtcaccagatgtcatggaatttttaagaatatgcttcggtgaagttcttgaagggtatggaatgacagagacatcttgtgtcatcagtacaatgaatattggtgacagatcaattggacatgttggatctccaaatccttcttgtgaggttaaacttgtggacgtcccagaaatgaattatacttcggaggatcaaccgtatcctcgtggagagatttgtgttaggggacctataatattctgtggttactataaagatgaagtccaaacaagagaggtcattgatgaggatggttggttacatactggagacataggtttgtggctgcctggagggcgtctaaaaattatagataggaaaaagaacattttcaagttagctcaaggagaatacatagctccagagaagattgagaatgtctatgctaagtgcaagttcattgctcaatgctttatatatggtgatagtttcaactcttccctagttgccattgtagcagtcgaaccggatgtgttgaaggcttgggctgcatcagaaggaatccagtacgaggacttgagacagctctgtgctgatcctagagcaacagctgctgtcctggctgatatggattccattgcgaaggaagcacagctgagaggtttcgagtttgctaaagcggttactcttgttgctgagccgttcacattggataatggccttctcaccccaacattcaaggtcaagaggccgcaagccaaagcatactttgcaaaagagatctcagacatgtatgcacggttgctagagacagagttagctaggtcgaagttgtaacttgtgcggtatcaggagaagggccatcaatacagccgtacaggagattggattctgcatttttttattccacctcacgaaataagtagtaaaatctttttactgatacgggaaataacggatcatgccatgctccggagtcgatagtttttttcaccagacggggcagtgcttggcgcatgctgaatatatggttctagttataaagaaatgtttttacagagtgtatattgggtctgaacagctgccctggaaggtagttcacagaaaatatattggtattacaaatgcaatactaaaaaaattgtgtcttccgattgtattgtcagtcttttatcaacactagtggaagtgtacgcgctcggtacacgataaaaatattacatacaaaatgtttataaatacctatataatattaaatttattgatatgttg

SEQ ID NO: 45145 - DNA, 2141 bp, Zea Mays
gttagtccaaagcaagttggggtagactagagggtgcacgaattggtctatattttataaacagaccggagtggatcatacttgaccatgcttgtgcggcatactcatatgtatctgtgccgctttatgatactctcggcccagatgcagttcagtttatagtgaaccacgcaacggtagaagttatattctgtgtgccccaaactctaagcgctattttaagctttattactcaaatgccgtgtgttcgtcttattgtggtggttggtggagatgattcaaatatgccatctgcaccagcaactactgaatgcaaaattatgacgtacaacaggctacacaatgagggaaagatgagtcctcaaacttttcgtccaccaaaacctgaagatatagccactatctgctacaccagtggcactactggcacaccaaagggagctgtactttctcatgagaacttaattgcaaatgtagcagggtcaagtttaggcattaagttttacccctctgatgtgtacatctcgtatctacctttggctcacatctatgagagagctaaccaggttgcattgcttcactatggtgttgccattggattctaccaaggggataacttgaagctgatggatgatttggctgttctgagaccaacaatattcgcaagtgttccccggttatataacaaaatttatgctgcaattacaaatgctgtgaaggagtctggggggttgagagaaaggttgtatcatactgcatacaatgccaagcgacatgcaatgataaatggtagaaacccatcacctatgtgggacaagttggtatttaacaaaattaaagctagacttggtggacgaatgaggcttatgacttcaggtgcttctccattgtcaccagatgtcatggaatttttaagaatatgcttcggtgaagttcttgaagggtatggaatgacagagacatcttgtgtcatcagtacaatgaatattggtgacagatcaattggacatgttggatctccaaatccttcttgtgaggttaaacttgtggacgtcccagaaatgaattatacttcggaggatcaaccgtatcctcgtggagagatttgtgttaggggacctataatattctgtggttactataaagatgaagtccaaacaagagaggtcattgatgaggatggttggttacatactggagacataggtttgtggctgcctggagggcgtctaaaaattatagataggaaaaagaacattttcaagttagctcaaggagaatacatagctccagagaagattgagaatgtctatgctaagtgcaagttcattgctcaatgctttatatatggtgatagtttcaactcttccctagttgccattgtagcagtcgaaccggatgtgttgaaggcttgggctgcatcagaaggaatccagtacgaggacttgagacagctctgtgctgatcctagagcaacagctgctgtcctggctgatatggattccattgcgaaggaagcacagctgagaggtttcgagtttgctaaagcggttactcttgttgctgagccgttcacattggataatggccttctcaccccaacattcaaggtcaagaggccgcaagccaaagcatactttgcaaaagagatctcagacatgtatgcacggttgctagagacagagttagctaggtcgaagttgtaacttgtgcggtatcaggagaagggccatcaatacagccgtacaggagattggattctgcatttttttattccacctcacgaaataagtagtaaaatctttttactgatacgggaaataacggatcatgccatgctccggagtcgatagtttttttcaccagacggggcagtgcttggcgcatgctgaatatatggttctagttataaagaaatgtttttacagagtgtatattgggtctgaacagctgccctggaaggtagttcacagaaaatatattggtattacaaatgcaatactaaaaaaattgtgtcttccgattgtattgtcagtcttttatcaacactagtggaagtgtacgcgctcggtacacgataaaaatattacatacaaaatgtttataaatacctatataatattaaatttattgatatgttg

SEQ ID NO: 45146 - DNA, 2623 bp, Zea Mays
cccactttgtttagtgatggagactagagaggacgctggttgtttcatgcaaacgagatcctcttgccgttgcgatgcacatgtatcaacagtatgacatgctgctataaagtataaacaatggaaagcatagagaaactggctacagtgtcgttctgcctgagaagctgcacactggaaagtggaatgtgtacagatctgcacattctcctctaagattaataaataaattccctgataacccggagattggaacgctgcatgataattttgtatatgcagttgaaactttccgagattgtagatatttgggtacaagaatccgcccagacgggacagttggagactacaagtggatgacgtatggagaagctagcacgagcagaactgcaataggttctggtcttatttatcatggaatatctgaaggtgcacgaattggtctatattttataaacagaccggagtggatcatacttgaccatgcttgtgcggcatactcatatgtatctgtgccgctttatgatactctcggcccagatgcagttcagtttatagtgaaccacgcaacggtagaagttatattctgtgtgccccaaactctaagcgctattttaagctttattactcaaatgccgtgtgttcgtcttattgtggtggttggtggagatgattcaaatatgccatctgcaccagcaactactgaatgcaaaattatgacgtacaacaggctacacaatgagggaaagatgagtcctcaaacttttcgtccaccaaaacctgaagatatagccactatctgctacaccagtggcactactggcacaccaaagggagctgtactttctcatgagaacttaattgcaaatgtagcagggtcaagtttaggcattaagttttacccctctgatgtgtacatctcgtatctacctttggctcacatctatgagagagctaaccaggttgcattgcttcactatggtgttgccattggattctaccaaggggataacttgaagctgatggatgatttggctgttctgagaccaacaatattcgcaagtgttccccggttatataacaaaatttatgctgcaattacaaatgctgtgaaggagtctggggggttgagagaaaggttgtatcatactgcatacaatgccaagcgacatgcaatgataaatggtagaaacccatcacctatgtgggacaagttggtatttaacaaaattaaagctagacttggtggacgaatgaggcttatgacttcaggtgcttctccattgtcaccagatgtcatggaatttttaagaatatgcttcggtgaagttcttgaagggtatggaatgacagagacatcttgtgtcatcagtacaatgaatattggtgacagatcaattggacatgttggatctccaaatccttcttgtgaggttaaacttgtggacgtcccagaaatgaattatacttcggaggatcaaccgtatcctcgtggagagatttgtgttaggggacctataatattctgtggttactataaagatgaagtccaaacgtaacttgttatcattacacatctatttacatcctttaaataaatacatccattaaactttgataaatgtatttgaaaacctgcagaagagaggtcattgatgaggatggttggttacatactggagacataggtttgtggctgcctggagggcgtctaaaaattatagataggaaaaagaacattttcaagttagctcaaggagaatacatagctccagagaagattgagaatgtctatgctaagtgcaagttcattgctcaatgctttatatatggtgatagtttcaactcttccctagttgccattgtagcagtcgaaccggatgtgttgaaggcttgggctgcatcagaaggaatccagtacgaggacttgagacagctctgtgctgatcctagagcaacagctgctgtcctggctgatatggattccattgcgaaggaagcacagctgagaggtttcgagtttgctaaagcggttactcttgttgctgagccgttcacattggataatggccttctcaccccaacattcaaggtcaagaggccgcaagccaaagcatactttgcaaaagagatctcagacatgtatgcacggttgctagagacagagttagctaggtcgaagttgtaacttgtgcggtatcaggagaagggccatcaatacagccgtacaggagattggattctgcatttttttattccacctcacgaaataagtagtaaaatctttttactgatacgggaaataacggatcatgccatgctccggagtcgatagtttttttcaccagacggggcagtgcttggcgcatgctgaatatatggttctagttataaagaaatgtttttacagagtgtatattgggtctgaacagctgccctggaaggtagttcacagaaaatatattggtattacaaatgcaatactaaaaaaattgtgtcttccgattgtattgtcagtcttttatcaacactagtggaagtgtacgcgctcggtacacgataaaaatattacatacaaaatgtttataaatacctatataatattaaatttattgatatgttg

SEQ ID NO: 45147 - DNA, 2573 bp, Zea Mays
tcggttcccacgccaacaacgcatatccgccacctcggggggtccctccctcctcggcctcgcgcgcgccttcccacacatcctcctcccccccacgccacgaaacgccaaagggagggagcccgagcctagcaggagcagcgcaaggaaacaatggcgcgggaggagcaggagcagtccgcattgggcgccgcccacgtccaccaccaccagcctccggccggcggatgcggcctctccgccaaccccaccgccgccgcagccgagtacgcccacgaacagggctacagtgtcgttctgcctgagaagctgcacactggaaagtggaatgtgtacagatctgcacattctcctctaagattaataaataaattccctgataacccggagattggaacgctgcatgataattttgtatatgcagttgaaactttccgagattgtagatatttgggtacaagaatccgcccagacgggacagttggagactacaagtggatgacgtatggagaagctagcacgagcagaactgcaataggttctggtcttatttatcatggaatatctgaagcccagatgcagttcagtttatagtgaaccacgcaacggtagaagttatattctgtgtgccccaaactctaagcgctattttaagctttattactcaaatgccgtgtgttcgtcttattgtggtggttggtggagatgattcaaatatgccatctgcaccagcaactactgaatgcaaaattatgacgtacaacaggctacacaatgagggaaagatgagtcctcaaacttttcgtccaccaaaacctgaagatatagccactatctgctacaccagtggcactactggcacaccaaagggagctgtactttctcatgagaacttaattgcaaatgtagcagggtcaagtttaggcattaagttttacccctctgatgtgtacatctcgtatctacctttggctcacatctatgagagagctaaccaggttgcattgcttcactatggtgttgccattggattctaccaaggggataacttgaagctgatggatgatttggctgttctgagaccaacaatattcgcaagtgttccccggttatataacaaaatttatgctgcaattacaaatgctgtgaaggagtctggggggttgagagaaaggttgtatcatactgcatacaatgccaagcgacatgcaatgataaatggtagaaacccatcacctatgtgggacaagttggtatttaacaaaattaaagctagacttggtggacgaatgaggcttatgacttcaggtgcttctccattgtcaccagatgtcatggaatttttaagaatatgcttcggtgaagttcttgaagggtatggaatgacagagacatcttgtgtcatcagtacaatgaatattggtgacagatcaattggacatgttggatctccaaatccttcttgtgaggttaaacttgtggacgtcccagaaatgaattatacttcggaggatcaaccgtatcctcgtggagagatttgtgttaggggacctataatattctgtggttactataaagatgaagtccaaacaagagaggtcattgatgaggatggttggttacatactggagacataggtttgtggctgcctggagggcgtctaaaaattatagataggaaaaagaacattttcaagttagctcaaggagaatacatagctccagagaagattgagaatgtctatgctaagtgcaagttcattgctcaatgctttatatatggtgatagtttcaactcttccctagttgccattgtagcagtcgaaccggatgtgttgaaggcttgggctgcatcagaaggaatccagtacgaggacttgagacagctctgtgctgatcctagagcaacagctgctgtcctggctgatatggattccattgcgaaggaagcacagctgagaggtttcgagtttgctaaagcggttactcttgttgctgagccgttcacattggataatggccttctcaccccaacattcaaggtcaagaggccgcaagccaaagcatactttgcaaaagagatctcagacatgtatgcacggttgctagagacagagttagctaggtcgaagttgtaacttgtgcggtatcaggagaagggccatcaatacagccgtacaggagattggattctgcatttttttattccacctcacgaaataagtagtaaaatctttttactgatacgggaaataacggatcatgccatgctccggagtcgatagtttttttcaccagacggggcagtgcttggcgcatgctgaatatatggttctagttataaagaaatgtttttacagagtgtatattgggtctgaacagctgccctggaaggtagttcacagaaaatatattggtattacaaatgcaatactaaaaaaattgtgtcttccgattgtattgtcagtcttttatcaacactagtggaagtgtacgcgctcggtacacgataaaaatattacatacaaaatgtttataaatacctatataatattaaatttattgatatgttg

SEQ ID NO: 45148 - DNA, 2695 bp, Zea Mays
tcggttcccacgccaacaacgcatatccgccacctcggggggtccctccctcctcggcctcgcgcgcgccttcccacacatcctcctcccccccacgccacgaaacgccaaagggagggagcccgagcctagcaggagcagcgcaaggaaacaatggcgcgggaggagcaggagcagtccgcattgggcgccgcccacgtccaccaccaccagcctccggccggcggatgcggcctctccgccaaccccaccgccgccgcagccgagtacgcccacgaacagggctacagtgtcgttctgcctgagaagctgcacactggaaagtggaatgtgtacagatctgcacattctcctctaagattaataaataaattccctgataacccggagattggaacgctgcatgataattttgtatatgcagttgaaactttccgagattgtagatatttgggtacaagaatccgcccagacgggacagttggagatcaataaatattgcagctacaagtggatgacgtatggagaagctagcacgagcagaactgcaataggttctggtcttatttatcatggaatatctgaaggtgcacgaattggtctatattttataaacagaccggagtggatcatacttgaccatgcttgtgcggcatactcatatgtatctgtgccgctttatgatactctcggcccagatgcagttcagtttatagtgaaccacgcaacggtagaagttatattctgtgtgccccaaactctaagcgctattttaagctttattactcaaatgccgtgtgttcgtcttattgtggtggttggtggagatgattcaaatatgccatctgcaccagcaactactgaatgcaaaattatgacgtacaacaggctacacaatgagggaaagatgagtcctcaaacttttcgtccaccaaaacctgaagatatagccactatctgctacaccagtggcactactggcacaccaaagggagctgtactttctcatgagaacttaattgcaaatgtagcagggtcaagtttaggcattaagttttacccctctgatgtgtacatctcgtatctacctttggctcacatctatgagagagctaaccaggttgcattgcttcactatggtgttgccattggattctaccaaggggataacttgaagctgatggatgatttggctgttctgagaccaacaatattcgcaagtgttccccggttatataacaaaatttatgctgcaattacaaatgctgtgaaggagtctggggggttgagagaaaggttgtatcatactgcatacaatgccaagcgacatgcaatgataaatggtagaaacccatcacctatgtgggacaagttggtatttaacaaaattaaagctagacttggtggacgaatgaggcttatgacttcaggtgcttctccattgtcaccagatgtcatggaatttttaagaatatgcttcggtgaagttcttgaagggtatggaatgacagagacatcttgtgtcatcagtacaatgaatattggtgacagatcaattggacatgttggatctccaaatccttcttgtgaggttaaacttgtggacgtcccagaaatgaattatacttcggaggatcaaccgtatcctcgtggagagatttgtgttaggggacctataatattctgtggttactataaagatgaagtccaaacaagagaggtcattgatgaggatggttggttacatactggagacataggtttgtggctgcctggagggcgtctaaaaattatagataggaaaaagaacattttcaagttagctcaaggagaatacatagctccagagaagattgagaatgtctatgctaagtgcaagttcattgctcaatgctttatatatggtgatagtttcaactcttccctagttgccattgtagcagtcgaaccggatgtgttgaaggcttgggctgcatcagaaggaatccagtacgaggacttgagacagctctgtgctgatcctagagcaacagctgctgtcctggctgatatggattccattgcgaaggaagcacagctgagaggtttcgagtttgctaaagcggttactcttgttgctgagccgttcacattggataatggccttctcaccccaacattcaaggtcaagaggccgcaagccaaagcatactttgcaaaagagatctcagacatgtatgcacggttgctagagacagagttagctaggtcgaagttgtaacttgtgcggtatcaggagaagggccatcaatacagccgtacaggagattggattctgcatttttttattccacctcacgaaataagtagtaaaatctttttactgatacgggaaataacggatcatgccatgctccggagtcgatagtttttttcaccagacggggcagtgcttggcgcatgctgaatatatggttctagttataaagaaatgtttttacagagtgtatattgggtctgaacagctgccctggaaggtagttcacagaaaatatattggtattacaaatgcaatactaaaaaaattgtgtcttccgattgtattgtcagtcttttatcaacactagtggaagtgtacgcgctcggtacacgataaaaatattacatacaaaatgtttataaatacctatataatattaaatttattgatatgttg

SEQ ID NO: 45149 - DNA, 2682 bp, Zea Mays
ctaccctctcggttcccacgccaacaacgcatatccgccacctcggggggtccctccctcctcggcctcgcgcgcgccttcccacacatcctcctcccccccacgccacgaaacgccaaagggagggagcccgagcctagcaggagcagcgcaaggaaacaatggcgcgggaggagcaggagcagtccgcattgggcgccgcccacgtccaccaccaccagcctccggccggcggatgcggcctctccgccaaccccaccgccgccgcagccgagtacgcccacgggctacagtgtcgttctgcctgagaagctgcacactggaaagtggaatgtgtacagatctgcacattctcctctaagattaataaataaattccctgataacccggagattggaacgctgcatgataattttgtatatgcagttgaaactttccgagattgtagatatttgggtacaagaatccgcccagacgggacagttggagactacaagtggatgacgtatggagaagctagcacgagcagaactgcaataggttctggtcttatttatcatggaatatctgaaggtgcacgaattggtctatattttataaacagaccggagtggatcatacttgaccatgcttgtgcggcatactcatatgtatctgtgccgctttatgatactctcggcccagatgcagttcagtttatagtgaaccacgcaacggtagaagttatattctgtgtgccccaaactctaagcgctattttaagctttattactcaaatgccgtgtgttcgtcttattgtggtggttggtggagatgattcaaatatgccatctgcaccagcaactactgaatgcaaaattatgacgtacaacaggctacacaatgagggaaagatgagtcctcaaacttttcgtccaccaaaacctgaagatatagccactatctgctacaccagtggcactactggcacaccaaagggagctgtactttctcatgagaacttaattgcaaatgtagcagggtcaagtttaggcattaagttttacccctctgatgtgtacatctcgtatctacctttggctcacatctatgagagagctaaccaggttgcattgcttcactatggtgttgccattggattctaccaaggggataacttgaagctgatggatgatttggctgttctgagaccaacaatattcgcaagtgttccccggttatataacaaaatttatgctgcaattacaaatgctgtgaaggagtctggggggttgagagaaaggttgtatcatactgcatacaatgccaagcgacatgcaatgataaatggtagaaacccatcacctatgtgggacaagttggtatttaacaaaattaaagctagacttggtggacgaatgaggcttatgacttcaggtgcttctccattgtcaccagatgtcatggaatttttaagaatatgcttcggtgaagttcttgaagggtatggaatgacagagacatcttgtgtcatcagtacaatgaatattggtgacagatcaattggacatgttggatctccaaatccttcttgtgaggttaaacttgtggacgtcccagaaatgaattatacttcggaggatcaaccgtatcctcgtggagagatttgtgttaggggacctataatattctgtggttactataaagatgaagtccaaacaagagaggtcattgatgaggatggttggttacatactggagacataggtttgtggctgcctggagggcgtctaaaaattatagataggaaaaagaacattttcaagttagctcaaggagaatacatagctccagagaagattgagaatgtctatgctaagtgcaagttcattgctcaatgctttatatatggtgatagtttcaactcttccctagttgccattgtagcagtcgaaccggatgtgttgaaggcttgggctgcatcagaaggaatccagtacgaggacttgagacagctctgtgctgatcctagagcaacagctgctgtcctggctgatatggattccattgcgaaggaagcacagctgagaggtttcgagtttgctaaagcggttactcttgttgctgagccgttcacattggataatggccttctcaccccaacattcaaggtcaagaggccgcaagccaaagcatactttgcaaaagagatctcagacatgtatgcacggttgctagagacagagttagctaggtcgaagttgtaacttgtgcggtatcaggagaagggccatcaatacagccgtacaggagattggattctgcatttttttattccacctcacgaaataagtagtaaaatctttttactgatacgggaaataacggatcatgccatgctccggagtcgatagtttttttcaccagacggggcagtgcttggcgcatgctgaatatatggttctagttataaagaaatgtttttacagagtgtatattgggtctgaacagctgccctggaaggtagttcacagaaaatatattggtattacaaatgcaatactaaaaaaattgtgtcttccgattgtattgtcagtcttttatcaacactagtggaagtgtacgcgctcggtacacgataaaaatattacatacaaaatgtttataaatacctatataatattaaatttattgatatgttg

SEQ ID NO: 45150 - DNA, 3243 bp, Zea Mays
cgcaccatatcgctatccctaccctctcggttcccacgccaacaacgcatatccgccacctcggggggtccctccctcctcggcctcgcgcgcgccttcccacacatcctcctcccccccacgccacgaaacgccaaagggagggagcccgagcctagcaggagcagcgcaaggaaacaatggcgcgggaggagcaggagcagtccgcattgggcgccgcccacgtccaccaccaccagcctccggccggcggatgcggcctctccgccaaccccaccgccgccgcagccgagtacgcccacgcccccacagttttgatgcaggaaacggtggtgcgagtgaaaaaaagaagaagaggtgctgctctttcagtttggattttggaattcgcttctgctgtgcctgtgtcggctgattacggtgcacccactttgtttagtgatggagactagagaggacgctggttgtttcatgcaaacgagatcctcttgccgttgcgatgcacatgtatcaacagtatgacatgctgctataaagtataaacaatggaaagcatagagaaactgtatccctatattaatcgatgcagtgggcaggcttacgttcgaatctgtacactgttttttttttacaattaatgtggacatcaatggtttgctgctatctgttgcttacctgcccatcgcccaatacccatcggccccatttatatcattcccagtttcaactgttcatgtttcagtgagcgaccatttctcagaggcaacatgcatattttccatctgtatccaaacctaagatttcattagcacttgacttttcatgtctttttattcaacagaacagggctacagtgtcgttctgcctgagaagctgcacactggaaagtggaatgtgtacagatctgcacattctcctctaagattaataaataaattccctgataacccggagattggaacgctgcatgataattttgtatatgcagttgaaactttccgagattgtagatatttgggtacaagaatccgcccagacgggacagttggagactacaagtggatgacgtatggagaagctagcacgagcagaactgcaataggttctggtcttatttatcatggaatatctgaaggtgcacgaattggtctatattttataaacagaccggagtggatcatacttgaccatgcttgtgcggcatactcatatgtatctgtgccgctttatgatactctcggcccagatgcagttcagtttatagtgaaccacgcaacggtagaagttatattctgtgtgccccaaactctaagcgctattttaagctttattactcaaatgccgtgtgttcgtcttattgtggtggttggtggagatgattcaaatatgccatctgcaccagcaactactgaatgcaaaattatgacgtacaacaggctacacaatgagggaaagatgagtcctcaaacttttcgtccaccaaaacctgaagatatagccactatctgctacaccagtggcactactggcacaccaaagggagctgtactttctcatgagaacttaattgcaaatgtagcagggtcaagtttaggcattaagttttacccctctgatgtgtacatctcgtatctacctttggctcacatctatgagagagctaaccaggttgcattgcttcactatggtgttgccattggattctaccaaggggataacttgaagctgatggatgatttggctgttctgagaccaacaatattcgcaagtgttccccggttatataacaaaatttatgctgcaattacaaatgctgtgaaggagtctggggggttgagagaaaggttgtatcatactgcatacaatgccaagcgacatgcaatgataaatggtagaaacccatcacctatgtgggacaagttggtatttaacaaaattaaagctagacttggtggacgaatgaggcttatgacttcaggtgcttctccattgtcaccagatgtcatggaatttttaagaatatgcttcggtgaagttcttgaagggtatggaatgacagagacatcttgtgtcatcagtacaatgaatattggtgacagatcaattggacatgttggatctccaaatccttcttgtgaggttaaacttgtggacgtcccagaaatgaattatacttcggaggatcaaccgtatcctcgtggagagatttgtgttaggggacctataatattctgtggttactataaagatgaagtccaaacaagagaggtcattgatgaggatggttggttacatactggagacataggtttgtggctgcctggagggcgtctaaaaattatagataggaaaaagaacattttcaagttagctcaaggagaatacatagctccagagaagattgagaatgtctatgctaagtgcaagttcattgctcaatgctttatatatggtgatagtttcaactcttccctagttgccattgtagcagtcgaaccggatgtgttgaaggcttgggctgcatcagaaggaatccagtacgaggacttgagacagctctgtgctgatcctagagcaacagctgctgtcctggctgatatggattccattgcgaaggaagcacagctgagaggtttcgagtttgctaaagcggttactcttgttgctgagccgttcacattggataatggccttctcaccccaacattcaaggtcaagaggccgcaagccaaagcatactttgcaaaagagatctcagacatgtatgcacggttgctagagacagagttagctaggtcgaagttgtaacttgtgcggtatcaggagaagggccatcaatacagccgtacaggagattggattctgcatttttttattccacctcacgaaataagtagtaaaatctttttactgatacgggaaataacggatcatgccatgctccggagtcgatagtttttttcaccagacggggcagtgcttggcgcatgctgaatatatggttctagttataaagaaatgtttttacagagtgtatattgggtctgaacagctgccctggaaggtagttcacagaaaatatattggtattacaaatgcaatactaaaaaaattgtgtcttccgattgtattgtcagtcttttatcaacactagtggaagtgtacgcgctcggtacacgataaaaatattacatacaaaatgtttataaatacctatataatattaaatttattgatatgttg

SEQ ID NO: 45151 - DNA, 2746 bp, Zea Mays
ccccgaccgacgcgacggcgacgcaccatatcgctatccctaccctctcggttcccacgccaacaacgcatatccgccacctcggggggtccctccctcctcggcctcgcgcgcgccttcccacacatcctcctcccccccacgccacgaaacgccaaagggagggagcccgagcctagcaggagcagcgcaaggaaacaatggcgcgggaggagcaggagcagtccgcattgggcgccgcccacgtccaccaccaccagcctccggccggcggatgcggcctctccgccaaccccaccgccgccgcagccgagtacgcccacgaacagggctacagtgtcgttctgcctgagaagctgcacactggaaagtggaatgtgtacagatctgcacattctcctctaagattaataaataaattccctgataacccggagattggaacgctgcatgataattttgtatatgcagttgaaactttccgagattgtagatatttgggtacaagaatccgcccagacgggacagttggagactacaagtggatgacgtatggagaagctagcacgagcagaactgcaataggttctggtcttatttatcatggaatatctgaaggtgcacgaattggtctatattttataaacagaccggagtggatcatacttgaccatgcttgtgcggcatactcatatgtatctgtgccgctttatgatactctcggcccagatgcagttcagtttatagtgaaccacgcaacggtagaagttatattctgtgtgccccaaactctaagcgctattttaagctttattactcaaatgccgtgtgttcgtcttattgtggtggttggtggagatgattcaaatatgccatctgcaccagcaactactgaatgcaaaattatgacgtacaacaggctacacaatgagggaaagatgagtcctcaaacttttcgtccaccaaaacctgaagatatagccactatctgctacaccagtggcactactggcacaccaaagggagctgtactttctcatgagaacttaattgcaaatgtagcagggtcaagtttaggcattaagttttacccctctgatgtctatttgtatcactcctcaggtacatctcgtatctacctttggctcacatctatgagagagctaaccaggttgcattgcttcactatggtgttgccattggattctaccaaggggataacttgaagctgatggatgatttggctgttctgagaccaacaatattcgcaagtgttccccggttatataacaaaatttatgctgcaattacaaatgctgtgaaggagtctggggggttgagagaaaggttgtatcatactgcatacaatgccaagcgacatgcaatgataaatggtagaaacccatcacctatgtgggacaagttggtatttaacaaaattaaagctagacttggtggacgaatgaggcttatgacttcaggtgcttctccattgtcaccagatgtcatggaatttttaagaatatgcttcggtgaagttcttgaagggtatggaatgacagagacatcttgtgtcatcagtacaatgaatattggtgacagatcaattggacatgttggatctccaaatccttcttgtgaggttaaacttgtggacgtcccagaaatgaattatacttcggaggatcaaccgtatcctcgtggagagatttgtgttaggggacctataatattctgtggttactataaagatgaagtccaaacaagagaggtcattgatgaggatggttggttacatactggagacataggtttgtggctgcctggagggcgtctaaaaattatagataggaaaaagaacattttcaagttagctcaaggagaatacatagctccagagaagattgagaatgtctatgctaagtgcaagttcattgctcaatgctttatatatggtgatagtttcaactcttccctagttgccattgtagcagtcgaaccggatgtgttgaaggcttgggctgcatcagaaggaatccagtacgaggacttgagacagctctgtgctgatcctagagcaacagctgctgtcctggctgatatggattccattgcgaaggaagcacagctgagaggtttcgagtttgctaaagcggttactcttgttgctgagccgttcacattggataatggccttctcaccccaacattcaaggtcaagaggccgcaagccaaagcatactttgcaaaagagatctcagacatgtatgcacggttgctagagacagagttagctaggtcgaagttgtaacttgtgcggtatcaggagaagggccatcaatacagccgtacaggagattggattctgcatttttttattccacctcacgaaataagtagtaaaatctttttactgatacgggaaataacggatcatgccatgctccggagtcgatagtttttttcaccagacggggcagtgcttggcgcatgctgaatatatggttctagttataaagaaatgtttttacagagtgtatattgggtctgaacagctgccctggaaggtagttcacagaaaatatattggtattacaaatgcaatactaaaaaaattgtgtcttccgattgtattgtcagtcttttatcaacactagtggaagtgtacgcgctcggtacacgataaaaatattacatacaaaatgtttataaatacctatataatattaaatttattgatatgttg

SEQ ID NO: 45152 - DNA, 2751 bp, Zea Mays
ctccgtccgtccccgaccgacgcgacggcgacgcaccatatcgctatccctaccctctcggttcccacgccaacaacgcatatccgccacctcggggggtccctccctcctcggcctcgcgcgcgccttcccacacatcctcctcccccccacgccacgaaacgccaaagggagggagcccgagcctagcaggagcagcgcaaggaaacaatggcgcgggaggagcaggagcagtccgcattgggcgccgcccacgtccaccaccaccagcctccggccggcggatgcggcctctccgccaaccccaccgccgccgcagccgagtacgcccacgggctacagtgtcgttctgcctgagaagctgcacactggaaagtggaatgtgtacagatctgcacattctcctctaagattaataaataaattccctgataacccggagattggaacgctgcatgataattttgtatatgcagttgaaactttccgagattgtagatatttgggtacaagaatccgcccagacgggacagttggagactacaagtggatgacgtatggagaagctagcacgagcagaactgcaataggttctggtcttatttatcatggaatatctgaaggtgcacgaattggtctatattttataaacagaccggagtggatcatacttgaccatgcttgtgcggcatactcatatgtatctgtgccgctttatgatactctcggcccagatgcagttcagtttatagtgaaccacgcaacggtagaagttatattctgtgtgccccaaactctaagcgctattttaagctttattactcaaatgccgtgtgttcgtcttattgtggtggttggtggagatgattcaaatatgccatctgcaccagcaactactgaatgcaaaattatgacgtacaacaggctacacaatgagggaaagatgagtcctcaaacttttcgtccaccaaaacctgaagatatagccactatctgctacaccagtggcactactggcacaccaaagggagctgtactttctcatgagaacttaattgcaaatgtagcagggtcaagtttaggcattaagttttacccctctgatgtctatttgtatcactcctcaggtacatctcgtatctacctttggctcacatctatgagagagctaaccaggttgcattgcttcactatggtgttgccattggattctaccaaggggataacttgaagctgatggatgatttggctgttctgagaccaacaatattcgcaagtgttccccggttatataacaaaatttatgctgcaattacaaatgctgtgaaggagtctggggggttgagagaaaggttgtatcatactgcatacaatgccaagcgacatgcaatgataaatggtagaaacccatcacctatgtgggacaagttggtatttaacaaaattaaagctagacttggtggacgaatgaggcttatgacttcaggtgcttctccattgtcaccagatgtcatggaatttttaagaatatgcttcggtgaagttcttgaagggtatggaatgacagagacatcttgtgtcatcagtacaatgaatattggtgacagatcaattggacatgttggatctccaaatccttcttgtgaggttaaacttgtggacgtcccagaaatgaattatacttcggaggatcaaccgtatcctcgtggagagatttgtgttaggggacctataatattctgtggttactataaagatgaagtccaaacaagagaggtcattgatgaggatggttggttacatactggagacataggtttgtggctgcctggagggcgtctaaaaattatagataggaaaaagaacattttcaagttagctcaaggagaatacatagctccagagaagattgagaatgtctatgctaagtgcaagttcattgctcaatgctttatatatggtgatagtttcaactcttccctagttgccattgtagcagtcgaaccggatgtgttgaaggcttgggctgcatcagaaggaatccagtacgaggacttgagacagctctgtgctgatcctagagcaacagctgctgtcctggctgatatggattccattgcgaaggaagcacagctgagaggtttcgagtttgctaaagcggttactcttgttgctgagccgttcacattggataatggccttctcaccccaacattcaaggtcaagaggccgcaagccaaagcatactttgcaaaagagatctcagacatgtatgcacggttgctagagacagagttagctaggtcgaagttgtaacttgtgcggtatcaggagaagggccatcaatacagccgtacaggagattggattctgcatttttttattccacctcacgaaataagtagtaaaatctttttactgatacgggaaataacggatcatgccatgctccggagtcgatagtttttttcaccagacggggcagtgcttggcgcatgctgaatatatggttctagttataaagaaatgtttttacagagtgtatattgggtctgaacagctgccctggaaggtagttcacagaaaatatattggtattacaaatgcaatactaaaaaaattgtgtcttccgattgtattgtcagtcttttatcaacactagtggaagtgtacgcgctcggtacacgataaaaatattacatacaaaatgtttataaatacctatataatattaaatttattgatatgttg

SEQ ID NO: 45153 - DNA, 2658 bp, Zea Mays
ccgtctccgtccgtccccgaccgacgcgacggcgacgcaccatatcgctatccctaccctctcggttcccacgccaacaacgcatatccgccacctcggggggtccctccctcctcggcctcgcgcgcgccttcccacacatcctcctcccccccacgccacgaaacgccaaagggagggagcccgagcctagcaggagcagcgcaaggaaacaatggcgcgggaggagcaggagcagtccgcattgggcgccgcccacgtccaccaccaccagcctccggccggcggatgcggcctctccgccaaccccaccgccgccgcagccgagtacgcccacgggctacagtgtcgttctgcctgagaagctgcacactggaaagtggaatgtgtacagatctgcacattctcctctaagattaataaataaattccctgataacccggagattggaacgctgcatgataattttgtatatgcagttgaaactttccgagattgtagatatttgggtacaagaatccgcccagacgggacagttggagactacaagtggatgacgtatggagaagctagcacgagcagaactgcaataggttctggtcttatttatcatggaatatctgaaggtgcacgaattggtctatattttataaacagaccggagtggatcatacttgaccatgcttgtgcggcatactcatatgtatctgtgccgctttatgatactctcgattttaagctttattactcaaatgccgtgtgttcgtcttattgtggtggttggtggagatgattcaaatatgccatctgcaccagcaactactgaatgcaaaattatgacgtacaacaggctacacaatgagggaaagatgagtcctcaaacttttcgtccaccaaaacctgaagatatagccactatctgctacaccagtggcactactggcacaccaaagggagctgtactttctcatgagaacttaattgcaaatgtagcagggtcaagtttaggcattaagttttacccctctgatgtgtacatctcgtatctacctttggctcacatctatgagagagctaaccaggttgcattgcttcactatggtgttgccattggattctaccaaggggataacttgaagctgatggatgatttggctgttctgagaccaacaatattcgcaagtgttccccggttatataacaaaatttatgctgcaattacaaatgctgtgaaggagtctggggggttgagagaaaggttgtatcatactgcatacaatgccaagcgacatgcaatgataaatggtagaaacccatcacctatgtgggacaagttggtatttaacaaaattaaagctagacttggtggacgaatgaggcttatgacttcaggtgcttctccattgtcaccagatgtcatggaatttttaagaatatgcttcggtgaagttcttgaagggtatggaatgacagagacatcttgtgtcatcagtacaatgaatattggtgacagatcaattggacatgttggatctccaaatccttcttgtgaggttaaacttgtggacgtcccagaaatgaattatacttcggaggatcaaccgtatcctcgtggagagatttgtgttaggggacctataatattctgtggttactataaagatgaagtccaaacaagagaggtcattgatgaggatggttggttacatactggagacataggtttgtggctgcctggagggcgtctaaaaattatagataggaaaaagaacattttcaagttagctcaaggagaatacatagctccagagaagattgagaatgtctatgctaagtgcaagttcattgctcaatgctttatatatggtgatagtttcaactcttccctagttgccattgtagcagtcgaaccggatgtgttgaaggcttgggctgcatcagaaggaatccagtacgaggacttgagacagctctgtgctgatcctagagcaacagctgctgtcctggctgatatggattccattgcgaaggaagcacagctgagaggtttcgagtttgctaaagcggttactcttgttgctgagccgttcacattggataatggccttctcaccccaacattcaaggtcaagaggccgcaagccaaagcatactttgcaaaagagatctcagacatgtatgcacggttgctagagacagagttagctaggtcgaagttgtaacttgtgcggtatcaggagaagggccatcaatacagccgtacaggagattggattctgcatttttttattccacctcacgaaataagtagtaaaatctttttactgatacgggaaataacggatcatgccatgctccggagtcgatagtttttttcaccagacggggcagtgcttggcgcatgctgaatatatggttctagttataaagaaatgtttttacagagtgtatattgggtctgaacagctgccctggaaggtagttcacagaaaatatattggtattacaaatgcaatactaaaaaaattgtgtcttccgattgtattgtcagtcttttatcaacactagtggaagtgtacgcgctcggtacacgataaaaatattacatacaaaatgtttataaatacctatataatattaaatttattgatatgttg

SEQ ID NO: 45154 - DNA, 1805 bp, Zea Mays
tattcttccttctaaacatatttccgtgggctggcctgttgggctgctgtattttgtggaaagtttcggacagcccgtaaacttgggcccgttccggttcggcttagctttgctcttcttctccccgttcaccgactaaacaaataacatttttaataataataataataataaaatctcccgtggcctccttcttctccggttctcgctcgtgcccttctctcctggcggcgacggctgggcgagcggcgcggcccgttatcacttcccaggtcttcggcggcgacgagtttccaccaggctgaccggaacgcagtgggtggagaaccggtgagcagctgcagccatgtccgtggcggccggcgtgagcgacgcggccatcgcggtgcgcgacaagctccgtggaaagattggtcagaccaaggtcaaacggtactggccggggaaggcgcctgagtgggccgatgacgtcgatgaggacgtcgacctcaggacggcacgggtctccctcgacaaggcgttccccagggacgaggacggcgatgttcccgccaaggatgaccgccggctccgccggctcgcggagacccgcgcggagaataaggaggagctgagggcggatcaccgccgcatacggcaggcggagatcgtgtcaaccgcggaggaggagaacgagaggcaggaggctgacgccgacgaggaggatgaggaggcccaagaggagaggaggaggagaataagggcaaggcagctgctgagggagcaggaagagctgcttcctcaggaagaggaggaaccggtggaggccgaggagtctgaggaggaatctgagtacgagacagactctgaggatgagcagatgggaatggccatggtgaagcccgttttcataccaaagtcacagagagacaccatcgcggagcgcgaacggctggaggaggaggaacggcagcttgaggagctggtcaagaagaggctggaggctaggaagatcgagactagacagattgtggtcgaagagattagaaaggaggagcacatcgagaaggcactgaacgaagaggccaacatcgaggatgtcgatacagacgacgagttgaacgaagcagaggagtacgagtcgtggaaaaacagagaaatagcaaggattaagagggacagggaggaaagagatgcgaggttgaaggagaaggaggagatcgagaaagtcaggaatatgaccgaggaggagcgtcgcgaatgggagcggaagaatccgaagccgcttcgtcagacgaaacagaagtggaagtttatgcagaagtattaccacaaaggcgccttcttccaggaaggtgctgatgatgttatccagtcagcgggtaaagaggatatctacacccgtgatttctctgagcccactggagaagataagatggataagagcatcctgcccaaggtcatgcaagttaaacatttcgggcgcagcggcaggacgaaatggacgcatcttgttaatgaagacactacagattggaatgcaccatggtcaacaaatgggcctctgcgagcaaagtataatgcaaaaatggcaggcatgaatgcacctattgctaaaccaaagggaagtaagaagctgaaggattgggatgcaaaatgagatgccagggtgatggtagcaaggaaatggcttccgtggggaccaagtgaagataaaggaaaagcgacggcttgggcatatagaaacgaaggacatggttgtggtgaagaagaaagtgcttgcatttagtttttcactattcaagttagaagaagttatattgtga

SEQ ID NO: 45155 - DNA, 1833 bp, Zea Mays
tattcttccttctaaacatatttccgtgggctggcctgttgggctgctgtattttgtggaaagtttcggacagcccgtaaacttgggcccgttccggttcggcttagctttgctcttcttctccccgttcaccgactaaacaaataacatttttaataataataataataataaaatctcccgtggcctccttcttctccggttctcgctcgtgcccttctctcctggcggcgacggctgggcgagcggcgcggcccgttatcacttcccaggtcttcggcggcgacgagtttccaccaggctgaccggaacgcagtgggtggagaaccggtgagcagctgcagccatgtccgtggcggccggcgtgagcgacgcggccatcgcggtgcgcgacaagctccgtggaaagattggtcagaccaaggtcaaacggtactggccggggaaggcgcctgagtgggccgatgacgtcgatgaggacgtcgacctcaggacggcacgggtctccctcgacaaggcgttccccagggacgaggacggcgatgttcccgccaaggatgaccgccggctccgccggctcgcggagacccgcgcggagaataaggaggagctgagggcggatcaccgccgcatacggcaggcggagatcgtgtcaaccgcggaggaggagaacgagaggcaggaggctgacgccgacgaggaggatgaggaggcccaagaggagaggaggaggagaataagggcaaggcagctgctgagggagcaggaagagctgcttcctcaggaagaggaggaaccggtggaggccgaggagtctgaggaggaatctgagtacgagacagactctgaggatgagcagatgggaatggccatggtgaagcccgttttcataccaaagtcacagagagacaccatcgcggagcgcgaacggctggaggaggaggaacggcagcttgaggagctggtcaagaagaggctggaggctaggaagatcgagactagacagattgtggtcgaagagattagaaaggaggagcacatcgagaaggcactgaacgaagaggccaacatcgaggatgtcgatacagacgacgagttgaacgaagcagaggagtacgagtcgtggaaaaacagagaaatagcaaggattaagagggacagggaggaaagagatgcgaggttgaaggagaaggaggagatcgagaaagtcaggaatatgaccgaggaggagcgtcgcgaatgggagcggaagaatccgaagccgcttcgtcagacgaaacagaagtggaagtttatgcagaagtattaccacaaaggcgccttcttccaggaaggtgctgatgatgttatccagtcagcgggtaaagaggatatctacacccgtgatttctctgagcccactggagaagataagatggataagagcatcctgcccaaggtcatgcaagttaaacatttcgggcgcagcggcaggacgaaatggacgcatcttgttaatgaagacactacagattggaatgcacatggtcaacaaatgggcctctgcgagcaaagtataatgcaaaaatggcaggcatgaatgcacctattgctaaaccaaagggaagtaagaagctgaaggattgggatgcaaaatgagatgccaggttagctggtattatctaagcgttataagaactatgtagccaaaaagtgcaaacaatgcttatgcagatgctttcttctcattttgactgcataaacaatgtgacctttatgtgctattatctgttgaagtgtcccaatagtatgatgtgatgatccatgaatgatcattattattgacttcctgtg

SEQ ID NO: 45156 - DNA, 1644 bp, Zea Mays
gcgcttgcttctcttcgtctactctactgaactctacttccacaccttccccctccggccctccactccgcatcccgccccagtgtcccctccccctccctccacccccgcacccgcgatgccgtctcgctctccgacatccgcttcctgcgccggctcggcgccggcgacatcggcagcgtgtacctggccgaggtccgccgccccacccccaccgccggggccgccggcaaggagaagcacacctcgactttggcggcggcggcggtggtggtggccgccaaggtgatggaccgcaaggagctggaggggcgaaacaaggagggccgcgcgcgcacggagcgcgagatcctcgaggccgtcgaccacccattcctgccccgcctctacggcgtcgccgagggcgaccgatggtcctgcctcctcaccgagttctgccccggcggggacctccacgtgctccgccagcgccagccgcaccgccgcttctccgaggccgccgtcaggttctacgcggcggaggtggtggcggcgctggagtacatccacatgatggacatcgtgtaccgcgacctgaagccggagaacgtgctggtccgcggggacggccacatcatgctgaccgacttcgacctgtcgctcaagtgcgacccgacggcgccgacgccggcgcacgtcatctccgacccgctgtcgctggcggggcggtcgggcggcgccgcgtcgtccacgtcctcctgcgccatctcctcctcctgcatcgtgccggccgcctcctgcttccagctcttcccgggccgcgggcgcgggcgccggcgccgccggccccgctggctgcgcgcgggcaagaaaccgtccccgaacaacaacggcgggctggagctggagctcgtggcggagccggtggagctgcggtccacgtcgttcgtgggcacgcacgagtacctggctcccgagatcgtggccggggaagggcacggcagcgccgtggactggtggacgctgggggtcttcgtcttcgagctgctgtacggggctacgcccttcaagggccacgacaacgagatgacgctggccaacatcgtggcccgcgcgctcgagttcccccgggaccgcgacccgcccgcgtcgcccgccgcccgcgacctcgtcaccgcgctcctcgccaaggaccccgcccgccgcctcggcgccaccgtcggcgccgccgccatcaagcgccaccccttcttcgccggcgtcaactgggccctgctccgctgcgccccgccgccttacgtgccgccgccgttcagcatcgccaaggcggcggctgctgctggtggaggcggcgggaaagacgacgacgacgacgacgtgtcggacgacagttgtccctggctgcagcacgcatgtcataacctggcggccgccgtgccattggctccggctcctgtcctgccttggtcagtacaacccccctgtctctgtagccttctcgttctaatatactactatgttattaggggccggggtgctgcttggaacgcaggaattgtcagaggtgaacatcttgtgttccaagcaggacctcacaagtcagaactggtgtcgtatgttggagtcgtcacttgtgttgtgtatcgtgttcaccgttgcttgcaa

SEQ ID NO: 45157 - DNA, 1900 bp, Zea Mays
gcgcttgcttctcttcgtctactctactgaactctacttccacaccttccccctccggccctccactccgcatcccgccccagtgtcccctccccctccctccacccccgcacccgcgatgccgccggacagagaagacgccgcgggcgcgggcgcggacgtcgcggccgacgagctgcagagcgtgagcttcggctcgtcctcggaccgctcgcgctcgcgctcggcctccacggcgtccacggccacggcgtcctgctccacgtcctcgtcggggccgctacaccagcacctctcgctcccggccccgcgccgcaacccctccccctcccccgcgccaaccccaaccctgcccacgcagatcccgcgcctcggcgccgtctcgctctccgacatccgcttcctgcgccggctcggcgccggcgacatcggcagcgtgtacctggccgaggtccgccgccccacccccaccgccggggccgccggcaaggagaagcacacctcgactttggcggcggcggcggtggtggtggccgccaaggtgatggaccgcaaggagctggaggggcgaaacaaggagggccgcgcgcgcacggagcgcgagatcctcgaggccgtcgaccacccattcctgccccgcctctacggcgtcgccgagggcgaccgatggtcctgcctcctcaccgagttctgccccggcggggacctccacgtgctccgccagcgccagccgcaccgccgcttctccgaggccgccgtcaggttctacgcggcggaggtggtggcggcgctggagtacatccacatgatggacatcgtgtaccgcgacctgaagccggagaacgtgctggtccgcggggacggccacatcatgctgaccgacttcgacctgtcgctcaagtgcgacccgacggcgccgacgccggcgcacgtcatctccgacccgctgtcgctggcggggcggtcgggcggcgccgcgtcgtccacgtcctcctgcgccatctcctcctcctgcatcgtgccggccgcctcctgcttccagctcttcccgggccgcgggcgcgggcgccggcgccgccggccccgctggctgcgcgcgggcaagaaaccgtccccgaacaacaacggcgggctggagctggagctcgtggcggagccggtggagctgcggtccacgtcgttcgtgggcacgcacgagtacctggctcccgagatcgtggccggggaagggcacggcagcgccgtggactggtggacgctgggggtcttcgtcttcgagctgctgtacggggctacgcccttcaagggccacgacaacgagatgacgctggccaacatcgtggcccgcgcgctcgagttcccccgggaccgcgacccgcccgcgtcgcccgccgcccgcgacctcgtcaccgcgctcctcgccaaggaccccgcccgccgcctcggcgccaccgtcggcgccgccgccatcaagcgccaccccttcttcgccggcgtcaactgggccctgctccgctgcgccccgccgccttacgtgccgccgccgttcagcatcgccaaggcggcggctgctgctggtggaggcggcgggaaagacgacgacgacgacgacgtgtcggacgacagttgtccctggctgcagcacgcatgtcataacctggcggccgccgtgccattggctccggctcctgtcctgccttggtcagtacaacccccctgtctctgtagccttctcgttctaatatactactatgttattaggggccggggtgctgcttggaacgcaggaattgtcagaggtgaacatcttgtgttccaagcaggacctcacaagtcagaactggtgtcgtatgttggagtcgtcacttgtgttgtgtatcgtgttcaccgttgcttgcaa

SEQ ID NO: 45158 - DNA, 3321 bp, Zea Mays
catttttcttcctcactcctcacacagtcacactgtcgaccgcaccacgagtggccatgctccaactcgcccccacgccgctgccgtcgccggcggccgggcgtaggcctcgaccctcctccgcatgcatctgctgctcgagcgtacgcgcgctggaggaggcgaagcgggtggtgctggtgcggcacgggcagagcacgtggaacgccgagggccgcatccaggggagctccgacgcctccgtgctcacgcccaagggggaggcccaggccgagacctgccgccagatgctcgcctccgactccttcgacgcctgcttcaccagcccgctggcgcgctcccgccgcaccgccgagatcatctggcaggggcgtgggcgtgggcgtggcgacggcctcatcccggaccccgacctccgcgagatcgatctctactctttccagggactcctgaagcgcgaagggagggagaggtacggtcctctgtaccggcagtggcagaagaacgcggccgagttcagcatcgacggccactacccggtgcaggagctgtgggaccgcgcacggagctgctgggagaggattttggcgcaccggggcaagtcagtgctcgtggtcgcgcacaatgcagtgaaccaggcacttgttgccacctctttgggtggggtgcatcctgcatccgagcgtgggatcggagttcattgcgtgtctaagtgtgatcgaagctgatttcgtgctttcctcacggttcatgatgtttagggcttggcgcggagcactttcggattctgctccagagcaactgtggcgctagtgtgctggacttcaccccacgggctgggggaggtcctcctaccgtctgccttaaccgcttaaatcagaccccaaactctcctgtcgctgggggaagttctgcgggaagaaagacgagcaagaggatcattctggcctgtcaaggggctacacaaagcagttctgagcttgggtggaacgggatatgcgccgctgaacatgctcgggactatacagtctcagaagactgcggaactactcctggatttgaaggtcgacagcatcgtctgcagcccgcaggtggcagctgttgatgccgcgactatcatatgtgaggtccaagaagctgcagattgcttaggtgctgattgcgtgcctcgttacgtggaaacgaaaaggttgatagaacttgagattgaagacgcctttcaagcaaagcagaagagatttggggacataggcggcggcggcacggagtacaaatcactggagcgagtatgggctcggtccgaggatgcatggcaggcactgctcagggagttgccagatgacacatcggagcgtgttgttgtggccgtaggtcatcctgccattcacctagctctaatctgccggtgccttggtttgccgatggagtatctgtcttctttccacctggacgaaggcagcgtcagtgtgatcgatttcccagacggaccgagaggaagaggcgtcgtcagatgcacgaattacacggcccatctgggaagatgggcgatacccattacacggcccaactgaaaatgactaagaattctaatctaacatgctagttcccctctgtatagcatagcatcaccataccgatgtacgtacatatataaatcttgatctcagtatgtcaccaaggcaaatgatgaatatgtctattcggatgacgtcaagtggttatcagttcaagagaagagagaccagaccgatggattccgtttcgtgtggcatacaggacaggacaggaagagatgctgacaaaggctgatgcctcgatctgcatggcggaagaaggttcagggcttgagcaggagcatgccacatgtcttttctgctgccacgtgtagcgcttcaacttccagcagcacagcactgcactctacaggctgctgcaacgcctcgatcccatgcccatggccatccatgtcgagcgagcccaccatgcactctactctaactaatctaatggagtactcaacgccgcaccaggtgtccgggaaccagcagcacggttactccggcgatggccggccaagaggcacatccggcggggagtccgactccgacgacgacgccctcctcttcctcgccgtcccggcaggctggctcgtgcgcctgctcgcgttcctcggggagctcgtggcgtctgccatcctcggcctcgtcttccccgtcgcagccctcgtgggcgcgctgcgcgccctccccgcggcggccgcgtccagcctccggcgcgtggcgcgcggcctgctcgccgcggcgtgcaccttcgccgcactcgtggccgcgctgctcgtgtccgtgctcctgggcttcgttctcgtccggcgctgcgtcgagggcccggtcaccgtgcgccagcagctcttcttcgactacacggaggcgcagcccagcgccgcggtgctcctcggtggagcgcgaggcgccgtgctgccggcgggtcactccgtcagcgtgtccatggcgttgctccttcctgattcctaccacaaccgtgaggttggcatgttccagataaaagcagaggcggtctcggcaagtggagtcaccatggcatcagcgacacagccgcacatgcttcgttacaagagcggcccagtccggctggcgcagaccgcgctgctgtgcgtgccgctcactctgggcatgcgcagcgaggcccaggccgccagcctcagggtgctgcagtacagggaagggcacggccggcacaggagaacaggggccatcagagtgctgctgcagccgagagccgcgacggtgagcctgccccaggtgtacagggcagaggtggtcgtgcagacggcgcttccgtgggcgaagagcctggcgcgcgggttcaggtggacgctctgcgtgtgggtgtcctcctccgtgtacgccgtcctcgctgtttgctgggtccggcctctcgtgctgtccgcgaggaggaggccgtctggtgttcaggaggccgatggaaacttggcttctggtttgggtttagtagacatgggcgaccgcccaaggaaggaggcgtctgattgtcttgcagcgaggtggagagcgaggagaagcgagcggaaagcgcagctccgaacgcggttacatggaggcggcatggagctggaggccactgaggattcagcttctagtgttgcggtggtagagagagagaaagagcctggtgaggccgtgaatgatccttgagaatctggttgtgtacaatcgtcggtatctggtggtatcaactaattttaattaagggtgtttctatactactctacatctcgagcca

SEQ ID NO: 45159 - DNA, 3331 bp, Zea Mays
catttttcttcctcactcctcacacagtcacactgtcgaccgcaccacgagtggccatgctccaactcgcccccacgccgctgccgtcgccggcggccgggcgtaggcctcgaccctcctccgcatgcatctgctgctcgagcgtacgcgcgctggaggaggcgaagcgggtggtgctggtgcggcacgggcagagcacgtggaacgccgagggccgcatccaggggagctccgacgcctccgtgctcacgcccaagggggaggcccaggccgagacctgccgccagatgctcgcctccgactccttcgacgcctgcttcaccagcccgctggcgcgctcccgccgcaccgccgagatcatctggcaggggcgtgggcgtgggcgtggcgacggcctcatcccggaccccgacctccgcgagatcgatctctactctttccagggactcctgaagcgcgaagggagggagaggtacggtcctctgtaccggcagtggcagaagaacgcggccgagttcagcatcgacggccactacccggtgcaggagctgtgggaccgcgcacggagctgctgggagaggattttggcgcaccggggcaagtcagtgctcgtggtcgcgcacaatgcagtgaaccaggcacttgttgccacctctttgggtggggtgcatcctgcatccgagcgtgggatcggagttcattgcgtgtctaagtgtgatcgaagctgatttcgtgctttcctcacggttcatgatgtttagggcttggcgcggagcactttcggattctgctccagagcaactgtggcgctagtgtgctggacttcaccccacgggctgggggaggtcctcctaccgtctgccttaaccgcttaaatcagtacagaccccaaactctcctgtcgctgggggaagttctgcgggaagaaagacgagcaagaggatcattctggcctgtcaaggggctacacaaagcagttctgagattagcttgggtggaacgggatatgcgccgctgaacatgctcgggactatacagtctcagaagactgcggaactactcctggatttgaaggtcgacagcatcgtctgcagcccgcaggtggcagctgttgatgccgcgactatcatatgtgaggtccaagaagctgcagattgcttaggtgctgattgcgtgcctcgttacgtggaaacgaaaaggttgatagaacttgagattgaagacgcctttcaagcaaagcagaagagatttggggacataggcggcggcggcacggagtacaaatcactggagcgagtatgggctcggtccgaggatgcatggcaggcactgctcagggagttgccagatgacacatcggagcgtgttgttgtggccgtaggtcatcctgccattcacctagctctaatctgccggtgccttggtttgccgatggagtatctgtcttctttccacctggacgaaggcagcgtcagtgtgatcgatttcccagacggaccgagaggaagaggcgtcgtcagatgcacgaattacacggcccatctgggaagatgggcgatacccattacacggcccaactgaaaatgactaagaattctaatctaacatgctagttcccctctgtatagcatagcatcaccataccgatgtacgtacatatataaatcttgatctcagtatgtcaccaaggcaaatgatgaatatgtctattcggatgacgtcaagtggttatcagttcaagagaagagagaccagaccgatggattccgtttcgtgtggcatacaggacaggacaggaagagatgctgacaaaggctgatgcctcgatctgcatggcggaagaaggttcagggcttgagcaggagcatgccacatgtcttttctgctgccacgtgtagcgcttcaacttccagcagcacagcactgcactctacaggctgctgcaacgcctcgatcccatgcccatggccatccatgtcgagcgagcccaccatgcactctactctaactaatctaatggagtactcaacgccgcaccaggtgtccgggaaccagcagcacggttactccggcgatggccggccaagaggcacatccggcggggagtccgactccgacgacgacgccctcctcttcctcgccgtcccggcaggctggctcgtgcgcctgctcgcgttcctcggggagctcgtggcgtctgccatcctcggcctcgtcttccccgtcgcagccctcgtgggcgcgctgcgcgccctccccgcggcggccgcgtccagcctccggcgcgtggcgcgcggcctgctcgccgcggcgtgcaccttcgccgcactcgtggccgcgctgctcgtgtccgtgctcctgggcttcgttctcgtccggcgctgcgtcgagggcccggtcaccgtgcgccagcagctcttcttcgactacacggaggcgcagcccagcgccgcggtgctcctcggtggagcgcgaggcgccgtgctgccggcgggtcactccgtcagcgtgtccatggcgttgctccttcctgattcctaccacaaccgtgaggttggcatgttccagataaaagcagaggcggtctcggcaagtggagtcaccatggcatcagcgacacagccgcacatgcttcgttacaagagcggcccagtccggctggcgcagaccgcgctgctgtgcgtgccgctcactctgggcatgcgcagcgaggcccaggccgccagcctcagggtgctgcagtacagggaagggcacggccggcacaggagaacaggggccatcagagtgctgctgcagccgagagccgcgacggtgagcctgccccaggtgtacagggcagaggtggtcgtgcagacggcgcttccgtgggcgaagagcctggcgcgcgggttcaggtggacgctctgcgtgtgggtgtcctcctccgtgtacgccgtcctcgctgtttgctgggtccggcctctcgtgctgtccgcgaggaggaggccgtctggtgttcaggaggccgatggaaacttggcttctggtttgggtttagtagacatgggcgaccgcccaaggaaggaggcgtctgattgtcttgcagcgaggtggagagcgaggagaagcgagcggaaagcgcagctccgaacgcggttacatggaggcggcatggagctggaggccactgaggattcagcttctagtgttgcggtggtagagagagagaaagagcctggtgaggccgtgaatgatccttgagaatctggttgtgtacaatcgtcggtatctggtggtatcaactaattttaattaagggtgtttctatactactctacatctcgagcca

SEQ ID NO: 45160 - DNA, 3708 bp, Zea Mays
catttttcttcctcactcctcacacagtcacactgtcgaccgcaccacgagtggccatgctccaactcgcccccacgccgctgccgtcgccggcggccgggcgtaggcctcgaccctcctccgcatgcatctgctgctcgagcgtacgcgcgctggaggaggcgaagcgggtggtgctggtgcggcacgggcagagcacgtggaacgccgagggccgcatccaggggagctccgacgcctccgtgctcacgcccaagggggaggcccaggccgagacctgccgccagatgctcgcctccgactccttcgacgcctgcttcaccagcccgctggcgcgctcccgccgcaccgccgagatcatctggcaggggcgtgggcgtgggcgtggcgacggcctcatcccggaccccgacctccgcgagatcgatctctactctttccagggactcctgaagcgcgaagggagggagaggtacggtcctctgtaccggcagtggcagaagaacgcggccgagttcagcatcgacggccactacccggtgcaggagctgtgggaccgcgcacggagctgctgggagaggattttggcgcaccggggcaagtcagtgctcgtggtcgcgcacaatgcagtgaaccaggcacttgttgccacctctttgggtggggtgcatcctgcatccgagcgtgggatcggagttcattgcgtgtctaagtgtgatcgaagctgatttcgtgctttcctcacggttcatgatgtttagggcttggcgcggagcactttcggattctgctccagagcaactgtggcgctagtgtgctggacttcaccccacgggctgggggaggtcctcctaccgtctgccttaaccgcttaaatcaggtctgttagcatttccgcttggtaacaacttggagatcaaagaaatttcaccagacaatacagggaaaatggaagggtcaaacaattaaaacatggattaatctgcccccaaactgtatcttgtagtacagaccccaaactctcctgtcgctgggggaagttctgcgggaagaaagacgagcaagaggatcattctggcctgtcaaggggctacacaaagcagttctgaggtatggtttttttttttacttgttcgtgctcgtatcctattcccatcatgaggaagcactaacggattcgtttggcataccattctgtatgtaattcctgaaactgccatctgaaaattgagcgcgtcagtccagcccacagcccagcccagcttggtcttggttggcaattggcatgaaaactggagaaacaaacgcatccctaatcttagtgatgtacaccgttaattgtccattgctttgggttccagattagcttgggtggaacgggatatgcgccgctgaacatgctcgggactatacagtctcagaagactgcggaactactcctggatttgaaggtcgacagcatcgtctgcagcccgcaggtggcagctgttgatgccgcgactatcatatgtgaggtccaagaagctgcagattgcttaggtgctgattgcgtgcctcgttacgtggaaacgaaaaggttgatagaacttgagattgaagacgcctttcaagcaaagcagaagagatttggggacataggcggcggcggcacggagtacaaatcactggagcgagtatgggctcggtccgaggatgcatggcaggcactgctcagggagttgccagatgacacatcggagcgtgttgttgtggccgtaggtcatcctgccattcacctagctctaatctgccggtgccttggtttgccgatggagtatctgtcttctttccacctggacgaaggcagcgtcagtgtgatcgatttcccagacggaccgagaggaagaggcgtcgtcagatgcacgaattacacggcccatctgggaagatgggcgatacccattacacggcccaactgaaaatgactaagaattctaatctaacatgctagttcccctctgtatagcatagcatcaccataccgatgtacgtacatatataaatcttgatctcagtatgtcaccaaggcaaatgatgaatatgtctattcggatgacgtcaagtggttatcagttcaagagaagagagaccagaccgatggattccgtttcgtgtggcatacaggacaggacaggaagagatgctgacaaaggctgatgcctcgatctgcatggcggaagaaggttcagggcttgagcaggagcatgccacatgtcttttctgctgccacgtgtagcgcttcaacttccagcagcacagcactgcactctacaggctgctgcaacgcctcgatcccatgcccatggccatccatgtcgagcgagcccaccatgcactctactctaactaatctaatggagtactcaacgccgcaccaggtgtccgggaaccagcagcacggttactccggcgatggccggccaagaggcacatccggcggggagtccgactccgacgacgacgccctcctcttcctcgccgtcccggcaggctggctcgtgcgcctgctcgcgttcctcggggagctcgtggcgtctgccatcctcggcctcgtcttccccgtcgcagccctcgtgggcgcgctgcgcgccctccccgcggcggccgcgtccagcctccggcgcgtggcgcgcggcctgctcgccgcggcgtgcaccttcgccgcactcgtggccgcgctgctcgtgtccgtgctcctgggcttcgttctcgtccggcgctgcgtcgagggcccggtcaccgtgcgccagcagctcttcttcgactacacggaggcgcagcccagcgccgcggtgctcctcggtggagcgcgaggcgccgtgctgccggcgggtcactccgtcagcgtgtccatggcgttgctccttcctgattcctaccacaaccgtgaggttggcatgttccagataaaagcagaggcggtctcggcaagtggagtcaccatggcatcagcgacacagccgcacatgcttcgttacaagagcggcccagtccggctggcgcagaccgcgctgctgtgcgtgccgctcactctgggcatgcgcagcgaggcccaggccgccagcctcagggtgctgcagtacagggaagggcacggccggcacaggagaacaggggccatcagagtgctgctgcagccgagagccgcgacggtgagcctgccccaggtgtacagggcagaggtggtcgtgcagacggcgcttccgtgggcgaagagcctggcgcgcgggttcaggtggacgctctgcgtgtgggtgtcctcctccgtgtacgccgtcctcgctgtttgctgggtccggcctctcgtgctgtccgcgaggaggaggccgtctggtgttcaggaggccgatggaaacttggcttctggtttgggtttagtagacatgggcgaccgcccaaggaaggaggcgtctgattgtcttgcagcgaggtggagagcgaggagaagcgagcggaaagcgcagctccgaacgcggttacatggaggcggcatggagctggaggccactgaggattcagcttctagtgttgcggtggtagagagagagaaagagcctggtgaggccgtgaatgatccttgagaatctggttgtgtacaatcgtcggtatctggtggtatcaactaattttaattaagggtgtttctatactactctacatctcgagcca

SEQ ID NO: 45161 - DNA, 3356 bp, Zea Mays
catttttcttcctcactcctcacacagtcacactgtcgaccgcaccacgagtggccatgctccaactcgcccccacgccgctgccgtcgccggcggccgggcgtaggcctcgaccctcctccgcatgcatctgctgctcgagcgtacgcgcgctggaggaggcgaagcgggtggtgctggtgcggcacgggcagagcacgtggaacgccgagggccgcatccaggggagctccgacgcctccgtgctcacgcccaagggggaggcccaggccgagacctgccgccagatgctcgcctccgactccttcgacgcctgcttcaccagcccgctggcgcgctcccgccgcaccgccgagatcatctggcaggggcgtgggcgtgggcgtggcgacggcctcatcccggaccccgacctccgcgagatcgatctctactctttccagggactcctgaagcgcgaagggagggagaggtacggtcctctgtaccggcagtggcagaagaacgcggccgagttcagcatcgacggccactacccggtgcaggagctgtgggaccgcgcacggagctgctgggagaggattttggcgcaccggggcaagtcagtgctcgtggtcgcgcacaatgcagtgaaccaggcacttgttgccacctctttggggcttggcgcggagcactttcggattctgctccagagcaactgtggcgctagtgtgctggacttcaccccacgggctgggggaggtcctcctaccgtctgccttaaccgcttaaatcaggtctgttagcatttccgcttggtaacaacttggagatcaaagaaatttcaccagacaatacagggaaaatggaagggtcaaacaattaaaacatggattaatctgcccccaaactgtatcttgtagtacagaccccaaactctcctgtcgctgggggaagttctgcgggaagaaagacgagcaagaggatcattctggcctgtcaaggggctacacaaagcagttctgagattagcttgggtggaacgggatatgcgccgctgaacatgctcgggactatacagtctcagaagactgcggaactactcctggatttgaaggtcgacagcatcgtctgcagcccgcaggtggcagctgttgatgccgcgactatcatatgtgaggtccaagaagctgcagattgcttaggtgctgattgcgtgcctcgttacgtggaaacgaaaaggttgatagaacttgagattgaagacgcctttcaagcaaagcagaagagatttggggacataggcggcggcggcacggagtacaaatcactggagcgagtatgggctcggtccgaggatgcatggcaggcactgctcagggagttgccagatgacacatcggagcgtgttgttgtggccgtaggtcatcctgccattcacctagctctaatctgccggtgccttggtttgccgatggagtatctgtcttctttccacctggacgaaggcagcgtcagtgtgatcgatttcccagacggaccgagaggaagaggcgtcgtcagatgcacgaattacacggcccatctgggaagatgggcgatacccattacacggcccaactgaaaatgactaagaattctaatctaacatgctagttcccctctgtatagcatagcatcaccataccgatgtacgtacatatataaatcttgatctcagtatgtcaccaaggcaaatgatgaatatgtctattcggatgacgtcaagtggttatcagttcaagagaagagagaccagaccgatggattccgtttcgtgtggcatacaggacaggacaggaagagatgctgacaaaggctgatgcctcgatctgcatggcggaagaaggttcagggcttgagcaggagcatgccacatgtcttttctgctgccacgtgtagcgcttcaacttccagcagcacagcactgcactctacaggctgctgcaacgcctcgatcccatgcccatggccatccatgtcgagcgagcccaccatgcactctactctaactaatctaatggagtactcaacgccgcaccaggtgtccgggaaccagcagcacggttactccggcgatggccggccaagaggcacatccggcggggagtccgactccgacgacgacgccctcctcttcctcgccgtcccggcaggctggctcgtgcgcctgctcgcgttcctcggggagctcgtggcgtctgccatcctcggcctcgtcttccccgtcgcagccctcgtgggcgcgctgcgcgccctccccgcggcggccgcgtccagcctccggcgcgtggcgcgcggcctgctcgccgcggcgtgcaccttcgccgcactcgtggccgcgctgctcgtgtccgtgctcctgggcttcgttctcgtccggcgctgcgtcgagggcccggtcaccgtgcgccagcagctcttcttcgactacacggaggcgcagcccagcgccgcggtgctcctcggtggagcgcgaggcgccgtgctgccggcgggtcactccgtcagcgtgtccatggcgttgctccttcctgattcctaccacaaccgtgaggttggcatgttccagataaaagcagaggcggtctcggcaagtggagtcaccatggcatcagcgacacagccgcacatgcttcgttacaagagcggcccagtccggctggcgcagaccgcgctgctgtgcgtgccgctcactctgggcatgcgcagcgaggcccaggccgccagcctcagggtgctgcagtacagggaagggcacggccggcacaggagaacaggggccatcagagtgctgctgcagccgagagccgcgacggtgagcctgccccaggtgtacagggcagaggtggtcgtgcagacggcgcttccgtgggcgaagagcctggcgcgcgggttcaggtggacgctctgcgtgtgggtgtcctcctccgtgtacgccgtcctcgctgtttgctgggtccggcctctcgtgctgtccgcgaggaggaggccgtctggtgttcaggaggccgatggaaacttggcttctggtttgggtttagtagacatgggcgaccgcccaaggaaggaggcgtctgattgtcttgcagcgaggtggagagcgaggagaagcgagcggaaagcgcagctccgaacgcggttacatggaggcggcatggagctggaggccactgaggattcagcttctagtgttgcggtggtagagagagagaaagagcctggtgaggccgtgaatgatccttgagaatctggttgtgtacaatcgtcggtatctggtggtatcaactaattttaattaagggtgtttctatactactctacatctcgagcca

SEQ ID NO: 45162 - DNA, 3225 bp, Zea Mays
catttttcttcctcactcctcacacagtcacactgtcgaccgcaccacgagtggccatgctccaactcgcccccacgccgctgccgtcgccggcggccgggcgtaggcctcgaccctcctccgcatgcatctgctgctcgagcgtacgcgcgctggaggaggcgaagcgggtggtgctggtgcggcacgggcagagcacgtggaacgccgagggccgcatccaggggagctccgacgcctccgtgctcacgcccaagggggaggcccaggccgagacctgccgccagatgctcgcctccgactccttcgacgcctgcttcaccagcccgctggcgcgctcccgccgcaccgccgagatcatctggcaggggcgtgggcgtgggcgtggcgacggcctcatcccggaccccgacctccgcgagatcgatctctactctttccagggactcctgaagcgcgaagggagggagaggtacggtcctctgtaccggcagtggcagaagaacgcggccgagttcagcatcgacggccactacccggtgcaggagctgtgggaccgcgcacggagctgctgggagaggattttggcgcaccggggcaagtcagtgctcgtggtcgcgcacaatgcagtgaaccaggcacttgttgccacctctttggggcttggcgcggagcactttcggattctgctccagagcaactgtggcgctagtgtgctggacttcaccccacgggctgggggaggtcctcctaccgtctgccttaaccgcttaaatcagaccccaaactctcctgtcgctgggggaagttctgcgggaagaaagacgagcaagaggatcattctggcctgtcaaggggctacacaaagcagttctgagattagcttgggtggaacgggatatgcgccgctgaacatgctcgggactatacagtctcagaagactgcggaactactcctggatttgaaggtcgacagcatcgtctgcagcccgcaggtggcagctgttgatgccgcgactatcatatgtgaggtccaagaagctgcagattgcttaggtgctgattgcgtgcctcgttacgtggaaacgaaaaggttgatagaacttgagattgaagacgcctttcaagcaaagcagaagagatttggggacataggcggcggcggcacggagtacaaatcactggagcgagtatgggctcggtccgaggatgcatggcaggcactgctcagggagttgccagatgacacatcggagcgtgttgttgtggccgtaggtcatcctgccattcacctagctctaatctgccggtgccttggtttgccgatggagtatctgtcttctttccacctggacgaaggcagcgtcagtgtgatcgatttcccagacggaccgagaggaagaggcgtcgtcagatgcacgaattacacggcccatctgggaagatgggcgatacccattacacggcccaactgaaaatgactaagaattctaatctaacatgctagttcccctctgtatagcatagcatcaccataccgatgtacgtacatatataaatcttgatctcagtatgtcaccaaggcaaatgatgaatatgtctattcggatgacgtcaagtggttatcagttcaagagaagagagaccagaccgatggattccgtttcgtgtggcatacaggacaggacaggaagagatgctgacaaaggctgatgcctcgatctgcatggcggaagaaggttcagggcttgagcaggagcatgccacatgtcttttctgctgccacgtgtagcgcttcaacttccagcagcacagcactgcactctacaggctgctgcaacgcctcgatcccatgcccatggccatccatgtcgagcgagcccaccatgcactctactctaactaatctaatggagtactcaacgccgcaccaggtgtccgggaaccagcagcacggttactccggcgatggccggccaagaggcacatccggcggggagtccgactccgacgacgacgccctcctcttcctcgccgtcccggcaggctggctcgtgcgcctgctcgcgttcctcggggagctcgtggcgtctgccatcctcggcctcgtcttccccgtcgcagccctcgtgggcgcgctgcgcgccctccccgcggcggccgcgtccagcctccggcgcgtggcgcgcggcctgctcgccgcggcgtgcaccttcgccgcactcgtggccgcgctgctcgtgtccgtgctcctgggcttcgttctcgtccggcgctgcgtcgagggcccggtcaccgtgcgccagcagctcttcttcgactacacggaggcgcagcccagcgccgcggtgctcctcggtggagcgcgaggcgccgtgctgccggcgggtcactccgtcagcgtgtccatggcgttgctccttcctgattcctaccacaaccgtgaggttggcatgttccagataaaagcagaggcggtctcggcaagtggagtcaccatggcatcagcgacacagccgcacatgcttcgttacaagagcggcccagtccggctggcgcagaccgcgctgctgtgcgtgccgctcactctgggcatgcgcagcgaggcccaggccgccagcctcagggtgctgcagtacagggaagggcacggccggcacaggagaacaggggccatcagagtgctgctgcagccgagagccgcgacggtgagcctgccccaggtgtacagggcagaggtggtcgtgcagacggcgcttccgtgggcgaagagcctggcgcgcgggttcaggtggacgctctgcgtgtgggtgtcctcctccgtgtacgccgtcctcgctgtttgctgggtccggcctctcgtgctgtccgcgaggaggaggccgtctggtgttcaggaggccgatggaaacttggcttctggtttgggtttagtagacatgggcgaccgcccaaggaaggaggcgtctgattgtcttgcagcgaggtggagagcgaggagaagcgagcggaaagcgcagctccgaacgcggttacatggaggcggcatggagctggaggccactgaggattcagcttctagtgttgcggtggtagagagagagaaagagcctggtgaggccgtgaatgatccttgagaatctggttgtgtacaatcgtcggtatctggtggtatcaactaattttaattaagggtgtttctatactactctacatctcgagcca

SEQ ID NO: 45163 - DNA, 3334 bp, Zea Mays
catttttcttcctcactcctcacacagtcacactgtcgaccgcaccacgagtggccatgctccaactcgcccccacgccgctgccgtcgccggcggccgggcgtaggcctcgaccctcctccgcatgcatctgctgctcgagcgtacgcgcgctggaggaggcgaagcgggtggtgctggtgcggcacgggcagagcacgtggaacgccgagggccgcatccaggggagctccgacgcctccgtgctcacgcccaagggggaggcccaggccgagacctgccgccagatgctcgcctccgactccttcgacgcctgcttcaccagcccgctggcgcgctcccgccgcaccgccgagatcatctggcaggggcgtgggcgtgggcgtggcgacggcctcatcccggaccccgacctccgcgagatcgatctctactctttccagggactcctgaagcgcgaagggagggagaggtacggtcctctgtaccggcagtggcagaagaacgcggccgagttcagcatcgacggccactacccggtgcaggagctgtgggaccgcgcacggagctgctgggagaggattttggcgcaccggggcaagtcagtgctcgtggtcgcgcacaatgcagtgaaccagggcttggcgcggagcactttcggattctgctccagagcaactgtggcgctagtgtgctggacttcaccccacgggctgggggaggtcctcctaccgtctgccttaaccgcttaaatcaggtctgttagcatttccgcttggtaacaacttggagatcaaagaaatttcaccagacaatacagggaaaatggaagggtcaaacaattaaaacatggattaatctgcccccaaactgtatcttgtagtacagaccccaaactctcctgtcgctgggggaagttctgcgggaagaaagacgagcaagaggatcattctggcctgtcaaggggctacacaaagcagttctgagattagcttgggtggaacgggatatgcgccgctgaacatgctcgggactatacagtctcagaagactgcggaactactcctggatttgaaggtcgacagcatcgtctgcagcccgcaggtggcagctgttgatgccgcgactatcatatgtgaggtccaagaagctgcagattgcttaggtgctgattgcgtgcctcgttacgtggaaacgaaaaggttgatagaacttgagattgaagacgcctttcaagcaaagcagaagagatttggggacataggcggcggcggcacggagtacaaatcactggagcgagtatgggctcggtccgaggatgcatggcaggcactgctcagggagttgccagatgacacatcggagcgtgttgttgtggccgtaggtcatcctgccattcacctagctctaatctgccggtgccttggtttgccgatggagtatctgtcttctttccacctggacgaaggcagcgtcagtgtgatcgatttcccagacggaccgagaggaagaggcgtcgtcagatgcacgaattacacggcccatctgggaagatgggcgatacccattacacggcccaactgaaaatgactaagaattctaatctaacatgctagttcccctctgtatagcatagcatcaccataccgatgtacgtacatatataaatcttgatctcagtatgtcaccaaggcaaatgatgaatatgtctattcggatgacgtcaagtggttatcagttcaagagaagagagaccagaccgatggattccgtttcgtgtggcatacaggacaggacaggaagagatgctgacaaaggctgatgcctcgatctgcatggcggaagaaggttcagggcttgagcaggagcatgccacatgtcttttctgctgccacgtgtagcgcttcaacttccagcagcacagcactgcactctacaggctgctgcaacgcctcgatcccatgcccatggccatccatgtcgagcgagcccaccatgcactctactctaactaatctaatggagtactcaacgccgcaccaggtgtccgggaaccagcagcacggttactccggcgatggccggccaagaggcacatccggcggggagtccgactccgacgacgacgccctcctcttcctcgccgtcccggcaggctggctcgtgcgcctgctcgcgttcctcggggagctcgtggcgtctgccatcctcggcctcgtcttccccgtcgcagccctcgtgggcgcgctgcgcgccctccccgcggcggccgcgtccagcctccggcgcgtggcgcgcggcctgctcgccgcggcgtgcaccttcgccgcactcgtggccgcgctgctcgtgtccgtgctcctgggcttcgttctcgtccggcgctgcgtcgagggcccggtcaccgtgcgccagcagctcttcttcgactacacggaggcgcagcccagcgccgcggtgctcctcggtggagcgcgaggcgccgtgctgccggcgggtcactccgtcagcgtgtccatggcgttgctccttcctgattcctaccacaaccgtgaggttggcatgttccagataaaagcagaggcggtctcggcaagtggagtcaccatggcatcagcgacacagccgcacatgcttcgttacaagagcggcccagtccggctggcgcagaccgcgctgctgtgcgtgccgctcactctgggcatgcgcagcgaggcccaggccgccagcctcagggtgctgcagtacagggaagggcacggccggcacaggagaacaggggccatcagagtgctgctgcagccgagagccgcgacggtgagcctgccccaggtgtacagggcagaggtggtcgtgcagacggcgcttccgtgggcgaagagcctggcgcgcgggttcaggtggacgctctgcgtgtgggtgtcctcctccgtgtacgccgtcctcgctgtttgctgggtccggcctctcgtgctgtccgcgaggaggaggccgtctggtgttcaggaggccgatggaaacttggcttctggtttgggtttagtagacatgggcgaccgcccaaggaaggaggcgtctgattgtcttgcagcgaggtggagagcgaggagaagcgagcggaaagcgcagctccgaacgcggttacatggaggcggcatggagctggaggccactgaggattcagcttctagtgttgcggtggtagagagagagaaagagcctggtgaggccgtgaatgatccttgagaatctggttgtgtacaatcgtcggtatctggtggtatcaactaattttaattaagggtgtttctatactactctacatctcgagcca

SEQ ID NO: 45164 - DNA, 3835 bp, Zea Mays
ctaggcttcgtcgccggttccgccgaccgccgccgcttcgtgttcacctcagtcaagcgcccccgccgccccccaggtcgggggggcacagccttggggcgtgcgccctcggccccgtacggtcgccgaatctggcggatgcgccgcggattcctcctcgccgctgccgccgcgccgtcattcatggcgaggcgtcgccgggtggtgccagagccataacccatgctattcaacatcccacactgcaaatcacaagctcctgtaaccgtcgccgccgccgccgtcgcagctatctccagcccccgcttctcctccgcgtccttgcccctgccggcgctagttccgccgccgcctccgactccgctgccagaggagagcccgttcgccgcgctcctcgcctctgtgcccccgccgccggaacctctccgccaagtgctcgccacgggcgacgtccacgctgcgctccgcggcctcccgggcctcgcgcgccagctgttccggtgggcggaggccaccccgcgcggcttccccagctccgcctccgcgttcgcggccgtcctcgtcccgctcgcccacgccaaccacatccggaccgcctaccccgtgtcgctccgcgccctgcgcctcggtctcctcctccctgttctgtccctccttctctccactcccctctcttccgctctgcgctccctagtgagcctcctcctacgcttgtccaccaacttctcgacggaacgcgatactcgccacgccacgcccgccgcctgttcgacgctgtgccttgccgccttccgcctggtgacctgccacggcgtggcccctgatgtcagggactgcaaccgcgtcctgcgtgtgctccgtgacgcggccaggtgggacgacgtccgtgctgtatacggagagatgctccagctcagggttgagccgaccattgtcacgtacaacactttgctggattctttcctgaaggaggggagaaaggacgaggcttccatgctgctcaaggagatggaaacccaaggaggtggtttctcgctgaatgatgtcacgttcaatgtggtgattagtttcttggccagggaaggtcatctggagaacgcggtgaagctggttgacagtatgcggctgtccaagaaggcctcatccttcacttataacccacttatcactgcgttacttgaaaggggttttgtacgaaaggctgaggctttgcagatggagatggagaatgagggcattatgcctacagtggtgacatacaatgccatcattcatgggttgcttaaatgtgagcaggcagaggccgcacaggtgaaatttgcggaaatgagagcgatggggttactgccagacgtgatcacatacaattcgttgctaaataggtattgtaaggcaggtaatttgaaggaggctctctggttgcttggcgatttgaggcgtgcaggtttagcaccgacagttttgacatataacactcttatagatggttattgtagattaggtgatttagcggaagctaggagattgaaagaggaaatggtagagcaggggtgctttcctgacgtttgtacatatacaattctcatgaatggttcacgtaaggtgaggaaccttgctatggcaagagagttttttgatgagatgctaagcaaaggtttgcagccagattgctttgcctataatacaaggatttgtgcggagctaaccctaagttctactcctatggctttccagttgagggaggtgatgatgttgaaaggaatatatcctgatacagtaacatacaatgttattatcgatggactgtgcaagactggtaacctgaaagatgccaaacgtttaaagacgaagatggtcagtgatggtttacagcctgactgtatcacatacacctgcttgattcatgcacactgtgaaagaggactcctaagggaagcaaggaaacttcttaatggcatggtctcagatggtttgcaaccctcagttgtgacctacaccatattagttcacacatgctgtagaagaggaaacctttattcagcatatggttggttccggaagatgctggatgtgggaattgaacctaatgaaataacatataatgtgctcatacatgcactatgcatgacaggcagaactccgttggcttttcgtcattttcatgagatgctggaaaggggattagcgccaaacaaatacacatatactttattgatagatgggaactgtagagaaggtaactgggcagatgcaataagattgtattttgagatgcatcaaaatggtattcctccagattattgcacacataatgcattgttcaagggatttgatgaaggccacatgtaccatgcaatcgagtacatggagaatattgttttggggtgaataaattgtcctgctggccttgcatcacagatatttcgtgtaagaactttctcatgtattgcagatttctcgtcatcagcgtaccattatttagctttgctcatttcttcaaacatactttactcggagatgatatggtgtttgtgggcaaggcaatacctttcgtaagggaaaggaaaagagagtttgagacaatgttctctgatttatgttgctgggtgctttcaaaaggatagttgtgcacacaaatatctcctcttgctgctcaggagatcatagatggagtttgggtgggtgggtgggaactgtgaaaagatgaaaaacaagagtctggaaccatgatctcttagttaagaagttgggtgctttccaaaagaatagttgagcacaagcaagcctttctcttgtggcttaaacagtgtcagaattctttgcttggcattatactcatggagataattttttttttaaatggaaactggatggaaggaacacgctccggtttctgaagatcttgcatgatattctgctcttttgttatttccttttgattatatgtactggaaacctgaccgccatgaattcctgataccaactatgtcaaatagtaaatggctgtggggcttctgtgactgagctttcttcagttatacgtaggatttctgctgaggtctcttctcctacccaagagtgccttgagatttcgtttggcccatctatctaccagcatgaacatattttcacattgtgggacttatgatacttgattcatggaagggaagcttcttgatacagaactttcaatttgatgaaacagaccggtagtatttatgggacaaattcccaacttccagaagacaaataaatcacgaatatttcagggtggcgcatggctcttgcagcagaggggaaggtgtattgtttgcaatccagggggcagagggtcctctgctctggcacaattaatttcttgaaggcctgcctggacattttaaatgtgaaagaaagccaccaatagttgatggttgggacgattagtacagcatatacagctttactctgaaatctgagttgcatatttcattaacatgtatttggttgtatctgtgtgtttgcctgtgaggtatataccggaggcgtctccaaattgagtatcctcccatcaagacccacgagacatgtaacttctgcccaagatccagctggtcagcaagctctttgttatccagtgctttgctcttgacatccctccttgtatttgggtcacttttcccatactcagctctatcaaaagaaactaatgacgtgtttggttcgatgtaatgtaacggtatgggacttcttagggtatttgataacgttacatgtgtttgttataggctctattggaatcacatacattggaatcggataccgctgtatagaaaactcaaacccttccacccta

SEQ ID NO: 45165 - DNA, 3895 bp, Zea Mays
ccttacattaccagccgccgcctaggcttcgtcgccggttccgccgaccgccgccgcttcgtgttcacctcagtcaagcgcccccgccgccccccaggtcgggggggcacagccttggggcgtgcgccctcggccccgtacggtcgccgaatctggcggatgcgccgcggattcctcctcgccgctgccgccgcgccgtcattcatggcgaggcgtcgccgggtggtgccagagccataacccatgctattcaacatcccacactgcaaatcacaagctcctgtaaccgtcgccgccgccgccgtcgcagctatctccagcccccgcttctcctccgcgtccttgcccctgccggcgctagttccgccgccgcctccgactccgctgccagaggagagcccgttcgccgcgctcctcgcctctgtgcccccgccgccggaacctctccgccaagtgctcgccacgggcgacgtccacgctgcgctccgcggcctcccgggcctcgcgcgccagctgttccggtgggcggaggccaccccgcgcggcttccccagctccgcctccgcgttcgcggccgtcctcgtcccgctcgcccacgccaaccacatccggaccgcctaccccgtgtcgctccgcgccctgcgcctcggtctcctcctccctgttctgtccctccttctctccactcccctctcttccgctctgcgctccctagtgagcctcctcctacgcttgtccaccaacttctcgacggaacgcgatactcgccacgccacgcccgccgcctgttcgacgctgtgccttgccgccttccgcctggtgacctgccacggcgtggcccctgatgtcagggactgcaaccgcgtcctgcgtgtgctccgtgacgcggccaggtgggacgacgtccgtgctgtatacggagagatgctccagctcagggttgagccgaccattgtcacgtacaacactttgctggattctttcctgaaggaggggagaaaggacgaggcttccatgctgctcaaggagatggaaacccaaggaggtggtttctcgctgaatgatgtcacgttcaatgtggtgattagtttcttggccagggaaggtcatctggagaacgcggtgaagctggttgacagtatgcggctgtccaagaaggcctcatccttcacttataacccacttatcactgcgttacttgaaaggggttttgtacgaaaggctgaggctttgcagatggagatggagaatgagggcattatgcctacagtggtgacatacaatgccatcattcatgggttgcttaaatgtgagcaggcagaggccgcacaggtgaaatttgcggaaatgagagcgatggggttactgccagacgtgatcacatacaattcgttgctaaataggtattgtaaggcaggtaatttgaaggaggctctctggttgcttggcgatttgaggcgtgcaggtttagcaccgacagttttgacatataacactcttatagatggttattgtagattaggtgatttagcggaagctaggagattgaaagaggaaatggtagagcaggggtgctttcctgacgtttgtacatatacaattctcatgaatggttcacgtaaggtgaggaaccttgctatggcaagagagttttttgatgagatgctaagcaaaggtttgcagccagattgctttgcctataatacaaggatttgtgcggagctaaccctaagttctactcctatggctttccagttgagggaggtgatgatgttgaaaggaatatatcctgatacagtaacatacaatgttattatcgatggactgtgcaagactggtaacctgaaagatgccaaacgtttaaagacgaagatggtcagtgatggtttacagcctgactgtatcacatacacctgcttgattcatgcacactgtgaaagaggactcctaagggaagcaaggaaacttcttaatggcatggtctcagatggtttgcaaccctcagttgtgacctacaccatattagttcacacatgctgtagaagaggaaacctttattcagcatatggttggttccggaagatgctggatgtgggaattgaacctaatgaaataacatataatgtgctcatacatgcactatgcatgacaggcagaactccgttggcttttcgtcattttcatgagatgctggaaaggggattagcgccaaacaaatacacatatactttattgatagatgggaactgtagagaaggtaactgggcagatgcaataagattgtattttgagatgcatcaaaatggtattcctccagattattgcacacataatgcattgttcaagggatttgatgaaggccacatgtaccatgcaatcgagtacatggagaatattgttttggggtgaataaattgtcctgctggccttgcatcacagatatttcgtgtaagaactttctcatgtattgcagatttctcgtcatcagcgtaccattatttagctttgctcatttcttcaaacatactttactcggagatgatatggtgtttgtgggcaaggcaatacctttcgtaagggaaaggaaaagagagtttgagacaatgttctctgatttatgttgctgggtgctttcaaaaggatagttgtgcacacaaatatctcctcttgctgctcaggagatcatagatggagtttgggtgggtgggtgggaactgtgaaaagatgaaaaacaagagtctggaaccatgatctcttagttaagaagttgggtgctttccaaaagaatagttgagcacaagcaagcctttctcttgtggcttaaacagtgtcagaattctttgcttggcattatactcatggagataattttttttttaaatggaaactggatggaaggaacacgctccggtttctgaagatcttgcatgatattctgctcttttgttatttccttttgattatatgtactggaaacctgaccgccatgaattcctgataccaactatgtcaaatagtaaatggctgtggggcttctgtgactgagctttcttcagttatacgtaggatttctgctgaagtctcatcattttgaaaatatctactgtcaacagctgaggtctcttctcctacccaagagtgccttgagatttcgtttggcccatctatctaccagcatgaacatattttcacattgtgggacttatgatacttgattcatggaagggaagcttcttgatacagaactttcaatttgatgaaacagaccggtagtatttatgggacaaattcccaacttccagaagacaaataaatcacgaatatttcagggtggcgcatggctcttgcagcagaggggaaggtgtattgtttgcaatccagggggcagagggtcctctgctctggcacaattaatttcttgaaggcctgcctggacattttaaatgtgaaagaaagccaccaatagttgatggttgggacgattagtacagcatatacagctttactctgaaatctgagttgcatatttcattaacatgtatttggttgtatctgtgtgtttgcctgtgaggtatataccggaggcgtctccaaattgagtatcctcccatcaagacccacgagacatgtaacttctgcccaagatccagctggtcagcaagctctttgttatccagtgctttgctcttgacatccctccttgtatttgggtcacttttcccatactcagctctatcaaaagaaactaatgacgtgtttggttcgatgtaatgtaacggtatgggacttcttagggtatttgataacgttacatgtgtttgttataggctctattggaatcacatacattggaatcggataccgctgtatagaaaactcaaacccttccacccta

SEQ ID NO: 45166 - DNA, 4006 bp, Zea Mays
ctctggcgcacgtggcctctctcttctccgatccctccctctcgcactcgcggcgccgtcttccttacattaccagccgccgcctaggcttcgtcgccggttccgccgaccgccgccgcttcgtgttcacctcagtcaagcgcccccgccgccccccaggtcgggggggcacagccttggggcgtgcgccctcggccccgtacggtcgccgaatctggcggatgcgccgcggattcctcctcgccgctgccgccgcgccgtcattcatggcgaggcgtcgccgggtggtgccagagccataacccatgctattcaacatcccacactgcaaatcacaagctcctgtaaccgtcgccgccgccgccgtcgcagctatctccagcccccgcttctcctccgcgtccttgcccctgccggcgctagttccgccgccgcctccgactccgctgccagaggagagcccgttcgccgcgctcctcgcctctgtgcccccgccgccggaacctctccgccaagtgctcgccacgggcgacgtccacgctgcgctccgcggcctcccgggcctcgcgcgccagctgttccggtgggcggaggccaccccgcgcggcttccccagctccgcctccgcgttcgcggccgtcctcgtcccgctcgcccacgccaaccacatccggaccgcctaccccgtgtcgctccgcgccctgcgcctcggtctcctcctccctgttctgtccctccttctctccactcccctctcttccgctctgcgctccctagtgagcctcctcctacgcttgtccaccaacttctcgacggaacgcgatactcgccacgccacgcccgccgcctgttcgacgctgtgccttgccgccttccgcctggtgacctgccacggcgtggcccctgatgtcagggactgcaaccgcgtcctgcgtgtgctccgtgacgcggccaggtgggacgacgtccgtgctgtatacggagagatgctccagctcagggttgagccgaccattgtcacgtacaacactttgctggattctttcctgaaggaggggagaaaggacgaggcttccatgctgctcaaggagatggaaacccaaggaggtggtttctcgctgaatgatgtcacgttcaatgtggtgattagtttcttggccagggaaggtcatctggagaacgcggtgaagctggttgacagtatgcggctgtccaagaaggcctcatccttcacttataacccacttatcactgcgttacttgaaaggggttttgtacgaaaggctgaggctttgcagatggagatggagaatgagggcattatgcctacagtggtgacatacaatgccatcattcatgggttgcttaaatgtgagcaggcagaggccgcacaggtgaaatttgcggaaatgagagcgatggggttactgccagacgtgatcacatacaattcgttgctaaataggtattgtaaggcaggtaatttgaaggaggctctctggttgcttggcgatttgaggcgtgcaggtttagcaccgacagttttgacatataacactcttatagatggttattgtagattaggtgatttagcggaagctaggagattgaaagaggaaatggtagagcaggggtgctttcctgacgtttgtacatatacaattctcatgaatggttcacgtaaggtgaggaaccttgctatggcaagagagttttttgatgagatgctaagcaaaggtttgcagccagattgctttgcctataatacaaggatttgtgcggagctaaccctaagttctactcctatggctttccagttgagggaggtgatgatgttgaaaggaatatatcctgatacagtaacatacaatgttattatcgatggactgtgcaagactggtaacctgaaagatgccaaacgtttaaagacgaagatggtcagtgatggtttacagcctgactgtatcacatacacctgcttgattcatgcacactgtgaaagaggactcctaagggaagcaaggaaacttcttaatggcatggtctcagatggtttgcaaccctcagttgtgacctacaccatattagttcacacatgctgtagaagaggaaacctttattcagcatatggttggttccggaagatgctggatgtgggaattgaacctaatgaaataacatataatgtgctcatacatgcactatgcatgacaggcagaactccgttggcttttcgtcattttcatgagatgctggaaaggggattagcgccaaacaaatacacatatactttattgatagatgggaactgtagagaaggtaactgggcagatgcaataagattgtattttgagatgcatcaaaatggtattcctccagattattgcacacataatgcattgttcaagggatttgatgaaggccacatgtaccatgcaatcgagtacatggagaatattgttttggggtgaataaattgtcctgctggccttgcatcacagatatttcgtgtaagaactttctcatgtattgcagatttctcgtcatcagcgtaccattatttagctttgctcatttcttcaaacatactttactcggagatgatatggtgtttgtgggcaaggcaatacctttcgtaagggaaaggaaaagagagtttgagacaatgttctctgatttatgttgctgggtgctttcaaaaggatagttgtgcacacaaatatctcctcttgctgctcaggagatcatagatggagtttgggtgggtgggtgggaactgtgaaaagatgaaaaacaagagtctggaaccatgatctcttagttaagaagttgggtgctttccaaaagaatagttgagcacaagcaagcctttctcttgtggcttaaacagtgtcagaattctttgcttggcattatactcatggagataattttttttttaaatggaaactggatggaaggaacacgctccggtttctgaagatcttgcatgatattctgctcttttgttatttccttttgattatatgtactggaaacctgaccgccatgaattcctgataccaactatgtcaaatagtaaatggctgtggggcttctgtgactgagctttcttcagttatacgtaggatttctgtgctcatggactgaaggttttcatgatattatcatgtcatgctcctaaactgaagtctcatcattttgaaaatatctactgtcaacagctgaggtctcttctcctacccaagagtgccttgagatttcgtttggcccatctatctaccagcatgaacatattttcacattgtgggacttatgatacttgattcatggaagggaagcttcttgatacagaactttcaatttgatgaaacagaccggtagtatttatgggacaaattcccaacttccagaagacaaataaatcacgaatatttcagggtggcgcatggctcttgcagcagaggggaaggtgtattgtttgcaatccagggggcagagggtcctctgctctggcacaattaatttcttgaaggcctgcctggacattttaaatgtgaaagaaagccaccaatagttgatggttgggacgattagtacagcatatacagctttactctgaaatctgagttgcatatttcattaacatgtatttggttgtatctgtgtgtttgcctgtgaggtatataccggaggcgtctccaaattgagtatcctcccatcaagacccacgagacatgtaacttctgcccaagatccagctggtcagcaagctctttgttatccagtgctttgctcttgacatccctccttgtatttgggtcacttttcccatactcagctctatcaaaagaaactaatgacgtgtttggttcgatgtaatgtaacggtatgggacttcttagggtatttgataacgttacatgtgtttgttataggctctattggaatcacatacattggaatcggataccgctgtatagaaaactcaaacccttccacccta

SEQ ID NO: 45167 - DNA, 3973 bp, Zea Mays
ggccttctctggcgcacgtggcctctctcttctccgatccctccctctcgcactcgcggcgccgtcttccttacattaccagccgccgcctaggcttcgtcgccggttccgccgaccgccgccgcttcgtgttcacctcagtcaagcgcccccgccgccccccaggtcgggggggcacagccttggggcgtgcgccctcggccccgtacggtcgccgaatctggcggatgcgccgcggattcctcctcgccgctgccgccgcgccgtcattcatggcgaggcgtcgccgggtggtgccagagccataacccatgctattcaacatcccacactgcaaatcacaagctcctgtaaccgtcgccgccgccgccgtcgcagctatctccagcccccgcttctcctccgcgtccttgcccctgccggcgctagttccgccgccgcctccgactccgctgccagaggagagcccgttcgccgcgctcctcgcctctgtgcccccgccgccggaacctctccgccaagtgctcgccacgggcgacgtccacgctgcgctccgcggcctcccgggcctcgcgcgccagctgttccggtgggcggaggccaccccgcgcggcttccccagctccgcctccgcgttcgcggccgtcctcgtcccgctcgcccacgccaaccacatccggaccgcctaccccgtgtcgctccgcgccctgcgcctcggtctcctcctccctgttctgtccctccttctctccactcccctctcttccgctctgcgctccctagtgagcctcctcctacgcttgtccaccaacttctcgacggaacgcgatactcgccacgccacgcccgccgcctgttcgacgctgtgccttgccgccttccgcctggtgacctgccacggcgtggcccctgatgtcagggactgcaaccgcgtcctgcgtgtgctccgtgacgcggccaggtgggacgacgtccgtgctgtatacggagagatgctccagctcagggttgagccgaccattgtcacgtacaacactttgctggattctttcctgaaggaggggagaaaggacgaggcttccatgctgctcaaggagatggaaacccaaggaggtggtttctcgctgaatgatgtcacgttcaatgtggtgattagtttcttggccagggaaggtcatctggagaacgcggtgaagctggttgacagtatgcggctgtccaagaaggcctcatccttcacttataacccacttatcactgcgttacttgaaaggggttttgtacgaaaggctgaggctttgcagatggagatggagaatgagggcattatgcctacagtggtgacatacaatgccatcattcatgggttgcttaaatgtgagcaggcagaggccgcacaggtgaaatttgcggaaatgagagcgatggggttactgccagacgtgatcacatacaattcgttgctaaataggtattgtaaggcaggtaatttgaaggaggctctctggttgcttggcgatttgaggcgtgcaggtttagcaccgacagttttgacatataacactcttatagatggttattgtagattaggtgatttagcggaagctaggagattgaaagaggaaatggtagagcaggggtgctttcctgacgtttgtacatatacaattctcatgaatggttcacgtaaggtgaggaaccttgctatggcaagagagttttttgatgagatgctaagcaaaggtttgcagccagattgctttgcctataatacaaggatttgtgcggagctaaccctaagttctactcctatggctttccagttgagggaggtgatgatgttgaaaggaatatatcctgatacagtaacatacaatgttattatcgatggactgtgcaagactggtaacctgaaagatgccaaacgtttaaagacgaagatggtcagtgatggtttacagcctgactgtatcacatacacctgcttgattcatgcacactgtgaaagaggactcctaagggaagcaaggaaacttcttaatggcatggtctcagatggtttgcaaccctcagttgtgacctacaccatattagttcacacatgctgtagaagaggaaacctttattcagcatatggttggttccggaagatgctggatgtgggaattgaacctaatgaaataacatataatgtgctcatacatgcactatgcatgacaggcagaactccgttggcttttcgtcattttcatgagatgctggaaaggggattagcgccaaacaaatacacatatactttattgatagatgggaactgtagagaaggtaactgggcagatgcaataagattgtattttgagatgcatcaaaatggtattcctccagattattgcacacataatgcattgttcaagggatttgatgaaggccacatgtaccatgcaatcgagtacatggagaatattgttttggggtgaataaattgtcctgctggccttgcatcacagatatttcgtgtaagaactttctcatgtattgcagatttctcgtcatcagcgtaccattatttagctttgctcatttcttcaaacatactttactcggagatgatatggtgtttgtgggcaaggcaatacctttcgtaagggaaaggaaaagagagtttgagacaatgttctctgatttatgttgctgggtgctttcaaaaggatagttgtgcacacaaatatctcctcttgctgctcaggagatcatagatggagtttgggtgggtgggtgggaactgtgaaaagatgaaaaacaagagtctggaaccatgatctcttagttaagaagttgggtgctttccaaaagaatagttgagcacaagcaagcctttctcttgtggcttaaacagtgtcagaattctttgcttggcattatactcatggagataattttttttttaaatggaaactggatggaaggaacacgctccggtttctgaagatcttgcatgatattctgctcttttgttatttccttttgattatatgtactggaaacctgaccgccatgaattcctgataccaactatgtcaaatagtaaatggctgtggggcttctgtgactgagctttcttcagttatacgtaggatttctgtgctcatggactgaaggttttcatgatattatcatgtcatgctcctaaactgaggtctcttctcctacccaagagtgccttgagatttcgtttggcccatctatctaccagcatgaacatattttcacattgtgggacttatgatacttgattcatggaagggaagcttcttgatacagaactttcaatttgatgaaacagaccggtagtatttatgggacaaattcccaacttccagaagacaaataaatcacgaatatttcagggtggcgcatggctcttgcagcagaggggaaggtgtattgtttgcaatccagggggcagagggtcctctgctctggcacaattaatttcttgaaggcctgcctggacattttaaatgtgaaagaaagccaccaatagttgatggttgggacgattagtacagcatatacagctttactctgaaatctgagttgcatatttcattaacatgtatttggttgtatctgtgtgtttgcctgtgaggtatataccggaggcgtctccaaattgagtatcctcccatcaagacccacgagacatgtaacttctgcccaagatccagctggtcagcaagctctttgttatccagtgctttgctcttgacatccctccttgtatttgggtcacttttcccatactcagctctatcaaaagaaactaatgacgtgtttggttcgatgtaatgtaacggtatgggacttcttagggtatttgataacgttacatgtgtttgttataggctctattggaatcacatacattggaatcggataccgctgtatagaaaactcaaacccttccacccta

SEQ ID NO: 45168 - DNA, 3965 bp, Zea Mays
gtggccttctctggcgcacgtggcctctctcttctccgatccctccctctcgcactcgcggcgccgtcttccttacattaccagccgccgcctaggcttcgtcgccggttccgccgaccgccgccgcttcgtgttcacctcagtcaagcgcccccgccgccccccaggtcgggggggcacagccttggggcgtgcgccctcggccccgtacggtcgccgaatctggcggatgcgccgcggattcctcctcgccgctgccgccgcgccgtcattcatggcgaggcgtcgccgggtggtgccagagccataacccatgctattcaacatcccacactgcaaatcacaagctcctgtaaccgtcgccgccgccgccgtcgcagctatctccagcccccgcttctcctccgcgtccttgcccctgccggcgctagttccgccgccgcctccgactccgctgccagaggagagcccgttcgccgcgctcctcgcctctgtgcccccgccgccggaacctctccgccaagtgctcgccacgggcgacgtccacgctgcgctccgcggcctcccgggcctcgcgcgccagctgttccggtgggcggaggccaccccgcgcggcttccccagctccgcctccgcgttcgcggccgtcctcgtcccgctcgcccacgccaaccacatccggaccgcctaccccgtgtcgctccgcgccctgcgcctcggtctcctcctccctgttctgtccctccttctctccactcccctctcttccgctctgcgctccctagtgagcctcctcctacgcttgtccaccaacttctcgacggaacgcgatactcgccacgccacgcccgccgcctgttcgacgctgtgccttgccgccttccgcctggtgacctgccacggcgtggcccctgatgtcagggactgcaaccgcgtcctgcgtgtgctccgtgacgcggccaggtgggacgacgtccgtgctgtatacggagagatgctccagctcagggttgagccgaccattgtcacgtacaacactttgctggattctttcctgaaggaggggagaaaggacgaggcttccatgctgctcaaggagatggaaacccaaggaggtggtttctcgctgaatgatgtcacgttcaatgtggtgattagtttcttggccagggaaggtcatctggagaacgcggtgaagctggttgacagtatgcggctgtccaagaaggcctcatccttcacttataacccacttatcactgcgttacttgaaaggggttttgtacgaaaggctgaggctttgcagatggagatggagaatgagggcattatgcctacagtggtgacatacaatgccatcattcatgggttgcttaaatgtgagcaggcagaggccgcacaggtgaaatttgcggaaatgagagcgatggggttactgccagacgtgatcacatacaattcgttgctaaataggtattgtaaggcaggtaatttgaaggaggctctctggttgcttggcgatttgaggcgtgcaggtttagcaccgacagttttgacatataacactcttatagatggttattgtagattaggtgatttagcggaagctaggagattgaaagaggaaatggtagagcaggggtgctttcctgacgtttgtacatatacaattctcatgaatggttcacgtaaggtgaggaaccttgctatggcaagagagttttttgatgagatgctaagcaaaggtttgcagccagattgctttgcctataatacaaggatttgtgcggagctaaccctaagttctactcctatggctttccagttgagggaggtgatgatgttgaaaggaatatatcctgatacagtaacatacaatgttattatcgatggactgtgcaagactggtaacctgaaagatgccaaacgtttaaagacgaagatggtcagtgatggtttacagcctgactgtatcacatacacctgcttgattcatgcacactgtgaaagaggactcctaagggaagcaaggaaacttcttaatggcatggtctcagatggtttgcaaccctcagttgtgacctacaccatattagttcacacatgctgtagaagaggaaacctttattcagcatatggttggttccggaagatgctggatgtgggaattgaacctaatgaaataacatataatgtgctcatacatgcactatgcatgacaggcagaactccgttggcttttcgtcattttcatgagatgctggaaaggggattagcgccaaacaaatacacatatactttattgatagatgggaactgtagagaaggtaactgggcagatgcaataagattgtattttgagatgcatcaaaatggtattcctccagattattgcacacataatgcattgttcaagggatttgatgaaggccacatgtaccatgcaatcgagtacatggagaatattgttttggggtgaataaattgtcctgctggccttgcatcacagatatttcgtgtaagaactttctcatgtattgcagatttctcgtcatcagcgtaccattatttagctttgctcatttcttcaaacatactttactcggagatgatatggtgtttgtgggcaaggcaatacctttcgtaagggaaaggaaaagagagtttgagacaatgttctctgatttatgttgctgggtgctttcaaaaggatagttgtgcacacaaatatctcctcttgctgctcaggagatcatagatggagtttgggtgggtgggtgggaactgtgaaaagatgaaaaacaagagtctggaaccatgatctcttagttaagaagttgggtgctttccaaaagaatagttgagcacaagcaagcctttctcttgtggcttaaacagtgtcagaattctttgcttggcattatactcatggagataattttttttttaaatggaaactggatggaaggaacacgctccggtttctgaagatcttgcatgatattctgctcttttgttatttccttttgattatatgtactggaaacctgaccgccatgaattcctgataccaactatgtcaaatagtaaatggctgtggggcttctgtgactgagctttcttcagttatacgtaggatttctgtgctcatggactgaaggttttcatgatattatcatgtcatgctcctaaactgaggtctcttctcctacccaagagtgccttgagatttcgtttggcccatctatctaccagcatgaacatattttcacattgtgggacttatgatacttgattcatggaagggaagcttcttgatacagaactttcaatttgatgaaacagaccggtagtatttatgggacaaattcccaacttccagaagacaaataaatcacgggtggcgcatggctcttgcagcagaggggaaggtgtattgtttgcaatccagggggcagagggtcctctgctctggcacaattaatttcttgaaggcctgcctggacattttaaatgtgaaagaaagccaccaatagttgatggttgggacgattagtacagcatatacagctttactctgaaatctgagttgcatatttcattaacatgtatttggttgtatctgtgtgtttgcctgtgaggtatataccggaggcgtctccaaattgagtatcctcccatcaagacccacgagacatgtaacttctgcccaagatccagctggtcagcaagctctttgttatccagtgctttgctcttgacatccctccttgtatttgggtcacttttcccatactcagctctatcaaaagaaactaatgacgtgtttggttcgatgtaatgtaacggtatgggacttcttagggtatttgataacgttacatgtgtttgttataggctctattggaatcacatacattggaatcggataccgctgtatagaaaactcaaacccttccacccta

SEQ ID NO: 45169 - DNA, 2714 bp, Zea Mays
ttctcaggtgaagacaaagccctagacctcctctccggctctccctcccctcttctcccttctctctctctctttctcgggatagccaagggaaagggagaacaaaatcacagtacaaaagcaggccacaaggacaagatcttcctctggactgggggattctcacacccatagaaactgaacctactacactgtcatatcacacaagaagagagcttcagcgtgtgagcaagagcaactctcagaaaagaaacaactagtcaagagtcaagactgcctgcggcctgcctgccctccaaggctccaactctccgaggctccaaagtccaagctacttcggcgtccctgactgggcttgtggtctcagtctcagcccttcgttgccgcagagaaccctcagtagttccggttgctaattaattaatcgacgagaagtaggagggagcgctgatcgtgtgtgtgcggcatcgcaggatgggggatactagtagttctagccattcaaggcaggatccttctcttcttggctatggcttccatggcgccatcgccaactccactcctcctgcaaacttctttgaccaaggaggaggaggcacctatttcggagagctggaagaagcgttcatgcatcaggtcgcctcgctcagaagaactcaacaggctgcaaccgtctctgcacctcatcatggagacaccaagccctttcccactgctgctggtgctacagctgcaacggctacggctacggctaggccacctcctacactggacatcttcccagcttggcctatgaggtctcgtcttcacacgcccaaggagtgctcgaatgtgacagcagacagcacagacgactcggagagcagcagcaagaaccacagcaaccactcctcagaccagctcggagcagcagcagcagcaaacatggcgagccagttcgagcaagcttcacagcagcagcttcagcacaaaaatatggctacaagttccactccaagaactggcaaggctcttgatccaaaggtaatcagaaggctggctcagaatcgtgaggctgcacgcaaaagccggctgcggaagaaggcgtacattcagcagctcgagagctgtaagctgaagctttctcagatggaacaggacatgcagcgagcccgtacccaggttcacttcctagttcctaccccttcagctttgtttgggtactctagtattgacctcaatccacatgtattgagctaaattgagatttcacttaaattaatttacatcctaatctacctcaacacacatatggattgaggatttgaggtcaatattagagtaaccaaacaaaaccttctgtttccctgttagcttctgactgaacatctcaaattctgcaccgatggaaatatgaagttctgtgtgtcctgtcctaaacctttcagggcctctttcttggaggagatccgggtgcaagcaccagttcaggtgccgccatgtttgacgtggagtacgcccggtggctggacaaccacagccggcgcctggccgagctgaacggagccctacacgcgcacctggcagacggtgacctcagagccatcgtcgacgacgccctcacccaccacgacgagctgttccagctcaaggccatggcggccaaatccgacgtgttccacctcatcactggggtgtggacgacccccgccgagcgctgcttcctctggatgggtggattcaggccctccgatctgctcaagacactgctgccccagctagatccactgacagagcagcaagtggtcggcatatgcagccttcagcagtcatcacagcaggcagaggaagctctctcgcagggcttggagcagctgcatcagtcgcttgctgacaccatggccggtgggtctctgactgacgacgccaacatgagcttcatgagccaaatggctcttgccctcggcaaactggccaaccttgaaggctttgtgatacaggccgataacttgaggcaacagactcttcatcagatgcaccggattctgacagttcggcaggcagctcgatgtctcttggcaattggcgagtaccacaaccgccttcgtgccttaagttccctctgggcttctagacctcgagagatactggtgaccgatgaaggcaattgtgagataagcatcgcagcacaaccatcccaaaaccaattttcaaccttctgactgacacatgttgtggaactaaccctcagcataggagcaagagaaaaatgactgggaagagaatgactgggaagagagattgtttggatgcacgtagcagatatctgagagctacagaggaaagctgggaaatagaagaagctctaaaacaaggagtgtttctggaaattctttagttttcaaaaaacactttctgaaaatgtgtgtacaagaaaattccaggaaggtgaaattgcttcattgactgcagtgggaaggggaaagagagaagctagaatctcatgtcgagtactccagtacaatgtgttcttttgtctggtctaaattcttgtaacagctcttcctatgatggaagaatccattcaacaattccacctatgattactggattgagtatgttgaataggttggttgaggctatctagtaatttttatgactatgtttatccattatctaggactatttggttactatattatataatctttatcatatatacatccatttagttc

SEQ ID NO: 45170 - DNA, 2454 bp, Zea Mays
ttctcaggtgaagacaaagccctagacctcctctccggctctccctcccctcttctcccttctctctctctctttctcgggatagccaagggaaagggagaacaaaatcacagtacaaaagcaggccacaaggacaagatcttcctctggactgggggattctcacacccatagaaactgaacctactacactgtcatatcacacaagaagagagcttcagcgtgtgagcaagagcaactctcagaaaagaaacaactagtcaagagtcaagactgcctgcggcctgcctgccctccaaggctccaactctccgaggctccaaagtccaagctacttcggcgtccctgactgggcttgtggtctcagtctcagcccttcgttgccgcagagaaccctcagtagttccgctgcaggttgctaattaattaatcgacgagaagtaggagggagcgctgatcgtgtgtgtgcggcatcgcaggatgggggatactagtagttctagccattcaaggcaggatccttctcttcttggctatggcttccatggcgccatcgccaactccactcctcctgcaaacttctttgaccaaggaggaggaggcacctatttcggagagctggaagaagcgttcatgcatcaggtcgcctcgctcagaagaactcaacaggctgcaaccgtctctgcacctcatcatggagacaccaagccctttcccactgctgctggtgctacagctgcaacggctacggctacggctaggccacctcctacactggacatcttcccagcttggcctatgaggtctcgtcttcacacgcccaaggagtgctcgaatgtgacagcagacagcacagacgactcggagagcagcagcaagaaccacagcaaccactcctcagaccagctcggagcagcagcagcagcaaacatggcgagccagttcgagcaagcttcacagcagcagcttcagcacaaaaatatggctacaagttccactccaagaactggcaaggctcttgatccaaaggtaatcagaaggctggctcagaatcgtgaggctgcacgcaaaagccggctgcggaagaaggcgtacattcagcagctcgagagctgtaagctgaagctttctcagatggaacaggacatgcagcgagcccgtacccagggcctctttcttggaggagatccgggtgcaagcaccagttcaggtgccgccatgtttgacgtggagtacgcccggtggctggacaaccacagccggcgcctggccgagctgaacggagccctacacgcgcacctggcagacggtgacctcagagccatcgtcgacgacgccctcacccaccacgacgagctgttccagctcaaggccatggcggccaaatccgacgtgttccacctcatcactggggtgtggacgacccccgccgagcgctgcttcctctggatgggtggattcaggccctccgatctgctcaagacactgctgccccagctagatccactgacagagcagcaagtggtcggcatatgcagccttcagcagtcatcacagcaggcagaggaagctctctcgcagggcttggagcagctgcatcagtcgcttgctgacaccatggccggtgggtctctgactgacgacgccaacatgagcttcatgagccaaatggctcttgccctcggcaaactggccaaccttgaaggctttgtgatacaggccgataacttgaggcaacagactcttcatcagatgcaccggattctgacagttcggcaggcagctcgatgtctcttggcaattggcgagtaccacaaccgccttcgtgccttaagttccctctgggcttctagacctcgagagatactggtgaccgatgaaggcaattgtgagataagcatcgcagcacaaccatcccaaaaccaattttcaaccttctgactgacacatgttgtggaactaaccctcagcataggagcaagagaaaaatgactgggaagagaatgactgggaagagagattgtttggatgcacgtagcagatatctgagagctacagaggaaagctgggaaatagaagaagctctaaaacaaggagtgtttctggaaattctttagttttcaaaaaacactttctgaaaatgtgtgtacaagaaaattccaggaaggtgaaattgcttcattgactgcagtgggaaggggaaagagagaagctagaatctcatgtcgagtactccagtacaatgtgttcttttgtctggtctaaattcttgtaacagctcttcctatgatggaagaatccattcaacaattccacctatgattactggattgagtatgttgaataggttggttgaggctatctagtaatttttatgactatgtttatccattatctaggactatttggttactatattatataatctttatcatatatacatccatttagttc

SEQ ID NO: 45171 - DNA, 2805 bp, Zea Mays
ttctcaggtgaagacaaagccctagacctcctctccggctctccctcccctcttctcccttctctctctctctttctcgggatagccaagggaaagggagaacaaaatcacagtacaaaagcaggccacaaggacaagatcttcctctggactgggggattctcacacccatagaaactgaacctactacactgtcatatcacacaagaagagagcttcagcgtgtgagcaagagcaactctcagaaaagaaacaactagtcaagagtcaagactgcctgcggcctgcctgccctccaaggctccaactctccgaggctccaaagtccaagctacttcggcgtccctgactgggcttgtggtctcagtctcagcccttcgttgccgcagagaaccctcagtagttccggttgctaattaattaatcgacgagaagtaggagggagcgctgatcgtgtgtgtgcggcatcgcaggatgggggatactagtagttctagccattcaaggcaggatccttctcttcttggctatggcttccatggcgccatcgccaactccactcctcctgcaaacttctttgaccaaggaggaggaggcacctatttcggagagctggaagaagcgttcatgcatcaggtcgcctcgctcagaagaactcaacaggctgcaaccgtctctgcacctcatcatggagacaccaagccctttcccactgctgctggtgctacagctgcaacggctacggctacggctaggccacctcctacactggacatcttcccagcttggcctatgaggtctcgtcttcacacgcccaagacagcacagacgactcggagagcagcagcaagaaccacagcaaccactcctcagaccagctcggagcagcagcagcagcaaacatggcgagccagttcgagcaagcttcacagcagcagcttcagcacaaaaatatggctacaagttccactccaagaactggcaaggctcttgatccaaaggtaatcagaaggctggctcagaatcgtgaggctgcacgcaaaagccggctgcggaagaaggcgtacattcagcagctcgagagctgtaagctgaagctttctcagatggaacaggacatgcagcgagcccgtacccaggttcacttcctagttcctaccccttcagctttgtttgggtactctagtattgacctcaatccacatgtattgagctaaattgagatttcacttaaattaatttacatcctaatctacctcaacacacatatggattgaggatttgaggtcaatattagagtaaccaaacaaaaccttctgtttccctgttagcttctgactgaacatctcaaattctgcaccgatggaaatatgaagttctgtgtgtcctgtcctaaacctttcagggcctctttcttggaggagatccgggtgcaagcaccagttcaggtgcctcatctgatgatacatttctcggcgttctcttcagctgtgtacataccaactgccacggtatgccatttctctctgactgacgagtgacgagtggtgtacgtgtccaggtgccgccatgtttgacgtggagtacgcccggtggctggacaaccacagccggcgcctggccgagctgaacggagccctacacgcgcacctggcagacggtgacctcagagccatcgtcgacgacgccctcacccaccacgacgagctgttccagctcaaggccatggcggccaaatccgacgtgttccacctcatcactggggtgtggacgacccccgccgagcgctgcttcctctggatgggtggattcaggccctccgatctgctcaagacactgctgccccagctagatccactgacagagcagcaagtggtcggcatatgcagccttcagcagtcatcacagcaggcagaggaagctctctcgcagggcttggagcagctgcatcagtcgcttgctgacaccatggccggtgggtctctgactgacgacgccaacatgagcttcatgagccaaatggctcttgccctcggcaaactggccaaccttgaaggctttgtgatacaggccgataacttgaggcaacagactcttcatcagatgcaccggattctgacagttcggcaggcagctcgatgtctcttggcaattggcgagtaccacaaccgccttcgtgccttaagttccctctgggcttctagacctcgagagatactggtgaccgatgaaggcaattgtgagataagcatcgcagcacaaccatcccaaaaccaattttcaaccttctgactgacacatgttgtggaactaaccctcagcataggagcaagagaaaaatgactgggaagagaatgactgggaagagagattgtttggatgcacgtagcagatatctgagagctacagaggaaagctgggaaatagaagaagctctaaaacaaggagtgtttctggaaattctttagttttcaaaaaacactttctgaaaatgtgtgtacaagaaaattccaggaaggtgaaattgcttcattgactgcagtgggaaggggaaagagagaagctagaatctcatgtcgagtactccagtacaatgtgttcttttgtctggtctaaattcttgtaacagctcttcctatgatggaagaatccattcaacaattccacctatgattactggattgagtatgttgaataggttggttgaggctatctagtaatttttatgactatgtttatccattatctaggactatttggttactatattatataatctttatcatatatacatccatttagttc

SEQ ID NO: 45172 - DNA, 1796 bp, Zea Mays
gccgcatcccacccgcacccacctctccaagctcgccggaacaccggcggcgatcgtctcgacgccccctggccttgaaaaagtgcagcgcccggaagaagccttggctctcgtcgtcgtcgcaagatcacaagtccgtaacaagaagcaccaacaaaagtatcagggaatgctgaaagatgtgcttttatagaagatacttgagcggtctggtggcttttgcgcaaggtctgcaggcctgctcgtcccttgacttgagcagcggtcaccttgcctgcatccactctacctccttcagagtccgacccataaggcacagtccacctgattgacaacagaaagctagttctgtgcgtgatcacacagttttcatcaagataaaagatatgaacaccagagggaagactttgacggagcggtacgagatggggaagctgctggggaaaggcgcgttcgggaaggtgcactatgcaagggacctcgagtccaaccagggtgttgctatcaagatcatggacaaggacagggtgctcaaggccgggctctcagagcaggtaaagcgtgagatcacgactatgcggctggtggaacacaaaaacatcgttcgtctccatgaggtcatggcgacgcggaacaagatctacatcatcatggagtatgccaaagggggtgagctcatggacaagcttaagaggagcggcaggctcacggaggctgacgcacacagatacttcgagcagctcatcgatgcactggatcactgccacaaccgaggcgtgtaccaccgggacttgaagcctgagaacctactgttggatgagaatggggacctcaaggtgtctgactttggacttagcgcgttttcagagtcgaggaggacagatgggctgctccatacggtctgtgggacaccgatatatatagctccagaggtgatcatgaagacaggctatgatggtgcaaaatcagacatctggtcttgtggtgtcgtcctgtttgttcttgctgctggctacctccctttccagggcccaaacttgatggagatttatcggaagatacatgatagagatttcacgtgcccaagtaggttttcacacaaactcaagaggctgctatacaagatcctgaaccccaaccccagcatgagaccttcaattcaggagataaaagagtctacctggttccgaaaaggtcctagggagattagtgcagtgaacgagaaagttcttagcgagaatgccaccaccacaaatgctgccccagtgcttgcttctaggcacaaggagattgctcacgaagatatgaagtccttggttgccacaaacctcaatgcctttgaaatcatcgcgttatcagcagggttggacctgtctggtctgtttatcaaggagtgcaggaaggagacaagattcacttcagataagcctgcgttggccatcatctcaaagcttgaagacatcgcaaaagcactgaatctcaggataaggaagaaggacaacaacattgtcagcattgaagggaggaaggaggggggcaatggtgtccttcagtttgacatgcagatctttgagatcacaccatcctgccatctcgttcagatgaaacaaacaagtggtgatctacttgagtaccaaaaactattggaagagggcatccgaccagggttaaaggatgttgtctcggcctggcatggagatgatctgtagtagaagcagaagtagcttcggatgtctcccagagattctgttttagtacattccttattttttttagcaactacattcctttttttg

SEQ ID NO: 45173 - DNA, 286 bp, Zea Mays
taactgcttatcgtaatagaagatctcatatttcctcctgtaataaggagggattcttgctatctttagctcctaatagttgcttcgtggggaggccttgaagattttaatgcttagtttatttcttatggaaaggcttcacctttcctaatcgtgtattaattcatgcacttgagtactatcaggacctgtaataattacaactctttctatgatgtaaaacttgagatctggaattgtaaaagtatgttttgtaaagtcttccgctctatctccgaagtgtgtg

SEQ ID NO: 45174 - DNA, 296 bp, Zea Mays
cccagattcctcggaggttgtgtcggtcgtgtggtgctcgttccctactcctcgaaggagggattcttgctatctttagctcctaatagttgcttcgtggggaggccttgaagattttaatgcttagtttatttcttatggaaaggcttcacctttcctaatcgtgtattaattcatgcacttgagtactatcaggacctgtaataattacaactctttctatgatgtaaaacttgagatctggaattgtaaaagtatgttttgtaaagtcttccgctctatctccgaagtgtgtg

SEQ ID NO: 45175 - DNA, 2488 bp, Zea Mays
gtctgctccagcctccaggcattcggttccggctcctgcttccctctcccttctccggttctccccctccgccgcggagatggaggccaccgcgctcgcgtcccactcgtccccgttcgccgtccaccgctcgacagggaagccagccttcgcctacccccaccgtggagggccctcgatggtctcctctgtccacctccgcacgtcccggacccccgcccgctctgcggttggcatggagaaggcggaggagggggaccgggctggttgtgcgcgcggagatgttcggccagctcaccaccggcctcgagtccgcctggaacaagctgcgcggcgttggcgtgctaacaaaggaaaatattgccgaaccaatgcgggacattagacgagcacttctggaagcagattttgcctgttgtgagacggtttgtttcatctgttagtgataaggctttaggtgcaaatgctatcagaggagtccgaccagaccagcaattagtgaagattgtgcatgacgaactggtacaactgatgggtggagaggtatcggatattgtatttgcaaaaagtggcccgacagttatcttgcttgcaggtctacagggtgttgggaagactactgtctgtgcaaagcttgcgttctatttgaagaaactggggaagagttgtatgctggttgctgcagacatttacaggcctgcagccattgatcaactcactatactgggtaaacaggtgggtgtaccagtttactcagaaggaacagaagccaaacctacacaaataactaagaatgctatggaagaggcaaaaagcaagaatattgatgctattgtggtggatactgctggaaggctgcagattgatagatcaatgatggatgaattgaaagaagtgaagaaggctgttaatcctacagaagttctgcttgtcgttgatgccatgactggccaagaagcagcagcactagtcaccaccttcaatattgagattggtataactggtgcaatactgactaaattggatggtgactccaggggcggagccgcactaagcgttaaagaggtctctgggaggcccataaaatttgttgggcgtggggagcgattagaggaccttgagcttttctaccctgatcgcatggcacagcgagttctgggaatgggagacgtgctttcatttgtcgaaaagacacaagaagtgatgaggcaagaagaagctatagaattacagaagaagatcatgagtgcaaaattcgacttcaacgatttcttaaaacaatctcaaaacgttgcgaaaatgggttccatgagccgcattattggaatgatgccaggcatgaacaagataactcccgcacaaatccgagaagctgagaaaagacttgcattcgtggagtcaatgatcaatgccatgactgctgaggaaagggagaagccagagttactggctgaatcacgtgagaggaggataagagtggctgaggagtctggaaagactgaacaagaggtgagtcaattggttgcccagcttttccaaatgcgtgctcagatgcagaagttgatgggtatggtgcaaggacaagaagcaatagctggcatgggagatctcatggactcgcttaaatctgaagagaaggcacctcctggcaccgcgcggcggaagagaaggaataacacgtctaagcagagggacctggacgcagtgctgagctagtgagtagtggcctagtgtgctgtattatgaaaatgcataggtgggcactgaacctgtgtaattgcggttaattcggcacacattttttttgtacataacgtttagtcccatgagggaagatatgttggtcgctcttgaaattggagtaggttgtcatgaggacatatctagtgcacatagaagattggtgtacatgatgtacatattaaattaccaccactcattttagatttaacgtctctagttgatcattcaatttacaaataacacatttcactactacacaccaccacgttggatgatgtttttagcaaaatataccaaacaactagagacgttaaatctaaaataagtggtgatgatttaatatgtgcatcatgtgcatcaatctttcatgtgcattagatatgttctctgttgtcatacagggcccagaagaactcaggtcttgtaccggaggcctggagcccagtatctttcagttgcaacacttgatgtaaaaaaataagaaaaaacattttacctttcttagtttaagtttactcctcaagcaccaaaaccaaacatcttgctccttgaactctcaaaaacactcaaattatctccttgacctgaattcaagtggttataaaggtggttttgtcttttgtttagttaaaaaattcataagtacttgatagggttttagccatagaatatgtttctaaccttttaaaaattccaaaaaaaaatcatagagatacattcggacaacaacaatcaaagtaaaata

SEQ ID NO: 45176 - DNA, 2413 bp, Zea Mays
gtctgctccagcctccaggcattcggttccggctcctgcttccctctcccttctccggttctccccctccgccgcggagatggaggccaccgcgctcgcgtcccactcgtccccgttcgccgtccaccgctcgacagggaagccagccttcgcctacccccaccgtggagggccctcgatggtctcctctgtccacctccgcacgtcccggacccccgcccgctctgcggttggcatggagaaggcggaggagggggaccgggctggttgtgcgcgcggagatgttcggccagctcaccaccggcctcgagtccgcctggaacaagctgcgcggcgttggcgtgctaacaaaggaaaatattgccgaaccaatgcgggacattagacgagcacttctggaagcagatgtcagttccttgcattttcaagttagtttgcctgttgtgagacggtttgtttcatctgttagtgataaggctttaggtgcaaatgctatcagaggagtccgaccagaccagcaattagtgaagattgtgcatgacgaactggtacaactgatgggtggagaggtatcggatattgtatttgcaaaaagtggcccgacagttatcttgcttgcaggtctacagggtgttgggaagactactgtctgtgcaaagcttgcgttctatttgaagaaactggggaagagttgtatgctggttgctgcagacatttacaggcctgcagccattgatcaactcactatactgggtaaacaggtgggtgtaccagtttactcagaaggaacagaagccaaacctacacaaataactaagaatgctatggaagaggcaaaaagcaagaatattgatgctattgtggtggatactgctggaaggctgcagattgatagatcaatgatggatgaattgaaagaagtgaagaaggctgttaatcctacagaagttctgcttgtcgttgatgccatgactggccaagaagcagcaggtctctgggaggcccataaaatttgttgggcgtggggagcgattagaggaccttgagcttttctaccctgatcgcatggcacagcgagttctgggaatgggagacgtgctttcatttgtcgaaaagacacaagaagtgatgaggcaagaagaagctatagaattacagaagaagatcatgagtgcaaaattcgacttcaacgatttcttaaaacaatctcaaaacgttgcgaaaatgggttccatgagccgcattattggaatgatgccaggcatgaacaagataactcccgcacaaatccgagaagctgagaaaagacttgcattcgtggagtcaatgatcaatgccatgactgctgaggaaagggagaagccagagttactggctgaatcacgtgagaggaggataagagtggctgaggagtctggaaagactgaacaagaggtgagtcaattggttgcccagcttttccaaatgcgtgctcagatgcagaagttgatgggtatggtgcaaggacaagaagcaatagctggcatgggagatctcatggactcgcttaaatctgaagagaaggcacctcctggcaccgcgcggcggaagagaaggaataacacgtctaagcagagggacctggacgcagtgctgagctagtgagtagtggcctagtgtgctgtattatgaaaatgcataggtgggcactgaacctgtgtaattgcggttaattcggcacacattttttttgtacataacgtttagtcccatgagggaagatatgttggtcgctcttgaaattggagtaggttgtcatgaggacatatctagtgcacatagaagattggtgtacatgatgtacatattaaattaccaccactcattttagatttaacgtctctagttgatcattcaatttacaaataacacatttcactactacacaccaccacgttggatgatgtttttagcaaaatataccaaacaactagagacgttaaatctaaaataagtggtgatgatttaatatgtgcatcatgtgcatcaatctttcatgtgcattagatatgttctctgttgtcatacagggcccagaagaactcaggtcttgtaccggaggcctggagcccagtatctttcagttgcaacacttgatgtaaaaaaataagaaaaaacattttacctttcttagtttaagtttactcctcaagcaccaaaaccaaacatcttgctccttgaactctcaaaaacactcaaattatctccttgacctgaattcaagtggttataaaggtggttttgtcttttgtttagttaaaaaattcataagtacttgatagggttttagccatagaatatgtttctaaccttttaaaaattccaaaaaaaaatcatagagatacattcggacaacaacaatcaaagtaaaata

SEQ ID NO: 45177 - DNA, 2398 bp, Zea Mays
gtctgctccagcctccaggcattcggttccggctcctgcttccctctcccttctccggttctccccctccgccgcggagatggaggccaccgcgctcgcgtcccactcgtccccgttcgccgtccaccgctcgacagggaagccagccttcgcctacccccaccgtggagggccctcgatggtctcctctgtccacctccgcacgtcccggacccccgcccgctctgcggcatggagaaggcggaggagggggaccgggctggttgtgcgcgcggagatgttcggccagctcaccaccggcctcgagtccgcctggaacaagctgcgcggcgttggcgtgctaacaaaggaaaatattgccgaaccaatgcgggacattagacgagcacttctggaagcagatgttagtttgcctgttgtgagacggtttgtttcatctgttagtgataaggctttaggtgcaaatgctatcagaggagtccgaccagaccagcaattagtgaaggtctacagggtgttgggaagactactgtctgtgcaaagcttgcgttctatttgaagaaactggggaagagttgtatgctggttgctgcagacatttacaggcctgcagccattgatcaactcactatactgggtaaacaggtgggtgtaccagtttactcagaaggaacagaagccaaacctacacaaataactaagaatgctatggaagaggcaaaaagcaagaatattgatgctattgtggtggatactgctggaaggctgcagattgatagatcaatgatggatgaattgaaagaagtgaagaaggctgttaatcctacagaagttctgcttgtcgttgatgccatgactggccaagaagcagcagcactagtcaccaccttcaatattgagattggtataactggtgcaatactgactaaattggatggtgactccaggggcggagccgcactaagcgttaaagaggtctctgggaggcccataaaatttgttgggcgtggggagcgattagaggaccttgagcttttctaccctgatcgcatggcacagcgagttctgggaatgggagacgtgctttcatttgtcgaaaagacacaagaagtgatgaggcaagaagaagctatagaattacagaagaagatcatgagtgcaaaattcgacttcaacgatttcttaaaacaatctcaaaacgttgcgaaaatgggttccatgagccgcattattggaatgatgccaggcatgaacaagataactcccgcacaaatccgagaagctgagaaaagacttgcattcgtggagtcaatgatcaatgccatgactgctgaggaaagggagaagccagagttactggctgaatcacgtgagaggaggataagagtggctgaggagtctggaaagactgaacaagaggtgagtcaattggttgcccagcttttccaaatgcgtgctcagatgcagaagttgatgggtatggtgcaaggacaagaagcaatagctggcatgggagatctcatggactcgcttaaatctgaagagaaggcacctcctggcaccgcgcggcggaagagaaggaataacacgtctaagcagagggacctggacgcagtgctgagctagtgagtagtggcctagtgtgctgtattatgaaaatgcataggtgggcactgaacctgtgtaattgcggttaattcggcacacattttttttgtacataacgtttagtcccatgagggaagatatgttggtcgctcttgaaattggagtaggttgtcatgaggacatatctagtgcacatagaagattggtgtacatgatgtacatattaaattaccaccactcattttagatttaacgtctctagttgatcattcaatttacaaataacacatttcactactacacaccaccacgttggatgatgtttttagcaaaatataccaaacaactagagacgttaaatctaaaataagtggtgatgatttaatatgtgcatcatgtgcatcaatctttcatgtgcattagatatgttctctgttgtcatacagggcccagaagaactcaggtcttgtaccggaggcctggagcccagtatctttcagttgcaacacttgatgtaaaaaaataagaaaaaacattttacctttcttagtttaagtttactcctcaagcaccaaaaccaaacatcttgctccttgaactctcaaaaacactcaaattatctccttgacctgaattcaagtggttataaaggtggttttgtcttttgtttagttaaaaaattcataagtacttgatagggttttagccatagaatatgtttctaaccttttaaaaattccaaaaaaaaatcatagagatacattcggacaacaacaatcaaagtaaaata

SEQ ID NO: 45178 - DNA, 2493 bp, Zea Mays
gtctgctccagcctccaggcattcggttccggctcctgcttccctctcccttctccggttctccccctccgccgcggagatggaggccaccgcgctcgcgtcccactcgtccccgttcgccgtccaccgctcgacagggaagccagccttcgcctacccccaccgtggagggccctcgatggtctcctctgtccacctccgcacgtcccggacccccgcccgctctgcggttggcatggagaaggcggaggagggggaccgggctggttgtgcgcgcggagatgttcggccagctcaccaccggcctcgagtccgcctggaacaagctgcgcggcgttggcgtgctaacaaaggaaaatattgccgaaccaatgcgggacattagacgagcacttctggaagcagatgttagtttgcctgttgtgagacggtttgtttcatctgttagtgataaggctttaggtgcaaatgctatcagaggagtccgaccagaccagcaattagtgaagattgtgcatgacgaactggtacaactgatgggtggagaggtatcggatattgtatttgcaaaaagtggcccgacagttatcttgcttgcaggtctacagggtgttgggaagactactgtctgtgcaaagcttgcgttctatttgaagaaactggggaagagttgtatgctggttgctgcagacatttacaggcctgcagccattgatcaactcactatactgggtaaacaggtgggtgtaccagtttactcagaaggaacagaagccaaacctacacaaataactaagaatgctatggaagaggcaaaaagcaagaatattgatgctattgtggtggatactgctggaaggctgcagattgatagatcaatgatggatgaattgaaagaagtgaagaaggctgttaatcctacagaagttctgcttgtcgttgatgccatgactggccaagaagcagcagcactagtcaccaccttcaatattgagattggtataactggtgcaatactgactaaattggatggtgactccaggggcggagccgcactaagcgttaaagaggtctctgggaggcccataaaatttgttgggcgtggggagcgattagaggaccttgagcttttctaccctgatcgcatggcacagcgagttctgggaatgggagacgtgctttcatttgtcgaaaagacacaagaagtgatgaggcaagaagaagctatagaattacagaagaagatcatgagtgcaaaattcgacttcaacgatttcttaaaacaatctcaaaacgttgcgaaaatgggttccatgagccgcattattggaatgatgccaggcatgaacaagataactcccgcacaaatccgagaagctgagaaaagacttgcattcgtggagtcaatgatcaatgccatgactgctgaggaaagggagaagccagagttactggctgaatcacgtgagaggaggataagagtggctgaggagtctggaaagactgaacaagaggtgagtcaattggttgcccagcttttccaaatgcgtgctcagatgcagaagttgatgggtatggtgcaaggacaagaagcaatagctggcatgggagatctcatggactcgcttaaatctgaagagaaggcacctcctggcaccgcgcggcggaagagaaggaataacacgtctaagcagagggacctggacgcagtgctgagctagtgagtagtggcctagtgtgctgtattatgaaaatgcataggtgggcactgaacctgtgtaattgcggttaattcggcacacattttttttgtacataacgtttagtcccatgagggaagatatgttggtcgctcttgaaattggagtaggttgtcatgaggacatatctagtgcacatagaagattggtgtacatgatgtacatattaaattaccaccactcattttagatttaacgtctctagttgatcattcaatttacaaataacacatttcactactacacaccaccacgttggatgatgtttttagcaaaatataccaaacaactagagacgttaaatctaaaataagtggtgatgatttaatatgtgcatcatgtgcatcaatctttcatgtgcattagatatgttctctgttgtcatacagggcccagaagaactcaggtcttgtaccggaggcctggagcccagtatctttcagttgcaacacttgatgtaaaaaaataagaaaaaacattttacctttcttagtttaagtttactcctcaagcaccaaaaccaaacatcttgctccttgaactctcaaaaacactcaaattatctccttgacctgaattcaagtggttataaaggtggttttgtcttttgtttagttaaaaaattcataagtacttgatagggttttagccatagaatatgtttctaaccttttaaaaattccaaaaaaaaatcatagagatacattcggacaacaacaatcaaagtaaaata

SEQ ID NO: 45179 - DNA, 2377 bp, Zea Mays
gtctgctccagcctccaggcattcggttccggctcctgcttccctctcccttctccggttctccccctccgccgcggagatggaggccaccgcgctcgcgtcccactcgtccccgttcgccgtccaccgctcgacagggaagccagccttcgcctacccccaccgtggagggccctcgatggtctcctctgtccacctccgcacgtcccggacccccgcccgctctgcggttggcatggagaaggcggaggagggggaccgggctggttgtgcgcgcggagatgttcggccagctcaccaccggcctcgagtccgcctggaacaagctgcgcggcgttggcgtgctaacaaaggaaaatattgccgaaccaatgcgggacattagacgagcacttctggaagcagatgttagtttgcctgttgtgagacggtttgtttcatctgttagtgataaggctttaggtgcaaatgctatcagaggagtccgaccagaccagcaattagtgaaggtctacagggtgttgggaagactactgtctgtgcaaagcttgcgttctatttgaagaaactggggaagagttgtatgctggttgctgcagacatttacaggcctgcagccattgatcaactcactatactgggtaaacaggtgggtgtaccagtttactcagaaggaacagaagccaaacctacacaaataactaagaatgctatggaagaggcaaaaagcaagaatattgatgctattgtggtggatactgctggaaggctgcagattgatagatcaatgatggatgaattgaaagaagtgaagaaggctgttaatcctacagaagttctgcttgtcgttgatgccatgactggccaagaagcagcagcactagtcaccaccttcaatattgagattggtataactggtgcaatactgactaaattggatggtgactccaggggcggagccgcactaagcgttaaagaggtctctgggaggcccataaaatttgttgggcgtggggagcgattagaggaccttgagcttttctaccctgatcgcatggcacagcgagttctgggaatgggagacgtgctttcatttgtcgaaaagacacaagaagtgatgaggcaagaagaagctatagaattacagaagaagatcatgagtgcaaaattcgacttcaacgatttcttaaaacaatctcaaaacgttgcgaaaatgggttccatgagccgcattattggaatgatgccaggcatgaacaagctgagaaaagacttgcattcgtggagtcaatgatcaatgccatgactgctgaggaaagggagaagccagagttactggctgaatcacgtgagaggaggataagagtggctgaggagtctggaaagactgaacaagaggtgagtcaattggttgcccagcttttccaaatgcgtgctcagatgcagaagttgatgggtatggtgcaaggacaagaagcaatagctggcatgggagatctcatggactcgcttaaatctgaagagaaggcacctcctggcaccgcgcggcggaagagaaggaataacacgtctaagcagagggacctggacgcagtgctgagctagtgagtagtggcctagtgtgctgtattatgaaaatgcataggtgggcactgaacctgtgtaattgcggttaattcggcacacattttttttgtacataacgtttagtcccatgagggaagatatgttggtcgctcttgaaattggagtaggttgtcatgaggacatatctagtgcacatagaagattggtgtacatgatgtacatattaaattaccaccactcattttagatttaacgtctctagttgatcattcaatttacaaataacacatttcactactacacaccaccacgttggatgatgtttttagcaaaatataccaaacaactagagacgttaaatctaaaataagtggtgatgatttaatatgtgcatcatgtgcatcaatctttcatgtgcattagatatgttctctgttgtcatacagggcccagaagaactcaggtcttgtaccggaggcctggagcccagtatctttcagttgcaacacttgatgtaaaaaaataagaaaaaacattttacctttcttagtttaagtttactcctcaagcaccaaaaccaaacatcttgctccttgaactctcaaaaacactcaaattatctccttgacctgaattcaagtggttataaaggtggttttgtcttttgtttagttaaaaaattcataagtacttgatagggttttagccatagaatatgtttctaaccttttaaaaattccaaaaaaaaatcatagagatacattcggacaacaacaatcaaagtaaaata

SEQ ID NO: 45180 - DNA, 2297 bp, Zea Mays
gtctgctccagcctccaggcattcggttccggctcctgcttccctctcccttctccggttctccccctccgccgcggagatggaggccaccgcgctcgcgtcccactcgtccccgttcgccgtccaccgctcgacagggaagccagccttcgcctacccccaccgtggagggccctcgatggtctcctctgtccacctccgcacgtcccggacccccgcccgctctgcggcatggagaaggcggaggagggggaccgggctggttgtgcgcgcggagatgttcggccagctcaccaccggcctcgagtccgcctggaacaagctgcgcggcgttggcgtgctaacaaaggaaaatattgccgaaccaatgcgggacattagacgagcacttctggaagcagatgttagtttgcctgttgtgagacggtttgtttcatctgttagtgataaggctttaggtgcaaatgctatcagaggagtccgaccagaccagcaattagtgaaggtctacagggtgttgggaagactactgtctgtgcaaagcttgcgttctatttgaagaaactggggaagagttgtatgctggttgctgcagacatttacaggcctgcagccattgatcaactcactatactgggtaaacaggtgggtgtaccagtttactcagaaggaacagaagccaaacctacacaaataactaagaatgctatggaagaggcaaaaagcaagaatattgatgctattgtggtggatactgctggaaggctgcagattgatagatcaatgatggatgaattgaaagaagtgaagaaggctgttaatcctacagaagttctgcttgtcgttgatgccatgactggccaagaagcagcaggtctctgggaggcccataaaatttgttgggcgtggggagcgattagaggaccttgagcttttctaccctgatcgcatggcacagcgagttctgggaatgggagacgtgctttcatttgtcgaaaagacacaagaagtgatgaggcaagaagaagctatagaattacagaagaagatcatgagtgcaaaattcgacttcaacgatttcttaaaacaatctcaaaacgttgcgaaaatgggttccatgagccgcattattggaatgatgccaggcatgaacaagataactcccgcacaaatccgagaagctgagaaaagacttgcattcgtggagtcaatgatcaatgccatgactgctgaggaaagggagaagccagagttactggctgaatcacgtgagaggaggataagagtggctgaggagtctggaaagactgaacaagaggtgagtcaattggttgcccagcttttccaaatgcgtgctcagatgcagaagttgatgggtatggtgcaaggacaagaagcaatagctggcatgggagatctcatggactcgcttaaatctgaagagaaggcacctcctggcaccgcgcggcggaagagaaggaataacacgtctaagcagagggacctggacgcagtgctgagctagtgagtagtggcctagtgtgctgtattatgaaaatgcataggtgggcactgaacctgtgtaattgcggttaattcggcacacattttttttgtacataacgtttagtcccatgagggaagatatgttggtcgctcttgaaattggagtaggttgtcatgaggacatatctagtgcacatagaagattggtgtacatgatgtacatattaaattaccaccactcattttagatttaacgtctctagttgatcattcaatttacaaataacacatttcactactacacaccaccacgttggatgatgtttttagcaaaatataccaaacaactagagacgttaaatctaaaataagtggtgatgatttaatatgtgcatcatgtgcatcaatctttcatgtgcattagatatgttctctgttgtcatacagggcccagaagaactcaggtcttgtaccggaggcctggagcccagtatctttcagttgcaacacttgatgtaaaaaaataagaaaaaacattttacctttcttagtttaagtttactcctcaagcaccaaaaccaaacatcttgctccttgaactctcaaaaacactcaaattatctccttgacctgaattcaagtggttataaaggtggttttgtcttttgtttagttaaaaaattcataagtacttgatagggttttagccatagaatatgtttctaaccttttaaaaattccaaaaaaaaatcatagagatacattcggacaacaacaatcaaagtaaaata

SEQ ID NO: 45181 - DNA, 837 bp, Zea Mays
caaggtaatagccatggcgccacacgattccgggcgccttgatcactacaagctggagctccatgagctccactaccagctaacccttgtacaacactggtgtggcaccagcaaagcaaaccaagtagcagtcgcagctcccggaggccgtagtaagctgggaaacttgatcgctaacgattgggatctagaagacccccgtcagaacgggaaaatcgttgcgcatgccaagggcctgcatgtccagtccagcagaggagaggtctcagacgaaagctggcacgcttcgttcgacatcatcttccagcaaggaagcggactggaagggtcgacacttcaggtgatggggcctaacgtctacaagggagagtggtccatcgtcgggggtacaggaaagctgacgatggctcgaggcgtcatctacaaagaagagctgtgtgtggtcgatggcatggccagaattggccttgagatccatgccttctacatccccatggaacgaaaagacgccgcaaagaatgtttggcgctggtgaaatcgtcgtccttttccttcccgtgttccaactgccagtggtcgtcttgtcgtcgtcaataataaaaagacaagtccggtgtcgttagttgatcaggactacctatcagttgtagtaactgtttcggctgctgaaaagccgaaaagcaagcgtcagagattgaaatatgtatcgttcattgaaatatgtatcggacattcggactgcggacgcgacgatccatggcgatctcgcgcaccgctagcttcttctcattcgttttctctgggctctgctacggcgtgtgtcttgctttcttggtt

SEQ ID NO: 45182 - DNA, 2105 bp, Zea Mays
aggcaaaacagccccggaccgcgtgcgtttcgcttccggcttccgcccctgctgtttcttggcgttcaccccctctttctctcgtggcgacgacggcgaccgtcgccgcccccctacgcgctaggtgccagggtccgtcgggtccttcgctggcgacgagcacctaccaggcgatccagtggtgtgtttgggaaggtttccgcggtcgggcggcgccccccagtggcgaagatgatccgactaccgacgtacgcagcgttcagcctgctggcgacggcgtcggcggcgtactacgcgttcagcagccgtgagcagttctacccggcgatggtgtacctctccacctccaagatctgcttcgtgctgctcctcaacacgggcctcgtcgccatgtgcgtcgcctggcagctcgccaggcgcctcttcctcggctcgctccgtgaggccgaggttgagcgcctcaacgagcagtcctggcgggaggtcatcgagatcctctttgctgtcaccatcttccgacaggatttctctgtttcctttcttgccatggttgctgcgcttctcctcgtcaaggcgctgcactggcttgcacagaagagggtcgagtacattgagaccacgccctctgtgcccttgctctcgcacatcaggatcgtctccttcatggttttcctgcttaccgtcgactgcctcttcctgtcaaactcgctcaggtcactcatacagaagcaggaggcgtccgttgccatcttcttctcctttgagtatatgatactagcaacatccacagtatcaacattcgtgaagtatatattctatgttagtgacatgctaatggaaggtcaatgggagaaaaaggcagtgtatacattttacttggagctcataagtgaccttgtgcacttgtcattatacatgctcttcttcatagctatcttcctgaactatggtgtcccgctgcacttgattcgtgagctatatgagactttccgcaacttcagaattcgcattgcagattatgtgcgctacagaaagatcacttccaacatgaatgaacgctttccagatgctacatcagaagagctcgatgtgagtgatgctacatgtattatttgccgtgaggagatgactacagcaaagaaactgctctgtgggcatctgttccatgtgcattgtctaaggtcgtggctagaacgccaacacacttgccccacgtgcagagctccaatcattcccgcagataatggacatgctgtatcagcacgacaacatggagcccaggctggggttcagcctggtactgccactccatcctcagaaggagcaccaggtgagaacatgagcaggcaccaagcaaaacttgaagctgctgcagcggcagcttctttatatggaaggtcttttgtttatcctccagcaaacaccctaaaaagcaggtctgttcctcctcagcctgcatcaagtacaccacaatctgaagcaagtagctccaatcatcagtcacaaaaagaccaagaaatgcagtcccgaaacagcagcgatggtttagtgcctctgcctcttaatgcagatggtgctgttggttcaggaacaagcacaagggaccttgaaaattcacttcagaaggcacaagaaaactttattaagagccagattgagatccaactgcaaatggtgcagcgtggcgctgctgggccgcccagtaacgagaatactgagcacacagaagaatgactgaatctgtgaacagacacttctgcatcgtggtgtaataataaggagaatactgatgagcacacagctgaatctgtaaataggcggcgatgaggatgggacaaaagaaagccaaggattggcgatacctggggctgggggaaactgttacatgatgtcttgcctggatttttggcaggcctgttaatttatgcttcactattagtgccttgttgccagcaccagatgtttctctctctctgtgtgtgtgtggtggtttctgtacatgaaagccttttgacgggagaaccaaccatggctagtttaattatgaagttcacttgttgtacccgagggaaaatagaaatgactcttgtttttgcctatctatc

SEQ ID NO: 45183 - DNA, 1638 bp, Zea Mays
aggcaaaacagccccggaccgcgtgcgtttcgcttccggcttccgcccctgctgtttcttggcgttcaccccctctttctctcgtggcgacgacggcgaccgtcgccgcccccctacgcgctaggtgccagggtccgtcgggtccttcgctggcgacgagcacctaccaggcgatccagtggtgtgtttgggaaggtttccgcggtcgggcggcgccccccagtggcgaagatgatccgactaccgacgtacgaagcaggaggcgtccgttgccatcttcttctcctttgagtatatgatactagcaacatccacagtatcaacattcgtgaagtatatattctatgttagtgacatgctaatggaaggtcaatgggagaaaaaggcagtgtatacattttacttggagctcataagtgaccttgtgcacttgtcattatacatgctcttcttcatagctatcttcctgaactatggtgtcccgctgcacttgattcgtgagctatatgagactttccgcaacttcagaattcgcattgcagattatgtgcgctacagaaagatcacttccaacatgaatgaacgctttccagatgctacatcagaagagctcgatgtgagtgatgctacatgtattatttgccgtgaggagatgactacagcaaagaaactgctctgtgggcatctgttccatgtgcattgtctaaggtcgtggctagaacgccaacacacttgccccacgtgcagagctccaatcattcccgcagataatggacatgctgtatcagcacgacaacatggagcccaggctggggttcagcctggtactgccactccatcctcagaaggagcaccaggtgagaacatgagcaggcaccaagcaaaacttgaagctgctgcagcggcagcttctttatatggaaggtcttttgtttatcctccagcaaacaccctaaaaaggtctgttcctcctcagcctgcatcaagtacaccacaatctgaagcaagtagctccaatcatcagtcacaaaaagaccaagaaatgcagtcccgaaacagcagcgatggtttagtgcctctgcctcttaatgcagatggtgctgttggttcaggaacaagcacaagggaccttgaaaattcacttcagaaggcacaagaaaactttattaagagccagattgagatgttacagatccaactgcaaatggtgcagcgtggcgctgctgggccgcccagtaacgagaatactgagcacacagaagaatgactgaatctgtgaacagacacttctgcatcgtggtgtaataataaggagaatactgatgagcacacagctgaatctgtaaataggcggcgatgaggatgggacaaaagaaagccaaggattggcgatacctggggctgggggaaactgttacatgatgtcttgcctggatttttggcaggcctgttaatttatgcttcactattagtgccttgttgccagcaccagatgtttctctctctctgtgtgtgtgtggtggtttctgtacatgaaagccttttgacgggagaaccaaccatggctagtttaattatgaagttcacttgttgtacccgagggaaaatagaaatgactcttgtttttgcctatctatc

SEQ ID NO: 45184 - DNA, 1915 bp, Zea Mays
aggcaaaacagccccggaccgcgtgcgtttcgcttccggcttccgcccctgctgtttcttggcgttcaccccctctttctctcgtggcgacgacggcgaccgtcgccgcccccctacgcgctaggtgccagggtccgtcgggtccttcgctggcgacgagcacctaccaggcgatccagtggtgtgtttgggaaggtttccgcggtcgggcggcgccccccagtggcgaagatgatccgactaccgacgtacgcagcgttcagcctgctggcgacggcgtcggcggcgtactacgcgttcagcagccgtgagcagttctacccggcgatggtgtacctctccacctccaagatctgcttcgtgctgctcctcaacacgggcctcgtcgccatgtgcgtcgcctggcagctcgccaggcgcctcttcctcggctcgctccgtgaggccgaggttgagcgcctcaacgagcagtcctggcgggaggtcatcgagatcctctttgctgtcaccatcttccgacaggatttctctgtttcctttcttgccatggttgctgcgcttctcctcgtcaaggcgctgcactggcttgcacagaagagggtcgagtacattgagaccacgccctctgtgcccttgctctcgcacatcaggatcgtctccttcatggttttcctgcttaccgtcgactgcctcttcctgtcaaactcgctcaggtcactcatacagaagcaggaggcgtccgttgccatcttcttctcctttgagtatatgatactagcaacatccacagtatcaacattcgtgaagtatatattctatattatgtgcgctacagaaagatcacttccaacatgaatgaacgctttccagatgctacatcagaagagctcgatgtgagtgatgctacatgtattatttgccgtgaggagatgactacagcaaagaaactgctctgtgggcatctgttccatgtgcattgtctaaggtcgtggctagaacgccaacacacttgccccacgtgcagagctccaatcattcccgcagataatggacatgctgtatcagcacgacaacatggagcccaggctggggttcagcctggtactgccactccatcctcagaaggagcaccaggtgagaacatgagcaggcaccaagcaaaacttgaagctgctgcagcggcagcttctttatatggaaggtcttttgtttatcctccagcaaacaccctaaaaaggtctgttcctcctcagcctgcatcaagtacaccacaatctgaagcaagtagctccaatcatcagtcacaaaaagaccaagaaatgcagtcccgaaacagcagcgatggtttagtgcctctgcctcttaatgcagatggtgctgttggttcaggaacaagcacaagggaccttgaaaattcacttcagaaggcacaagaaaactttattaagagccagattgagatgttacagatccaactgcaaatggtgcagcgtggcgctgctgggccgcccagtaacgagaatactgagcacacagaagaatgactgaatctgtgaacagacacttctgcatcgtggtgtaataataaggagaatactgatgagcacacagctgaatctgtaaataggcggcgatgaggatgggacaaaagaaagccaaggattggcgatacctggggctgggggaaactgttacatgatgtcttgcctggatttttggcaggcctgttaatttatgcttcactattagtgccttgttgccagcaccagatgtttctctctctctgtgtgtgtgtggtggtttctgtacatgaaagccttttgacgggagaaccaaccatggctagtttaattatgaagttcacttgttgtacccgagggaaaatagaaatgactcttgtttttgcctatctatc

SEQ ID NO: 45185 - DNA, 1288 bp, Zea Mays
aggcaaaacagccccggaccgcgtgcgtttcgcttccggcttccgcccctgctgtttcttggcgttcaccccctctttctctcgtggcgacgacggcgaccgtcgccgcccccctacgcgctaggtgccagggtccgtcgggtccttcgctggcgacgagcacctaccaggcgatccagtggtgtgtttgggaaggtttgcgctacagaaagatcacttccaacatgaatgaacgctttccagatgctacatcagaagagctcgatgtgagtgatgctacatgtattatttgccgtgaggagatgactacagcaaagaaactgctctgtgggcatctgttccatgtgcattgtctaaggtcgtggctagaacgccaacacacttgccccacgtgcagagctccaatcattcccgcagataatggacatgctgtatcagcacgacaacatggagcccaggctggggttcagcctggtactgccactccatcctcagaaggagcaccaggtgagaacatgagcaggcaccaagcaaaacttgaagctgctgcagcggcagcttctttatatggaaggtcttttgtttatcctccagcaaacaccctaaaaaggtctgttcctcctcagcctgcatcaagtacaccacaatctgaagcaagtagctccaatcatcagtcacaaaaagaccaagaaatgcagtcccgaaacagcagcgatggtttagtgcctctgcctcttaatgcagatggtgctgttggttcaggaacaagcacaagggaccttgaaaattcacttcagaaggcacaagaaaactttattaagagccagattgagatgttacagatccaactgcaaatggtgcagcgtggcgctgctgggccgcccagtaacgagaatactgagcacacagaagaatgactgaatctgtgaacagacacttctgcatcgtggtgtaataataaggagaatactgatgagcacacagctgaatctgtaaataggcggcgatgaggatgggacaaaagaaagccaaggattggcgatacctggggctgggggaaactgttacatgatgtcttgcctggatttttggcaggcctgttaatttatgcttcactattagtgccttgttgccagcaccagatgtttctctctctctgtgtgtgtgtggtggtttctgtacatgaaagccttttgacgggagaaccaaccatggctagtttaattatgaagttcacttgttgtacccgagggaaaatagaaatgactcttgtttttgcctatctatc

SEQ ID NO: 45186 - DNA, 1523 bp, Zea Mays
aggcaaaacagccccggaccgcgtgcgtttcgcttccggcttccgcccctgctgtttcttggcgttcaccccctctttctctcgtggcgacgacggcgaccgtcgccgcccccctacgcgctaggtgccagggtccgtcgggtccttcgctggcgacgagcacctaccaggtatatgatactagcaacatccacagtatcaacattcgtgaagtatatattctatgttagtgacatgctaatggaaggtcaatgggagaaaaaggcagtgtatacattttacttggagctcataagtgaccttgtgcacttgtcattatacatgctcttcttcatagctatcttcctgaactatggtgtcccgctgcacttgattcgtgagctatatgagactttccgcaacttcagaattcgcattgcagattatgtgcgctacagaaagatcacttccaacatgaatgaacgctttccagatgctacatcagaagagctcgatgtgagtgatgctacatgtattatttgccgtgaggagatgactacagcaaagaaactgctctgtgggcatctgttccatgtgcattgtctaaggtcgtggctagaacgccaacacacttgccccacgtgcagagctccaatcattcccgcagataatggacatgctgtatcagcacgacaacatggagcccaggctggggttcagcctgctgcaggtactgccactccatcctcagaaggagcaccaggtgagaacatgagcaggcaccaagcaaaacttgaagctgctgcagcggcagcttctttatatggaaggtcttttgtttatcctccagcaaacaccctaaaaaggtctgttcctcctcagcctgcatcaagtacaccacaatctgaagcaagtagctccaatcatcagtcacaaaaagaccaagaaatgcagtcccgaaacagcagcgatggtttagtgcctctgcctcttaatgcagatggtgctgttggttcaggaacaagcacaagggaccttgaaaattcacttcagaaggcacaagaaaactttattaagagccagattgagatgttacagatccaactgcaaatggtgcagcgtggcgctgctgggccgcccagtaacgagaatactgagcacacagaagaatgactgaatctgtgaacagacacttctgcatcgtggtgtaataataaggagaatactgatgagcacacagctgaatctgtaaataggcggcgatgaggatgggacaaaagaaagccaaggattggcgatacctggggctgggggaaactgttacatgatgtcttgcctggatttttggcaggcctgttaatttatgcttcactattagtgccttgttgccagcaccagatgtttctctctctctgtgtgtgtgtggtggtttctgtacatgaaagccttttgacgggagaaccaaccatggctagtttaattatgaagttcacttgttgtacccgagggaaaatagaaatgactcttgtttttgcctatctatc

SEQ ID NO: 45187 - DNA, 2111 bp, Zea Mays
aggcaaaacagccccggaccgcgtgcgtttcgcttccggcttccgcccctgctgtttcttggcgttcaccccctctttctctcgtggcgacgacggcgaccgtcgccgcccccctacgcgctaggtgccagggtccgtcgggtccttcgctggcgacgagcacctaccaggcgatccagtggtgtgtttgggaaggtttccgcggtcgggcggcgccccccagtggcgaagatgatccgactaccgacgtacgcagcgttcagcctgctggcgacggcgtcggcggcgtactacgcgttcagcagccgtgagcagttctacccggcgatggtgtacctctccacctccaagatctgcttcgtgctgctcctcaacacgggcctcgtcgccatgtgcgtcgcctggcagctcgccaggcgcctcttcctcggctcgctccgtgaggccgaggttgagcgcctcaacgagcagtcctggcgggaggtcatcgagatcctctttgctgtcaccatcttccgacaggatttctctgtttcctttcttgccatggttgctgcgcttctcctcgtcaaggcgctgcactggcttgcacagaagagggtcgagtacattgagaccacgccctctgtgcccttgctctcgcacatcaggatcgtctccttcatggttttcctgcttaccgtcgactgcctcttcctgtcaaactcgctcaggtcactcatacagaagcaggaggcgtccgttgccatcttcttctcctttgagtatatgatactagcaacatccacagtatcaacattcgtgaagtatatattctatgttagtgacatgctaatggaaggtcaatgggagaaaaaggcagtgtatacattttacttggagctcataagtgaccttgtgcacttgtcattatacatgctcttcttcatagctatcttcctgaactatggtgtcccgctgcacttgattcgtgagctatatgagactttccgcaacttcagaattcgcattgcagattatgtgcgctacagaaagatcacttccaacatgaatgaacgctttccagatgctacatcagaagagctcgatgtgagtgatgctacatgtattatttgccgtgaggagatgactacagcaaagaaactgctctgtgggcatctgttccatgtgcattgtctaaggtcgtggctagaacgccaacacacttgccccacgtgcagagctccaatcattcccgcagataatggacatgctgtatcagcacgacaacatggagcccaggctggggttcagcctggtactgccactccatcctcagaaggagcaccaggtgagaacatgagcaggcaccaagcaaaacttgaagctgctgcagcggcagcttctttatatggaaggtcttttgtttatcctccagcaaacaccctaaaaaggtctgttcctcctcagcctgcatcaagtacaccacaatctgaagcaagtagctccaatcatcagtcacaaaaagaccaagaaatgcagtcccgaaacagcagcgatggtttagtgcctctgcctcttaatgcagatggtgctgttggttcaggaacaagcacaagggaccttgaaaattcacttcagaaggcacaagaaaactttattaagagccagattgagatgttacagatccaactgcaaatggtgcagcgtggcgctgctgggccgcccagtaacgagaatactgagcacacagaagaatgactgaatctgtgaacagacacttctgcatcgtggtgtaataataaggagaatactgatgagcacacagctgaatctgtaaataggcggcgatgaggatgggacaaaagaaagccaaggattggcgatacctggggctgggggaaactgttacatgatgtcttgcctggatttttggcaggcctgttaatttatgcttcactattagtgccttgttgccagcaccagatgtttctctctctctgtgtgtgtgtggtggtttctgtacatgaaagccttttgacgggagaaccaaccatggctagtttaattatgaagttcacttgttgtacccgagggaaaatagaaatgactcttgtttttgcctatctatc

SEQ ID NO: 45188 - DNA, 969 bp, Zea Mays
aggcaaaacagccccggaccgcgtgcgtttcgcttccggcttccgcccctgctgtttcttggcgttcaccccctctttctctcgtggcgacgacggcgaccgtcgccgcccccctacgcgctaggtgccagggtccgtcgggtccttcgctggcgacgagcacctaccaggcgatccagtggtgtgtttgggaaggtttccgcggtcgggcggcgccccccagtggcgaagatgatccgactaccgacgtacgaagcaggaggcgtccgttgccatcttcttctcctttgagtatatgatactagcaacatccacagtatcaacattcgtgaagtatatattctatgttagtgacatgctaatggaaggtcaatgggagaaaaaggcagtgtatacattttacttggagctcataagtgaccttgtgcacttgtcattatacatgctcttcttcatagctatcttcctgaactatggtgtcccgctgcacttgattcgtgagctatatgagactttccgcaacttcagaattcgcattgcagattatgtgcgctacagaaagatcacttccaacatgaatgaacgctttccagatgctacatcagaagagctcgatgtgagtgatgctacatgtattatttgccgtgaggagatgactacagcaaagaaactgctctgtgggcatctgttccatgtgcattgtctaaggtcgtggctagaacgccaacacacttgccccacgtgcagagctccaatcattcccgcagataatggacatgctgtatcagcacgacaacatggagcccaggctggggttcagcctgctgcaggtactgccactccatcctcagaaggagcaccaggtgagaacatgagcaggcaccaagcaaaacttgaagctgctgcagcggcagcttctttatatggaaggtcttttgtttatcctccagcaaacaccctaaaaagcag

SEQ ID NO: 45189 - DNA, 4896 bp, Zea Mays
gtacaccacctgatcgtcgtcccggcccggcctcaccaccagcctactactacatattttataacctgcctcacgcccacctctgaagcccttcacactttgattcctcctgtctctctagccttctccatgctaatagccagatcaaacgcatcaagacctcatgttgtgtagtaccagcagggggggggggggggggggggggggaatattaatactacgtctcgcgtaaacgctagctagcttagctagctccgtcgtcgtcccaaaagtcctcctgctcttgggctataaatgcctggccaaaacacctgcatggttctctacgcgacacacacacaccatcactgcgctgcgctactctactccccaccaccgccgccacccaagagctttcctcgctgcacaagaaatggccacgaaccatctctcccaagggcagcaccagcacccgcaggcctggccctggggcgtggccatgtacaccaacctacactaccaccaccagcagcaccaccactacgagaaggagcacctgttcgagaagccgctgacgccgagcgacgtgggcaagctcaacaggctggtgatccccaagcagcacgccgagaggtacttccctctcagcagcagcggcgccggcgacaaaggcctcatcctgtgcttcgaggacgacgacgacgacgaggctgccgccgccaacaagccgtggcggttccgctactcgtactggaccagcagccagagctacgtgctcaccaagggctggagccgctacgtcaaggagaagcagcttgacgccggcgacgtcgtgcgcttccagaggatgcgtggtttcggcatgcccgaccgcctgttcatcagccacagccgccgcggcgagactactgctactgctgcaacaacagtgccccccgctgctgctgccgtgcgcgtagtagtggcacctgcacagagcgctggcgcagaccaccagcagcagcagcagccgtcgccttggagcccaatgtgctacagcacatcaggctcgtactcgtaccccaccagcagcccagccaattcccagcatgcctaccaccgccactcagctgaccatgaccacagcaacaacatgcaacatgcaggagaatctcagtccgacagagacaacaggagctgcagtgcagcttcggcaccgccgccaccgtcgcggcggctccggctgttcggcgtaaacctcgactgcggcccggggccggagccggagacaccaacggcgatgtacggctacatgcaccaaagcccctacgcttacaacaactggggcagtccataccagcatgacgaggagatttaagattatgcctgcagaatccaaacagccaaagtagtagcagtagtagttgctagcagcagcagcagccgcctagtactacttgcacacgaagtgacaggattgaattgacctgtacacggggagaaaaaaaaaggaaggaaggaagtggagagagatcccttgtttcccgggcaatcttccttccatccccgcccccagaagaatgctgctgcctttttgctgttccgttttttttttttaatttttattttcttctccatggcttccagaaaaccctacttactgtaggggatctggtagcagggggccgggcatgcgtgggaggtttgcaggaagcatcaagctgccaaggagctggaacgagagacaacagacagagagagatgtgtgtgtatgtatgtgtgtgtcatctgtacctatatgtcttaatttgtgggtccgatagagaacaaactgtgaagttgatgtgtgtgcctgcctgcctcctgaagaaacaatgcaatatccccatggggattttgttccctcgctccagcatctccctgcttctactgttctatcctgcggttcatcagtggtggtgcaatgctttcacttcgtaaaagtaatgtacttgaccttttctccgcaaaaaaaagtggcaatcctgtttcggaagattatagggggaaaaaaatcagtcaattgtataagaatgttgtgagtgctgatcctttttatgctgtcaattgcgacggtctcccttgcacgcgcccgagattttgtaagcagtgaccttccatgcacaccatcgctgtcagataggacgtttgtgtgtgagataaatgacagattttctgttccagagttttgccaccaaatatgtattgtttcgttacccgactgccattattgctaggttatggagattttttccattgttggtgtcggccatttaagggcttgttcgcttttcctctcaatccatatggattgaggtgggattagacgggtttaaatcccgagcaagtcaaaatccttcataattttttttcaatctcatacaatctacatgggacagaaataaccaaacaaaacccaagtctattttctcttcaaccaaacaggttatctatgggtactttgcccccttagggcttgttcggttacaccaatccaggagaggattagaggggtttaaatcccctcctagtcatttttgacttggaggggatttgatcccctccaatccctttctggattggtgtaaccgaacatgcccttagggagtgtttgaatggactagaactaataatcagctgctaaaattagccgagacatccaaacaatctagataatagttcaactattagctatttttagcaaattagctaatagttagctcactatttgttagctagttaattccactagcaatttttagccaactaactattagctctaatgcatttaaacatcacattagtagaaaaataaacaggctaacaacaaagtaacaattaatggttaatttggctgatggatggaactatcacaataaatggaacgaaagtattgtgcttataactttttgggtggctaagggagcaatgagagaagcataatcaaaggaagaaaatgaaatgaccctaaaataatggcatataaggaatacgtagacatagtggtaaactggtattttacatggtaaaatcacaaaccttcaattttaatgaaatgatgggggcataccgcataagcgatgctgacacctggggattttcatgtcctaatcttttaaagccggtctccacctttttgttccctggggaaggaaaggtgcaacaaaagtttaagtgtgcaagtgggatcaattgccctagtaggatactaagaaaaaggctgcctaagttgatggtctaaggggcaaggttcgacacaaaaggccgcaaaactccaataagcatgaagattcctcacagcatgtatcaaaagaaaaacagagggctgtctcctgcttttgttgcctatgcaaagaaggggcaaaaaaatagctggtacgggcctaacaacagtttattacttagacagccagtcaataaaatgaagtatacacctagaggagaatcaacttgcgaaacattagttcttaaccgagggtaataagccaaaggggttactgtagcttcggtttgtgaaacacatcaaagatagagacaaatatatgcatgatgtgtctataatatgcttaacaaaaaagtgttccatgtagctcagtagcaaggacttgttagttcttagcttaaagaccacgggatactgtaagtatcctgagagctaggtattcatttgctacatatagatacagaacagagaaacatggtcccagagcattagattgattaatggaaagatgactgcgcaggtttcagattcatctgaatgggattttgtggcaactgcggtaatgatgattaaacaagtaggttaactaccgtatcaacgacaagatttcctgtctgcttactaagaagtctagagcacaagccatgtgccagggttctttccttagtggcgaaagttgagccctatcccagggttacatgattaagacttttgaacaccaagttgtttatcttaacatcagcgcaaatgggtcatgtgactgccataatgataaagtagacccaacctacttaacacataccgaggaaaagaaaaaaatatatcaaagggtcccaactacaaagtacagtttaatcacgtcatccatgtaagatattcatagaaatcttcaacttttaccttttgatgttcaacctagcagtttcattgcagaatcgctgcatggatgcaaaacatggggctaccaaagaaagaatacacatggaaatgccatgatggtggggcactagaagtaaccatcacgagattgaaagctaccaagatgaggatgcagcagatataagagatggtccccctggaaaaatgcgtagcagaggcgacccacgaactggcacacacaggggggccaactaagactggaccaacaaaatgcccatgatacatccatcaggcaatcaaccacttgatttccttgctttccaagaagccactgcctcctcaaggttatgaacaagcatggtcttcaagaaaaggctagcagtgagcctgataactcgccttttgaatgcaatgtttgccattttaaaatccttgctagtggttcttgagccagcttttctgcataaacagtactttccttgagagacagatgtcgcatagacagatagtaagccagtggactctgtaaggacatgacatgatccaacgcgctatggggaagaaatcacccaatctattaataagttgttaaatgaaaacaattcagaaaatagattggatttctgttttcctcacatcatccaaacatttctgtactacagtgcttgcgaacagatatttgagttgaagatagtgaatacctcaagaagaatgattaattgctgaagccagaatgattaattaaataatcaagctaaaagcagtatgaatataaagcccatatgggtatgtccaag

SEQ ID NO: 45190 - DNA, 1263 bp, Zea Mays
gtcatacatcatccacattccacacacttgcatagttgcattatatgcaagcaggcatgcaccacgcaccagggcagcgtgcaagcaattaccagcagacacatcacacagaagctagagcacatcacgggcgggcgccggcgatgtcgtcgtcaacaccgagagagcgaggcggcgggaggcagttcccggtggggcggcgccggtacgccccggtggccgacgcggggtgcggcgggtgccgcccgacgacgtcgaggctgctccgcctgccgtccttcctcaagccctgcagccagctgttgggtgggggtggtaatagcaaagctgccgcgacgacgacgacaaggaggaggagtggtggcggcgccgccgccgtcggtgagcattactcctgcgcctccacctctaccacggcttccttctcctcgtactcctcctcgtcgtcggccgccacgcgcagcacgggcggctacgcggcgtcgtcggcggcctactcctcctccgactgctgctactactaccactgccacccgtcgcgcgtcgtcgtgtacggagctggacccaccgcccccatgcaacagtaccaagacccagcgtcgtcgtcgctccacaagcagcagcagcaggagcaggcgtcaccagctcgcgcggcgccgtcggcagtcggccataataataagaagaagaagatgaggaggagggcggcggaggacggcgtgggcgtgggcgtggcggtggagaaggagtcgtcggacccgcgcgcggacttccgcgacagcatggtgcagatggtgctggagacggggctgtgcgactgggacggcctccgcggcatgctccgccgcctgctcgccctcaacgcgccgcgccaccacgccgccatcctcaccgccttcgccgaggtctgcgcgcagctcgccgccgctcctcctcctcctgcgccgtcgtgccagtaccggcgctgctgatggcacatggcagcgtccacccaccaccctaccccgctcgtgccgtctgctagctgtaacggacggacggacctgatggcgacaacagggctatgcgcttacaaagtgcagatttttaactgtggttattagtcaggagattaagctaaatcaaggacagataataaagtggcgtggcagcagcgttattaggctaccaccatgcatgcatgttcttgagatcccaggtagtatacaacacacacacatggcgtagtgtggtgtccggctcacgaaccgagaccaaggcgta

SEQ ID NO: 45191 - DNA, 1260 bp, Zea Mays
gtcatacatcatccacattccacacacttgcatagttgcattatatgcaagcaggcatgcaccacgcaccagggcagcgtgcaagcaattaccagcagacacatcacacagaagctagagcacatcacgggcgggcgccggcgatgtcgtcgtcaacaccgagagagcgaggcggcgggaggcagttcccggtggggcggcgccggtacgccccggtggccgacgcggggtgcggcgggtgccgcccgacgacgtcgaggctgctccgcctgccgtccttcctcaagccctgcagccagctgttgggtgggggtggtaatagcaaagctgccgcgacgacgacgacaaggaggaggagtggtggcggcgccgccgccgtcggtgagcattactcctgcgcctccacctctaccacggcttccttctcctcgtactcctcctcgtcgtcggccgccacgcgcagcacgggcggctacgcggcgtcgtcggcggcctactcctcctccgactgctgctactactaccactgccacccgtcgcgcgtcgtcgtgtacggagctggacccaccgcccccatgcaacagtaccaagacccagcgtcgtcgtcgctccacaagcagcagcagcaggagcaggcgtcaccagctcgcgcggcgccgtcggcagtcggccataataataagaagaagaagatgaggaggagggcggcggaggacggcgtgggcgtgggcgtggcggtggagaaggagtcgtcggacccgcgcgcggacttccgcgacagcatggtgcagatggtgctggagacggggctgtgcgactgggacggcctccgcggcatgctccgccgcctgctcgccctcaacgcgccgcgccaccacgccgccatcctcaccgccttcgccgaggtctgcgcgcagctcgccgccgctcctcctcctcctgcgccgtcgtgccagtaccggcgctgctgatggcacatggcagcgtccacccaccaccctaccccgctcgtgccgtctgctagctgtaacggacggacggacctgatggcgacaacagggctatgcgcttacaaagtgcagatttttaactgtggttattagtcaggagattaagctaaatcaaggacagataataaagtggcgtggcagcagcgttattaggctaccaccatgcatgcatgttcttgagatcccaggtatacaacacacacacatggcgtagtgtggtgtccggctcacgaaccgagaccaaggcgta

SEQ ID NO: 45192 - DNA, 2166 bp, Zea Mays
cggttctgccgtcaaagcgccgcggatcccccaccctcctccccctctgctccccgccatcaacgcgcacgcgccctctgctctccgccatcaacgcgcactgcatgcctgcgccgcagatcccccaccctctcctcggcatcaacgcgcaagcggatgccacggatccgcctatccgccataaacgccgatccatagatccacgctcgccctgcctcctacgacaccaaccgatccctcaacctctcctacgacaccttctccagcccgctccccgacgacatcgagcgcctggctttcacagcggcgggacatggaggatgaacgagcaccgggagagagtcggttagatctaaatttccgtggaggtgagcttggacgaggtcaggtatgtcgcctccttctcttcctccaccggcttctacacgctccaggcttgcgctggtgttgctagccattccttgtgctcgacctcgcgtctgcgttggactccgcccctctgccaccgtctccagcgccgacgttgaagagacaacgaaggcgtccacactagcccatgcccccgcctgcctccgtccccgcgacacccagcccccgaacctcgcccgctccccgcgtgatggccgcccatcccaccgtgcccgccccctacccccaccaaccgccggagcctacctcgcctagccgctcaagcggggaatccacccgtcggcgccgagagcgaggagcgtggatccaggagcgggcaggccgagtgggcgggagggggcgaggacctgcacctctgcatcgacgacagccaggcgaggtggcacgcgccgcccgagcatgctcaccctgcaattcccgtgggtccccgctgctcgcacgcctgtcggtgcgtgtgctcaacctcagggccgtcaacaacgccatggttgccatgctcgaggtcatccacctccactccgtcttcctcaccgacgcctcgctgcgccggatggttgccgtctgcccctgcctccggaaccttgacctccgctactgctgtcgcctggccgcgtcaacttcactaatgtcggggtgcgcagcctcacgagcttcaccgtcgtcgactacatccacaccaccgagctgtgggtcctggtaccggtcacgccctgcctctgctccttccgcttcagcgagtggcaggctatcacttcactcgatatcaatacgctcgatcagtagatgtagcgaacaatctaatgaagaaatagtatacgatgataaatcatgggctagggcgtgaccggtaccagaggcatctctgtgaaatcgagcggaaggtggtggtgctgaatgactccttgatggccaaatttcgtgatagtttatgggtagtatgtgcacgggcttgagcctttactttatctgagtgaagtgcatgagaagggagttcatgatctgtggagagcgccgacggatgagatttgcctgccactaatggtatcactgtgccaactgaattatttgcgtttgccacgccatgcttgatggctttgcctgctgatcttaagactaaggtattgcattttttacctggggttgatcttgcaaaggttgagtgcacgtgcaaggaaatgaggaatcttgcattagatgatagtatttggaagaagcttgtattcaagtatgaaaattatggtaagggctgtagggggcgagcaagagtgcgaaggccatatttggagaagcttggcaggccaataagagatggcagaagaggcctaatccaaccttttggtacaatggctggggaaacaattcttttagccatccacttaggctgccattgatggtgggaacttagacagacttccttttattggaaatcatggttctgtagggcgtcactttagaaataaacgaaggaatatcttgctaaattgcattcttaatggtcatcggtcaccgccacaacttcctttgaagccatgccaatgagtttgacttgtatattaagagtggtcggtaagtagtgcatagacggttagagcgccttgttcttatcaaatatcaattatcatcaactcacacattatgcatatgccttatcctaataaatcccccagtactcctttctatttacacagaaggcttttgtgactgctagagagtgatagacaaggttcaaacaggcat

SEQ ID NO: 45193 - DNA, 2837 bp, Zea Mays
attacaatgagttgccactagatatacgcgaagcctctcccacctcatctgcctcgcgtgcggcggcggcgactccacctggcttgcgtcctcccgttttccagccagcaagccagactcctcccctctccgaagactccgatcgtccggattcatccagatccgggcgttctgagtcctgccgaggctctagatcgcgtcgcgcacgatgccacgcgacctgtcgcggtcgcggtctccgccgcgccgacgttggcggtcgccgtctcccgcgcggtaccgcggccggagggggcgcagggaccgaagccccagtcccatccgtagcaggtccccctatcgctcctcgtatagaaggaggagccctttgccttccccaagaaggcacaagagccgttctccgtctcctaggaggcgcaagagtccgtctccatcacaaaagcgttacagaagaaagagaagtccgagtgtcactagctctccagtcgctgcatctcagagttcccaccttgggttggcagagaataagaatgttattgatacacaaaggctagaagaagaaaagaaaagggaacatgcctcagtagaattgatgaaagaaataaaagaagggtatgtgtgaaatattaccagtatcatttcataaattttacagcagtttgtattaactattgtgcacgtcaccttggaaaccattaattttttttaaaaaaaaatcatgaatgcttcttgagatgtttggtgtagttgtcagagctgtcttactgagtcatcaggtcatgggttcgaagcaacttctccacatttatgtgggaaggctcgcctcggcttatcccttcacagacgctactcatgtgggagcctccagcagtaagtctgcccaatgctccttgagatgtgccatcagaagagtttttttccacataaacacaaagttacagaaaaaattatgcatgatttttattgactattttttgagcaaagagataagctattgccaggattaaaaaaactagaccaacataggaggaaccaggtggcattttattatcaagaagaaaatagccatgcaaattttccttgacgaggactagaacctaggtggcctgggctagccacagaaccacatgctctaccaattgcgatagatcagcttccttaacagtgagcatacggtcaggattgtctgagcatacaaccaggattatgtcatatatgttgattggaattatatattgtgattgcaactgtttgtttgttttttccatgtaggctatctattttgacacagatgttgtcctcagttgtgtttcaggactaaaagttttttagtaattgttcattattgagttagcactcatgtttttcgcttgatttgttgtgtgttggacttctctgtaatatcactatcatatgaactaggcagtagtatgatagatggaggatttctgagttagtttgacctctgcgctgtaatgttatctttagaaggtaaggaaaccgaaaaggctgaatttcaattatcaattatgtaccatgttgtcattgaaattcacttttttgtgctctaaatatgtaatgtagttattttagttcgtttctgatcgcagttttcctgcatacttgagaaaaaagaagcttgtttctgatcctttttttagtcatgccatgtggtatgagataacctgtcaggataaattatccaaaaatcattcctggttatgcagttccactaattagcagtaggtagtttattctataattgtattgaggcttgaattatgattttggttgggcatgtagtaagtagcatccaagaaatatggtttagttggaatatcttaatgcctcatgattagctctaaacctgccacaaattacttgacattcttctctacaggctttaccgaagggagctactgctatagttccacttgttatatttgatgatgcaattggtgatcatttatctactcttgatcagttttgataattcgtttttggatctggaacgaactagaggcgccaaaaggaagttgaactgagactattagagaaggagacggcaaaaagagttgaacaagctattaggaggaaggttgaggagagtctaaattgtgatgaaatcaaacatgaaatacatcgtcgaattgaggaaggacgaaagaggatacatgaggaggtagcaatccagattgagaaggaaaaggatgcagctttaaatgaagccaagctgaaagtggaacaagaaaaaaagaagcgggaggagctagagaaaaaacttgaagaagaacgaaagaaagctgaagaggcgttgatgaaagaagcgttggaacagcagcagaaagagctagagcggtaccaggagttggagaggcttcagaaagaaagagaggaggccatgaaacggaaaaaaatggaggaagagcagcagaggcaaaaccagatgaagctgctgggcaagaacaagtcgcggcctaagctgtcgtttgcttttgggatgaagtagcgttcgattcaccgaacgaaattagtgctttagtatactgtaaccgtgtagtgtagtacctctgtatgaaactgcccatttctaactctggcagacaaattgcgatgtcataaatgctcctgatctgcttcgtaagttgccggctcttggtggatgtggtttcatctgcttcttgctgttcagttggcgttgccttgcgagaagactgccagagaagaatccggttggtttgatcttgcatgtcaccaagatactatctccgtttgtgttgccccctagttcagcctgttcatatttgaactaaaacgtgataaataaaaaaaacgga

SEQ ID NO: 45194 - DNA, 1563 bp, Zea Mays
attacaatgagttgccactagatatacgcgaagcctctcccacctcatctgcctcgcgtgcggcggcggcgactccacctggcttgcgtcctcccgttttccagccagcaagccagactcctcccctctccgaagactccgatcgtccggattcatccagatccgggcgttctgagtcctgccgaggctctagatcgcgtcgcgcacgatgccacgcgacctgtcgcggtcgcggtctccgccgcgccgacgttggcggtcgccgtctcccgcgcggtaccgcggccggagggggcgcagggaccgaagccccagtcccatccgtagcaggtccccctatcgctcctcgtatagcttttactctgtgctgtattgctgtggaatgctccacccctgtaacagtgtctaagaaggaggagccctttgccttccccaagaaggcacaagagccgttctccgtctcctaggaggcgcaagagtccgtctccatcacaaaagcgttacagaagaaagagaagtccgagtgtcactagctctccagtcgctgcatctcagagttcccaccttgggttggcagagaataagaatgttattgatacacaaaggctagaagaagaaaagaaaaggctttaccgaagggagctactgctatagttccacttgttatatttgatgatgcaattggtgatcatttatctactcttgatcagttttgataattcgtttttggatctggaacgaactagaggcgccaaaaggaagttgaactgagactattagagaaggagacggcaaaaagagttgaacaagctattaggaggaaggttgaggagagtctaaattgtgatgaaatcaaacatgaaatacatcgtcgaattgaggaaggacgaaagaggatacatgaggaggtagcaatccagattgagaaggaaaaggatgcagctttaaatgaagccaagctgaaagtggaacaagaaaaaaagaagcgggaggagctagagaaaaaacttgaagaagaacgaaagaaagctgaagaggcgttgatgaaagaagcgttggaacagcagcagaaagagctagagcggtaccaggagttggagaggcttcagaaagaaagagaggaggccatgaaacggaaaaaaatggaggaagagcagcagaggcaaaaccagatgaagctgctgggcaagaacaagtcgcggcctaagctgtcgtttgcttttgggatgaagtagcgttcgattcaccgaacgaaattagtgctttagtatactgtaaccgtgtagtgtagtacctctgtatgaaactgcccatttctaactctggcagacaaattgcgatgtcataaatgctcctgatctgcttcgtaagttgccggctcttggtggatgtggtttcatctgcttcttgctgttcagttggcgttgccttgcgagaagactgccagagaagaatccggttggtttgatcttgcatgtcaccaagatactatctccgtttgtgttgccccctagttcagcctgttcatatttgaactaaaacgtgataaataaaaaaaacgga

SEQ ID NO: 45195 - DNA, 1483 bp, Zea Mays
attacaatgagttgccactagatatacgcgaagcctctcccacctcatctgcctcgcgtgcggcggcggcgactccacctggcttgcgtcctcccgttttccagccagcaagccagactcctcccctctccgaagactccgatcgtccggattcatccagatccgggcgttctgagtcctgccgaggctctagatcgcgtcgcgcacgatgccacgcgacctgtcgcggtcgcggtctccgccgcgccgacgttggcggtcgccgtctcccgcgcggtaccgcggccggagggggcgcagggaccgaagccccagtcccatccgtagcaggtccccctatcgctcctcgtatagcttttactctgtgctgtattgctgtggaatgctccacccctgtaacagtgtctaaggtaactgcttttgcccatgttttagggcttcaggagctaatgaaggaggagccctttgccttccccaagaaggcacaagagccgttctccgtctcctaggaggcgcaagagtccgtctccatcacaaaagcgttacagaagaaagagaagtccgagtgtcactagctctccagtcgctgcatctcagagttcccaccttgggttggcagagaataagaatgttattgatacacaaaggctagaagaagaaaagaaaaggcgccaaaaggaagttgaactgagactattagagaaggagacggcaaaaagagttgaacaagctattaggaggaaggttgaggagagtctaaattgtgatgaaatcaaacatgaaatacatcgtcgaattgaggaaggacgaaagaggatacatgaggaggtagcaatccagattgagaaggaaaaggatgcagctttaaatgaagccaagctgaaagtggaacaagaaaaaaagaagcgggaggagctagagaaaaaacttgaagaagaacgaaagaaagctgaagaggcgttgatgaaagaagcgttggaacagcagcagaaagagctagagcggtaccaggagttggagaggcttcagaaagaaagagaggaggccatgaaacggaaaaaaatggaggaagagcagcagaggcaaaaccagatgaagctgctgggcaagaacaagtcgcggcctaagctgtcgtttgcttttgggatgaagtagcgttcgattcaccgaacgaaattagtgctttagtatactgtaaccgtgtagtgtagtacctctgtatgaaactgcccatttctaactctggcagacaaattgcgatgtcataaatgctcctgatctgcttcgtaagttgccggctcttggtggatgtggtttcatctgcttcttgctgttcagttggcgttgccttgcgagaagactgccagagaagaatccggttggtttgatcttgcatgtcaccaagatactatctccgtttgtgttgccccctagttcagcctgttcatatttgaactaaaacgtgataaataaaaaaaacgga

SEQ ID NO: 45196 - DNA, 1507 bp, Zea Mays
attacaatgagttgccactagatatacgcgaagcctctcccacctcatctgcctcgcgtgcggcggcggcgactccacctggcttgcgtcctcccgttttccagccagcaagccagactcctcccctctccgaagactccgatcgtccggattcatccagatccgggcgttctgagtcctgccgaggctctagatcgcgtcgcgcacgatgccacgcgacctgtcgcggtcgcggtctccgccgcgccgacgttggcggtcgccgtctcccgcgcggtaccgcggccggagggggcgcagggaccgaagccccagtcccatccgtagcaggtccccctatcgctcctcgtatagaaggaggagccctttgccttccccaagaaggcacaagagccgttctccgtctcctaggaggcgcaagagtccgtctccatcacaaaagcgttacagaagaaagagaagtccgagtgtcactagctctccagtcgctgcatctcagagttcccaccttgggttggcagagaataagaatgttattgatacacaaaggctagaagaagaaaagaaaaggctttaccgaagggagctactgctatagttccacttgttatatttgatgatgcaattggtgatcatttatctactcttgatcagttttgataattcgtttttggatctggaacgaactagaggcgccaaaaggaagttgaactgagactattagagaaggagacggcaaaaagagttgaacaagctattaggaggaaggttgaggagagtctaaattgtgatgaaatcaaacatgaaatacatcgtcgaattgaggaaggacgaaagaggatacatgaggaggtagcaatccagattgagaaggaaaaggatgcagctttaaatgaagccaagctgaaagtggaacaagaaaaaaagaagcgggaggagctagagaaaaaacttgaagaagaacgaaagaaagctgaagaggcgttgatgaaagaagcgttggaacagcagcagaaagagctagagcggtaccaggagttggagaggcttcagaaagaaagagaggaggccatgaaacggaaaaaaatggaggaagagcagcagaggcaaaaccagatgaagctgctgggcaagaacaagtcgcggcctaagctgtcgtttgcttttgggatgaagtagcgttcgattcaccgaacgaaattagtgctttagtatactgtaaccgtgtagtgtagtacctctgtatgaaactgcccatttctaactctggcagacaaattgcgatgtcataaatgctcctgatctgcttcgtaagttgccggctcttggtggatgtggtttcatctgcttcttgctgttcagttggcgttgccttgcgagaagactgccagagaagaatccggttggtttgatcttgcatgtcaccaagatactatctccgtttgtgttgccccctagttcagcctgttcatatttgaactaaaacgtgataaataaaaaaaacgga

SEQ ID NO: 45197 - DNA, 2130 bp, Zea Mays
attacaatgagttgccactagatatacgcgaagcctctcccacctcatctgcctcgcgtgcggcggcggcgactccacctggcttgcgtcctcccgttttccagccagcaagccagactcctcccctctccgaagactccgatcgtccggattcatccagatccgggcgttctgagtcctgccgaggctctagatcgcgtcgcgcacgatgccacgcgacctgtcgcggtcgcggtctccgccgcgccgacgttggcggtcgccgtctcccgcgcggtaccgcggccggagggggcgcagggaccgaagccccagtcccatccgtagcaggtccccctatcgctcctcgtataggtgaccacacctcccgttacacgcagaaatctggcgagtcttcgttttattttttgggggtttgtactgtaaaaaaaagaagtgaggcgatgctgaccgccttcattgaaattttgtactattgcttgcttgatggaaacggggcttggtgctcttatgattatttgatctatcaactgtttgttggtgttactgttagaggtagccagcgcggtagtatattgtgctatgtcatatctgcatgaactatggtttatgaatgtgcaaatttcataatacttcggagcgatcaagatttctgatttccaaaggaagaaaaatgcttcggattcttttgcattacagagttagaataaaaatacttcgatgcagcatggaatatatcagcagatgaagcttagatatagttatgccatgttttgcactacttgcctgtacagactaacaagagttgctttcgtaaaacgcatggaatctacaaagcttttactctgtgctgtattgctgtggaatgctccacccctgtaacagtgtctaaggtaactgcttttgcccatgttttagggcttcaggagctaatgaaggaggagccctttgccttccccaagaaggcacaagagccgttctccgtctcctaggaggcgcaagagtccgtctccatcacaaaagcgttacagaagaaagagaagtccgagtgtcactagctctccagtcgctgcatctcagagttcccaccttgggttggcagagaataagaatgttattgatacacaaaggctagaagaagaaaagaaaagggaacatgcctcagtagaattgatgaaagaaataaaagaagggctttaccgaagggagctactgctatagttccacttgttatatttgatgatgcaattggtgatcatttatctactcttgatcagttttgataattcgtttttggatctggaacgaactagaggcgccaaaaggaagttgaactgagactattagagaaggagacggcaaaaagagttgaacaagctattaggaggaaggttgaggagagtctaaattgtgatgaaatcaaacatgaaatacatcgtcgaattgaggaaggacgaaagaggatacatgaggaggtagcaatccagattgagaaggaaaaggatgcagctttaaatgaagccaagctgaaagtggaacaagaaaaaaagaagcgggaggagctagagaaaaaacttgaagaagaacgaaagaaagctgaagaggcgttgatgaaagaagcgttggaacagcagcagaaagagctagagcggtaccaggagttggagaggcttcagaaagaaagagaggaggccatgaaacggaaaaaaatggaggaagagcagcagaggcaaaaccagatgaagctgctgggcaagaacaagtcgcggcctaagctgtcgtttgcttttgggatgaagtagcgttcgattcaccgaacgaaattagtgctttagtatactgtaaccgtgtagtgtagtacctctgtatgaaactgcccatttctaactctggcagacaaattgcgatgtcataaatgctcctgatctgcttcgtaagttgccggctcttggtggatgtggtttcatctgcttcttgctgttcagttggcgttgccttgcgagaagactgccagagaagaatccggttggtttgatcttgcatgtcaccaagatactatctccgtttgtgttgccccctagttcagcctgttcatatttgaactaaaacgtgataaataaaaaaaacgga

SEQ ID NO: 45198 - DNA, 1549 bp, Zea Mays
attacaatgagttgccactagatatacgcgaagcctctcccacctcatctgcctcgcgtgcggcggcggcgactccacctggcttgcgtcctcccgttttccagccagcaagccagactcctcccctctccgaagactccgatcgtccggattcatccagatccgggcgttctgagtcctgccgaggctctagatcgcgtcgcgcacgatgccacgcgacctgtcgcggtcgcggtctccgccgcgccgacgttggcggtcgccgtctcccgcgcggtaccgcggccggagggggcgcagggaccgaagccccagtcccatccgtagcaggtccccctatcgctcctcgtatagaaggaggagccctttgccttccccaagaaggcacaagagccgttctccgtctcctaggaggcgcaagagtccgtctccatcacaaaagcgttacagaagaaagagaagtccgagtgtcactagctctccagtcgctgcatctcagagttcccaccttgggttggcagagaataagaatgttattgatacacaaaggctagaagaagaaaagaaaagggaacatgcctcagtagaattgatgaaagaaataaaagaagggctttaccgaagggagctactgctatagttccacttgttatatttgatgatgcaattggtgatcatttatctactcttgatcagttttgataattcgtttttggatctggaacgaactagaggcgccaaaaggaagttgaactgagactattagagaaggagacggcaaaaagagttgaacaagctattaggaggaaggttgaggagagtctaaattgtgatgaaatcaaacatgaaatacatcgtcgaattgaggaaggacgaaagaggatacatgaggaggtagcaatccagattgagaaggaaaaggatgcagctttaaatgaagccaagctgaaagtggaacaagaaaaaaagaagcgggaggagctagagaaaaaacttgaagaagaacgaaagaaagctgaagaggcgttgatgaaagaagcgttggaacagcagcagaaagagctagagcggtaccaggagttggagaggcttcagaaagaaagagaggaggccatgaaacggaaaaaaatggaggaagagcagcagaggcaaaaccagatgaagctgctgggcaagaacaagtcgcggcctaagctgtcgtttgcttttgggatgaagtagcgttcgattcaccgaacgaaattagtgctttagtatactgtaaccgtgtagtgtagtacctctgtatgaaactgcccatttctaactctggcagacaaattgcgatgtcataaatgctcctgatctgcttcgtaagttgccggctcttggtggatgtggtttcatctgcttcttgctgttcagttggcgttgccttgcgagaagactgccagagaagaatccggttggtttgatcttgcatgtcaccaagatactatctccgtttgtgttgccccctagttcagcctgttcatatttgaactaaaacgtgataaataaaaaaaacgga

SEQ ID NO: 45199 - DNA, 3173 bp, Zea Mays
attacaatgagttgccactagatatacgcgaagcctctcccacctcatctgcctcgcgtgcggcggcggcgactccacctggcttgcgtcctcccgttttccagccagcaagccagactcctcccctctccgaagactccgatcgtccggattcatccagatccgggcgttctgagtcctgccgaggctctagatcgcgtcgcgcacgatgccacgcgacctgtcgcggtcgcggtctccgccgcgccgacgttggcggtcgccgtctcccgcgcggtaccgcggccggagggggcgcagggaccgaagccccagtcccatccgtagcaggtccccctatcgctcctcgtataggtgaccacacctcccgttacacgcagaaatctggcgagtcttcgttttattttttgggggtttgtactgtaaaaaaaagaagtgaggcgatgctgaccgccttcattgaaattttgtactattgcttgcttgatggaaacggggcttggtgctcttatgattatttgatctatcaactgtttgttggtgttactgttagaggtagccagcgcggtagtatattgtgctatgtcatatctgcatgaactatggtttatgaatgtgcaaatttcataatacttcggagcgatcaagatttctgatttccaaaggaagaaaaatgcttcggattcttttgcattacagagttagaataaaaatacttcgatgcagcatggaatatatcagcagatgaagcttagatatagttatgccatgttttgcactacttgcctgtacagactaacaagagttgctttcgtaaaacgcatggaatctacaaagcttttactctgtgctgtattgctgtggaatgctccacccctgtaacagtgtctaaggtaactgcttttgcccatgttttagggcttcaggagctaatggtaattccttgtctattgttgtgatgactcattgactctaattttattcttacggtgctcatctttgtcttgcagaaggaggagccctttgccttccccaagaaggcacaagagccgttctccgtctcctaggaggcgcaagagtccgtctccatcacaaaagcgttacagaagaaagagaagtccgagtgtcactagctctccagtcgctgcatctcagagttcccaccttgggttggcagagaataagaatgttattgatacacaaaggctagaagaagaaaagaaaaggtgggaagtatctgcttttctatgcagtctacattatttcttctacaaacccagctattcactgttgcaccctttctgtaactcttccgtgatgctaacaatgaaattctactaatctagttgctgtttgcaccggaatatatcacaaggtcagctctatttgataatctgttgaccatctgttttcctgagtacatacgtgcaatattatttttggattttgcaagtactacaaacataaatatgacttgagcatctgactgccggatgtgaatcacgtaggttatatgagacaattgtggcttaaggtgcaagtgcaaattcagtaggagtttctgtattccttgaaatcgcgacgttagttgtagctacctggaaaaaatcacctgcgattaacacagggcaacatgacttcaatgtaaaaaaaaaggtttgggatttaacaaaaaaaattgtaattttgtgtccacaaatttaaattgtttctgagcaagaagtttttttgttttccatgtggtatctactaagaaatgtaatgcctttctactgtacattgaacacttttcaaaggtactctttgtagtttgttttggacttgaattgtagttctggtgaactaatatctgtgatgtaacatatgttccagaagttgtgattcaaaacatttatattcttgttggaaattagtctgaaacccaccattttaacagggaacatgcctcagtagaattgatgaaagaaataaaagaagggtatgtgtgaaatattaccagtatcatttcataaattttacagcagtttgtattaactattgtgcacgtcaccttggaaaccattaattttttttaaaaaaaaatcatgaatgcttcttgagatgtttggtgtagttgtcagagctgtcttactgagtcatcaggtcatgggttcgaagcaacttctccacatttatgtgggaaggctcgcctcggcttatcccttcacagacgctactcatgtgggagcctccagcagctttaccgaagggagctactgctatagttccacttgttatatttgatgatgcaattggtgatcatttatctactcttgatcagttttgataattcgtttttggatctggaacgaactagaggcgccaaaaggaagttgaactgagactattagagaaggagacggcaaaaagagttgaacaagctattaggaggaaggttgaggagagtctaaattgtgatgaaatcaaacatgaaatacatcgtcgaattgaggaaggacgaaagaggatacatgaggaggtagcaatccagattgagaaggaaaaggatgcagctttaaatgaagccaagctgaaagtggaacaagaaaaaaagaagcgggaggagctagagaaaaaacttgaagaagaacgaaagaaagctgaagaggcgttgatgaaagaagcgttggaacagcagcagaaagagctagagcggtaccaggagttggagaggcttcagaaagaaagagaggaggccatgaaacggaaaaaaatggaggaagagcagcagaggcaaaaccagatgaagctgctgggcaagaacaagtcgcggcctaagctgtcgtttgcttttgggatgaagtagcgttcgattcaccgaacgaaattagtgctttagtatactgtaaccgtgtagtgtagtacctctgtatgaaactgcccatttctaactctggcagacaaattgcgatgtcataaatgctcctgatctgcttcgtaagttgccggctcttggtggatgtggtttcatctgcttcttgctgttcagttggcgttgccttgcgagaagactgccagagaagaatccggttggtttgatcttgcatgtcaccaagatactatctccgtttgtgttgccccctagttcagcctgttcatatttgaactaaaacgtgataaataaaaaaaacgga

SEQ ID NO: 45200 - DNA, 3010 bp, Zea Mays
attacaatgagttgccactagatatacgcgaagcctctcccacctcatctgcctcgcgtgcggcggcggcgactccacctggcttgcgtcctcccgttttccagccagcaagccagactcctcccctctccgaagactccgatcgtccggattcatccagatccgggcgttctgagtcctgccgaggctctagatcgcgtcgcgcacgatgccacgcgacctgtcgcggtcgcggtctccgccgcgccgacgttggcggtcgccgtctcccgcgcggtaccgcggccggagggggcgcagggaccgaagccccagtcccatccgtagcaggtccccctatcgctcctcgtatagcttttactctgtgctgtattgctgtggaatgctccacccctgtaacagtgtctaaggtaactgcttttgcccatgttttagggcttcaggagctaatggtaattccttgtctattgttgtgatgactcattgactctaattttattcttacggtgctcatctttgtcttgcagaaggaggagccctttgccttccccaagaaggcacaagagccgttctccgtctcctaggaggcgcaagagtccgtctccatcacaaaagcgttacagaagaaagagaagtccgagtgtcactagctctccagtcgctgcatctcagagttcccaccttgggttggcagagaataagaatgttattgatacacaaaggctagaagaagaaaagaaaagggaacatgcctcagtagaattgatgaaagaaataaaagaagggtatgtgtgaaatattaccagtatcatttcataaattttacagcagtttgtattaactattgtgcacgtcaccttggaaaccattaattttttttaaaaaaaaatcatgaatgcttcttgagatgtttggtgtagttgtcagagctgtcttactgagtcatcaggtcatgggttcgaagcaacttctccacatttatgtgggaaggctcgcctcggcttatcccttcacagacgctactcatgtgggagcctccagcagtaagtctgcccaatgctccttgagatgtgccatcagaagagtttttttccacataaacacaaagttacagaaaaaattatgcatgatttttattgactattttttgagcaaagagataagctattgccaggattaaaaaaactagaccaacataggaggaaccaggtggcattttattatcaagaagaaaatagccatgcaaattttccttgacgaggactagaacctaggtggcctgggctagccacagaaccacatgctctaccaattgcgatagatcagcttccttaacagtgagcatacggtcaggattgtctgagcatacaaccaggattatgtcatatatgttgattggaattatatattgtgattgcaactgtttgtttgttttttccatgtaggctatctattttgacacagatgttgtcctcagttgtgtttcaggactaaaagttttttagtaattgttcattattgagttagcactcatgtttttcgcttgatttgttgtgtgttggacttctctgtaatatcactatcatatgaactaggcagtagtatgatagatggaggatttctgagttagtttgacctctgcgctgtaatgttatctttagaaggtaaggaaaccgaaaaggctgaatttcaattatcaattatgtaccatgttgtcattgaaattcacttttttgtgctctaaatatgtaatgtagttattttagttcgtttctgatcgcagttttcctgcatacttgagaaaaaagaagcttgtttctgatcctttttttagtcatgccatgtggtatgagataacctgtcaggataaattatccaaaaatcattcctggttatgcagttccactaattagcagtaggtagtttattctataattgtattgaggcttgaattatgattttggttgggcatgtagtaagtagcatccaagaaatatggtttagttggaatatcttaatgcctcatgattagctctaaacctgccacaaattacttgacattcttctctacaggctttaccgaagggagctactgctatagttccacttgttatatttgatgatgcaattggtgatcatttatctactcttgatcagttttgataattcgtttttggatctggaacgaactagaggcgccaaaaggaagttgaactgagactattagagaaggagacggcaaaaagagttgaacaagctattaggaggaaggttgaggagagtctaaattgtgatgaaatcaaacatgaaatacatcgtcgaattgaggaaggacgaaagaggatacatgaggaggtagcaatccagattgagaaggaaaaggatgcagctttaaatgaagccaagctgaaagtggaacaagaaaaaaagaagcgggaggagctagagaaaaaacttgaagaagaacgaaagaaagctgaagaggcgttgatgaaagaagcgttggaacagcagcagaaagagctagagcggtaccaggagttggagaggcttcagaaagaaagagaggaggccatgaaacggaaaaaaatggaggaagagcagcagaggcaaaaccagatgaagctgctgggcaagaacaagtcgcggcctaagctgtcgtttgcttttgggatgaagtagcgttcgattcaccgaacgaaattagtgctttagtatactgtaaccgtgtagtgtagtacctctgtatgaaactgcccatttctaactctggcagacaaattgcgatgtcataaatgctcctgatctgcttcgtaagttgccggctcttggtggatgtggtttcatctgcttcttgctgttcagttggcgttgccttgcgagaagactgccagagaagaatccggttggtttgatcttgcatgtcaccaagatactatctccgtttgtgttgccccctagttcagcctgttcatatttgaactaaaacgtgataaataaaaaaaacgga

SEQ ID NO: 45201 - DNA, 2915 bp, Zea Mays
attacaatgagttgccactagatatacgcgaagcctctcccacctcatctgcctcgcgtgcggcggcggcgactccacctggcttgcgtcctcccgttttccagccagcaagccagactcctcccctctccgaagactccgatcgtccggattcatccagatccgggcgttctgagtcctgccgaggctctagatcgcgtcgcgcacgatgccacgcgacctgtcgcggtcgcggtctccgccgcgccgacgttggcggtcgccgtctcccgcgcggtaccgcggccggagggggcgcagggaccgaagccccagtcccatccgtagcaggtccccctatcgctcctcgtataggtgaccacacctcccgttacacgcagaaatctggcgagtcttcgttttattttttgggggtttgtactgtaaaaaaaagaagtgaggcgatgctgaccgccttcattgaaattttgtactattgcttgcttgatggaaacggggcttggtgctcttatgattatttgatctatcaactgtttgttggtgttactgttagaggtagccagcgcggtagtatattgtgctatgtcatatctgcatgaactatggtttatgaatgtgcaaatttcataatacttcggagcgatcaagatttctgatttccaaaggaagaaaaatgcttcggattcttttgcattacagagttagaataaaaatacttcgatgcagcatggaatatatcagcagatgaagcttagatatagttatgccatgttttgcactacttgcctgtacagactaacaagagttgctttcgtaaaacgcatggaatctacaaagcttttactctgtgctgtattgctgtggaatgctccacccctgtaacagtgtctaaggtaactgcttttgcccatgttttagggcttcaggagctaatggtaattccttgtctattgttgtgatgactcattgactctaattttattcttacggtgctcatctttgtcttgcagaaggaggagccctttgccttccccaagaaggcacaagagccgttctccgtctcctaggaggcgcaagagtccgtctccatcacaaaagcgttacagaagaaagagaagtccgagtgtcactagctctccagtcgctgcatctcagagttcccaccttgggttggcagagaataagaatgttattgatacacaaaggctagaagaagaaaagaaaaggtgggaagtatctgcttttctatgcagtctacattatttcttctacaaacccagctattcactgttgcaccctttctgtaactcttccgtgatgctaacaatgaaattctactaatctagttgctgtttgcaccggaatatatcacaaggtcagctctatttgataatctgttgaccatctgttttcctgagtacatacgtgcaatattatttttggattttgcaagtactacaaacataaatatgacttgagcatctgactgccggatgtgaatcacgtaggttatatgagacaattgtggcttaaggtgcaagtgcaaattcagtaggagtttctgtattccttgaaatcgcgacgttagttgtagctacctggaaaaaatcacctgcgattaacacagggcaacatgacttcaatgtaaaaaaaaaggtttgggatttaacaaaaaaaattgtaattttgtgtccacaaatttaaattgtttctgagcaagaagtttttttgttttccatgtggtatctactaagaaatgtaatgcctttctactgtacattgaacacttttcaaaggtactctttgtagtttgttttggacttgaattgtagttctggtgaactaatatctgtgatgtaacatatgttccagaagttgtgattcaaaacatttatattcttgttggaaattagtctgaaacccaccattttaacagggaacatgcctcagtagaattgatgaaagaaataaaagaagggctttaccgaagggagctactgctatagttccacttgttatatttgatgatgcaattggtgatcatttatctactcttgatcagttttgataattcgtttttggatctggaacgaactagaggcgccaaaaggaagttgaactgagactattagagaaggagacggcaaaaagagttgaacaagctattaggaggaaggttgaggagagtctaaattgtgatgaaatcaaacatgaaatacatcgtcgaattgaggaaggacgaaagaggatacatgaggaggtagcaatccagattgagaaggaaaaggatgcagctttaaatgaagccaagctgaaagtggaacaagaaaaaaagaagcgggaggagctagagaaaaaacttgaagaagaacgaaagaaagctgaagaggcgttgatgaaagaagcgttggaacagcagcagaaagagctagagcggtaccaggagttggagaggcttcagaaagaaagagaggaggccatgaaacggaaaaaaatggaggaagagcagcagaggcaaaaccagatgaagctgctgggcaagaacaagtcgcggcctaagctgtcgtttgcttttgggatgaagtagcgttcgattcaccgaacgaaattagtgctttagtatactgtaaccgtgtagtgtagtacctctgtatgaaactgcccatttctaactctggcagacaaattgcgatgtcataaatgctcctgatctgcttcgtaagttgccggctcttggtggatgtggtttcatctgcttcttgctgttcagttggcgttgccttgcgagaagactgccagagaagaatccggttggtttgatcttgcatgtcaccaagatactatctccgtttgtgttgccccctagttcagcctgttcatatttgaactaaaacgtgataaataaaaaaaacgga

SEQ ID NO: 45202 - DNA, 1722 bp, Zea Mays
attacaatgagttgccactagatatacgcgaagcctctcccacctcatctgcctcgcgtgcggcggcggcgactccacctggcttgcgtcctcccgttttccagccagcaagccagactcctcccctctccgaagactccgatcgtccggattcatccagatccgggcgttctgagtcctgccgaggctctagatcgcgtcgcgcacgatgccacgcgacctgtcgcggtcgcggtctccgccgcgccgacgttggcggtcgccgtctcccgcgcggtaccgcggccggagggggcgcagggaccgaagccccagtcccatccgtagcaggtccccctatcgctcctcgtatagcttttactctgtgctgtattgctgtggaatgctccacccctgtaacagtgtctaaggtaactgcttttgcccatgttttagggcttcaggagctaatggtaattccttgtctattgttgtgatgactcattgactctaattttattcttacggtgctcatctttgtcttgcagaaggaggagccctttgccttccccaagaaggcacaagagccgttctccgtctcctaggaggcgcaagagtccgtctccatcacaaaagcgttacagaagaaagagaagtccgagtgtcactagctctccagtcgctgcatctcagagttcccaccttgggttggcagagaataagaatgttattgatacacaaaggctagaagaagaaaagaaaagggaacatgcctcagtagaattgatgaaagaaataaaagaagggctttaccgaagggagctactgctatagttccacttgttatatttgatgatgcaattggtgatcatttatctactcttgatcagttttgataattcgtttttggatctggaacgaactagaggcgccaaaaggaagttgaactgagactattagagaaggagacggcaaaaagagttgaacaagctattaggaggaaggttgaggagagtctaaattgtgatgaaatcaaacatgaaatacatcgtcgaattgaggaaggacgaaagaggatacatgaggaggtagcaatccagattgagaaggaaaaggatgcagctttaaatgaagccaagctgaaagtggaacaagaaaaaaagaagcgggaggagctagagaaaaaacttgaagaagaacgaaagaaagctgaagaggcgttgatgaaagaagcgttggaacagcagcagaaagagctagagcggtaccaggagttggagaggcttcagaaagaaagagaggaggccatgaaacggaaaaaaatggaggaagagcagcagaggcaaaaccagatgaagctgctgggcaagaacaagtcgcggcctaagctgtcgtttgcttttgggatgaagtagcgttcgattcaccgaacgaaattagtgctttagtatactgtaaccgtgtagtgtagtacctctgtatgaaactgcccatttctaactctggcagacaaattgcgatgtcataaatgctcctgatctgcttcgtaagttgccggctcttggtggatgtggtttcatctgcttcttgctgttcagttggcgttgccttgcgagaagactgccagagaagaatccggttggtttgatcttgcatgtcaccaagatactatctccgtttgtgttgccccctagttcagcctgttcatatttgaactaaaacgtgataaataaaaaaaacgga

SEQ ID NO: 45203 - DNA, 2506 bp, Zea Mays
cagcccaactctctcgcagccaatcccgccgctccgccgcccgcacccaatccgtttctctcacccccgccactcgccagcaacgcggacacgccctccgccgctcttcctctgcaccccagtcctctcccacaaccacttccggcggccacgccctcggcttctccgtacttgctgctcgcccgtcccaccaccataattttccaccagcgattgtaaatttgtgggaggcacattcgccgaggatggctgtaaccctacttcgagggatgagaacgccgataccattcagatcgaactccggcttcttctccactgtcctacggcctcggttgtcccgcttcacgactagggcggagagtgcgcaggccacagaacccaaagcggcgcccaggtcaattcagctggcgaccaaggaggcggctgagcagaaaacacaaggcttcgaagccatcatcgggattgagacccatgtccagctctcgaccgtcacgaaggcgttctgctcctgcccttacagctatggttcccagcccaacagcactatctgccccacctgcatgggccacccggggacgctgccggttctgaatgagaaggtggtcgagtgcgccgtgaagctggggctcgccctcaactgcgagatctcaatgacgtccaagtttgatcgcaagcagtatttctacccggacctccccaaggggtaccagatttcccagtttgacatccccattgccaagaagggttgtgtcgatttggaccttccagtggagtttggtggtgggcataggaaatttggggtcacaagggttcacatggaagaagatgctggcaagctgcttcattctgaatccagcagctactctcaggttgacctaaacagggctggcgtacctttgctcgaaattgtctcagagccagacatgagaacagggatagaagctgctgagtatggtgctgaactgcaaaggattgttaggtacctgggagtgagtaatggtaatatgcaagaaggttcccttcgttgtgatgtgaacgtttctgttcgaccagttggacaatcagaatttggtacaaaggtggaaataaagaatatgaactcattttctgcgataaatagggcaatcgattatgagatctcccggcagattctgctccataaagaaggccaggctgatcaaattgtacaagaaacccgcctgtgggatgaatcttctcagaaaacttttacaatgcgaaaaaaggagggacttgccgactatagatattttccagaacctgatcttcctgaagtagttatcactagtgactatattaatgaaatcagcaagtcaatgccggagcttccagaagcaaagcgtaggcgttatgagaatatgggactcagcatgcaagatgttctgttccttgctaatgatgataatattggtcatttctttgattctactcttgagcatggtgctgatgcaaagctggctgccaactggatcatgggtgacatcgctgcttatctcaaagatgaaaaagtatccattgatgaaattaaattaacacctctagagctttctgaactgatagcatcaattaagaatggaactataagtgggaagatcggcaaggagatactggccgagctcattgccaaaggcggaacagttaaggctgtgatagaagagaaagatttggttcagatagcagatccagcagcaattgaggcaatggtagataaagtaattgctgataatccaaagcaacttgagcagtaccgttgaggagagtctaaattgtgatgaaatcaaacatgaaatacatcgtcgaattgaggaaggacgaaagaggatacatgaggaggtagcaatccagattgagaaggaaaaggatgcagctttaaatgaagccaagctgaaagtggaacaagaaaaaaagaagcgggaggagctagagaaaaaacttgaagaagaacgaaagaaagctgaagaggcgttgatgaaagaagcgttggaacagcagcagaaagagctagagcggtaccaggagttggagaggcttcagaaagaaagagaggaggccatgaaacggaaaaaaatggaggaagagcagcagaggcaaaaccagatgaagctgctgggcaagaacaagtcgcggcctaagctgtcgtttgcttttgggatgaagtagcgttcgattcaccgaacgaaattagtgctttagtatactgtaaccgtgtagtgtagtacctctgtatgaaactgcccatttctaactctggcagacaaattgcgatgtcataaatgctcctgatctgcttcgtaagttgccggctcttggtggatgtggtttcatctgcttcttgctgttcagttggcgttgccttgcgagaagactgccagagaagaatccggttggtttgatcttgcatgtcaccaagatactatctccgtttgtgttgccccctagttcagcctgttcatatttgaactaaaacgtgataaataaaaaaaacgga

SEQ ID NO: 45204 - DNA, 2665 bp, Zea Mays
cggcacagcccaactctctcgcagccaatcccgccgctccgccgcccgcacccaatccgtttctctcacccccgccactcgccagcaacgcggacacgccctccgccgctcttcctctgcaccccagtcctctcccacaaccacttccggcggccacgccctcggcttctccgtacttgctgctcgcccgtcccaccaccataattttccaccagcgattgtaaatttgtgggaggcacattcgccgaggatggctgtaaccctacttcgagggatgagaacgccgataccattcagatcgaactccggcttcttctccactgtcctacggcctcggttgtcccgcttcacgactagggcggagagtgcgcaggccacagaacccaaagcggcgcccaggtcaattcagctggcgaccaaggaggcggctgagcagaaaacacaaggcttcgaagccatcatcgggattgagacccatgtccagctctcgaccgtcacgaaggcgttctgctcctgcccttacagctatggttcccagcccaacagcactatctgccccacctgcatgggccacccggggacgctgccggttctgaatgagaaggtggtcgagtgcgccgtgaagctggggctcgccctcaactgcgagatctcaatgacgtccaagtttgatcgcaagcagtatttctacccggacctccccaaggggtaccagatttcccagtttgacatccccattgccaagaagggttgtgtcgatttggaccttccagtggagtttggtggtgggcataggaaatttggggtcacaagggttcacatggaagaagatgctggcaagctgcttcattctgaatccagcagctactctcaggttgacctaaacagggctggcgtacctttgctcgaaattgtctcagagccagacatgagaacagggatagaagctgctgagtatggtgctgaactgcaaaggattgttaggtacctgggagtgagtaatggtaatatgcaagaaggttcccttcgttgtgatgtgaacgtttctgttcgaccagttggacaatcagaatttggtacaaaggtggaaataaagaatatgaactcattttctgcgataaatagggcaatcgattatgagatctcccggcagattctgctccataaagaaggccaggctgatcaaattgtacaagaaacccgcctgtgggatgaatcttctcagaaaacttttacaatgcgaaaaaaggagggacttgccgactatagatattttccagaacctgatcttcctgaagtagttatcactagtgactatattaatgaaatcagcaagtcaatgccggagcttccagaagcaaagcgtaggcgttatgagaatatgggactcagcatgcaagatgttctgttccttgctaatgatgataatattggtcatttctttgattctactcttgagcatggtgctgatgcaaagctggctgccaactggatcatgggtgacatcgctgcttatctcaaagatgaaaaagtatccattgatgaaattaaattaacacctctagagctttctgaactgatagcatcaattaagaatggaactataagtgggaagatcggcaaggagatactggccgagctcattgccaaaggcggaacagttaaggctgtgatagaagagaaagatttggttcagatagcagatccagcagcaattgaggcaatggtagataaagtaattgctgataatccaaagcaacttgagcagtaccgtgctggaaaaactaagctacaaggattttttgctggccaggtgatgaaagcatcgaaggggaaggccaacccagttttgttgaataaaattcttggagagaagctaaatgccaaataattatttttacccccatactgaatctcaggcgtccatgaagaatgggacttcaaattcatagaatgagattaatgtgaacgacgtagaagttttgtccacaatacagatattattgtactaagctgatactttaaaagggcgtgttcattatattttatgcgatagcttgccctaatcatttgtgcaaaaaaaagaagcgggaggagctagagaaaaaacttgaagaagaacgaaagaaagctgaagaggcgttgatgaaagaagcgttggaacagcagcagaaagagctagagcggtaccaggagttggagaggcttcagaaagaaagagaggaggccatgaaacggaaaaaaatggaggaagagcagcagaggcaaaaccagatgaagctgctgggcaagaacaagtcgcggcctaagctgtcgtttgcttttgggatgaagtagcgttcgattcaccgaacgaaattagtgctttagtatactgtaaccgtgtagtgtagtacctctgtatgaaactgcccatttctaactctggcagacaaattgcgatgtcataaatgctcctgatctgcttcgtaagttgccggctcttggtggatgtggtttcatctgcttcttgctgttcagttggcgttgccttgcgagaagactgccagagaagaatccggttggtttgatcttgcatgtcaccaagatactatctccgtttgtgttgccccctagttcagcctgttcatatttgaactaaaacgtgataaataaaaaaaacgga

SEQ ID NO: 45205 - DNA, 3170 bp, Zea Mays
cagcccaactctctcgcagccaatcccgccgctccgccgcccgcacccaatccgtttctctcacccccgccactcgccagcaacgcggacacgccctccgccgctcttcctctgcaccccagtcctctcccacaaccacttccggcggccacgccctcggcttctccgtacttgctgctcgcccgtcccaccaccataattttccaccagcgattgtaaatttgtgggaggcacattcgccgaggatggctgtaaccctacttcgagggatgagaacgccgataccattcagatcgaactccggcttcttctccactgtcctacggcctcggttgtcccgcttcacgactagggcggagagtgcgcaggccacagaacccaaagcggcgcccaggtcaattcagctggcgaccaaggaggcggctgagcagaaaacacaaggcttcgaagccatcatcgggattgagacccatgtccagctctcgaccgtcacgaaggcgttctgctcctgcccttacagctatggttcccagcccaacagcactatctgccccacctgcatgggccacccggggacgctgccggttctgaatgagaaggtggtcgagtgcgccgtgaagctggggctcgccctcaactgcgagatctcaatgacgtccaagtttgatcgcaagcagtatttctacccggacctccccaaggggtaccagatttcccagtttgacatccccattgccaagaagggttgtgtcgatttggaccttccagtggagtttggtggtgggcataggaaatttggggtcacaagggttcacatggaagaagatgctggcaagctgcttcattctgaatccagcagctactctcaggtcttccttgtctactaatgattgcttaatttctgtgtactactgtaagatattgtgatattcggatctgcttgtcatgtctttctggcataacagtttcgtaaccacaagatcagttttgacatttaccacggtgcattagaaaacttatagattagtgaatagaaccctagaaaaatattaaagattgtatatcagggaccttaagtgggcatttggatctgaggcaagggggatcctagctttacagcgaaaggattgaagttttataggacatcaaaattcaaaagacttattttggggcaatataatctgcaatcacgagcaaaagcttgctctgtgaagagagccaaatcagtttggcaccaaaagaaaagtagcgctgcagtgaaaaaaaagtctggcaactgctattcagaattatggccaaacattaatccttttctattgctggttgtagaacagatgggggagctaggtataatctcagcagtcccatcttcctggtgaaagtaactatttgaaagtttgaatcatctggctataaatgcatgtgataggctcacacaagaaagtatgtttttttgtgtaagtatgacatatggaacacaatacaatgatacagataataaaccataaacactgctctaatattgacaggggaaatccagagggaatgaaaagaattacacagcgtctcatcacataaaagtacagcagcttcagttattgatcagtggttgctactttggctggttaggttgacctaaacagggctggcgtacctttgctcgaaattgtctcagagccagacatgagaacagggatagaagctgctgagtatggtgctgaactgcaaaggattgttaggtacctgggagtgagtaatggtaatatgcaagaaggttcccttcgttgtgatgtgaacgtttctgttcgaccagttggacaatcagaatttggtacaaaggtggaaataaagaatatgaactcattttctgcgataaatagggcaatcgattatgagatctcccggcagattctgctccataaagaaggccaggctgatcaaattgtacaagaaacccgcctgtgggatgaatcttctcagaaaacttttacaatgcgaaaaaaggagggacttgccgactatagatattttccagaacctgatcttcctgaagtagttatcactagtgactatattaatgaaatcagcaagtcaatgccggagcttccagaagcaaagcgtaggcgttatgagaatatgggactcagcatgcaagatgttctgttccttgctaatgatgataatattggtcatttctttgattctactcttgagcatggtgctgatgcaaagctggctgccaactggatcatgggtgacatcgctgcttatctcaaagatgaaaaagtatccattgatgaaattaaattaacacctctagagctttctgaactgatagcatcaattaagaatggaactataagtgggaagatcggcaaggagatactggccgagctcattgccaaaggcggaacagttaaggctgtgatagaagagaaagatttggttcagatagcagatccagcagcaattgaggcaatggtagataaagtaattgctgataatccaaagcaacttgagcagtaccgtgctggaaaaactaagctacaaggattttttgctggccaggtgatgaaagcatcgaaggggaaggccaacccagttttgttgaataaaattcttggagagaagctaaatgccaaataattatttttacccccatactgaatctcaggcgtccatgaagaatgggacttcaaattcatagaatgagattaatgtgaacgacgtagaagttttgtccacaatacagatattattgtactaagctgatactttaaaagggcgtgttcattatattttatgcgatagcttgccctaatcatttgtgcagtttccatggattgtgtactgacttcgctgtttattttttttcgctctctgcaacccacaatatttataacaattttcattaaaccaaaaatgtattctctgttctaaactataattcgttttagactaaatatacattcattaattaatacaataatttgtatgaacgtctacattcattatcaattatggggaaaaaaaaactagaaaggactatattttggggaggaattattgaacagcagcaatgacctgacctataagaaagagtgtttggtttgaagaatttgaagaataagttagtctattatctacttatctcttactttttaatttcg

SEQ ID NO: 45206 - DNA, 2415 bp, Zea Mays
cagcccaactctctcgcagccaatcccgccgctccgccgcccgcacccaatccgtttctctcacccccgccactcgccagcaacgcggacacgccctccgccgctcttcctctgcaccccagtcctctcccacaaccacttccggcggccacgccctcggcttctccgtacttgctgctcgcccgtcccaccaccataattttccaccagcgattgtaaatttgtgggaggcacattcgccgaggatggctgtaaccctacttcgagggatgagaacgccgataccattcagatcgaactccggcttcttctccactgtcctacggcctcggttgtcccgcttcacgactagggcggagagtgcgcaggccacagaacccaaagcggcgcccaggtcaattcagctggcgaccaaggaggcggctgagcagaaaacacaaggcttcgaagccatcatcgggattgagacccatgtccagctctcgaccgtcacgaaggcgttctgctcctgcccttacagctatggttcccagcccaacagcactatctgccccacctgcatgggccacccggggacgctgccggttctgaatgagaaggtggtcgagtgcgccgtgaagctggggctcgccctcaactgcgagatctcaatgacgtccaagtttgatcgcaagcagtatttctacccggacctccccaaggggtaccagatttcccagtttgacatccccattgccaagaagggttgtgtcgatttggaccttccagtggagtttggtggtgggcataggaaatttggggtcacaagggttcacatggaagaagatgctggcaagctgcttcattctgaatccagcagctactctcaggggaaatccagagggaatgaaaagaattacacagcgtctcatcacataaaaagccagacatgagaacagggatagaagctgctgagtatggtgctgaactgcaaaggattgttaggtacctgggagtgagtaatggtaatatgcaagaaggttcccttcgttgtgatgtgaacgtttctgttcgaccagttggacaatcagaatttggtacaaaggtggaaataaagaatatgaactcattttctgcgataaatagggcaatcgattatgagatctcccggcagattctgctccataaagaaggccaggctgatcaaattgtacaagaaacccgcctgtgggatgaatcttctcagaaaacttttacaatgcgaaaaaaggagggacttgccgactatagatattttccagaacctgatcttcctgaagtagttatcactagtgactatattaatgaaatcagcaagtcaatgccggagcttccagaagcaaagcgtaggcgttatgagaatatgggactcagcatgcaagatgttctgttccttgctaatgatgataatattggtcatttctttgattctactcttgagcatggtgctgatgcaaagctggctgccaactggatcatgggtgacatcgctgcttatctcaaagatgaaaaagtatccattgatgaaattaaattaacacctctagagctttctgaactgatagcatcaattaagaatggaactataagtgggaagatcggcaaggagatactggccgagctcattgccaaaggcggaacagttaaggctgtgatagaagagaaagatttggttcagatagcagatccagcagcaattgaggcaatggtagataaagtaattgctgataatccaaagcaacttgagcagtaccgtgctggaaaaactaagctacaaggattttttgctggccaggtgatgaaagcatcgaaggggaaggccaacccagttttgttgaataaaattcttggagagaagctaaatgccaaataattatttttacccccatactgaatctcaggcgtccatgaagaatgggacttcaaattcatagaatgagattaatgtgaacgacgtagaagttttgtccacaatacagatattattgtactaagctgatactttaaaagggcgtgttcattatattttatgcgatagcttgccctaatcatttgtgcagtttccatggattgtgtactgacttcgctgtttattttttttcgctctctgcaacccacaatatttataacaattttcattaaaccaaaaatgtattctctgttctaaactataattcgttttagactaaatatacattcattaattaatacaataatttgtatgaacgtctacattcattatcaattatggggaaaaaaaaactagaaaggactatattttggggaggaattattgaacagcagcaatgacctgacctataagaaagagtgtttggtttgaagaatttgaagaataagttagtctattatctacttatctcttactttttaatttcg

SEQ ID NO: 45207 - DNA, 3129 bp, Zea Mays
cagcccaactctctcgcagccaatcccgccgctccgccgcccgcacccaatccgtttctctcacccccgccactcgccagcaacgcggacacgccctccgccgctcttcctctgcaccccagtcctctcccacaaccacttccggcggccacgccctcggcttctccgtacttgctgctcgcccgtcccaccaccataattttccaccagcgattgtaaatttgtgggaggcacattcgccgaggatggctgtaaccctacttcgagggatgagaacgccgataccattcagatcgaactccggcttcttctccactgtcctacggcctcggttgtcccgcttcacgactagggcggagagtgcgcaggccacagaacccaaagcggcgcccaggtcaattcagctggcgaccaaggaggcggctgagcagaaaacacaaggcttcgaagccatcatcgggattgagacccatgtccagctctcgaccgtcacgaaggcgttctgctcctgcccttacagctatggttcccagcccaacagcactatctgccccacctgcatgggccacccggggacgctgccggttctgaatgagaaggtggtcgagtgcgccgtgaagctggggctcgccctcaactgcgagatctcaatgacgtccaagtttgatcgcaagcagtatttctacccggacctccccaaggggtaccagatttcccagtttgacatccccattgccaagaagggttgtgtcgatttggaccttccagtggagtttggtggtgggcataggaaatttggggtcacaagggttcacatggaagaagatgctggcaagctgcttcattctgaatccagcagctactctcaggtcttccttgtctactaatgattgcttaatttctgtgtactactgtaagatattgtgatattcggatctgcttgtcatgtctttctggcataacagtttcgtaaccacaagatcagttttgacatttaccacggtgcattagaaaacttatagattagtgaatagaaccctagaaaaatattaaagattgtatatcagggaccttaagtgggcatttggatctgaggcaagggggatcctagctttacagcgaaaggattgaagttttataggacatcaaaattcaaaagacttattttggggcaatataatctgcaatcacgagcaaaagcttgctctgtgaagagagccaaatcagtttggcaccaaaagaaaagtagcgctgcagtgaaaaaaaagtctggcaactgctattcagaattatggccaaacattaatccttttctattgctggttgtagaacagatgggggagctaggtataatctcagcagtcccatcttcctggtgaaagtaactatttgaaagtttgaatcatctggctataaatgcatgtgataggctcacacaagaaagtatgtttttttgtgtaagtatgacatatggaacacaatacaatgatacagataataaaccataaacactgctctaatattgacaggggaaatccagagggaatgaaaagaattacacagcgtctcatcacataaaagtacagcagcttcagttattgatcagtggttgctactttggctggttaggttgacctaaacagggctggcgtacctttgctcgaaattgtctcagagccagacatgagaacagggatagaagctgctgagtatggtgctgaactgcaaaggattgttaggtacctgggagtgagtaatggtaatatgcaagaaggttcccttcgttgtgatgtgaacgtttctgttcgaccagttggacaatcagaatttggtacaaagggcaatcgattatgagatctcccggcagattctgctccataaagaaggccaggctgatcaaattgtacaagaaacccgcctgtgggatgaatcttctcagaaaacttttacaatgcgaaaaaaggagggacttgccgactatagatattttccagaacctgatcttcctgaagtagttatcactagtgactatattaatgaaatcagcaagtcaatgccggagcttccagaagcaaagcgtaggcgttatgagaatatgggactcagcatgcaagatgttctgttccttgctaatgatgataatattggtcatttctttgattctactcttgagcatggtgctgatgcaaagctggctgccaactggatcatgggtgacatcgctgcttatctcaaagatgaaaaagtatccattgatgaaattaaattaacacctctagagctttctgaactgatagcatcaattaagaatggaactataagtgggaagatcggcaaggagatactggccgagctcattgccaaaggcggaacagttaaggctgtgatagaagagaaagatttggttcagatagcagatccagcagcaattgaggcaatggtagataaagtaattgctgataatccaaagcaacttgagcagtaccgtgctggaaaaactaagctacaaggattttttgctggccaggtgatgaaagcatcgaaggggaaggccaacccagttttgttgaataaaattcttggagagaagctaaatgccaaataattatttttacccccatactgaatctcaggcgtccatgaagaatgggacttcaaattcatagaatgagattaatgtgaacgacgtagaagttttgtccacaatacagatattattgtactaagctgatactttaaaagggcgtgttcattatattttatgcgatagcttgccctaatcatttgtgcagtttccatggattgtgtactgacttcgctgtttattttttttcgctctctgcaacccacaatatttataacaattttcattaaaccaaaaatgtattctctgttctaaactataattcgttttagactaaatatacattcattaattaatacaataatttgtatgaacgtctacattcattatcaattatggggaaaaaaaaactagaaaggactatattttggggaggaattattgaacagcagcaatgacctgacctataagaaagagtgtttggtttgaagaatttgaagaataagttagtctattatctacttatctcttactttttaatttcg

SEQ ID NO: 45208 - DNA, 2415 bp, Zea Mays
cggcacagcccaactctctcgcagccaatcccgccgctccgccgcccgcacccaatccgtttctctcacccccgccactcgccagcaacgcggacacgccctccgccgctcttcctctgcaccccagtcctctcccacaaccacttccggcggccacgccctcggcttctccgtacttgctgctcgcccgtcccaccaccataattttccaccagcgattgtaaatttgtgggaggcacattcgccgaggatggctgtaaccctacttcgagggatgagaacgccgataccattcagatcgaactccggcttcttctccactgtcctacggcctcggttgtcccgcttcacgactagggcggagagtgcgcaggccacagaacccaaagcggcgcccaggtcaattcagctggcgaccaaggaggcggctgagcagaaaacacaaggcttcgaagccatcatcgggattgagacccatgtccagctctcgaccgtcacgaaggcgttctgctcctgcccttacagctatggttcccagcccaacagcactatctgccccacctgcatgggccacccggggacgctgccggttctgaatgagaaggtggtcgagtgcgccgtgaagctggggctcgccctcaactgcgagatctcaatgacgtccaagtttgatcgcaagcagtatttctacccggacctccccaaggggtaccagatttcccagtttgacatccccattgccaagaagggttgtgtcgatttggaccttccagtggagtttggtggtgggcataggaaatttggggtcacaagggttcacatggaagaagatgctggcaagctgcttcattctgaatccagcagctactctcaggttgacctaaacagggctggcgtacctttgctcgaaattgtctcagagccagacatgagaacagggatagaagctgctgagtatggtgctgaactgcaaaggattgttaggtacctgggagtgagtaatggtaatatgcaagaaggttcccttcgttgtgatgtgaacgtttctgttcgaccagttggacaatcagaatttggtacaaaggtggaaataaagaatatgaactcattttctgcgataaatagggcaatcgattatgagatctcccggcagattctgctccataaagaaggccaggctgatcaaattgtacaagaaacccgcctgtgggatgaatcttctcagaaaacttttacaatgcgaaaaaaggagggacttgccgactatagatattttccagaacctgatcttcctgaagtagttatcactagtgactatattaatgaaatcagcaagtcaatgccggagcttccagaagcaaagcgtaggcgttatgagaatatgggactcagcatgcaagatgttctgttccttgctaatgatgataatattggtcatttctttgattctactcttgagcatggtgctgatgcaaagctggctgccaactggatcatgggtgacatcgctgcttatctcaaagatgaaaaagtatccattgatgaaattaaattaacacctctagagctttctgaactgatagcatcaattaagaatggaactataagtgggaagatcggcaaggagatactggccgagctcattgccaaaggcggaacagttaaggctgtgatagaagagaaagatttggttcagatagcagatccagcagcaattgaggcaatggtagataaagtaattgctgataatccaaagcaacttgagcagtaccgtgctggaaaaactaagctacaaggattttttgctggccaggtgatgaaagcatcgaaggggaaggccaacccagttttgttgaataaaattcttggagagaagctaaatgccaaataattatttttacccccatactgaatctcaggcgtccatgaagaatgggacttcaaattcatagaatgagattaatgtgaacgacgtagaagttttgtccacaatacagatattattgtactaagctgatactttaaaagggcgtgttcattatattttatgcgatagcttgccctaatcatttgtgcagtttccatggattgtgtactgacttcgctgtttattttttttcgctctctgcaacccacaatatttataacaattttcattaaaccaaaaatgtattctctgttctaaactataattcgttttagactaaatatacattcattaattaatacaataatttgtatgaacgtctacattcattatcaattatggggaaaaaaaaactagaaaggactatattttggggaggaattattgaacagcagcaatgacctgacctataagaaagagtgtttggtttgaagaatttgaagaataagttagtctattatctacttatctcttactttttaatttcg

SEQ ID NO: 45209 - DNA, 298 bp, Zea Mays
cttcctagtgcaaggcggatttggtgtggtgccacctccccttaccggcggtgatggcttccttcctctacatcagcgacaacgacatcaccttttctgcatcaggcgacaacatcctcccttttatacacggcggcggcgccccccctacaccaagtggcaacgacaacttccttccccacatcagtgacaacaacatcgcgttccggcacctaccggtggtgacatcccctctcctacacatggcatcaatgaccctttctctacacccaacaatggtgttccctttagatggggc

SEQ ID NO: 45210 - DNA, 1812 bp, Zea Mays
gtcactgaatgctgcactgcagcatacagcacattacaccataataatgttttactggtatctggataagtataacagaaaagaagtgtgataaccatctcttctatttatttataaaattgatttgtgctgcacatatgtgcattataacaattgtattatcaattgttagagtggacgcactaaccaatcaaacacaaaagcttaagctgttaggaaaaagtaggcaatctacttatacacttcaatactctcactcacgtgcaaccagagagaaaggtgcaaacatgtaaataaaggggcagagacacaaataaagcctctaccaggatttgaactcaagacctctggctttgatactatgttagagtgagatgcactaaccagttcaacccaaagctcaccatatcaaagtggacacactaatcagtcaaacccaatagcttaagctgttagaagaaggtaggcaatccacttatatatttcaacaccaatctccactaaatttttgtatttttactttcttgaacagcggatggtaagctctttgtttggggcagaaactcaggtggccagcttggccttggtaaaggtaaagtagtttctaccccaacaaaggttgattgtttgactgacctcagagtaaaaacggttgctctgggatcagagcattcaattgctgttacagaggaaggtgaagtcttgagttggggagctgctggttctggtaggctcggacatggccgtcaatctagcatcctgggattttctctgacctcaactgaatatactccaagattgatcaaaaactttgatggtatcaagattaaaaagatagctgcaggaatgttgcactcagcttgcattgatgaaaaagggatttggaagaccgaacgaagaattcagaccaaatattgttgaagagataccattttcagaagaagttgcttgtggaggttaccatacttgtgttgtaacagatagcggtgatctgtattcttggggttcaaatgaaaatggctgccttggtctgggaggtacggatatggtccgctctccggaaattttgaaaagttctctatttaaacttcctgtatctaaggtatcttgtggttggaagcacacagctgtagtttcaggtgatgacatctacacatggggttggggaggcgccaatgggacttttttcgaagagggccattcttccggtggacagctgggacatggaaacgacgtagactattttgagcctatgatggttccctttggcacgaatgcaagagccgtccatgtatcgtgtggcttcaatcatactggtgcaatttacgagtgctccgaggactttgactgacgtgccacctgcagacagcagatccgcatgtcttggagacttaggttagttatcaaattatactcgctagaagtgcatataaacagcataaataagctctgatgttggacctgcatttatgtgaagagaaatatagaacaagtgataacacccctgagagggggatgtaaattaaacagaataagggatgaactggatgcattttgtgatgcatcagagttacttgccagtgtatagcatttcttcatttattggctggttctgtattattttgccaggtactaagaaatccattgcctgatgtctcagcaggctgtttgtgtacattatgattgcttgactgcttggtgtcgatgcttgctgtgttttttgtgtgtaaataatacatgaatcagttaatcgtgcttgtacaattaaatatgtacatatatcagtgcatcacttattatatgtacatgatt

SEQ ID NO: 45211 - DNA, 1812 bp, Zea Mays
gtcactgaatgctgcactgcagcatacagcacattacaccataataatgttttactggtatctggataagtataacagaaaagaagtgtgataaccatctcttctatttatttataaaattgatttgtgctgcacatatgtgcattataacaattgtattatcaattgttagagtggacgcactaaccaatcaaacacaaaagcttaagctgttaggaaaaagtaggcaatctacttatacacttcaatactctcactcacgtgcaaccagagagaaaggtgcaaacatgtaaataaaggggcagagacacaaataaagcctctaccaggatttgaactcaagacctctggctttgatactatgttagagtgagatgcactaaccagttcaacccaaagctcaccatatcaaagtggacacactaatcagtcaaacccaatagcttaagctgttagaagaaggtaggcaatccacttatatatttcaacaccaatctccactaaatttttgtatttttactttcttgaacagcggatggtaagctctttgtttggggcagaaactcaggtggccagcttggccttggtaaaggggcaggtaaagtagtttctaccccaacaaaggttgattgtttgactgacctcagagtaaaaacggttgctctgggatcagagcattcaattgctgttacagaggaaggtgaagtcttgagttggggagctgctggttctggtaggctcggacatggccgtcaatctagcatcctgggattttctctgacctcaactgaatatactccaagattgatcaaaaactttgatggtatcaagattaaaaagatagctgcaggaatgttgcactcagcttgcattgatgggatttggaagaccgaacgaagaattcagaccaaatattgttgaagagataccattttcagaagaagttgcttgtggaggttaccatacttgtgttgtaacagatagcggtgatctgtattcttggggttcaaatgaaaatggctgccttggtctgggaggtacggatatggtccgctctccggaaattttgaaaagttctctatttaaacttcctgtatctaaggtatcttgtggttggaagcacacagctgtagtttcaggtgatgacatctacacatggggttggggaggcgccaatgggacttttttcgaagagggccattcttccggtggacagctgggacatggaaacgacgtagactattttgagcctatgatggttccctttggcacgaatgcaagagccgtccatgtatcgtgtggcttcaatcatactggtgcaatttacgagtgctccgaggactttgactgacgtgccacctgcagacagcagatccgcatgtcttggagacttaggttagttatcaaattatactcgctagaagtgcatataaacagcataaataagctctgatgttggacctgcatttatgtgaagagaaatatagaacaagtgataacacccctgagagggggatgtaaattaaacagaataagggatgaactggatgcattttgtgatgcatcagagttacttgccagtgtatagcatttcttcatttattggctggttctgtattattttgccaggtactaagaaatccattgcctgatgtctcagcaggctgtttgtgtacattatgattgcttgactgcttggtgtcgatgcttgctgtgttttttgtgtgtaaataatacatgaatcagttaatcgtgcttgtacaattaaatatgtacatatatcagtgcatcacttattatatgtacatgatt

SEQ ID NO: 45212 - DNA, 1803 bp, Zea Mays
gtcactgaatgctgcactgcagcatacagcacattacaccataataatgttttactggtatctggataagtataacagaaaagaagtgtgataaccatctcttctatttatttataaaattgatttgtgctgcacatatgtgcattataacaattgtattatcaattgttagagtggacgcactaaccaatcaaacacaaaagcttaagctgttaggaaaaagtaggcaatctacttatacacttcaatactctcactcacgtgcaaccagagagaaaggtgcaaacatgtaaataaaggggcagagacacaaataaagcctctaccaggatttgaactcaagacctctggctttgatactatgttagagtgagatgcactaaccagttcaacccaaagctcaccatatcaaagtggacacactaatcagtcaaacccaatagcttaagctgttagaagaaggtaggcaatccacttatatatttcaacaccaatctccactaaatttttgtatttttactttcttgaacagcggatggtaagctctttgtttggggcagaaactcaggtggccagcttggccttggtaaaggtaaagtagtttctaccccaacaaaggttgattgtttgactgacctcagagtaaaaacggttgctctgggatcagagcattcaattgctgttacagaggaaggtgaagtcttgagttggggagctgctggttctggtaggctcggacatggccgtcaatctagcatcctgggattttctctgacctcaactgaatatactccaagattgatcaaaaactttgatggtatcaagatagctgcaggaatgttgcactcagcttgcattgatgaaaaagggatttggaagaccgaacgaagaattcagaccaaatattgttgaagagataccattttcagaagaagttgcttgtggaggttaccatacttgtgttgtaacagatagcggtgatctgtattcttggggttcaaatgaaaatggctgccttggtctgggaggtacggatatggtccgctctccggaaattttgaaaagttctctatttaaacttcctgtatctaaggtatcttgtggttggaagcacacagctgtagtttcaggtgatgacatctacacatggggttggggaggcgccaatgggacttttttcgaagagggccattcttccggtggacagctgggacatggaaacgacgtagactattttgagcctatgatggttccctttggcacgaatgcaagagccgtccatgtatcgtgtggcttcaatcatactggtgcaatttacgagtgctccgaggactttgactgacgtgccacctgcagacagcagatccgcatgtcttggagacttaggttagttatcaaattatactcgctagaagtgcatataaacagcataaataagctctgatgttggacctgcatttatgtgaagagaaatatagaacaagtgataacacccctgagagggggatgtaaattaaacagaataagggatgaactggatgcattttgtgatgcatcagagttacttgccagtgtatagcatttcttcatttattggctggttctgtattattttgccaggtactaagaaatccattgcctgatgtctcagcaggctgtttgtgtacattatgattgcttgactgcttggtgtcgatgcttgctgtgttttttgtgtgtaaataatacatgaatcagttaatcgtgcttgtacaattaaatatgtacatatatcagtgcatcacttattatatgtacatgatt

SEQ ID NO: 45213 - DNA, 1842 bp, Zea Mays
gtcactgaatgctgcactgcagcatacagcacattacaccataataatgttttactggtatctggataagtataacagaaaagaagtgtgataaccatctcttctatttatttataaaattgatttgtgctgcacatatgtgcattataacaattgtattatcaattgttagagtggacgcactaaccaatcaaacacaaaagcttaagctgttaggaaaaagtaggcaatctacttatacacttcaatactctcactcacgtgcaaccagagagaaaggtgcaaacatgtaaataaaggggcagagacacaaataaagcctctaccaggatttgaactcaagacctctggctttgatactatgttagagtgagatgcactaaccagttcaacccaaagctcaccatatcaaagtggacacactaatcagtcaaacccaatagcttaagctgttagaagaaggtaggcaatccacttatatatttcaacaccaatctccactaaatttttgtatttttactttcttgaacagcggatggtaagctctttgtttggggcagaaactcaggtggccagcttggccttggtaaaggggcaggtaaagtagtttctaccccaacaaaggttgattgtttgactgacctcagagtaaaaacggttgctctgggatcagagcattcaattgctgttacagaggaaggtgaagtcttgagttggggagctgctggttctggtaggctcggacatggccgtcaatctagcatcctgggattttctctgacctcaactgaatatactccaagattgatcaaaaactttgatggtatcaagattaaaaagatagctgcaggaatgttgcactcagcttgcattgatgaaaaaggtactttgttcatatttgggcagaagactgagaagaccgaacgaagaattcagaccaaatattgttgaagagataccattttcagaagaagttgcttgtggaggttaccatacttgtgttgtaacagatagcggtgatctgtattcttggggttcaaatgaaaatggctgccttggtctgggaggtacggatatggtccgctctccggaaattttgaaaagttctctatttaaacttcctgtatctaaggtatcttgtggttggaagcacacagctgtagtttcaggtgatgacatctacacatggggttggggaggcgccaatgggacttttttcgaagagggccattcttccggtggacagctgggacatggaaacgacgtagactattttgagcctatgatggttccctttggcacgaatgcaagagccgtccatgtatcgtgtggcttcaatcatactggtgcaatttacgagtgctccgaggactttgactgacgtgccacctgcagacagcagatccgcatgtcttggagacttaggttagttatcaaattatactcgctagaagtgcatataaacagcataaataagctctgatgttggacctgcatttatgtgaagagaaatatagaacaagtgataacacccctgagagggggatgtaaattaaacagaataagggatgaactggatgcattttgtgatgcatcagagttacttgccagtgtatagcatttcttcatttattggctggttctgtattattttgccaggtactaagaaatccattgcctgatgtctcagcaggctgtttgtgtacattatgattgcttgactgcttggtgtcgatgcttgctgtgttttttgtgtgtaaataatacatgaatcagttaatcgtgcttgtacaattaaatatgtacatatatcagtgcatcacttattatatgtacatgatt

SEQ ID NO: 45214 - DNA, 1853 bp, Zea Mays
gtcactgaatgctgcactgcagcatacagcacattacaccataataatgttttactggtatctggataagtataacagaaaagaagtgtgataaccatctcttctatttatttataaaattgatttgtgctgcacatatgtgcattataacaattgtattatcaattgttagagtggacgcactaaccaatcaaacacaaaagcttaagctgttaggaaaaagtaggcaatctacttatacacttcaatactctcactcacgtgcaaccagagagaaaggtgcaaacatgtaaataaaggggcagagacacaaataaagcctctaccaggatttgaactcaagacctctggctttgatactatgttagagtgagatgcactaaccagttcaacccaaagctcaccatatcaaagtggacacactaatcagtcaaacccaatagcttaagctgttagaagaaggtaggcaatccacttatatatttcaacaccaatctccactaaatttttgtatttttactttcttgaacagcggatggtaagctctttgtttggggcagaaactcaggtggccagcttggccttggtaaaggggcaggtaaagtagtttctaccccaacaaaggttgattgtttgactgacctcagagtaaaaacggttgctctgggatcagagcattcaattgctgttacagaggaaggtgaagtcttgagttggggagctgctggttctggtaggctcggacatggccgtcaatctagcatcctgggattttctctgacctcaactgaatatactccaagattgatcaaaaactttgatggtatcaagattaaaaagatagctgcaggaatgttgcactcagcttgcattgatgaaaaaggtactttgttcatatttgggcagaagactgagaagggatttggaagaccgaacgaagaattcagaccaaatattgttgaagagataccattttcagaagaagttgcttgtggaggttaccatacttgtgttgtaacagatagcggtgatctgtattcttggggttcaaatgaaaatggctgccttggtctgggaggtacggatatggtccgctctccggaaattttgaaaagttctctatttaaacttcctgtatctaaggtatcttgtggttggaagcacacagctgtagtttcaggtgatgacatctacacatggggttggggaggcgccaatgggacttttttcgaagagggccattcttccggtggacagctgggacatggaaacgacgtagactattttgagcctatgatggttccctttggcacgaatgcaagagccgtccatgtatcgtgtggcttcaatcatactggtgcaatttacgagtgctccgaggactttgactgacgtgccacctgcagacagcagatccgcatgtcttggagacttaggttagttatcaaattatactcgctagaagtgcatataaacagcataaataagctctgatgttggacctgcatttatgtgaagagaaatatagaacaagtgataacacccctgagagggggatgtaaattaaacagaataagggatgaactggatgcattttgtgatgcatcagagttacttgccagtgtatagcatttcttcatttattggctggttctgtattattttgccaggtactaagaaatccattgcctgatgtctcagcaggctgtttgtgtacattatgattgcttgactgcttggtgtcgatgcttgctgtgttttttgtgtgtaaataatacatgaatcagttaatcgtgcttgtacaattaaatatgtacatatatcagtgcatcacttattatatgtacatgatt

SEQ ID NO: 45215 - DNA, 1847 bp, Zea Mays
gtcactgaatgctgcactgcagcatacagcacattacaccataataatgttttactggtatctggataagtataacagaaaagaagtgtgataaccatctcttctatttatttataaaattgatttgtgctgcacatatgtgcattataacaattgtattatcaattgttagagtggacgcactaaccaatcaaacacaaaagcttaagctgttaggaaaaagtaggcaatctacttatacacttcaatactctcactcacgtgcaaccagagagaaaggtgcaaacatgtaaataaaggggcagagacacaaataaagcctctaccaggatttgaactcaagacctctggctttgatactatgttagagtgagatgcactaaccagttcaacccaaagctcaccatatcaaagtggacacactaatcagtcaaacccaatagcttaagctgttagaagaaggtaggcaatccacttatatatttcaacaccaatctccactaaatttttgtatttttactttcttgaacagcggatggtaagctctttgtttggggcagaaactcaggtggccagcttggccttggtaaaggtaaagtagtttctaccccaacaaaggttgattgtttgactgacctcagagtaaaaacggttgctctgggatcagagcattcaattgctgttacagaggaaggtgaagtcttgagttggggagctgctggttctggtaggctcggacatggccgtcaatctagcatcctgggattttctctgacctcaactgaatatactccaagattgatcaaaaactttgatggtatcaagattaaaaagatagctgcaggaatgttgcactcagcttgcattgatgaaaaaggtactttgttcatatttgggcagaagactgagaagggatttggaagaccgaacgaagaattcagaccaaatattgttgaagagataccattttcagaagaagttgcttgtggaggttaccatacttgtgttgtaacagatagcggtgatctgtattcttggggttcaaatgaaaatggctgccttggtctgggaggtacggatatggtccgctctccggaaattttgaaaagttctctatttaaacttcctgtatctaaggtatcttgtggttggaagcacacagctgtagtttcaggtgatgacatctacacatggggttggggaggcgccaatgggacttttttcgaagagggccattcttccggtggacagctgggacatggaaacgacgtagactattttgagcctatgatggttccctttggcacgaatgcaagagccgtccatgtatcgtgtggcttcaatcatactggtgcaatttacgagtgctccgaggactttgactgacgtgccacctgcagacagcagatccgcatgtcttggagacttaggttagttatcaaattatactcgctagaagtgcatataaacagcataaataagctctgatgttggacctgcatttatgtgaagagaaatatagaacaagtgataacacccctgagagggggatgtaaattaaacagaataagggatgaactggatgcattttgtgatgcatcagagttacttgccagtgtatagcatttcttcatttattggctggttctgtattattttgccaggtactaagaaatccattgcctgatgtctcagcaggctgtttgtgtacattatgattgcttgactgcttggtgtcgatgcttgctgtgttttttgtgtgtaaataatacatgaatcagttaatcgtgcttgtacaattaaatatgtacatatatcagtgcatcacttattatatgtacatgatt

SEQ ID NO: 45216 - DNA, 1821 bp, Zea Mays
ccgacccattgctatcctacctgccagcgaacctgtctcgtctccttgttgcccacgtggcctcgccgtcgccgcgagctccaccttcctcagctctgccccgagcgcgatgtggcgagcgacgaggcggtctccgccgttcctgcgatggctatcgtcggacgcagcctcctctaaggcgccgcggcagcgcgtagcggcgctgtgggggaacggtgactacgggcggctggggctgggctcgctggagtcgcggtggagccccacggtttgccccttcttcctcgcccgcgccgccgacccgcccgcctccctcgcctgcggcggcgcacataccctctttctcacccagaatgggcgagtgttcgctacagggctgaacgactttgggcagctggggataggaacctctgttacacatatgctggagcctgttgaaatttctggatttcacgaaagagttgtagaagtttcagctggcaaccatcattcttgtgcagtcaccgcggatggtaagctctttgtttggggcagaaactcaggtggccagcttggccttggtaaaggtaaagtagtttctaccccaacaaaggttgattgtttgactgacctcagagtaaaaacggttgctctgggatcagagcattcaattgctgttacagaggaaggtgaagtcttgagttggggagctgctggttctggtaggctcggacatggccgtcaatctagcatcctgggattttctctgacctcaactgaatatactccaagattgatcaaaaactttgatggtatcaagattaaaaagatagctgcaggaatgttgcactcagcttgcattgatgaaaaaggtactttgttcatatttgggcagaagactgagaagggatttggaagaccgaacgaagaattcagaccaaatattgttgaagagataccattttcagaagaagttgcttgtggaggttaccatacttgtgttgtaacagatagcggtgatctgtattcttggggttcaaatgaaaatggctgccttggtctgggaggtacggatatggtccgctctccggaaattttgaaaagttctctatttaaacttcctgtatctaaggtatcttgtggttggaagcacacagctgtagtttcaggtgatgacatctacacatggggttggggaggcgccaatgggacttttttcgaagagggccattcttccggtggacagctgggacatggaaacgacgtagactattttgagcctatgatggttccctttggcacgaatgcaagagccgtccatgtatcgtgtggcttcaatcatactggtgcaatttacgagtgctccgaggactttgactgacgtgccacctgcagacagcagatccgcatgtcttggagacttaggttagttatcaaattatactcgctagaagtgcatataaacagcataaataagctctgatgttggacctgcatttatgtgaagagaaatatagaacaagtgataacacccctgagagggggatgtaaattaaacagaataagggatgaactggatgcattttgtgatgcatcagagttacttgccagtgtatagcatttcttcatttattggctggttctgtattattttgccaggtactaagaaatccattgcctgatgtctcagcaggctgtttgtgtacattatgattgcttgactgcttggtgtcgatgcttgctgtgttttttgtgtgtaaataatacatgaatcagttaatcgtgcttgtacaattaaatatgtacatatatcagtgcatcacttattatatgtacatgatt

SEQ ID NO: 45217 - DNA, 1816 bp, Zea Mays
ccgacccattgctatcctacctgccagcgaacctgtctcgtctccttgttgcccacgtggcctcgccgtcgccgcgagctccaccttcctcagctctgccccgagcgcgatgtggcgagcgacgaggcggtctccgccgttcctgcgatggctatcgtcggacgcagcctcctctaaggcgccgcggcagcgcgtagcggcgctgtgggggaacggtgactacgggcggctggggctgggctcgctggagtcgcggtggagccccacggtttgccccttcttcctcgcccgcgccgccgacccgcccgcctccctcgcctgcggcggcgcacataccctctttctcacccagaatgggcgagtgttcgctacagggctgaacgactttgggcagctggggataggaacctctgttacacatatgctggagcctgttgaaatttctggatttcacgaaagagttgtagaagtttcagctggcaaccatcattcttgtgcagtcaccgcggatggtaagctctttgtttggggcagaaactcaggtggccagcttggccttggtaaaggggcaggtaaagtagtttctaccccaacaaaggttgattgtttgactgacctcagagtaaaaacggttgctctgggatcagagcattcaattgctgttacagaggaaggtgaagtcttgagttggggagctgctggttctggtaggctcggacatggccgtcaatctagcatcctgggattttctctgacctcaactgaatatactccaagattgatcaaaaactttgatggtatcaagattaaaaagatagctgcaggaatgttgcactcagcttgcattgatgaaaaaggtactttgttcatatttgggcagaagactgagaagaccgaacgaagaattcagaccaaatattgttgaagagataccattttcagaagaagttgcttgtggaggttaccatacttgtgttgtaacagatagcggtgatctgtattcttggggttcaaatgaaaatggctgccttggtctgggaggtacggatatggtccgctctccggaaattttgaaaagttctctatttaaacttcctgtatctaaggtatcttgtggttggaagcacacagctgtagtttcaggtgatgacatctacacatggggttggggaggcgccaatgggacttttttcgaagagggccattcttccggtggacagctgggacatggaaacgacgtagactattttgagcctatgatggttccctttggcacgaatgcaagagccgtccatgtatcgtgtggcttcaatcatactggtgcaatttacgagtgctccgaggactttgactgacgtgccacctgcagacagcagatccgcatgtcttggagacttaggttagttatcaaattatactcgctagaagtgcatataaacagcataaataagctctgatgttggacctgcatttatgtgaagagaaatatagaacaagtgataacacccctgagagggggatgtaaattaaacagaataagggatgaactggatgcattttgtgatgcatcagagttacttgccagtgtatagcatttcttcatttattggctggttctgtattattttgccaggtactaagaaatccattgcctgatgtctcagcaggctgtttgtgtacattatgattgcttgactgcttggtgtcgatgcttgctgtgttttttgtgtgtaaataatacatgaatcagttaatcgtgcttgtacaattaaatatgtacatatatcagtgcatcacttattatatgtacatgatt

SEQ ID NO: 45218 - DNA, 1762 bp, Zea Mays
ccgacccattgctatcctacctgccagcgaacctgtctcgtctccttgttgcccacgtggcctcgccgtcgccgcgagctccaccttcctcagctctgccccgagcgcgatgtggcgagcgacgaggcggtctccgccgttcctgcgatggctatcgtcggacgcagcctcctctaaggcgccgcggcagcgcgtagcggcgctgtgggggaacggtgactacgggcggctggggctgggctcgctggagtcgcggtggagccccacggtttgccccttcttcctcgcccgcgccgccgacccgcccgcctccctcgcctgcggcggcgcacataccctctttctcacccagaatgggcgagtgttcgctacagggctgaacgactttgggcagctggggataggaacctctgttacacatatgctggagcctgttgaaatttctggatttcacgaaagagttgtagaagtttcagctggcaaccatcattcttgtgcagtcaccgcggatggtaagctctttgtttggggcagaaactcaggtggccagcttggccttggtaaaggggcaggtaaagtagtttctaccccaacaaaggttgattgtttgactgacctcagagtaaaaacggttgctctgggatcagagcattcaattgctgttacagaggaaggtgaagtcttgagttggggagctgctggttctggtaggctcggacatggccgtcaatctagcatcctgggattttctctgacctcaactgaatatactccaagattgatcaaaaactttgatggtatcaagattaaaaagatagctgcaggaatgttgcactcagcttgcattgatgaaaaaggtactttgttcatatttgggcagaagactgagaagggatttggaagaccgaacgaagaattcagaccaaatattgttgaagagataccattttcagaagaagttgcttgtggaggttaccatacttgtgttgtaacagatagcggtgatctgtattcttggggttcaaatgaaaatggctgccttggtctgggaggtatcttgtggttggaagcacacagctgtagtttcaggtgatgacatctacacatggggttggggaggcgccaatgggacttttttcgaagagggccattcttccggtggacagctgggacatggaaacgacgtagactattttgagcctatgatggttccctttggcacgaatgcaagagccgtccatgtatcgtgtggcttcaatcatactggtgcaatttacgagtgctccgaggactttgactgacgtgccacctgcagacagcagatccgcatgtcttggagacttaggttagttatcaaattatactcgctagaagtgcatataaacagcataaataagctctgatgttggacctgcatttatgtgaagagaaatatagaacaagtgataacacccctgagagggggatgtaaattaaacagaataagggatgaactggatgcattttgtgatgcatcagagttacttgccagtgtatagcatttcttcatttattggctggttctgtattattttgccaggtactaagaaatccattgcctgatgtctcagcaggctgtttgtgtacattatgattgcttgactgcttggtgtcgatgcttgctgtgttttttgtgtgtaaataatacatgaatcagttaatcgtgcttgtacaattaaatatgtacatatatcagtgcatcacttattatatgtacatgatt

SEQ ID NO: 45219 - DNA, 1306 bp, Zea Mays
gcgcgcttgatgcgagtttttgctccacccacccgacccattgctatcctacctgccagcgaacctgtctcgtctccttgttgcccacgtggcctcgccgtcgccgcgagctccaccttcctcagctctgccccgagcgcgatgtggcgagcgacgaggcggtctccgccgttcctgcgatggctatcgtcggacgcagcctcctctaaggcgccgcggcagcgcgtagcggcgctgtgggggaacggtgactacgggcggctggggctgggctcgctggagtcgcggtggagccccacggtttgccccttcttcctcgcccgcgccgccgacccgcccgcctccctcgcctgcggcggcgcacataccctctttctcacccagaatgggcgagtgttcgctacagggctgaacgactttgggcagctggggataggaacctctgttacacatatgctggagcctgttgaaatttctggatttcacgaaagagttgtagaagtttcagctggcaaccatcattcttgtgcagtcaccgcggatggtaagctctttgtttggggcagaaactcaggtggccagcttggccttggtaaaggggcaggtaaagtagtttctaccccaacaaaggttgattgtttgactgacctcagagtaaaaacggttgctctgggatcagagcattcaattgctgttacagaggaaggtgaagtcttgagttggggagctgctggttctggtaggctcggacatggccgtcaatctagcatcctgggattttctctgacctcaactgaatatactccaagattgatcaaaaactttgatggtatcaagattaaaaagatagctgcaggaatgttgcactcagcttgcattgatgaaaaagggatttggaagaccgaacgaagaattcagaccaaatattgttgaagagataccattttcagaagaagttgcttgtggaggttaccatacttgtgttgtaacagatagcggtgatctgtattcttggggttcaaatgaaaatggctgccttggtctggggtattttatctgtgactttttcaataatttccctacatcatcttgtatcctacttatatcagtgtgcaactgtgcatccaatgtcgaagttgtattctgatatgattatctctaaccagaggtacggatatggtccgctctccggaaattttgaaaagttctctatttaaacttcctgtatctaaggtatcttgtggttggaagcacacagctgtagtttcagctatacgctatcgctgtgctctgagcacctcaaaac

SEQ ID NO: 45220 - DNA, 1227 bp, Zea Mays
cacgggcgcgcttgatgcgagtttttgctccacccacccgacccattgctatcctacctgccagcgaacctgtctcgtctccttgttgcccacgtggcctcgccgtcgccgcgagctccaccttcctcagctctgccccgagcgcgatgtggcgagcgacgaggcggtctccgccgttcctgcgatggctatcgtcggacgcagcctcctctaaggcgccgcggcagcgcgtagcggcgctgtgggggaacggtgactacgggcggctggggctgggctcgctggagtcgcggtggagccccacggtttgccccttcttcctcgcccgcgccgccgacccgcccgcctccctcgcctgcggcggcgcacataccctctttctcacccagaatgggcgagtgttcgctacagggctgaacgactttgggcagctggggataggaacctctgttacacatatgctggagcctgttgaaatttctggatttcacgaaagagttgtagaagtttcagctggcaaccatcattcttgtgcagtcaccgcggatggtaagctctttgtttggggcagaaactcaggtggccagcttggccttggtaaaggggcaggtaaagtagtttctaccccaacaaaggttgattgtttgactgacctcagagtaaaaacggttgctctgggatcagagcattcaattgctgttacagaggaaggtgaagtcttgagttggggagctgctggttctggtaggctcggacatggccgtcaatctagcatcctgggattttctctgacctcaactgaatatactccaagattgatcaaaaactttgatggtatcaagattaaaaagatagctgcaggaatgttgcactcagcttgcattgatgaaaaaggtactttgttcatatttgggcagaagactgagaagggatttggaagaccgaacgaagaattcagaccaaatattgttgaagagataccattttcagaagaagttgcttgtggaggttaccatacttgtgttgtaacagatagcggtgatctgtattcttggggttcaaatgaaaatggctgccttggtctgggaggtacggatatggtccgctctccggaaattttgaaaagttctctatttaaacttcctgtatctaaggtatcttgtggttggaagcacacagctgtagtttcagctatacgctatcgctgtgctctgagcacctcaaaac

SEQ ID NO: 45221 - DNA, 2296 bp, Zea Mays
gatagggagcgagaggcggccgcgccacacaaaactatctccgccgcggctccgttgcatggtataccatgctgccggcggctgccaccgctgcagcgccggacccctcgtgctccaccttcccctcctcccgccgcgctccccctgtcgcttcgcgtcacagcttcgttgttgcaacaagagccaccggcagctcgggtctcttctctctccggtgtcacggtcgccttccctgccactctcgctgtcgctgccgctgccgcgcctggtggaacaatgagcgagcgcgccgggtatccggcgccagccgtggccgccattgccggtacgtaagtatgtcttggagcagtgactgagcctccagctgctggttgattggtgaccaaatgatgcagggccgtcgcgtcggcgccggaccacatggacgagcagccggcgagggggaggtaccacccgttcgaggagatctccgaggcggtgcagctggacgacggcgagccggcccacctgaccgacgccgagtcagcccgaacaatcgtcgaggtgaacaacaaggcgacggtgatgatctccacgctcgtcggcgacggtgtgcacgagcggatcatcctgccggagttcccctacctcaccgacgagaacggagatatctacttcgaggtcgacaacgaggacgcgctgctggagagcatcatgggggaggacaagatcgcggtgacgcctccgatttcctcccctgtttcatccaccttatgactctgtcggtgtgtgacaccttggtaatctgtcgttgttgttgattgatgcgtgcagcacgttatcatcggattggacaacacacaggtcttcgccgacttggatctcgtctcggcctccgccacagagtttgcgcaagaagacgacaacggcgatgaggacgatgacggctccgacgatgatgaggaaagcgactttgacgaggacttcaacgacgtggagggtgtgttttcggttgatgaggacgacgaagatgacagagaggaagaggaggaggaggacgacgacgacgatgacgaggacctaccaagctggtccaaccttgagaccgtgaattcctgccatccactgtactttgcaaggatgattgtagagactgcaaccaagtctagcatagactggctggaccggccacctgcaagccttgtcgtcgagggccagctgaggcctgcctttgctgaggagagcaccatggttgccaagcatatatcaagtgacgcgccaaagaaagatacaaaggagagtggtgccacctttttcaaggtcgaggtcctcagcatcgagttgatcactgcgtatggaactgagtttaaaaatatcgccatgtagccaaaggtaaagattgaagaataccagaaggctaagccggacatcatcgcgcattctgcaccgaacgtaatatcgcgcctgagagctggtggagacaaggtcacccaggctctgaaatctctctgttggaggagcaaggccattcaagtagaggaggcagcggtgatcggagtggactgccttggttttgacctgagagtgtgctcaggaactcaagtgcagacattgagatttgctttccctacaaaggccacttcagagttctctgcagagaagcaaatacatgagcttctgtttcctaggaatacacatcaagaagggcaatcaccacaggcccgacagaagtcctgatgtaattcgatccatcgatgtggtaacttcattcagatggtaggaaattaatttagagaaataaataataaattcttggtcatgtccatgaaagttgtggtataaccttcaagcttgccattgatttcgtgtttggagacaatcacaagttccaaggttgttcttagacacgttctcaaagaaaaagggttgttcttagatcatggaccgggggatttggtttttttttttaattcagaggaagctcagtgcaactccaacagattgcctatccaagtagagatgaagtctcgacaagtgaaaaactacatcagcgcaagtcagaactcagttttacttgtccttgcatcaaatcaaacaacagaaactctcctgaaaaacgcagaaacaaaaaaaatctcaagttgcacctgtcactgcatcaattggttcttaaacaaggactagttacatacccatgcattgctacagtatttatatatcacataggtagggttttttatattatgcttgagtgtagaatataaacacaaaaatatacgtgttttattggttaaatggatgtgaatgtagagccaac

SEQ ID NO: 45222 - DNA, 1988 bp, Zea Mays
gatagggagcgagaggcggccgcgccacacaaaactatctccgccgcggctccgttgcatggtataccatgctgccggcggctgccaccgctgcagcgccggacccctcgtgctccaccttcccctcctcccgccgcgctccccctgtcgcttcgcgtcacagcttcgttgttgcaacaagagccaccggcagctcgggtctcttctctctccggtgtcacggtcgccttccctgccactctcgctgtcgctgccgctgccgcgcctggtggaacaatgagcgagcgcgccgggtatccggcgccagccgtggccgccattgccgggccgtcgcgtcggcgccggaccacatggacgagcagccggcgagggggaggtaccacccgttcgaggagatctccgaggcggtgcagctggacgacggcgagccggcccacctgaccgacgccgagtcagcccgaacaatcgtcgaggtgaacaacaaggcgacggtgatgatctccacgctcgtcggcgacggtgtgcacgagcggatcatcctgccggagttcccctacctcaccgacgagaacggagatatctacttcgaggtcgacaacgaggacgcgctgctggagagcatcatgggggaggacaagatcgcgcacgttatcatcggattggacaacacacaggtcttcgccgacttggatctcgtctcggcctccgccacagagtttgcgcaagaagacgacaacggcgatgaggacgatgacggctccgacgatgatgaggaaagcgactttgacgaggacttcaacgacgtggagggtgtgttttcggttgatgaggacgacgaagatgacagagaggaagaggaggaggaggacgacgacgacgatgacgaggacctaccaagctggtccaaccttgagaccgtgaattcctgccatccactgtactttgcaaggatgattgtagaggtgacgcgccaaagaaagatacaaaggagagtggtgccacctttttcaaggtcgaggtcctcagcatcgagttgatcactgcgtatggaactgagccaaaggtaaagattgaagaataccagaaggctaagccggacatcatcgcgcattctgcaccgaacgtaatatcgcgcctgagagctggtggagacaaggtcacccaggctctgaaatctctctgttggaggagcaaggccattcaagtagaggaggcagcggtgatcggagtggactgccttggttttgacctgagagtgtgctcaggaactcaagtgcagacattgagatttgctttccctacaaaggccacttcagagttctctgcagagaagcaaatacatgagcttctgtttcctaggaatacacatcaagaagggcaatcaccacaggcccgacagaagtcctgatgtaattcgatccatcgatgtggtaacttcattcagatggtaggaaattaatttagagaaataaataataaattcttggtcatgtccatgaaagttgtggtataaccttcaagcttgccattgatttcgtgtttggagacaatcacaagttccaaggttgttcttagacacgttctcaaagaaaaagggttgttcttagatcatggaccgggggatttggtttttttttttaattcagaggaagctcagtgcaactccaacagattgcctatccaagtagagatgaagtctcgacaagtgaaaaactacatcagcgcaagtcagaactcagttttacttgtccttgcatcaaatcaaacaacagaaactctcctgaaaaacgcagaaacaaaaaaaatctcaagttgcacctgtcactgcatcaattggttcttaaacaaggactagttacatacccatgcattgctacagtatttatatatcacataggtagggttttttatattatgcttgagtgtagaatataaacacaaaaatatacgtgttttattggttaaatggatgtgaatgtagagccaac

SEQ ID NO: 45223 - DNA, 1999 bp, Zea Mays
cacgttctcagcccatggaagacggcagcccaggccgagatccgacgtagacgtcatcccacagcattattcgcgacagctccggtttggggggatagggagcgagaggcggccgcgccacacaaaactatctccgccgcggctccgttgcatggtataccatgctgccggcggctgccaccgctgcagcgccggacccctcgtgctccaccttcccctcctcccgccgcgctccccctgtcgcttcgcgtcacagcttcgttgttgcaacaagagccaccggcagctcgggtctcttctctctccggtgtcacggtcgccttccctgccactctcgctgtcgctgccgctgccgcgcctggtggaacaatgagcgagcgcgccgggtatccggcgccagccgtggccgccattgccgggccgtcgcgtcggcgccggaccacatggacgagcagccggcgagggggaggtaccacccgttcgaggagatctccgaggcggtgcagctggacgacggcgagccggcccacctgaccgacgccgagtcagcccgaacaatcgtcgaggtgaacaacaaggcgacggtgatgatctccacgctcgtcggcgacggtgtgcacgagcggatcatcctgccggagttcccctacctcaccgacgagaacggagatatctacttcgaggtcgacaacgaggacgcgctgctggagagcatcatgggggaggacaagatcgccacgttatcatcggattggacaacacacaggtcttcgccgacttggatctcgtctcggcctccgccacagagtttgcgcaagaagacgacaacggcgatgaggacgatgacggctccgacgatgatgaggaaagcgactttgacgaggacttcaacgacgtggagggtgtgttttcggttgatgaggacgacgaagatgacagagaggaagaggaggaggaggacgacgacgacgatgacgaggacctaccaagctggtccaaccttgagaccgtgaattcctgccatccactgtactttgcaaggatgattgtagagactgcaaccaagtctagcatagactggctggaccggccacctgcaagccttgtcgtcgagggccagctgaggcctgcctttgctgaggagagcaccatggttgccaagcatatatcaagtgacgcgccaaagaaagatacaaaggagagtggtgccacctttttcaaggtcgaggtcctcagcatcgagttgatcactgcgtatggaactgagccaaaggtaaagattgaagaataccagaaggctaagccggacatcatcgcgcattctgcaccgaacgtaatatcgcgcctgagagctggtggagacaaggtcacccaggctctgaaatctctctgttggaggagcaaggccattcaagtagaggaggcagcggtgatcggagtggactgccttggttttgacctgagagtgtgctcaggaactcaagtgcagacattgagatttgctttccctacaaaggccacttcagagttctctgcagagaagcaaatacatgagcttctgtttcctaggaatacacatcaagaagggcaatcaccacaggcccgacagaagtcctgatgtaattcgatccatcgatgtggtaacttcattcagatgaggaagctcagtgcaactccaacagattgcctatccaagtagagatgaagtctcgacaagtgaaaaactacatcagcgcaagtcagaactcagttttacttgtccttgcatcaaatcaaacaacagaaactctcctgaaaaacgcagaaacaaaaaaaatctcaagttgcacctgtcactgcatcaattggttcttaaacaaggactagttacatacccatgcattgctacagtatttatatatcacataggtagggttttttatattatgcttgagtgtagaatataaacacaaaaatatacgtgttttattggttaaatggatgtgaatgtagagccaac

SEQ ID NO: 45224 - DNA, 2839 bp, Zea Mays
cagcacgtccttaccagcatgactgtttatatggcaatggcagttgacatcccccaacggggtttagatgccattgatagaataagaaaaggttttctttggagaggccgtaaagaggcgaaaggtgggcactgccttgtggcatggggaaaggtatgtcgcccacttcaacttgtagggctgggtatgtcatgcctggtaaggatgggaaggcgtctgctagtgatgttggtgggaaagcgtgagagtagttgatgattcaatcgttaggctggcacttgggccgtgggccagttggagttgtatcgaatctgtattgggctggccaaggctaaccatatatgtcgaaccaatgccagtgggcaggaatatggaataacagaaagtaaaaccacttcgtaacaacttatctcgagttgcgttgcgattgtcgtgcctccgacgatctcacgtcccggcagtgactcatcggcggccacggggcgtcacaggtggtatcaaagctttggatcctcggagcttccacgacggcaccaaccgccaagccgtcggtgcagacatggctgctactggagacgatggaagccacagagcagaagagtgatgagaattgggatcggatgacgcggaccctggaccgcttgggcgataaggtggaggccatggagatcggacagcagtgccttcatcgacagccagagactatggaggttgggcagttccgtcttcaacaacaggcggaaactacaacggctgctgctcggaaggcggaggaagagaggtccattctcgcgcggcaagtggacaagaccggaaagacggtgtctcggcttcgtttggaagtgctggcgaaggagatggaaggtatggaaactgaaactgagaaggaggaacgtaatcataggccggagggggtgatggtcgatcacatggagagagggagtaccatgatcagcaaggtggaagtagggagagtagggagcatagagctgttaatccacaaaggggaaaccgggagtatcgcgatcaacaaggtgggaatagagagtatcgtacattaaatttgcctaagatgtcatttcccaagtttcatggaactgaattaggtgtttggtttgataagtgtatagagtatttcgacatctaccaggtgtataagtgtatgagggaaacacaactagatgggtgcaggtgtacaagaggaggcaagggctaggaaactgggcacaattcactcaagcagtgcaagagaagtttggggccgaggagaatgcacagacgatgaggggcttactgcatttatcatagaaatctagtttggaggagtacattcatgcatttgaagaagctagatatgctactatattgcacaatcctgaaatgggagaaacgttttttgtttctcagtttgtgaaaggtttgaaaggggagttgcagggccatgttttagctcaattgcctcggacagtagatcgagctatcctcctggctcagattcagcaagaggttgtggaaatgaatagagcaaaatttcagaaaaaaattcagggtagtaaggtgatagtgaatgcaggaaaaggggacactagagcaggagtgggctctagtgagttggctaaggagaggcagttgagggattttcgaaggttgaatggattgtgttttgggagtggagaaaaatacgagccaggtcaccaggccaagtgtccaaaaggggtcgaactcaattacatagtctgacaatagaggatatggggttgactttgtcagatgaggtgctgcagcagttagacgaggatagagagattttttctcgaacgcgcaggagaactgcgcatcattatattaagagaggaaggtccaaagtggaccaaaatacaacgccctgagggcgaggatagagagatgaagcatgtaatctgtccctaaatgccatcagtggaactgatagagagggatgtatgagagttcgggcgctgattcaaaatcaggtgatggtgatgctggtagactcgggcagttccaccagttttgtcagtcagagaatagtggacaaactggctttgcagacagaacctgctgcacctgacagggttaaggtggctaatggggagttcatgctgagcacgaggagggtggcagcattggagtggtgggctgatggacatacttatatcagtgacatgagagttttggatttagaagcttatgacgccattttgggatatgattggttgaagggtcgtagtcccatgcaatgtgattgggataacaagattctgctgttcaaggatagaggtgtggaggtgcaattgaagggagatggcatggaaagcaaggaggtgctgcaggtgtctgctgcacaactgcaaaggtggatgaaaggtaatcaagtatgggttctggtgctgttagagtcaatgcaggaagaagtggttgaaaggcatcaggaaccattacagctcatactcaaggagtttgaggatgtttttgctacacccacagggctacctcctgcagtcctgctagagtgtatgatcaccatatacctctgttgccaggttccatacctatgaattctagaccctacaggtactcaccattccacaaaacagagatcgaaagacaggtgacagacttgttgaaagcaggtctgatagtacctagtgccagtccttttgcatccccagtactactagtccagaagaaagatggcagctggaggttttgcattgactacagaaggttgaactctatgactatcaagaatagatcccccatgcccttggtagatgaggtcctagatgagttggctggcacccagtttttcaccagtttg

SEQ ID NO: 45225 - DNA, 1866 bp, Zea Mays
aaaatagaatcacatcatttttagttggcgtgggggtatcagataatatactacgtacattcataacataatagtcatgccataaaattatgatatctgataatatatttgattatgtacacttgttcaaagtttcgactgacatgatagaagtttgataaatgcctagcattactgcccatgtttaactccagattcgagcagtaacactgctgcatatgaatgttcgtacatcgcctgccccaaccagcaaagaatggtatgtacaggttgcattccatccccccattttgtcttcatatagcttaccggcacaatgaatttcacagtatgtctatcaaaacaaaattggatctcgaaccatgacatgcggcttcagactttgcattcaacccccaattagtcagcagaacaatggtgcgacttccttgctatacagagaagactctccaagtccgaaccagatgtccggaacaatcaaatagcctcttcctcttgctgaactatagatggaaccaacatgtagcatgccagcagagacgggacggacatcagttccacaaggaccccctctctagagtcagactccaagctactggagggactggacatcctcaaatcagtaaagagtgcaagactcgtgacacatccatatcatgtaggactggggattggaacattccggtggctttctgcgaaatctctgattatacgtttaagagttctaccacccttcccttgcatgtaaccttgatggcttcttatattatcaccagtcctgctgtgaagatagtctgagcctgcatcctgaagcaccttgagccacgatggaactattatttcagcctccccttgctttagatactcagaaggcaaagatttcacctaatcagacatgtcagccaacattaggcaacaggtgtgaatctattgagcacatgaaaattcatatctgacagatctggcatcagattgtcacgtataacttgtcccataataagtgcacttctagcattcaaattttgttccaaaattcatatctaactatggacgactccttggagtacctaacttcagtaacttcttttagctacaagtacagtcattttgggaccgagggaataaccatatgaaggaaaaatagttgaacatgtttttgatcctacatccatgtttcaagttaaataagagaatagcagaattaattatgccagatagttaccaagaatatatttctttaagtagtgctaatcaatcatacatgatagcacatcatgcgtgtgaaattcaaatggtagaattagttaggtgcccgtacgttactacggtttatatttaagttcgagtataaaatacaaagacatgtgtgttctattggctagatgagtgtgaatctaggtttgggtttggagacaacaacctggtttaaaatcccatttagcataatttcagtttttttatgtatcacctaacccagcgaccggaccggtcccgaattccatgctggaatattagtgcagattatggcttaaagaggaccagtgcagattatggcctaaagagtaagaaaaaaatcatttgaacatctacaaataaaaaaaattattttttccgcgagtaataaaaataattgcattgatgagcagcaactacagtttcggaaaaaaaaagaaatcaatctattcaatgatccgaaacagaaatgggagcatatcacgcccaacctaggtggtgctgtgcgtgggtggggcaggggtttaggggttttctcgacctgtgtgaggtcttaatataatatcgtggaagcggtctcacccccaggtcgattttttttaaaaaggttcatttatgaaaagaaaaacaata

SEQ ID NO: 45226 - DNA, 1316 bp, Zea Mays
tttcgatacttaatcgcaattcatttcggtgtgaggagatacgagcgtacagtacaacacaagcatgtacgtatgcatgtgcccacgcgggcacacgtacgcgccggatcggactctctctgtgtctctgcagacccacgacgacgaacctgacacacaacaataccataccatacatacattacaggctgctctcgatcaagcagcttgccggcccaacgcatcatcatcagacgtcgcggtcgcgggcgcactcgggcggcacggcggcgccgtagcggtcgcgatcggtgcagtagttgtagatggtgtagcggcgcctgacctcggccaggcggcggtactgcgcggcgtcgaggtccctgaactccggctgcagtgagcttttaccgcggtaaattttagggaatcctacctggttcatgtgaggttccagaggacggagcagcggggggattgcattgcattgcagatgcagagtgatgatgtgtgtgtgacggacgcaaaagcaatgcgatggatatatgatgcgggtgcttacgcgatcatgtagaggttccagaggacggagtaggagtggtactccttggtggggtcgaaccagaggtagatccgctgctcgcggtcgcccttgccgccggtgaacacgttggtctgcaggatgtagggctgccccgtccggttgcccaggaactcgaagtcgatctcgtcgtgctccgagttctgcgacgacagctgcagatagagcgagccggccggccaccagtcagatacgttgttacatacaagccggcaagagcgaggtggtagagataggaggcaggagaggagctcgtatgtaacgtacgtagaaggccgtgacggtgcccgcggagtcgccgccgacgagcttcatgtgcatgctgaagtggccgaagaggtaggagccccgcgtctggaagcccgtgccggtggacttgtccaggtacagctgcacctcccgcccgccgtcgatgtagtggatgtggtcctgcgcccacgtcggcacgtagttcttctggaacggcacgtccacgggcttccgaggcgccgccgccgtcgcccactccgccagcagcgccaccgccatggcggcaacctgcagccaccgcgccgtcgccatcttcgtctccactggatagctagtgctagtgccggaccaagggtggtgtggtgtggctccgctggatgctttgcttgggcctgaggctcgaggattgcttgagtactttatttatagggaaggacgaaggagagctggcaggctagagcgtggataactggaactgtccggatta

SEQ ID NO: 45227 - DNA, 1208 bp, Zea Mays
gttgaagtcatattagatttcattgttggtcctggattggttttcctgttttcaaggaaaaagggcaattttcagatacttcacttcagcaatggaatggctacagaggaacaagtacttccatgttgtggttaagggggttgagcgtgacggctggaaatttgtattgcttgctagattctctcctttgccttcctacatcatcaactacgcgctatcagccacggacgttggttttttcagagattttctctttcccacagttatcggctgcttaccaatgatactacagaatgtttccatcgtaagccttgctggtgcagcagtggcgtcgaccacaggatcaaataagtcccatatatactcttacctgtttccagcaataggcattgtgtccagtgttctcatttcatggaggattaagcagtattcctcagcccttgctgttcctgaagagctgcaaagttcacctactaatggagatcacaatggtgacgctaagctggcttccgcgccatctaaaaataccggatctgggaaaactaggaagagaaggtaactgacagtatccccctgtattcactatttattacattgtgataccaagtaccaagcagctacagccaatgctagtcaaacatttggatttccacattggtttaccactacagtaagctgtcttgtctgttccatgccatgatcttttgggggggtatttaacagatgcgcaggcagctaccttcttgtttgtcaattgtcaatgagcttctgttcttgtggcagataatatcataaaatgttgtaacagatgcgcaggctcacatagtcacatgttgtacacccgaataacctggtggtttagatttggatcgtcctgagttcaattgtattctggggatcaatattggttttccctccctaattattgaacttgacatgtgcacggtgtagtccaaccagtttatgttctttggtgtaacaatttaattcagaactgtgtttgcttttgtgtggttgtagatagagatggcaatgggtaaaaatccgctgggtattacttgcccaaactcatacccgcgaaagaaaaatacgcccgctaaaaaactcatacccatgacgggtataaagttttgtccaaacccatacccatgcgggtttcggatatccaacgggtttcccatacccactaacatcaacataaaaaataa

SEQ ID NO: 45228 - DNA, 1733 bp, Zea Mays
ctaaaacttccacttgttctagccgtcacggcgctaccagttctctgccgcatctctctgttcctctgtttcttcctcttctctaatacattccactagtaatctgttaacacttcgtcatgaagttcggcggctcgtcgctcgcgtcagccgagcggatgcaggaggtggccgacctcatccttagcttcctcggcgagatgcccgtcgtcgtcctctccgccatggggaagaccaccaataacctcctcctaggaccctccatttctagctctcagcgcctgggtcggggccggagagaaggcagtgagctgcggtggaggaggggcgtccgaaatccctgagctcgctgtcatcagggagctgaatcttaggacaattgatgagctcggtttagataagtcgatagtttcaggtatgttgttgtttgctccactctgctcttggaacgcctcagctgttcctcttgctctatcatgaatgcttctgttatacaatgggatgtcgttctcttggatgtgccaaagttttctctccccttagtctgaataacaattcctggtggatgtatgtatgtatgtattctcttggatgtgcgaaagttttccccttggatgtgcgaaacacatttactcctcactgcaatccacgcctccactctcgacccctcctccttcctcctctccctagggaccgttctccccaacacgcaggggtagcgtaggaggtgttgtggcggcattatctaggaagcggtctgtggacgtgaggcggatcaacccgaaggtgcctaaggaggaggctgtcaccatctccggtcgactcgtccagatcctctccgaccatgggcccctcaccatcggcaacacctggaacaacaccaaggtacccaatcaaccagtcagtcaagcagagtggcaaaagccggggagcgatgcaggcgtcggagcagcaacaacggaggaatgagaaggaaacacacaaagagcatcaaaagcaagttcaacgatcttatgtcaacccatccacctctgaatgaggcatattcagatgtgtgtgtattcagcactcatgctgccttcagtttacggagctcaatatgttacatcgacctttccaacctgccggcagaactcaagaagctcaagcacaagaagtgcctcgtccagtccccccaactccttcatggtccaattcgcttgtggcataggaatcccatcctagattcaatagaggggttgcaatgccggcatcgccatagctggaaatcgagcactgacggacaccgagcgccgagatgggccgtcttgtccaccgccgcaagaaccgcatgcgttggatccatccttacacctgctcctacttccgcgccagcagcccaacactccgacgacacgagctcctccctataaaagtgacatctttactgtatagataacgaatggttatagttatttattcttatgtccaagtggtattggatttttttagcttgggattaaagaaaagacaatcatgtactttgcatcttttttgtatttatgttttatgctaaattgtggaataacactatattagttgttagcaaagaatttgtgagatattaaggttgatgataatatatgttgttatttcatttaatcattgtgtattaatattttatcgaataatttgtgtaccgtcgcaacgcacgggcactatactagtagagtcctaaaatccatccacctgcc

SEQ ID NO: 45229 - DNA, 1727 bp, Zea Mays
ctaaaacttccacttgttctagccgtcacggcgctaccagttctctgccgcatctctctgttcctctgtttcttcctcttctctaatacattccactagtaatctgttaacacttcgtcatgaagttcggcggctcgtcgctcgcgtcagccgagcggatgcaggaggtggccgacctcatccttagcttcctcggcgagatgcccgtcgtcgtcctctccgccatggggaagaccaccaataacctcctcctaggaccctccatttctagctctcagcgcctgggccggagagaaggcagtgagctgcggtggaggaggggcgtccgaaatccctgagctcgctgtcatcagggagctgaatcttaggacaattgatgagctcggtttagataagtcgatagtttcaggtatgttgttgtttgctccactctgctcttggaacgcctcagctgttcctcttgctctatcatgaatgcttctgttatacaatgggatgtcgttctcttggatgtgccaaagttttctctccccttagtctgaataacaattcctggtggatgtatgtatgtatgtattctcttggatgtgcgaaagttttccccttggatgtgcgaaacacatttactcctcactgcaatccacgcctccactctcgacccctcctccttcctcctctccctagggaccgttctccccaacacgcaggggtagcgtaggaggtgttgtggcggcattatctaggaagcggtctgtggacgtgaggcggatcaacccgaaggtgcctaaggaggaggctgtcaccatctccggtcgactcgtccagatcctctccgaccatgggcccctcaccatcggcaacacctggaacaacaccaaggtacccaatcaaccagtcagtcaagcagagtggcaaaagccggggagcgatgcaggcgtcggagcagcaacaacggaggaatgagaaggaaacacacaaagagcatcaaaagcaagttcaacgatcttatgtcaacccatccacctctgaatgaggcatattcagatgtgtgtgtattcagcactcatgctgccttcagtttacggagctcaatatgttacatcgacctttccaacctgccggcagaactcaagaagctcaagcacaagaagtgcctcgtccagtccccccaactccttcatggtccaattcgcttgtggcataggaatcccatcctagattcaatagaggggttgcaatgccggcatcgccatagctggaaatcgagcactgacggacaccgagcgccgagatgggccgtcttgtccaccgccgcaagaaccgcatgcgttggatccatccttacacctgctcctacttccgcgccagcagcccaacactccgacgacacgagctcctccctataaaagtgacatctttactgtatagataacgaatggttatagttatttattcttatgtccaagtggtattggatttttttagcttgggattaaagaaaagacaatcatgtactttgcatcttttttgtatttatgttttatgctaaattgtggaataacactatattagttgttagcaaagaatttgtgagatattaaggttgatgataatatatgttgttatttcatttaatcattgtgtattaatattttatcgaataatttgtgtaccgtcgcaacgcacgggcactatactagtagagtcctaaaatccatccacctgcc

SEQ ID NO: 45230 - DNA, 1466 bp, Zea Mays
ctaaaacttccacttgttctagccgtcacggcgctaccagttctctgccgcatctctctgttcctctgtttcttcctcttctctaatacattccactagtaatctgttaacacttcgtcatgaagttcggcggctcgtcgctcgcgtcagccgagcggatgcaggaggtggccgacctcatccttagcttcctcggcgagatgcccgtcgtcgtcctctccgccatggggaagaccaccaataacctcctcctaggaccctccatttctagctctcagcgcctgggccggagagaaggcagtgagctgcggtggaggaggggcgtccgaaatccctgagctcgctgtcatcagggagctgaatcttaggacaattgatgagctcggtttagataagtcgatagtttcagggaccgttctccccaacacgcaggggtagcgtaggaggtgttgtggcggcattatctaggaagcggtctgtggacgtgaggcggatcaacccgaaggtgcctaaggaggaggctgtcaccatctccggtcgactcgtccagatcctctccgaccatgggcccctcaccatcggcaacacctggaacaacaccaaggtacccaatcaaccagtcagtcaagcagagtggcaaaagccggggagcgatgcaggcgtcggagcagcaacaacggaggactctgctggtgtagatgagaaggaaacacacaaagagcatcaaaagcaagttcaacgatcttatgtcaacccatccacctctgaatgaggcatattcagatgtgtgtgtattcagcactcatgctgccttcagtttacggagctcaatatgttacatcgacctttccaacctgccggcagaactcaagaagctcaagcacaagaagtgcctcgtccagtccccccaactccttcatggtccaattcgcttgtggcataggaatcccatcctagattcaatagaggggttgcaatgccggcatcgccatagctggaaatcgagcactgacggacaccgagcgccgagatgggccgtcttgtccaccgccgcaagaaccgcatgcgttggatccatccttacacctgctcctacttccgcgccagcagcccaacactccgacgacacgagctcctccctataaaagtgacatctttactgtatagataacgaatggttatagttatttattcttatgtccaagtggtattggatttttttagcttgggattaaagaaaagacaatcatgtactttgcatcttttttgtatttatgttttatgctaaattgtggaataacactatattagttgttagcaaagaatttgtgagatattaaggttgatgataatatatgttgttatttcatttaatcattgtgtattaatattttatcgaataatttgtgtaccgtcgcaacgcacgggcactatactagtagagtcctaaaatccatccacctgcc

SEQ ID NO: 45231 - DNA, 904 bp, Zea Mays
ctaaaacttccacttgttctagccgtcacggcgctaccagttctctgccgcatctctctgttcctctgtttcttcctcttctctaatacattccactagtaatctgttaacacttcgtcatgaagttcggcggctcgtcgctcgcgtcagccgagcggatgcaggaggtggccgacctcatccttagcttcctcggcgagatgcccgtcgtcgtcctctccgccatggggaagaccaccaataacctcctcctaggaccctccatttctagctctcagcgcctgggccggagagaaggcagtgagctgcggtggaggaggggcgtccgaaatccctgagctcgctgtcatcagggagctgaatcttaggacaattgatgagctcggtttagataagtcgatagtttcagggaccgttctccccaacacgcaggggtagcgtaggaggtgttgtggcggcattatctaggaagcggtctgtggacgtgaggcggatcaacccgaaggtgcctaaggaggaggctgtcaccatctccggtcgactcgtccagatcctctccgaccatgggcccctcaccatcggcaacacctggaacaacaccaaggtacccaatcaaccagtcagtcaagcagagtggcaaaagccggggagcgatgcaggcgtcggagcagcaacaacggaggaatgagaaggaaacacacaaagagcatcaaaagcaagttcaacgatcttatgtcaacccatccacctctgaatgaggcatattcagatgtgtgtgtattcagcactcatgctgccttcagtttacggagctcaatatgttacatcgacctttccaacctgccggcagaactcaagaagctcaagcacaagaagtgcctcgtccagtccccccaactccttc

SEQ ID NO: 45232 - DNA, 1128 bp, Zea Mays
ctaaaacttccacttgttctagccgtcacggcgctaccagttctctgccgcatctctctgttcctctgtttcttcctcttctctaatacattccactagtaatctgttaacacttcgtcatgaagttcggcggctcgtcgctcgcgtcagccgagcggatgcaggaggtggccgacctcatccttagcttcctcggcgagatgcccgtcgtcgtcctctccgccatggggaagaccaccaataacctcctcctaggaccctccatttctagctctcagcgcctgggccggagagaaggcagtgagctgcggtggaggaggggcgtccgaaatccctgagctcgctgtcatcagggagctgaatcttaggacaattgatgagctcggtttagataagtcgatagtttcaggtatgttgttgtttgctccactctgctcttggaacgcctcagctgttcctcttgctctatcatgaatgcttctgttatacaatgggatgtcgttctcttggatgtgccaaagttttctctccccttagtctgaataacaattcctggtggatgtatgtatgtatgtattctcttggatgtgcgaaagttttccccttggatgtgcgaaacacatttactcctcactgcaatccacgcctccactctcgacccctcctccttcctcctctccctagggaccgttctccccaacacgcaggggtagcgtaggaggtgttgtggcggcattatctaggaagcggtctgtggacgtgaggcggatcaacccgaaggtgcctaaggaggaggctgtcaccatctccggtcgactcgtccagatcctctccgaccatgggcccctcaccatcggcaacacctggaacaacaccaaggtacccaatcaaccagtcagtcaagcagagtggcaaaagccggggagcgatgcaggcgtcggagcagcaacaacggaggactctgctggtgtagatgagaaggaaacacacaaagagcatcaaaagcaagttcaacgatcttatgtcaacccatccacctctgaatgaggcatattcagatgtgtgtgtattcagaactcaagaagctcaagcacaagaagtgcctcgtccagtccccccaactccttc

SEQ ID NO: 45233 - DNA, 1175 bp, Zea Mays
ctaaaacttccacttgttctagccgtcacggcgctaccagttctctgccgcatctctctgttcctctgtttcttcctcttctctaatacattccactagtaatctgttaacacttcgtcatgaagttcggcggctcgtcgctcgcgtcagccgagcggatgcaggaggtggccgacctcatccttagcttcctcggcgagatgcccgtcgtcgtcctctccgccatggggaagaccaccaataacctcctcctaggaccctccatttctagctctcagcgcctgggccggagagaaggcagtgagctgcggtggaggaggggcgtccgaaatccctgagctcgctgtcatcagggagctgaatcttaggacaattgatgagctcggtttagataagtcgatagtttcaggtatgttgttgtttgctccactctgctcttggaacgcctcagctgttcctcttgctctatcatgaatgcttctgttatacaatgggatgtcgttctcttggatgtgccaaagttttctctccccttagtctgaataacaattcctggtggatgtatgtatgtatgtattctcttggatgtgcgaaagttttccccttggatgtgcgaaacacatttactcctcactgcaatccacgcctccactctcgacccctcctccttcctcctctccctagggaccgttctccccaacacgcaggggtagcgtaggaggtgttgtggcggcattatctaggaagcggtctgtggacgtgaggcggatcaacccgaaggtgcctaaggaggaggctgtcaccatctccggtcgactcgtccagatcctctccgaccatgggcccctcaccatcggcaacacctggaacaacaccaaggtacccaatcaaccagtcagtcaagcagagtggcaaaagccggggagcgatgcaggcgtcggagcagcaacaacggaggactctgctggtgtagatgagaaggaaacacacaaagagcatcaaaagcaagttcaacgatcttatgtcaacccatccacctctgaatgaggcatattcagatgtgtgtgtattcagtttacggagctcaatatgttacatcgacctttccaacctgccggcagaactcaagaagctcaagcacaagaagtgcctcgtccagtccccccaactccttc

SEQ ID NO: 45234 - DNA, 1075 bp, Zea Mays
ctaaaacttccacttgttctagccgtcacggcgctaccagttctctgccgcatctctctgttcctctgtttcttcctcttctctaatacattccactagtaatctgttaacacttcgtcatgaagttcggcggctcgtcgctcgcgtcagccgagcggatgcaggaggccggagagaaggcagtgagctgcggtggaggaggggcgtccgaaatccctgagctcgctgtcatcagggagctgaatcttaggacaattgatgagctcggtttagataagtcgatagtttcaggtatgttgttgtttgctccactctgctcttggaacgcctcagctgttcctcttgctctatcatgaatgcttctgttatacaatgggatgtcgttctcttggatgtgccaaagttttctctccccttagtctgaataacaattcctggtggatgtatgtatgtatgtattctcttggatgtgcgaaagttttccccttggatgtgcgaaacacatttactcctcactgcaatccacgcctccactctcgacccctcctccttcctcctctccctagggaccgttctccccaacacgcaggggtagcgtaggaggtgttgtggcggcattatctaggaagcggtctgtggacgtgaggcggatcaacccgaaggtgcctaaggaggaggctgtcaccatctccggtcgactcgtccagatcctctccgaccatgggcccctcaccatcggcaacacctggaacaacaccaaggtacccaatcaaccagtcagtcaagcagagtggcaaaagccggggagcgatgcaggcgtcggagcagcaacaacggaggactctgctggtgtagatgagaaggaaacacacaaagagcatcaaaagcaagttcaacgatcttatgtcaacccatccacctctgaatgaggcatattcagatgtgtgtgtattcagcactcatgctgccttcagtttacggagctcaatatgttacatcgacctttccaacctgccggcagaactcaagaagctcaagcacaagaagtgcctcgtccagtccccccaactccttc

SEQ ID NO: 45235 - DNA, 900 bp, Zea Mays
ctaaaacttccacttgttctagccgtcacggcgctaccagttctctgccgcatctctctgttcctctgtttcttcctcttctctaatacattccactagtaatctgttaacacttcgtcatgaagttcggcggctcgtcgctcgcgtcagccgagcggatgcaggaggtggccgacctcatccttagcttcctcggcgagatgcccgtcgtcgtcctctccgccatggggaagaccaccaataacctcctcctaggaccctccatttctagctctcagcgcctgggccggagagaaggcagtgagctgcggtggaggaggggcgtccgaaatccctgagctcgctgtcatcagggagctgaatcttaggacaattgatgagctcggtttagataagtcgatagtttcagggaccgttctccccaacacgcaggggtagcgtaggaggtgttgtggcggcattatctaggaagcggtctgtggacgtgaggcggatcaacccgaaggtgcctaaggaggaggctgtcaccatctccggtcgactcgtccagatcctctccgaccatgggcccctcaccatcggcaacacctggaacaacaccaaggtacccaatcaaccagtcagtcaagcagagtggcaaaagccggggagcgatgcaggcgtcggagcagcaacaacggaggactctgctggtgtagatgagaaggaaacacacaaagagcatcaaaagcaagttcaacgatcttatgtcaacccatccacctctgaatgaggcatattcagatgtgtgtgtattcagtttacggagctcaatatgttacatcgacctttccaacctgccggcagaactcaagaagctcaagcacaagaagtgcctcgtccagtccccccaactccttc

SEQ ID NO: 45236 - DNA, 1199 bp, Zea Mays
ctaaaacttccacttgttctagccgtcacggcgctaccagttctctgccgcatctctctgttcctctgtttcttcctcttctctaatacattccactagtaatctgttaacacttcgtcatgaagttcggcggctcgtcgctcgcgtcagccgagcggatgcaggaggtggccgacctcatccttagcttcctcggcgagatgcccgtcgtcgtcctctccgccatggggaagaccaccaataacctcctcctaggaccctccatttctagctctcagcgcctgggtcggggccggagagaaggcagtgagctgcggtggaggaggggcgtccgaaatccctgagctcgctgtcatcagggagctgaatcttaggacaattgatgagctcggtttagataagtcgatagtttcaggtatgttgttgtttgctccactctgctcttggaacgcctcagctgttcctcttgctctatcatgaatgcttctgttatacaatgggatgtcgttctcttggatgtgccaaagttttctctccccttagtctgaataacaattcctggtggatgtatgtatgtatgtattctcttggatgtgcgaaagttttccccttggatgtgcgaaacacatttactcctcactgcaatccacgcctccactctcgacccctcctccttcctcctctccctagggaccgttctccccaacacgcaggggtagcgtaggaggtgttgtggcggcattatctaggaagcggtctgtggacgtgaggcggatcaacccgaaggtgcctaaggaggaggctgtcaccatctccggtcgactcgtccagatcctctccgaccatgggcccctcaccatcggcaacacctggaacaacaccaaggtacccaatcaaccagtcagtcaagcagagtggcaaaagccggggagcgatgcaggcgtcggagcagcaacaacggaggactctgctggtgtagatgagaaggaaacacacaaagagcatcaaaagcaagttcaacgatcttatgtcaacccatccacctctgaatgaggcatattcagatgtgtgtgtattcagcactcatgctgccttcagtttacggagctcaatatgttacatcgacctttccaacctgccggcagaactcaagaagctcaagcacaagaagtgcctcgtccagtccccccaactccttc

SEQ ID NO: 45237 - DNA, 914 bp, Zea Mays
ctaaaacttccacttgttctagccgtcacggcgctaccagttctctgccgcatctctctgttcctctgtttcttcctcttctctaatacattccactagtaatctgttaacacttcgtcatgaagttcggcggctcgtcgctcgcgtcagccgagcggatgcaggaggtggccgacctcatccttagcttcctcggcgagatgcccgtcgtcgtcctctccgccatggggaagaccaccaataacctcctcctaggaccctccatttctagctctcagcgcctgggtcggggtgctcgattctttcgcttactagctaacaaggctagatgtgcgtgtgcctgattcgttgtctgtgtaggccggagagaaggcagtgagctgcggtggaggaggggcgtccgaaatccctgagctcgctgtcatcagggagctgaatcttaggacaattgatgagctcggtttagataagtcgatagtttcagggaccgttctccccaacacgcaggggtagcgtaggaggtgttgtggcggcattatctaggaagcggtctgtggacgtgaggcggatcaacccgaaggtgcctaaggaggaggctgtcaccatctccggtcgactcgtccagatcctctccgaccatgggcccctcaccatcggcaacacctggaacaacaccaaggtacccaatcaaccagtcagtcaagcagagtggcaaaagccggggagcgatgcaggcgtcggagcagcaacaacggaggaatgagaaggaaacacacaaagagcatcaaaagcaagttcaacgatcttatgtcaacccatccacctctgaatgaggcatattcagatgtgtgtgtattcagaactcaagaagctcaagcacaagaagtgcctcgtccagtccccccaactccttc

SEQ ID NO: 45238 - DNA, 853 bp, Zea Mays
ctaaaacttccacttgttctagccgtcacggcgctaccagttctctgccgcatctctctgttcctctgtttcttcctcttctctaatacattccactagtaatctgttaacacttcgtcatgaagttcggcggctcgtcgctcgcgtcagccgagcggatgcaggaggtggccgacctcatccttagcttcctcggcgagatgcccgtcgtcgtcctctccgccatggggaagaccaccaataacctcctcctaggaccctccatttctagctctcagcgcctgggccggagagaaggcagtgagctgcggtggaggaggggcgtccgaaatccctgagctcgctgtcatcagggagctgaatcttaggacaattgatgagctcggtttagataagtcgatagtttcagggaccgttctccccaacacgcaggggtagcgtaggaggtgttgtggcggcattatctaggaagcggtctgtggacgtgaggcggatcaacccgaaggtgcctaaggaggaggctgtcaccatctccggtcgactcgtccagatcctctccgaccatgggcccctcaccatcggcaacacctggaacaacaccaaggtacccaatcaaccagtcagtcaagcagagtggcaaaagccggggagcgatgcaggcgtcggagcagcaacaacggaggactctgctggtgtagatgagaaggaaacacacaaagagcatcaaaagcaagttcaacgatcttatgtcaacccatccacctctgaatgaggcatattcagatgtgtgtgtattcagaactcaagaagctcaagcacaagaagtgcctcgtccagtccccccaactccttc

SEQ ID NO: 45239 - DNA, 961 bp, Zea Mays
ctaaaacttccacttgttctagccgtcacggcgctaccagttctctgccgcatctctctgttcctctgtttcttcctcttctctaatacattccactagtaatctgttaacacttcgtcatgaagttcggcggctcgtcgctcgcgtcagccgagcggatgcaggaggtggccgacctcatccttagcttcctcggcgagatgcccgtcgtcgtcctctccgccatggggaagaccaccaataacctcctcctaggaccctccatttctagctctcagcgcctgggtcggggtgctcgattctttcgcttactagctaacaaggctagatgtgcgtgtgcctgattcgttgtctgtgtaggccggagagaaggcagtgagctgcggtggaggaggggcgtccgaaatccctgagctcgctgtcatcagggagctgaatcttaggacaattgatgagctcggtttagataagtcgatagtttcagggaccgttctccccaacacgcaggggtagcgtaggaggtgttgtggcggcattatctaggaagcggtctgtggacgtgaggcggatcaacccgaaggtgcctaaggaggaggctgtcaccatctccggtcgactcgtccagatcctctccgaccatgggcccctcaccatcggcaacacctggaacaacaccaaggtacccaatcaaccagtcagtcaagcagagtggcaaaagccggggagcgatgcaggcgtcggagcagcaacaacggaggaatgagaaggaaacacacaaagagcatcaaaagcaagttcaacgatcttatgtcaacccatccacctctgaatgaggcatattcagatgtgtgtgtattcagtttacggagctcaatatgttacatcgacctttccaacctgccggcagaactcaagaagctcaagcacaagaagtgcctcgtccagtccccccaactccttc

SEQ ID NO: 45240 - DNA, 1161 bp, Zea Mays
ctaaaacttccacttgttctagccgtcacggcgctaccagttctctgccgcatctctctgttcctctgtttcttcctcttctctaatacattccactagtaatctgttaacacttcgtcatgaagttcggcggctcgtcgctcgcgtcagccgagcggatgcaggaggtggccgacctcatccttagcttcctcggcgagatgcccgtcgtcgtcctctccgccatggggaagaccaccaataacctcctcctaggaccctccatttctagctctcagcgcctgggccggagagaaggcagtgagctgcggtggaggaggggcgtccgaaatccctgagctcgctgtcatcagggagctgaatcttaggacaattgatgagctcggtttagataagtcgatagtttcaggtatgttgttgtttgctccactctgctcttggaacgcctcagctgttcctcttgctctatcatgaatgcttctgttatacaatgggatgtcgttctcttggatgtgccaaagttttctctccccttagtctgaataacaattcctggtggatgtatgtatgtatgtattctcttggatgtgcgaaagttttccccttggatgtgcgaaacacatttactcctcactgcaatccacgcctccactctcgacccctcctccttcctcctctccctagggaccgttctccccaacacgcaggggtagcgtaggaggtgttgtggcggcattatctaggaagcggtctgtggacgtgaggcggatcaacccgaaggtgcctaaggaggaggctgtcaccatctccggtcgactcgtccagatcctctccgaccatgggcccctcaccatcggcaacacctggaacaacaccaaggtacccaatcaaccagtcagtcaagcagagtggcaaaagccggggagcgatgcaggcgtcggagcagcaacaacggaggaatgagaaggaaacacacaaagagcatcaaaagcaagttcaacgatcttatgtcaacccatccacctctgaatgaggcatattcagatgtgtgtgtattcagtttacggagctcaatatgttacatcgacctttccaacctgccggcagaactcaagaagctcaagcacaagaagtgcctcgtccagtccccccaactccttc

SEQ ID NO: 45241 - DNA, 1114 bp, Zea Mays
ctaaaacttccacttgttctagccgtcacggcgctaccagttctctgccgcatctctctgttcctctgtttcttcctcttctctaatacattccactagtaatctgttaacacttcgtcatgaagttcggcggctcgtcgctcgcgtcagccgagcggatgcaggaggtggccgacctcatccttagcttcctcggcgagatgcccgtcgtcgtcctctccgccatggggaagaccaccaataacctcctcctaggaccctccatttctagctctcagcgcctgggccggagagaaggcagtgagctgcggtggaggaggggcgtccgaaatccctgagctcgctgtcatcagggagctgaatcttaggacaattgatgagctcggtttagataagtcgatagtttcaggtatgttgttgtttgctccactctgctcttggaacgcctcagctgttcctcttgctctatcatgaatgcttctgttatacaatgggatgtcgttctcttggatgtgccaaagttttctctccccttagtctgaataacaattcctggtggatgtatgtatgtatgtattctcttggatgtgcgaaagttttccccttggatgtgcgaaacacatttactcctcactgcaatccacgcctccactctcgacccctcctccttcctcctctccctagggaccgttctccccaacacgcaggggtagcgtaggaggtgttgtggcggcattatctaggaagcggtctgtggacgtgaggcggatcaacccgaaggtgcctaaggaggaggctgtcaccatctccggtcgactcgtccagatcctctccgaccatgggcccctcaccatcggcaacacctggaacaacaccaaggtacccaatcaaccagtcagtcaagcagagtggcaaaagccggggagcgatgcaggcgtcggagcagcaacaacggaggaatgagaaggaaacacacaaagagcatcaaaagcaagttcaacgatcttatgtcaacccatccacctctgaatgaggcatattcagatgtgtgtgtattcagaactcaagaagctcaagcacaagaagtgcctcgtccagtccccccaactccttc

SEQ ID NO: 45242 - DNA, 413 bp, Zea Mays
atgaattggtacgctagatgattatgtgaattggagggcatggatcaggatggatcacaaggtggctttgatgaacccatctctatagggacgacttgatcaagtgtcaggattgttgatgctcaccaagcggacgtcatctaaccacactaacctagtgttatcccaggcaagccccggtgcatttgccacctccttgttgttttaaaacttttatcgcttatatgctgcattaggtgataggagttgagtgatgaaacagttgatgcattgccattccttggaatttgattatcctccttgatacctgtttttataaaaagaattaatgaggcttagccctgcctagagaattaaaatttgtttctttttaaaagaatgatgtgtgacactgggtatgggtttgttttatg

SEQ ID NO: 45243 - DNA, 931 bp, Zea Mays
cttacctctacgtgtccatctccaactaattcttgtgcacgtatttttctctagaagtatcccaccgctcaaactcctctgctccttatcccttcacgccgatctctccctaccgatctctccctacagattttttcagccgcctgcattatcttctacgcgctaccacccagcctctgtcctcgtcgcgatgcccagtccccagctcggcgtcctcctcttccgcggcctcccactcctccagtccgagctcccttctcttcttcccatggcggctgtcgtcgagttccctgcgcaagcgtcgcacgcagccgtgtcttcaagcccgggtcttcttcctcccttttctatggacgctgcccctctctggtttctggtggccggccacctctgctgctcccatgtaaaatccctggagaaattggtggagaagaaggttaagttcaacgctccttaggtgttcgatgatatgcaagaactggtggccgtcttcgctcttgctgaaatcgagtcggggcatgatgtggtacgctagatgattatgtgaattggagggcatggatcaggatggatcacaaggtggctttgatgaacccatctctatagggacgacttgatcaagtgtcaggattgttgatgctcaccaagcggacgtcatctaaccacactaacctagtgttatcccaggcaagccccggtgcatttgccacctccttgttgttttaaaacttttatcgcttatatgctgcattaggtgataggagttgagtgatgaaacagttgatgcattgccattccttggaatttgattatcctccttgatacctgtttttataaaaagaattaatgaggcttagccctgcctagagaattaaaatttgtttctttttaaaagaatgatgtgtgacactgggtatgggtttgttttatg

SEQ ID NO: 45244 - DNA, 1689 bp, Zea Mays
gttagcgggagcgggtgccgttggaggaggtctgatctcgtctgcggcgggggcgagagagcaaggccacggcgtcgcggcaatgagcagcaccaccgccgacacatccccggagagcgtcggctcctgccgccctcccactcctcctacttcccttccccctcattcagcgccggcggcggccctccgcggcgctccagtgaggcggcaactggacttcgcggacgcggacgccgactcctgtgccggcgccggtggcgacctggacgactacgacgacttccttatccgcgccgtggatgacattgagcggggctataacgaggccaagcgacgcgctccgccgtgcgtctgcgggcgcggctattgcgcggtgcaacgggacgaccagagcggcgggtggatgtacgtctgctcatcgcagccgaagtgtaaacatgttgccatgtgtaaggaagttgatcagaatccacaatcaccgcctgttgttagaagtgatcctaaaacaagcaatcgttgtgcattcaacgttccaaggactcctgtaaatgatgctagaacacaaattaataatgttactctcgaaggtgctggtgctacaactccaattaatgtcagtccccaggctgctgttgctgcaactccatttagttacacttcgaaaggtgttggcgctatgactccagttcatgttagtccccaagttcatgttagtccacaaggtgcacacgctacagcagcagttaaatgtactgcagggaagtgtaaaatattgagagtgggcaatgaagactggtatgtttgccctatacccaagggacaaggtgcatgcagttacaaggtgccagtaacagatgctgttggagctggagacaacgacgacgcaaatggatcagccaatcccgcccaacctaatgacgacgagtggccattcgacgtcatcaacgatgaaatcgtgccgacgccgcgtgctgtagcccagcagaagtcaccgagcacaccgcaccaccagcggagtggcacggcgagaacacctgcgccatcgcccgtgacgccgttcggtagccgcggcgctatgaccgggcgcccaaacgacacctgcttcgggtgcggcgagaaggggcactggatcagcgcctgccctaaaccgtctccgcgaagtaggtgtttccgttgcggcgtggtcggtcacaggccggccaattgtccccagccgagagggtcttagaatagaaggttgtgggtgaactggtggtctgatgctgcttttgggctgtgcctcgtaggcaatcagggctcaggagcagtgctaatgtttctgcttaggaatcttaagagcttgttcgatttgaggtggatcagaggggaatccacctcaaacccaacaagtcttaatcgggtttggcattgtagctacgagagagagagagagagaataatgtgtttgttgagaggtagggtggacaacggtgtaaaggtccgcaattgggccccattgtctgcctagtttagttaatttagttaataactaaattaatgtagttaattcagttaatgtagttcggtacatctatagtacatacatctgcgtcctctgtattggacctttgaagaacgggatgaacatgaaccgaggacggacatattgtaaggtgcatccttgaaacccctgcttgttctttgcttgtg

SEQ ID NO: 45245 - DNA, 1899 bp, Zea Mays
gttagcgggagcgggtgccgttggaggaggtctgatctcgtctgcggcgggggcgagagagcaaggccacggcgtcgcggcaatgagcagcaccaccgccgacacatccccggagagcgtcggctcctgccgccctcccactcctcctacttcccttccccctcattcagcgccggcggcggccctccgcggcgctccagtgaggcggcaactggacttcgcggacgcggacgccgactcctgtgccggcgccggtggcgacctggacgactacgacgacttccttatccgcgccgtggatgacattgagcggggctataacgaggccaagcgacgcgctccgccgtgcgtctgcgggcgcggctattgcgcggtgcaacgggacgaccagagcggcgggtggatgtacgtctgctcatcgcagccgaagtgtaaacatgttgccatgtgtaaggaagttgatcagaatccacaatcaccgcctgttgttagaagtgatcctaaaacaagcaatcgttgtgcattcaacgttccaaggactcctgtaaatgatgctagaacacaaattaataatgttactctcgaaggtgctggtgctacaactccaattaatgtcagtccccaggctgctgttgctgcaactccatttagttacacttcgaaaggtgttggcgctatgactccagttcatgttagtccccaaggtgctggtgctacaactccaattaatgtcagtccccaggctgctgttgctgcaactccatttagttacactttgaaaggtgttggcgctatgactccagttcatgttagtccccaaggtgttggcgctaggactccagttcatgttagtccacaaggtgcacacgctacagcagcagttaaagttagtccccaatggaatagatctaatgatggacgatggaatagatctaatgatggacggccaatttgccagtgtactgcagggaagtgtaaaatattgagagtgggcaatgaagactggtatgtttgccctatacccaagggacaaggtgcatgcagttacaaggtgccagtaacagatgctgttggagctggagacaacgacgacgcaaatggatcagccaatcccgcccaacctaatgacgacgagtggccattcgacgtcatcaacgatgaaatcgtgccgacgccgcgtgctgtagcccagcagaagtcaccgagcacaccgcaccaccagcggagtggcacggcgagaacacctgcgccatcgcccgtgacgccgttcggtagccgcggcgctatgaccgggcgcccaaacgacacctgcttcgggtgcggcgagaaggggcactggatcagcgcctgccctaaaccgtctccgcgaagtaggtgtttccgttgcggcgtggtcggtcacaggccggccaattgtccccagccgagagggtcttagaatagaaggttgtgggtgaactggtggtctgatgctgcttttgggctgtgcctcgtaggcaatcagggctcaggagcagtgctaatgtttctgcttaggaatcttaagagcttgttcgatttgaggtggatcagaggggaatccacctcaaacccaacaagtcttaatcgggtttggcattgtagctacgagagagagagagagagaataatgtgtttgttgagaggtagggtggacaacggtgtaaaggtccgcaattgggccccattgtctgcctagtttagttaatttagttaataactaaattaatgtagttaattcagttaatgtagttcggtacatctatagtacatacatctgcgtcctctgtattggacctttgaagaacgggatgaacatgaaccgaggacggacatattgtaaggtgcatccttgaaacccctgcttgttctttgcttgtg

SEQ ID NO: 45246 - DNA, 1886 bp, Zea Mays
gttagcgggagcgggtgccgttggaggaggtctgatctcgtctgcggcgggggcgagagagcaaggccacggcgtcgcggcaatgagcagcaccaccgccgacacatccccggagagcgtcggctcctgccgccctcccactcctcctacttcccttccccctcattcagcgccggcggcggccctccgcggcgctccagtgaggcggcaactggacttcgcggacgcggacgccgactcctgtgccggcgccggtggcgacctggacgactacgacgacttccttatccgcgccgtggatgacattgagcggggctataacgaggccaagcgacgcgctccgccgtgcgtctgcgggcgcggctattgcgcggtgcaacgggacgaccagagcggcgggtggatgtacgtctgctcatcgcagccgaagtgtaaacatgttgccatgtgtaaggaagttgatcagaatccacaatcaccgcctgttgttagaagtgatcctaaaacaagcaatcgttgtgcattcaacgttccaaggactcctgtaaatgatgctagaacacaaattaataatgttactctcgaaggtgctggtgctacaactccaattaatgtcagtccccaggctgctgttgctgcaactccatttagttacacttcgaaaggtgttggcgctatgactccagttcatgttagtccccaaggtgctggtgctacaactccaattaatgtcagtccccaggctgctgttgctgcaactccatttagttacactttgaaaggtgttggcgctatgactccagttcatgttagtccccaaggactccagttcatgttagtccacaaggtgcacacgctacagcagcagttaaagttagtccccaatggaatagatctaatgatggacgatggaatagatctaatgatggacggccaatttgccagtgtactgcagggaagtgtaaaatattgagagtgggcaatgaagactggtatgtttgccctatacccaagggacaaggtgcatgcagttacaaggtgccagtaacagatgctgttggagctggagacaacgacgacgcaaatggatcagccaatcccgcccaacctaatgacgacgagtggccattcgacgtcatcaacgatgaaatcgtgccgacgccgcgtgctgtagcccagcagaagtcaccgagcacaccgcaccaccagcggagtggcacggcgagaacacctgcgccatcgcccgtgacgccgttcggtagccgcggcgctatgaccgggcgcccaaacgacacctgcttcgggtgcggcgagaaggggcactggatcagcgcctgccctaaaccgtctccgcgaagtaggtgtttccgttgcggcgtggtcggtcacaggccggccaattgtccccagccgagagggtcttagaatagaaggttgtgggtgaactggtggtctgatgctgcttttgggctgtgcctcgtaggcaatcagggctcaggagcagtgctaatgtttctgcttaggaatcttaagagcttgttcgatttgaggtggatcagaggggaatccacctcaaacccaacaagtcttaatcgggtttggcattgtagctacgagagagagagagagagaataatgtgtttgttgagaggtagggtggacaacggtgtaaaggtccgcaattgggccccattgtctgcctagtttagttaatttagttaataactaaattaatgtagttaattcagttaatgtagttcggtacatctatagtacatacatctgcgtcctctgtattggacctttgaagaacgggatgaacatgaaccgaggacggacatattgtaaggtgcatccttgaaacccctgcttgttctttgcttgtg

SEQ ID NO: 45247 - DNA, 959 bp, Zea Mays
tgaattcagggcctgcttggatgccttgcctggcaaggcaatgccagaggaggtgagccgaacggcatcttgctcttagcttccttgctgggaaaacccagatttgtggaaatggttgactagccaggagcagccaccagaggatctgaattctaatccggtgtttgctgccatcaaatcaaaggtcacagataacctgaccaagcatgcttctcctgagacccgatctacaccaggtcaaccatgggttagaggatgggacgacataaagaaaggcaaagatggacccaagtatggaaatcagtgataagctgcttgaaatggggatgacggctttccatcctaaataatagctgtccgcccaccccaccccccaatatgcttgttttgtgattgtgtagaataaagtgaactgccaccggcatgtgtgaagtttgttaaattgtagaatcagcttgtaactatggatggtactcctgatgtttgcctggcaattccagccttccagggatcaatggccgattttcaaaagaatgattgagaaggttaaagatagctagttctaaatgtcaacggagttgttcgacacttagagattagtaatagaacctttattttcctttaagttgtattataaaggggaatgaaataggttgcttgacctaggtgagtttagttaggtttggtggtgcacacttttacaaactagtgctaggtaaacctaagattgtccacaaaaagtttgaaagaaagcccaattctaaaagtgagtgaaatgagtgagctggtgactttacagtagcatcagacttgtttgatgcttcactgctatgacactagataagagtgtgtcctatatttttaagagttccatcgatgtgttcggcgtacaccgaatatggtgcaccaggcatggtatctagaaagcttgtagaagtggtctaaagagacatgtactc

SEQ ID NO: 45248 - DNA, 1331 bp, Zea Mays
gaaggcctgcgctccacggaccacggcaacggggatgtggaggcaccccgacggtgaattccccattcacatctgtagccgcgcctctccgtatcactccgcgcctctctcccgccaggccgccgcccaagcaaccatggtggccgcgctgctccgccgcgcgctccacctccgccgtgtgctcccctcgcccgccgtcaccgccgccgcctcccagcgcctcatccccgccttctcgaccacccccacgccgaccccgaccacctcccagcagaacgccgccaccactacgatcgacctctcctccgacgagagccgccgccgcctcctcaataggttggtgtaccggagcaagcagcgaggttttctggaactggacctggtgctggggacctgggtcgagcagcacgtgcacgccatggacgaggccaacatccgcgccctcctgcaagtgctcgacctcgaaaacccagatttgtggaaatggttgactagccaggagcagccaccagaggatctgaattctaatccggtgtttgctgccatcaaatcaaaggtcacagataacctgaccaagcatgcttctcctgagacccgatctacaccaggtcaaccatgggttagaggatgggacgacataaagaaaggcaaagatggacccaagtatggaaatcagtgataagctgcttgaaatggggatgacggctttccatcctaaataatagctgtccgcccaccccaccccccaatatgcttgttttgtgattgtgtagaataaagtgaactgccaccggcatgtgtgaagtttgttaaattgtagaatcagcttgtaactatggatggtactcctgatgtttgcctggcaattccagccttccagggatcaatggccgattttcaaaagaatgattgagaaggttaaagatagctagttctaaatgtcaacggagttgttcgacacttagagattagtaatagaacctttattttcctttaagttgtattataaaggggaatgaaataggttgcttgacctaggtgagtttagttaggtttggtggtgcacacttttacaaactagtgctaggtaaacctaagattgtccacaaaaagtttgaaagaaagcccaattctaaaagtgagtgaaatgagtgagctggtgactttacagtagcatcagacttgtttgatgcttcactgctatgacactagataagagtgtgtcctatatttttaagagttccatcgatgtgttcggcgtacaccgaatatggtgcaccaggcatggtatctagaaagcttgtagaagtggtctaaagagacatgtactc

SEQ ID NO: 45249 - DNA, 703 bp, Zea Mays
ctaatcatcccagctacttgtatcagtgttattatttacccagacagcattcccagattacttatagtttaccaggaaaacccagatttgtggaaatggttgactagccaggagcagccaccagaggatctgaattctaatccggtgtttgctgccatcaaatcaaaggtcacagataacctgaccaagcatgcttctcctgagacccgatctacaccaggtcaaccatgggttagaggatgggacgacataaagaaaggcaaagatggacccaagtatggaaatcagtgataagctgcttgaaatggggatgacggctttccatcctaaataatagctgtccgcccaccccaccccccaatatgcttgttttgtgattgtgtagaataaagtgaactgccaccggcatgtgtgaagtttgttaaattgtagaatcagcttgtaactatggatggtactcctgatgtttgcctggcaattccagccttccaggtatcgtctactacttggaaatatgttatattatgcattgcagtctgttagtgatggcaatcgttgaagcatttggactgagacttaaacattgaaaatgtggacaacaaacgcagtcagtgtagttttctactgtgatagtccaggatatatggtagaaaataaagaaaccatttcccatatcataaggagaaagctttcttttgttttc

SEQ ID NO: 45250 - DNA, 674 bp, Zea Mays
catcaattggttaattgattgtgctggttagttgctgagtaatctggaaaacccagatttgtggaaatggttgactagccaggagcagccaccagaggatctgaattctaatccggtgtttgctgccatcaaatcaaaggtcacagataacctgaccaagcatgcttctcctgagacccgatctacaccaggtcaaccatgggttagaggatgggacgacataaagaaaggcaaagatggacccaagtatggaaatcagtgataagctgcttgaaatggggatgacggctttccatcctaaataatagctgtccgcccaccccaccccccaatatgcttgttttgtgattgtgtagaataaagtgaactgccaccggcatgtgtgaagtttgttaaattgtagaatcagcttgtaactatggatggtactcctgatgtttgcctggcaattccagccttccaggtatcgtctactacttggaaatatgttatattatgcattgcagtctgttagtgatggcaatcgttgaagcatttggactgagacttaaacattgaaaatgtggacaacaaacgcagtcagtgtagttttctactgtgatagtccaggatatatggtagaaaataaagaaaccatttcccatatcataaggagaaagctttcttttgttttc

SEQ ID NO: 45251 - DNA, 2029 bp, Zea Mays
atgaaagcctcacaaaggtagcttttctgcttaaaagctttgctcgagagttacgccctatcaacagggctaagaatcaactacgcaaaatcctgtttagttcctatcaacactgacagtaaaaaaactgaacttcttgctggtccctttggttgcaagattgaatctcttccctttacatatttggggctaccgatggggacaacaaagccaagggttgaacactatggacccattatgagcaagattgaaaggaggttgacctccatctcttctatgttgtcacatgcggggagacttcaacttgtcaactctgtcctctcgtctctgccaacatacgccatgtgcaccttacaagttccagctgcggtcttggagtacattgacacagccagacgccactgtttgtggcgtaattctgatagcaatgcaaaatctaagcctctggtggcttggaataaatgcacacgaccgaagaaaaaaggtggtctgggggtcatcaacctaagaagccagaactcgtatctctgaatgaaatttcttgacaagctctacaacaagaaacaaatcccttgggttaacctggtttggaatacctactactctgacggcaagacccctcatgcatccaagttcatgggctcgttttggtggagagacgtccttaaactttgtgatctcttcagaggaatctccaactgtaaggttggagatggtaaaactgttctattttggcatgatttatggaatgacaacatccgcagaaacaagtttccaaggcttttcaccttcgcaaaaaatcaaagcatttcggttgcttcctttttgactcaggagaacttgacagacaatttccacttaccccttactgagcaagcaaacaccgagctgcaacagctcctggatgaagtgcagcaaattcaagaatcagtgattgaaccagaagagaaagactcttggagttatatttgggggaatagcacctactcgtcaactaaactttaccactacactttcaaaaatgtgaatcctccaaaaccatttgtctggatctgggagtccagatgttcaaacaagcttaaagtcttcacctggctgctgttgatggacaggctgaacaccagaaacatcctaaagagaaagaactttaaggttcaaggcgacaactacagttgtgctctttgtcaacttcaaagagaagaaactgccttccatttgttcttcaattgccctttcagccaagactgttggagacatctgaatattcagtggaaccaccagattgacttctttgcaacctttcaacaagccagagacttgcacggttcaccattctttatggatagggatggcaatttaatccgtggatttggatatccgtcggatatccgacccgacggataaggatatggatatgttttttgacccgcgaattagacccgtatccgatccgggataaagtggtggcatggatttggatattaaatctcacccgcgggtaatccgttggatatccgaaattaaccattagtccattattgccaggatgaacatgattctactatcattgactaaaaaattcaaacacagctactatagcgctagctcaagtgctcaacactacactcggatcggatcaatattgattgtcatgtatttgttttcatgttgagacatgtagacatgtatttttgtcatgttgagaatgttgcttgttgaaggacatgtatatttgttaaaaaatttattaaattttaagttgtgtatgatgttgaattgggaagaaatttgattaattatgttattcaattgctgaaaatggttctttaccatatccgatggatatccaatggatatccgaaacccgatgggcatggatatggatatgaatttctacccgtggatatagtcacgtgcggatattatctatgaccgtggatatgtctgcgggcggatatttccaatatccgatccgaatccgacccgttgccatccctatttatggaggtctttatcatagcagcttggc

SEQ ID NO: 45252 - DNA, 1907 bp, Zea Mays
ataaatttattggccagaatttttgattttttagcagcgcatgtaatatgtacttctattaagaaggcatgtgaaacagacaaacagtagtgataagcaaggcagctacacgtgccttagggtcatgctggtttgtatgtatcatccaccaagtccaaaagaacacaagcgggcggcatgattgaattggcggatagccagtcagcaacaaacccgctagattaatagcagcaagttgtggcctttgtgtctttcttcaacttgccctcctataagcctatacacagtatatggaaaatacttggacaaagcttgcaaactccttttctaactagtagtgtttctcaactacagtttgccaaaggaagacatttatgctttcaagaaaggggctgcaacagtcgtataatgcatgccaattgtcaagaaccaatctagcactcaagaagtaaagcatattgcatgttcacaatgcttggccccgggccatctggtcagcgactgtagaaaccagttactttgctggttctgtgctagatatggtcacaagaggagatcttgcttacaatggaagtgtggtcgccacattaaatgggctgagaaagctgccatgcctagtatggagccgcgcgcccgacagtctgatgggatggaagccgaaccggcattatcacctagtatttgtcatgcgcctgcagctcaacacgctggcaacaacaatagcacttcaggcgcctcctcaatcatctcggaagctagcagtaatgcagaagagcgttacagtcctgccaatggactagatatgcaggtaaacctcccgggcttgaacacaatcacagcacagatgccagctcaacccactcgagagatgcagcccaactctgttgcagagcaagctcagttagtcaaccaaggtacccaagaggtgcagctcaatcaacaccaccgagaaaacaccgtgctgactcccatcacaagctttcataatagcaacattgtcccaaacgttgaggttacctggctgagtgcggccattcctgaactgcatagtagtttacagtgccttatgaatgagtttaagttcaaaatcaattatctgaacacaggcccggatcaagctcccaagctcactatcgatattctcccccgtgtcgagacaacttatgaaatgcctaccttgtttggaaatgatcacctcctcacttttcagaaccatgctactgatccgagttcggcagctgaaacgatgataaccatgcacaatcggatagtcaccaagttctataccagaaggccaattcacttgaggaaaaggaatgttcactcccctcaaccccccatcttcagtgccccccagacgactgaagttagtaacacaggtaaaagagttacctcggatgtctctgacaataagcttcgtcgtagcaccaggatcaaactcgctaatgacggctgcaagacccagactggaacccccaggtgtagttgttgcaaggaggccccccatcacaagggtaaagctcgaacaaagagagggcagtcaagtttcaatattccccttccaaacttgatttctgatgtcaccttttcgtctcttgacgagatcgacaaatccacaaacttcccccctctaccagtgctggaactgcagagagtagcaacaaagatgtgcggccttgctcctgcggaggtggccacagagctcctgctgtctgaagaggagcccgctgatgctcagaataaggaagtgatcaatggatagcaccagccatagatcctggaatgtcctcaattggaacattagaggactaaacgccgatgacaagcaaacagcaatccgaaacaaaattgaggaaagtgattgctctatattctgtattcaagaaactaaaatgagcaacattgat

SEQ ID NO: 45253 - DNA, 2285 bp, Zea Mays
cacccttattagtaacttctgcttcaagtgtcacctgatcagaagatacaagctgcatgtaaaatacttgagttcatatgcaaattgcatgtcatggggcagcagcccaaagcatggaagctataggaagattagattagataagattgagttagttacttgggattagattagataaaattgagctagtttcttggggggcaagtcttcctatctatataagcatgggatgaacctccttaagggaaaatcaatcaatgaagaagaattggtctcatatcactctaatagtctagtcaaccctcccaaaccaactccgcccgactatcttcccggcgacgtttattcccctatgaactaggaatcataacatccggtgtcatgtgtctgggatcttttcccatgacttctgttgcggacgatttccacaacttgcgtgaggggctcgctcaggcccgatctgctatcatccagctccgtgatctactcgcgacaaaggtggagtctgatcgccgattagcgacggcaacgcgactgcaggcgactgcacgtggcttcctggcactggcatgacgtccaatgtggcaagttgcggcaacggcacggctgtaggcaacggcttctgcagcacgcggcttcctggcacggcgtcaagcacagcaagtggcaacggcggcgcggctgcaggctgcggtccgctgttccctggcacagcgacttgcatcgctattgcgcgttgaacaccatgtggcggcaaggccttcggcatggttggtcgatcctccactccagttcaccgtcctgatccatagccttcaggacagcaagaacacgtccggttgggtggcgccgtctccaatggaactcgtggcagctcaggccgtaggactggtgagctaccacgtcttggcctttgcaacctggacaaggttgttcacatgggatctatggggcaaccttggcatgataggttctttattttatttgcaaataaactaaagtcgagatgtaaaaggcttctagtagggttgcactttcacatgcagatcaagttagatagcaagggtgttgccatgcactatattacagctcaaggacgagctgtcttcgcagggtggaggatgtcatagggcggcagcccaaagcatgaaggccacaaggataagctcagggttaggattagtggataaagattagataagattgagttagttgggattagattagataagattgagttagttacttggaattagattagataagattgagttagttacttggattagattagataagattgagttagttacttggtggccaagtctttctatctatataaggatgggttgtacctccttaagggggaatcaatcaacgaagaagaattagtctcatatctctctaatagtctagtcccttccaaaccgactccgcccggctatcttcccgacgttgtttatccccctatgaactagggtctacaacattgcatgtcaatctagtatctaagctcaaacttatttccatctttctagcttaagatactataaaccctttctacacaaatcaatataaatggtaaattccaacataagataggtgacaagctttcacttctagaagtttccaagtcaattggaatgttggggatcaaaagaggatgtgaaatggcagcagtaattacctcctcacagccagattccatcattgcccgaattgatctagtaactagctcagttgctgtatcaagacaatagacagtttgtttgctaagatcagccaattgaagaagtggaaaaaaaactagagacatggtatcaatttacacacgaaaattaggatagccataatgatgcaattatcgttccctttattagaaaactaacttgtgctaaacatactacataaccaaagcaacaacctccaatggattgtttttcaaccaataagtgctgaaaggatttcatcatcaatgtatgctacaagaaagattctcaaaagaaagatctgacaaaagattagtcctatatgaaagaaattatcaaacaaaaagatgttaacgttcctcaccatattcactaaccattttctgtattattttgccagaatcaatgatgccttgagacttcccacactgaagcatagtcacaagaaacaggtacagtggtagcgaccctagacccggaaaaatcgtccccgacctcctcgacctggatacgcagggtcattttcgttcccaccatgtaaaagcctctcgcaagtagcataccacgttcctcgac

SEQ ID NO: 45254 - DNA, 346 bp, Zea Mays
cttgtgaccacctcagcagctacggccgcgtgacccgcctgcccatataattgacccgtcctcgccgctcatgcctcgaaccctaccgtgaaacgattctagaaaagatagggggaggagagagatccgccaccgccatagttcatcgcgcgtcgacagagcacgaccacgcgatagccgagggtgtaaaccaaggcctgcgggacctattggcggggtttcggggcacagtgatcgaccaagacctgtcgaatagctcgccggtgatggaaggccgccgtggttccgtcttggccgtggattgctgtgctcaccgcgcctaactccgaagaacctgtgactgtgg

SEQ ID NO: 45255 - DNA, 743 bp, Zea Mays
gaactttgtaaaggcctcgtagtgttaccttgcctcgcttccttggtagaggtgtatggggcccgtacaaccccgtggcagatgggtaacatgacttgtgggtatagggtacaacctctgcagagtgtaaaactggtatactagccgagctcatggtcatgagcagctcaggactctcacatgattaatttatggaacttaaactcaatttgtcatttgcatatgcatgggattatttattaattttgttctattacttttattgagttttggtatttacttacatctagtaattgctaataaaattttgaccaactaattaaaagcaatgctcagctttaacctctgttgttgattagccttacacatcacatgaactcccacctttggtgagttcatgtcactcttttccccacaacttgttgagctatgatcatgtgtgagctcacccttgctgtctcacacccccacaggagaagaacatgtggttcaggaggagccacaaagcgaggagtttgatctgatctaggtggcgtttcccagttgacttgcgccaaggatgatccttagttcgttttatatttatcttttattttgtaataagacttccgctatgtaataaatactctaatattattgtgacatttatctctatacactcttttattgtatatgttgtcttcttggcgcatgtatgagatgcacccgactttgttccttaaagcctgagtgttacaaaagtg

SEQ ID NO: 45256 - DNA, 463 bp, Zea Mays
tgcccatataattgacccgtcctcgccgctcatgcctcgaaccctaccgtgaaacgattctagaaaagatagggggaggagagagatccgccaccgccatagttcatcgcgcgtcgacagagcacgaccacgcgatagccgagggtgtaaaccaaggcctgcgggacctattggcggggtttcggggcacagtgatcgaccaagacctgtcgaatagctcgccggtgatggaaggccgccgtggttccgtcttggccgtggattgctgtgctcaccgcgcctaactccgaagaacatgtggttcaggaggagccacaaagcgaggagtttgatctgatctaggtggcgtttcccagttgacttgcgccaaggatgatccttagttcgttttatatttatcttttattttgtaataagacttccgctatgtaataaatactctaatattattgtgacatttatc

SEQ ID NO: 45257 - DNA, 674 bp, Zea Mays
cttgtgaccacctcagcagctacggccgcgtgacccgcctgcccatataattgacccgtcctcgccgctcatgcctcgaaccctaccgtgaaacgattctagaaaagatagggggaggagagagatccgccaccgccatagttcatcgcgcgtcgacagagcacgaccacgcgatagccgagggtgtaaaccaaggcctgcgggacctattggcggggtttcggggcacagtgatcgaccaagacctgtcgaatagctcgccggtgatggaaggccgccgtggttccgtcttggccgtggattgctgtgctcaccgcgcctaactccgaagaacctgtgactgtggatactggtgaccagcagatagaagtagctgagcaggagctcattgaaggcaagttgtgcccttgtccacttttatacccaataatgttctttaagatcattatttatgcataggtttaattttgatgggacccaataggtcaccgtagtttgtttatccatattaccttgttatccctgaatcacttgggtagttttgctattgctttacatggttttgggataatctttcattatatccatgttctagttattttgttattctatttatgttcatgtcaagatcattaatgttaattgaaacatggagcttaacttgagaaacatgt

SEQ ID NO: 45258 - DNA, 321 bp, Zea Mays
ctctcgtcggccgcagcaccgccgtgttctcccggcgtggcggcgacaaccggtccgggactgtggttgttggaggagagtccatgagtgacacaagaacaagatgaccgtcacatgagacgggacaggttagaaatgctagacgacattttatatctgggtcctttgtacaggggctctcatttttgtactattgtctagtcaacatgagatgttgtcattgtttgactataggatatttatggtgcctgatttttttattattattcaatcaaaaagcaatgctgtcatcgtcgtttgactgtaacatttatggtgttt

SEQ ID NO: 45259 - DNA, 3209 bp, Zea Mays
aatcacttctcacttgggttaatctagagatggcaattgcattgtggattttttcaaggagatgccgcaattctgcataaaggttgcacacattttgactggcctatatggttcagattgggaaaagaggcttgagttgaaggaactgcaagcgaatgttgtccatttaagcttgctaagcaggcactacaagcgtgcatatcaggagctattcttgccaaatgatggaaagtgttcagacagctcttcagaatcaaacaaccaagaggtttctgattattatcgctttggatggttgctctttttagtcctaagaatccaaacattcagcagattcaaggatcttgtgacatctacgaatgaactagtttctgtgttggctgtacttatcattcatattcctgtgcggctaaggaatttcgatataaaggattcatcctactttggtaagaaatcagataggggagtcagtcttattgcttctctgtgtgaaaaatatcatacctcagaagatgagttgagcaaagcactggagaagacaaatactctcatactggatattttgaaaaagaagccatggacagctacttcagcatgccaacaggataatttgactttcattgatccagaagggttgacagtttttaaggatttgcttcagggaggctcattgaaatcaagtcttctaatcctggaaaaagaatatgaaaatgcaattaacacaagaggcgagctagatgagcgcatgtttgctaatgatgaggacagtttacttggcagtggaagcctttcaggtggagccattaatttaccaggcacaaagagaaagtatgatgttatggcctcacctgcaaaatcaatatcaagcccaaatccaatgtctcctccacgtttttgtctatctcctaaaggaaacagcttttgcaactcaaagatggctcctatcactccagtgagcacagccatgacaactgccaagtggcttcggagtacagtatctccgcttccatcaaaaccttctggggaactattgcgcttcttctcagcatgtgataaggatgtaacagatgacattgtacacagagctgggattatacttggagccatattcacgagcagttcttttggtgaacagatctgtactaatatgcgaagcgctaataggatggatgctatttggacagagcaaagaaaaatggaagcccttaagctatattatagggttctggaatctatgtgtagggcagagtcacagatcttgagtgggaacaatcttacattacttttgtctaatgaacgtttccatcggtgtatgattgcatgttctgcggagttagttcttgcaactcacaagactgtcactttgatgttcccagctgtgttggagaagactggcattacagcctttgacttgagtaaagtcatagagggttttgttcggcatgaagatacactccccagagagttaaagcgtcatctgaattctcttgaggaacggcttctggaaagcatgtcatgggagaaagggtcatcaatgtacaattctttgattgttgctaggccagtactatctatcgaaataaatcggttaggtttactggctgaaccgatgccatcacttgatgcaattgcagcacatcataatatctcaatgggtggcctgccgcctcttcccttccagaaacaggagcgtttgcaagataaagatgaaatcaggtctcccaaaagggcgtgcactgagaggagacatgtgccggtggacagcaattcatttcgatcacaagtgaaggacagtattaaattgaagctaccacctcctcttcaatcagcttttgcaagtccaacaagaccgaatcctgcagcaggaggtgaaacatgcgcagagacaggaatagctgtgttctttagcaagatatcaaaacttgcagccattagaatcagaagtctctgtgaaagactgcaactttctcagcaagttctggagcgagtatattcccttgtccagcaaatccttagccaacagactggtctcttcttcaacaggcacattgatcagatcatactatgcagcatatatggagttgccaagatctctcaactgcaactttcattcaaggagattgtttttgggtataggaaacaacctcaatgcaagccacaagtttttcgaagtgtttatgttcattggcccccaacaagccataatgggaaaacaggagaagatcatgttgatattatcactttctacaatgaagtatttattcctgctgtcaagcctttgttagtggaggttggacctggtgctagtccaaagaggaaagaagagggaaaaggtccatacccagaatcccctcggctagctcggtttccgaaccttcctgacatgtctccaaagaaggtttctgctactcataatgtatatgtctcgccactacgatcatcaaagatggatactttactctcaccaagcccaaagagctattatgcatgtgtcggcgagagtacctatgcgttccaaagcccctccaaggacctgaaggctatcaacaaccgcctaaatagttggaagaaagttagcggacgattgaacttcgacattgtcagcgatctggtcgttgccagtagcctcaacggcgttcaaaatgccaagcccgcagccacggaagtggttcccaccaagacaccggtgaagtgcgagccatctgaatcgtgatctactctgatgctgcatcaccaatccagtgtaacatattataaatggttaggtgtcagatgttctgatttaggagtgtttgaatgcactagagataatagttagttagctaaaaattgttagtggaattagctagctaactattacctaatttgctaaaagtagttgatagctaaaatattagctagactgtttagatgtctcaattttagcagctaactattagttctagtgcattcaaacattcccttagatattaggtggccttatttctgtttgtatttttgacatgtaaacatctttgtgagcagctctaccatctgtaaaatataagaaagctgctctaagagctcccataacccaactctctttgtaagagatagataagtacgatagtcatgtaactttataagttttgaaaaggtctgtaaatacaaatgatcattgtcaattccgtacagttgtgaattgcttgttcatggctgtttactatcag

SEQ ID NO: 45260 - DNA, 3678 bp, Zea Mays
taaaagtccgtgcgagccgctgggatccgaaaatattttttggcgcgcatcccaacagccgccgccgcttcccgtccaccggcaccgccgccgcaaccctgttagagcttcccttccggtcgctggagtgcctggttccggccccagcagcggtttcgggcactgggttgggagtgcttggaaggggagaaacatggacggagtcgccaagccgtccacgagctcggggtcgggggtcacggatagtgcctccgccgccgcggcctccatagatgagaggttcgccgatctgtgcgagagcaagctgggactagacgacagcatgacgaggcaggcaatgcagcttttcaatgagaccaagaacatcaagtccagcatgtcttccttgggcggtggatcgcccgaggaggtcgagaggttctggtctgcctgtgttatgtactgtgtgtcaaggctcagcaaagcgcggaggtcgaaggaaagtggcagtgtctcactttgccagattttgagggcatctaagctgaacattgtggattttttcaaggagatgccgcaattctgcataaaggttgcacacattttgactggcctatatggttcagattgggaaaagaggcttgagttgaaggaactgcaagcgaatgttgtccatttaagcttgctaagcaggcactacaagcgtgcatatcaggagctattcttgccaaatgatggaaagtgttcagacagctcttcagaatcaaacaaccaagaggtttctgattattatcgctttggatggttgctctttttagtcctaagaatccaaacattcagcagattcaaggatcttgtgacatctacgaatgaactagtttctgtgttggctgtacttatcattcatattcctgtgcggctaaggaatttcgatataaaggattcatcctactttggtaagaaatcagataggggagtcagtcttattgcttctctgtgtgaaaaatatcatacctcagaagatgagttgagcaaagcactggagaagacaaatactctcatactggatattttgaaaaagaagccatggacagctacttcagcatgccaacaggataatttgactttcattgatccagaagggttgacagtttttaaggatttgcttcagggaggctcattgaaatcaagtcttctaatcctggaaaaagaatatgaaaatgcaattaacacaagaggcgagctagatgagcgcatgtttgctaatgatgaggacagtttacttggcagtggaagcctttcaggtggagccattaatttaccaggcacaaagagaaagtatgatgttatggcctcacctgcaaaatcaatatcaagcccaaatccaatgtctcctccacgtttttgtctatctcctaaaggaaacagcttttgcaactcaaagatggctcctatcactccagtgagcacagccatgacaactgccaagtggcttcggagtacagtatctccgcttccatcaaaaccttctggggaactattgcgcttcttctcagcatgtgataaggatgtaacagatgacattgtacacagagctgggattatacttggagccatattcacgagcagttcttttggtgaacagatctgtactaatatgcgaagcgctaataggatggatgctatttggacagagcaaagaaaaatggaagcccttaagctatattatagggttctggaatctatgtgtagggcagagtcacagatcttgagtgggaacaatcttacattacttttgtctaatgaacgtttccatcggtgtatgattgcatgttctgcggagttagttcttgcaactcacaagactgtcactttgatgttcccagctgtgttggagaagactggcattacagcctttgacttgagtaaagtcatagagggttttgttcggcatgaagatacactccccagagagttaaagcgtcatctgaattctcttgaggaacggcttctggaaagcatgtcatgggagaaagggtcatcaatgtacaattctttgattgttgctaggccagtactatctatcgaaataaatcggttaggtttactggctgaaccgatgccatcacttgatgcaattgcagcacatcataatatctcaatgggtggcctgccgcctcttcccttccagaaacaggagcgtttgcaagataaagatgaaatcaggtctcccaaaagggcgtgcactgagaggagacatgtgccggtggacagcaattcatttcgatcacaagtgaaggacagtattaaattgaagctaccacctcctcttcaatcagcttttgcaagtccaacaagaccgaatcctgcagcaggaggtgaaacatgcgcagagacaggaatagctgtgttctttagcaagatatcaaaacttgcagccattagaatcagaagtctctgtgaaagactgcaactttctcagcaagttctggagcgagtatattcccttgtccagcaaatccttagccaacagactggtctcttcttcaacaggcacattgatcagatcatactatgcagcatatatggagttgccaagatctctcaactgcaactttcattcaaggagattgtttttgggtataggaaacaacctcaatgcaagccacaagtttttcgaagtgtttatgttcattggcccccaacaagccataatgggaaaacaggagaagatcatgttgatattatcactttctacaatgaagtatttattcctgctgtcaagcctttgttagtggaggttggacctggtgctagtccaaagaggaaagaagagggaaaagtaggtccatacccagaatcccctcggctagctcggtttccgaaccttcctgacatgtctccaaagaaggtttctgctactcataatgtatatgtctcgccactacgatcatcaaagcccaaagagctattatgcatgtgtcggcgagagtacctatgcgttccaaagcccctccaaggacctgaaggctatcaacaaccgcctaaatagttggaagaaagttagcggacgattgaacttcgacattgtcagcgatctggtcgttgccagtagcctcaacggcgttcaaaatgccaagcccgcagccacggaagtggttcccaccaagacaccggtgaagtgcgagccatctgaatcgtgatctactctgatgctgcatcaccaatccagtgtaacatattataaatggttaggtgtcagatgttctgatttaggagtgtttgaatgcactagagataatagttagttagctaaaaattgttagtggaattagctagctaactattacctaatttgctaaaagtagttgatagctaaaatattagctagactgtttagatgtctcaattttagcagctaactattagttctagtgcattcaaacattcccttagatattaggtggccttatttctgtttgtatttttgacatgtaaacatctttgtgagcagctctaccatctgtaaaatataagaaagctgctctaagagctcccataacccaactctctttgtaagagatagataagtacgatagtcatgtaactttataagttttgaaaaggtctgtaaatacaaatgatcattgtcaattccgtacagttgtgaattgcttgttcatggctgtttactatcag

SEQ ID NO: 45261 - DNA, 3647 bp, Zea Mays
taaaagtccgtgcgagccgctgggatccgaaaatattttttggcgcgcatcccaacagccgccgccgcttcccgtccaccggcaccgccgccgcaaccctgttagagcttcccttccggtcgctggagtgcctggttccggccccagcagcggtttcgggcactgggttgggagtgcttggaaggggagaaacatggacggagtcgccaagccgtccacgagctcggggtcgggggtcacggatagtgcctccgccgccgcggcctccatagatgagaggttcgccgatctgtgcgagagcaagctgggactagacgacagcatgacgaggcaggcaatgcagcttttcaatgagaccaagaacatcaagtccagcatgtcttccttgggcggtggatcgcccgaggaggtcgagaggttctggtctgcctgtgttatgtactgtgtgtcaaggctcagcaaagcgcggaggtcgaaggaaagtggcagtgtctcactttgccagattttgagggcatctaagctgaagagatgccgcaattctgcataaaggttgcacacattttgactggcctatatggttcagattgggaaaagaggcttgagttgaaggaactgcaagcgaatgttgtccatttaagcttgctaagcaggcactacaagcgtgcatatcaggagctattcttgccaaatgatggaaagtgttcagacagctcttcagaatcaaacaaccaagaggtttctgattattatcgctttggatggttgctctttttagtcctaagaatccaaacattcagcagattcaaggatcttgtgacatctacgaatgaactagtttctgtgttggctgtacttatcattcatattcctgtgcggctaaggaatttcgatataaaggattcatcctactttggtaagaaatcagataggggagtcagtcttattgcttctctgtgtgaaaaatatcatacctcagaagatgagttgagcaaagcactggagaagacaaatactctcatactggatattttgaaaaagaagccatggacagctacttcagcatgccaacaggataatttgactttcattgatccagggaggctcattgaaatcaagtcttctaatcctggaaaaagaatatgaaaatgcaattaacacaagaggcgagctagatgagcgcatgtttgctaatgatgaggacagtttacttggcagtggaagcctttcaggtggagccattaatttaccaggcacaaagagaaagtatgatgttatggcctcacctgcaaaatcaatatcaagcccaaatccaatgtctcctccacgtttttgtctatctcctaaaggaaacagcttttgcaactcaaagatggctcctatcactccagtgagcacagccatgacaactgccaagtggcttcggagtacagtatctccgcttccatcaaaaccttctggggaactattgcgcttcttctcagcatgtgataaggatgtaacagatgacattgtacacagagctgggattatacttggagccatattcacgagcagttcttttggtgaacagatctgtactaatatgcgaagcgctaataggatggatgctatttggacagagcaaagaaaaatggaagcccttaagctatattatagggttctggaatctatgtgtagggcagagtcacagatcttgagtgggaacaatcttacattacttttgtctaatgaacgtttccatcggtgtatgattgcatgttctgcggagttagttcttgcaactcacaagactgtcactttgatgttcccagctgtgttggagaagactggcattacagcctttgacttgagtaaagtcatagagggttttgttcggcatgaagatacactccccagagagttaaagcgtcatctgaattctcttgaggaacggcttctggaaagcatgtcatgggagaaagggtcatcaatgtacaattctttgattgttgctaggccagtactatctatcgaaataaatcggttaggtttactggctgaaccgatgccatcacttgatgcaattgcagcacatcataatatctcaatgggtggcctgccgcctcttcccttccagaaacaggagcgtttgcaagataaagatgaaatcaggtctcccaaaagggcgtgcactgagaggagacatgtgccggtggacagcaattcatttcgatcacaagtgaaggacagtattaaattgaagctaccacctcctcttcaatcagcttttgcaagtccaacaagaccgaatcctgcagcaggaggtgaaacatgcgcagagacaggaatagctgtgttctttagcaagatatcaaaacttgcagccattagaatcagaagtctctgtgaaagactgcaactttctcagcaagttctggagcgagtatattcccttgtccagcaaatccttagccaacagactggtctcttcttcaacaggcacattgatcagatcatactatgcagcatatatggagttgccaagatctctcaactgcaactttcattcaaggagattgtttttgggtataggaaacaacctcaatgcaagccacaagtttttcgaagtgtttatgttcattggcccccaacaagccataatgggaaaacaggagaagatcatgttgatattatcactttctacaatgaagtatttattcctgctgtcaagcctttgttagtggaggttggacctggtgctagtccaaagaggaaagaagagggaaaaggtccatacccagaatcccctcggctagctcggtttccgaaccttcctgacatgtctccaaagaaggtttctgctactcataatgtatatgtctcgccactacgatcatcaaagatggatactttactctcaccaagcccaaagagctattatgcatgtgtcggcgagagtacctatgcgttccaaagcccctccaaggacctgaaggctatcaacaaccgcctaaatagttggaagaaagttagcggacgattgaacttcgacattgtcagcgatctggtcgttgccagtagcctcaacggcgttcaaaatgccaagcccgcagccacggaagtggttcccaccaagacaccggtgaagtgcgagccatctgaatcgtgatctactctgatgctgcatcaccaatccagtgtaacatattataaatggttaggtgtcagatgttctgatttaggagtgtttgaatgcactagagataatagttagttagctaaaaattgttagtggaattagctagctaactattacctaatttgctaaaagtagttgatagctaaaatattagctagactgtttagatgtctcaattttagcagctaactattagttctagtgcattcaaacattcccttagatattaggtggccttatttctgtttgtatttttgacatgtaaacatctttgtgagcagctctaccatctgtaaaatataagaaagctgctctaagagctcccataacccaactctctttgtaagagatagataagtacgatagtcatgtaactttataagttttgaaaaggtctgtaaatacaaatgatcattgtcaattccgtacagttgtgaattgcttgttcatggctgtttactatcag

SEQ ID NO: 45262 - DNA, 3639 bp, Zea Mays
taaaagtccgtgcgagccgctgggatccgaaaatattttttggcgcgcatcccaacagccgccgccgcttcccgtccaccggcaccgccgccgcaaccctgttagagcttcccttccggtcgctggagtgcctggttccggccccagcagcggtttcgggcactgggttgggagtgcttggaaggggagaaacatggacggagtcgccaagccgtccacgagctcggggtcgggggtcacggatagtgcctccgccgccgcggcctccatagatgagaggttcgccgatctgtgcgagagcaagctgggactagacgacagcatgacgaggcaggcaatgcagcttttcaatgagaccaagaacatcaagtccagcatgtcttccttgggcggtggatcgcattgtggattttttcaaggagatgccgcaattctgcataaaggttgcacacattttgactggcctatatggttcagattgggaaaagaggcttgagttgaaggaactgcaagcgaatgttgtccatttaagcttgctaagcaggcactacaagcgtgcatatcaggagctattcttgccaaatgatggaaagtgttcagacagctcttcagaatcaaacaaccaagaggtttctgattattatcgctttggatggttgctctttttagtcctaagaatccaaacattcagcagattcaaggatcttgtgacatctacgaatgaactagtttctgtgttggctgtacttatcattcatattcctgtgcggctaaggaatttcgatataaaggattcatcctactttggtaagaaatcagataggggagtcagtcttattgcttctctgtgtgaaaaatatcatacctcagaagatgagttgagcaaagcactggagaagacaaatactctcatactggatattttgaaaaagaagccatggacagctacttcagcatgccaacaggataatttgactttcattgatccagaagggttgacagtttttaaggatttgcttcagggaggctcattgaaatcaagtcttctaatcctggaaaaagaatatgaaaatgcaattaacacaagaggcgagctagatgagcgcatgtttgctaatgatgaggacagtttacttggcagtggaagcctttcaggtggagccattaatttaccaggcacaaagagaaagtatgatgttatggcctcacctgcaaaatcaatatcaagcccaaatccaatgtctcctccacgtttttgtctatctcctaaaggaaacagcttttgcaactcaaagatggctcctatcactccagtgagcacagccatgacaactgccaagtggcttcggagtacagtatctccgcttccatcaaaaccttctggggaactattgcgcttcttctcagcatgtgataaggatgtaacagatgacattgtacacagagctgggattatacttggagccatattcacgagcagttcttttggtgaacagatctgtactaatatgcgaagcgctaataggatggatgctatttggacagagcaaagaaaaatggaagcccttaagctatattatagggttctggaatctatgtgtagggcagagtcacagatcttgagtgggaacaatcttacattacttttgtctaatgaacgtttccatcggtgtatgattgcatgttctgcggagttagttcttgcaactcacaagactgtcactttgatgttcccagctgtgttggagaagactggcattacagcctttgacttgagtaaagtcatagagggttttgttcggcatgaagatacactccccagagagttaaagcgtcatctgaattctcttgaggaacggcttctggaaagcatgtcatgggagaaagggtcatcaatgtacaattctttgattgttgctaggccagtactatctatcgaaataaatcggttaggtttactggctgaaccgatgccatcacttgatgcaattgcagcacatcataatatctcaatgggtggcctgccgcctcttcccttccagaaacaggagcgtttgcaagataaagatgaaatcaggtctcccaaaagggcgtgcactgagaggagacatgtgccggtggacagcaattcatttcgatcacaagtgaaggacagtattaaattgaagctaccacctcctcttcaatcagcttttgcaagtccaacaagaccgaatcctgcagcaggaggtgaaacatgcgcagagacaggaatagctgtgttctttagcaagatatcaaaacttgcagccattagaatcagaagtctctgtgaaagactgcaactttctcagcaagttctggagcgagtatattcccttgtccagcaaatccttagccaacagactggtctcttcttcaacaggcacattgatcagatcatactatgcagcatatatggagttgccaagatctctcaactgcaactttcattcaaggagattgtttttgggtataggaaacaacctcaatgcaagccacaagtttttcgaagtgtttatgttcattggcccccaacaagccataatgggaaaacaggagaagatcatgttgatattatcactttctacaatgaagtatttattcctgctgtcaagcctttgttagtggaggttggacctggtgctagtccaaagaggaaagaagagggaaaaggtccatacccagaatcccctcggctagctcggtttccgaaccttcctgacatgtctccaaagaaggtttctgctactcataatgtatatgtctcgccactacgatcatcaaaggtaagatacctgactgaaatattttcataattctccatcaatgctgtgacaattttgtaactactccagatggatactttactctcaccaagcccaaagagctattatgcatgtgtcggcgagagtacctatgcgttccaaagcccctccaaggacctgaaggctatcaacaaccgcctaaatagttggaagaaagttagcggacgattgaacttcgacattgtcagcgatctggtcgttgccagtagcctcaacggcgttcaaaatgccaagcccgcagccacggaagtggttcccaccaagacaccggtgaagtgcgagccatctgaatcgtgatctactctgatgctgcatcaccaatccagtgtaacatattataaatggttaggtgtcagatgttctgatttaggagtgtttgaatgcactagagataatagttagttagctaaaaattgttagtggaattagctagctaactattacctaatttgctaaaagtagttgatagctaaaatattagctagactgtttagatgtctcaattttagcagctaactattagttctagtgcattcaaacattcccttagatattaggtggccttatttctgtttgtatttttgacatgtaaacatctttgtgagcagctctaccatctgtaaaatataagaaagctgctctaagagctcccataacccaactctctttgtaagagatagataagtacgatagtcatgtaactttataagttttgaaaaggtctgtaaatacaaatgatcattgtcaattccgtacagttgtgaattgcttgttcatggctgtttactatcag

SEQ ID NO: 45263 - DNA, 3666 bp, Zea Mays
taaaagtccgtgcgagccgctgggatccgaaaatattttttggcgcgcatcccaacagccgccgccgcttcccgtccaccggcaccgccgccgcaaccctgttagagcttcccttccggtcgctggagtgcctggttccggccccagcagcggtttcgggcactgggttgggagtgcttggaaggggagaaacatggacggagtcgccaagccgtccacgagctcggggtcgggggtcacggatagtgcctccgccgccgcggcctccatagatgagaggttcgccgatctgtgcgagagcaagctgggactagacgacagcatgacgaggcaggcaatgcagcttttcaatgagaccaagaacatcaagtccagcatgtcttccttgggcggtggatcgcccgaggaggtcgagaggttctggtctgcctgtgttatgtactgtgtgtcaaggctcagcaaagcgcggaggtcgaaggaaagtggcagtgtctcactttgccagattttgagggcatctaagctgaacattgtggattttttcaaggagatgccgcaattctgcataaaggttgcacacattttgactggcctatatggttcagattgggaaaagaggcttgagttgaaggaactgcaagcgaatgttgtccatttaagcttgctaagcaggcactacaagcgtgcatatcaggagctattcttgccaaatgatggaaagtgttcagacagctcttcagaatcaaacaaccaagaggtttctgattattatcgctttggatggttgctctttttagtcctaagaatccaaacattcagcagattcaaggatcttgtgacatctacgaatgaactagtttctgtgttggctgtacttatcattcatattcctgtgcggctaaggaatttcgatataaaggattcatcctactttggtaagaaatcagataggggagtcagtcttattgcttctctgtgtgaaaaatatcatacctcagaagatgagttgagcaaagcactggagaagacaaatactctcatactggatattttgaaaaagaagccatggacagctacttcagcatgccaacaggataatttgactttcattgatccagggaggctcattgaaatcaagtcttctaatcctggaaaaagaatatgaaaatgcaattaacacaagaggcgagctagatgagcgcatgtttgctaatgatgaggacagtttacttggcagtggaagcctttcaggtggagccattaatttaccaggcacaaagagaaagtatgatgttatggcctcacctgcaaaatcaatatcaagcccaaatccaatgtctcctccacgtttttgtctatctcctaaaggaaacagcttttgcaactcaaagatggctcctatcactccagtgagcacagccatgacaactgccaagtggcttcggagtacagtatctccgcttccatcaaaaccttctggggaactattgcgcttcttctcagcatgtgataaggatgtaacagatgacattgtacacagagctgggattatacttggagccatattcacgagcagttcttttggtgaacagatctgtactaatatgcgaagcgctaataggatggatgctatttggacagagcaaagaaaaatggaagcccttaagctatattatagggttctggaatctatgtgtagggcagagtcacagatcttgagtgggaacaatcttacattacttttgtctaatgaacgtttccatcggtgtatgattgcatgttctgcggagttagttcttgcaactcacaagactgtcactttgatgttcccagctgtgttggagaagactggcattacagcctttgacttgagtaaagtcatagagggttttgttcggcatgaagatacactccccagagagttaaagcgtcatctgaattctcttgaggaacggcttctggaaagcatgtcatgggagaaagggtcatcaatgtacaattctttgattgttgctaggccagtactatctatcgaaataaatcggttaggtttactggctgaaccgatgccatcacttgatgcaattgcagcacatcataatatctcaatgggtggcctgccgcctcttcccttccagaaacaggagcgtttgcaagataaagatgaaatcaggtctcccaaaagggcgtgcactgagaggagacatgtgccggtggacagcaattcatttcgatcacaagtgaaggacagtattaaattgaagctaccacctcctcttcaatcagcttttgcaagtccaacaagaccgaatcctgcagcaggaggtgaaacatgcgcagagacaggaatagctgtgttctttagcaagatatcaaaacttgcagccattagaatcagaagtctctgtgaaagactgcaactttctcagcaagttctggagcgagtatattcccttgtccagcaaatccttagccaacagactggtctcttcttcaacaggcacattgatcagatcatactatgcagcatatatggagttgccaagatctctcaactgcaactttcattcaaggagattgtttttgggtataggaaacaacctcaatgcaagccacaagtttttcgaagtgtttatgttcattggcccccaacaagccataatgggaaaacaggagaagatcatgttgatattatcactttctacaatgaagtatttattcctgctgtcaagcctttgttagtggaggttggacctggtgctagtccaaagaggaaagaagagggaaaaggtccatacccagaatcccctcggctagctcggtttccgaaccttcctgacatgtctccaaagaaggtttctgctactcataatgtatatgtctcgccactacgatcatcaaagatggatactttactctcaccaagcccaaagagctattatgcatgtgtcggcgagagtacctatgcgttccaaagcccctccaaggacctgaaggctatcaacaaccgcctaaatagttggaagaaagttagcggacgattgaacttcgacattgtcagcgatctggtcgttgccagtagcctcaacggcgttcaaaatgccaagcccgcagccacggaagtggttcccaccaagacaccggtgaagtgcgagccatctgaatcgtgatctactctgatgctgcatcaccaatccagtgtaacatattataaatggttaggtgtcagatgttctgatttaggagtgtttgaatgcactagagataatagttagttagctaaaaattgttagtggaattagctagctaactattacctaatttgctaaaagtagttgatagctaaaatattagctagactgtttagatgtctcaattttagcagctaactattagttctagtgcattcaaacattcccttagatattaggtggccttatttctgtttgtatttttgacatgtaaacatctttgtgagcagctctaccatctgtaaaatataagaaagctgctctaagagctcccataacccaactctctttgtaagagatagataagtacgatagtcatgtaactttataagttttgaaaaggtctgtaaatacaaatgatcattgtcaattccgtacagttgtgaattgcttgttcatggctgtttactatcag

SEQ ID NO: 45264 - DNA, 3682 bp, Zea Mays
taaaagtccgtgcgagccgctgggatccgaaaatattttttggcgcgcatcccaacagccgccgccgcttcccgtccaccggcaccgccgccgcaaccctgttagagcttcccttccggtcgctggagtgcctggttccggccccagcagcggtttcgggcactgggttgggagtgcttggaaggggagaaacatggacggagtcgccaagccgtccacgagctcggggtcgggggtcacggatagtgcctccgccgccgcggcctccatagatgagaggttcgccgatctgtgcgagagcaagctgggactagacgacagcatgacgaggcaggcaatgcagcttttcaatgagaccaagaacatcaagtccagcatgtcttccttgggcggtggatcgcccgaggaggtcgagaggttctggtctgcctgtgttatgtactgtgtgtcaaggctcagcaaagcgcggaggtcgaaggaaagtggcagtgtctcactttgccagattttgagggcatctaagctgaagagatgccgcaattctgcataaaggttgcacacattttgactggcctatatggttcagattgggaaaagaggcttgagttgaaggaactgcaagcgaatgttgtccatttaagcttgctaagcaggcactacaagcgtgcatatcaggagctattcttgccaaatgatggaaagtgttcagacagctcttcagaatcaaacaaccaagaggtttctgattattatcgctttggatggttgctctttttagtcctaagaatccaaacattcagcagattcaaggatcttgtgacatctacgaatgaactagtttctgtgttggctgtacttatcattcatattcctgtgcggctaaggaatttcgatataaaggattcatcctactttggtaagaaatcagataggggagtcagtcttattgcttctctgtgtgaaaaatatcatacctcagaagatgagttgagcaaagcactggagaagacaaatactctcatactggatattttgaaaaagaagccatggacagctacttcagcatgccaacaggataatttgactttcattgatccagaagggttgacagtttttaaggatttgcttcagggaggctcattgaaatcaagtcttctaatcctggaaaaagaatatgaaaatgcaattaacacaagaggcgagctagatgagcgcatgtttgctaatgatgaggacagtttacttggcagtggaagcctttcaggtggagccattaatttaccaggcacaaagagaaagtatgatgttatggcctcacctgcaaaatcaatatcaagcccaaatccaatgtctcctccacgtttttgtctatctcctaaaggaaacagcttttgcaactcaaagatggctcctatcactccagtgagcacagccatgacaactgccaagtggcttcggagtacagtatctccgcttccatcaaaaccttctggggaactattgcgcttcttctcagcatgtgataaggatgtaacagatgacattgtacacagagctgggattatacttggagccatattcacgagcagttcttttggtgaacagatctgtactaatatgcgaagcgctaataggatggatgctatttggacagagcaaagaaaaatggaagcccttaagctatattatagggttctggaatctatgtgtagggcagagtcacagatcttgagtgggaacaatcttacattacttttgtctaatgaacgtttccatcggtgtatgattgcatgttctgcggagttagttcttgcaactcacaagactgtcactttgatgttcccagctgtgttggagaagactggcattacagcctttgacttgagtaaagtcatagagggttttgttcggcatgaagatacactccccagagagttaaagcgtcatctgaattctcttgaggaacggcttctggaaagcatgtcatgggagaaagggtcatcaatgtacaattctttgattgttgctaggccagtactatctatcgaaataaatcggttaggtttactggctgaaccgatgccatcacttgatgcaattgcagcacatcataatatctcaatgggtggcctgccgcctcttcccttccagaaacaggagcgtttgcaagataaagatgaaatcaggtctcccaaaagggcgtgcactgagaggagacatgtgccggtggacagcaattcatttcgatcacaagtgaaggacagtattaaattgaagctaccacctcctcttcaatcagcttttgcaagtccaacaagaccgaatcctgcagcaggaggtgaaacatgcgcagagacaggaatagctgtgttctttagcaagatatcaaaacttgcagccattagaatcagaagtctctgtgaaagactgcaactttctcagcaagttctggagcgagtatattcccttgtccagcaaatccttagccaacagactggtctcttcttcaacaggcacattgatcagatcatactatgcagcatatatggagttgccaagatctctcaactgcaactttcattcaaggagattgtttttgggtataggaaacaacctcaatgcaagccacaagtttttcgaagtgtttatgttcattggcccccaacaagccataatgggaaaacaggagaagatcatgttgatattatcactttctacaatgaagtatttattcctgctgtcaagcctttgttagtggaggttggacctggtgctagtccaaagaggaaagaagagggaaaagtaggtccatacccagaatcccctcggctagctcggtttccgaaccttcctgacatgtctccaaagaaggtttctgctactcataatgtatatgtctcgccactacgatcatcaaagatggatactttactctcaccaagcccaaagagctattatgcatgtgtcggcgagagtacctatgcgttccaaagcccctccaaggacctgaaggctatcaacaaccgcctaaatagttggaagaaagttagcggacgattgaacttcgacattgtcagcgatctggtcgttgccagtagcctcaacggcgttcaaaatgccaagcccgcagccacggaagtggttcccaccaagacaccggtgaagtgcgagccatctgaatcgtgatctactctgatgctgcatcaccaatccagtgtaacatattataaatggttaggtgtcagatgttctgatttaggagtgtttgaatgcactagagataatagttagttagctaaaaattgttagtggaattagctagctaactattacctaatttgctaaaagtagttgatagctaaaatattagctagactgtttagatgtctcaattttagcagctaactattagttctagtgcattcaaacattcccttagatattaggtggccttatttctgtttgtatttttgacatgtaaacatctttgtgagcagctctaccatctgtaaaatataagaaagctgctctaagagctcccataacccaactctctttgtaagagatagataagtacgatagtcatgtaactttataagttttgaaaaggtctgtaaatacaaatgatcattgtcaattccgtacagttgtgaattgcttgttcatggctgtttactatcag

SEQ ID NO: 45265 - DNA, 4301 bp, Zea Mays
cccagctagctcgtagcccattatctgctagtagcctggcagttccgacgctgcttgcggcggcgcttggcaaggccgacaaacggcgaccaggcaggcgagctcgtcgcctcgggggcagggaggaccggagcccctcgcctcggaggaagggaggacctgagctttatgatcaagcaggagctctgattaacagaattttttgaattctccccaaattgaagggtgcacctgaagggagttatggatcggaagaatcaaactcctcaaggtcaaatagcacaggtggttgtggaatttcttgaggtagcaatcagctgcatcgtcttcctcaaaggcttctatcctcctcgtgcctttgagaggagaaggtacatgaatgtggtggtccagaaagcactgcatcctgagcttactagctatattcactctgtgactttcggtcttctacctttcattcagaagggattggtagagagggtcgtggtcatcttctatgacaaagggcatgtaccgaccgagaagttcgtcttcaagcttgcagtcaaccagtcataccgttccaagttagaggaggcgaacctggagttcgctctgcgagcattcttgatcaagctgactgttgctgagcctgttaccagaccccttccaccagatggtagctgggaggtgaccgcctacttccggtccctccccggcgacggtgaccgagaagctcagctgtggattcctacggacgccgagctgtggatgcagcctccgcagatcacccccatcaagtcagtcagctgtgaccctctgacgatgcagctctacttggagcaccctagcgtcacggaaccgaaggagccaccggcataatgacaggagcctgcacctgtgggctgtgatacactgcaatagcaagctgggactagacgacagcatgacgaggcaggcaatgcagcttttcaatgagaccaagaacatcaagtccagcatgtcttccttgggcggtggatcgcccgaggaggtcgagaggttctggtctgcctgtgttatgtactgtgtgtcaaggctcagcaaagcgcggaggtcgaaggaaagtggcagtgtctcactttgccagattttgagggcatctaagctgaacattgtggattttttcaaggagatgccgcaattctgcataaaggttgcacacattttgactggcctatatggttcagattgggaaaagaggcttgagttgaaggaactgcaagcgaatgttgtccatttaagcttgctaagcaggcactacaagcgtgcatatcaggagctattcttgccaaatgatggaaagtgttcagacagctcttcagaatcaaacaaccaagaggtttctgattattatcgctttggatggttgctctttttagtcctaagaatccaaacattcagcagattcaaggatcttgtgacatctacgaatgaactagtttctgtgttggctgtacttatcattcatattcctgtgcggctaaggaatttcgatataaaggattcatcctactttggtaagaaatcagataggggagtcagtcttattgcttctctgtgtgaaaaatatcatacctcagaagatgagttgagcaaagcactggagaagacaaatactctcatactggatattttgaaaaagaagccatggacagctacttcagcatgccaacaggataatttgactttcattgatccagaagggttgacagtttttaaggatttgcttcagggaggctcattgaaatcaagtcttctaatcctggaaaaagaatatgaaaatgcaattaacacaagaggcgagctagatgagcgcatgtttgctaatgatgaggacagtttacttggcagtggaagcctttcaggtggagccattaatttaccaggcacaaagagaaagtatgatgttatggcctcacctgcaaaatcaatatcaagcccaaatccaatgtctcctccacgtttttgtctatctcctaaaggaaacagcttttgcaactcaaagatggctcctatcactccagtgagcacagccatgacaactgccaagtggcttcggagtacagtatctccgcttccatcaaaaccttctggggaactattgcgcttcttctcagcatgtgataaggatgtaacagatgacattgtacacagagctgggattatacttggagccatattcacgagcagttcttttggtgaacagatctgtactaatatgcgaagcgctaataggatggatgctatttggacagagcaaagaaaaatggaagcccttaagctatattatagggttctggaatctatgtgtagggcagagtcacagatcttgagtgggaacaatcttacattacttttgtctaatgaacgtttccatcggtgtatgattgcatgttctgcggagttagttcttgcaactcacaagactgtcactttgatgttcccagctgtgttggagaagactggcattacagcctttgacttgagtaaagtcatagagggttttgttcggcatgaagatacactccccagagagttaaagcgtcatctgaattctcttgaggaacggcttctggaaagcatgtcatgggagaaagggtcatcaatgtacaattctttgattgttgctaggccagtactatctatcgaaataaatcggttaggtttactggctgaaccgatgccatcacttgatgcaattgcagcacatcataatatctcaatgggtggcctgccgcctcttcccttccagaaacaggagcgtttgcaagataaagatgaaatcaggtctcccaaaagggcgtgcactgagaggagacatgtgccggtggacagcaattcatttcgatcacaagtgaaggacagtattaaattgaagctaccacctcctcttcaatcagcttttgcaagtccaacaagaccgaatcctgcagcaggaggtgaaacatgcgcagagacaggaatagctgtgttctttagcaagatatcaaaacttgcagccattagaatcagaagtctctgtgaaagactgcaactttctcagcaagttctggagcgagtatattcccttgtccagcaaatccttagccaacagactggtctcttcttcaacaggcacattgatcagatcatactatgcagcatatatggagttgccaagatctctcaactgcaactttcattcaaggagattgtttttgggtataggaaacaacctcaatgcaagccacaagtttttcgaagtgtttatgttcattggcccccaacaagccataatgggaaaacaggagaagatcatgttgatattatcactttctacaatgaagtatttattcctgctgtcaagcctttgttagtggaggttggacctggtgctagtccaaagaggaaagaagagggaaaaggtccatacccagaatcccctcggctagctcggtttccgaaccttcctgacatgtctccaaagaaggtttctgctactcataatgtatatgtctcgccactacgatcatcaaagatggatactttactctcaccaagcccaaagagctattatgcatgtgtcggcgagagtacctatgcgttccaaagcccctccaaggacctgaaggctatcaacaaccgcctaaatagttggaagaaagttagcggacgattgaacttcgacattgtcagcgatctggtcgttgccagtagcctcaacggcgttcaaaatgccaagcccgcagccacggaagtggttcccaccaagacaccggtgaagtgcgagccatctgaatcgtgatctactctgatgctgcatcaccaatccagtgtaacatattataaatggttaggtgtcagatgttctgatttaggagtgtttgaatgcactagagataatagttagttagctaaaaattgttagtggaattagctagctaactattacctaatttgctaaaagtagttgatagctaaaatattagctagactgtttagatgtctcaattttagcagctaactattagttctagtgcattcaaacattcccttagatattaggtggccttatttctgtttgtatttttgacatgtaaacatctttgtgagcagctctaccatctgtaaaatataagaaagctgctctaagagctcccataacccaactctctttgtaagagatagataagtacgatagtcatgtaactttataagttttgaaaaggtctgtaaatacaaatgatcattgtcaattccgtacagttgtgaattgcttgttcatggctgtttactatcag

SEQ ID NO: 45266 - DNA, 1139 bp, Zea Mays
cccagctagctcgtagcccattatctgctagtagcctggcagttccgacgctgcttgcggcggcgcttggcaaggccgacaaacggcgaccaggcaggcgagctcgtcgcctcgggggcagggaggaccggagcccctcgcctcggaggaagggaggacctgagctttatgatcaagcaggagctctgattaacagaattttttgaattctccccaaattgaagggtgcacctgaagggagttatggatcggaagaatcaaactcctcaaggtcaaatagcacaggtggttgtggaatttcttgaggtagcaatcagctgcatcgtcttcctcaaaggcttctatcctcctcgtgcctttgagaggagaaggtacatgaatgtggtggtccagaaagcactgcatcctgagcttactagctatattcactctgtgactttcggtcttctacctttcattcagaagggattggtagagagggtcgtggtcatcttctatgacaaagggcatgtaccgaccgagaagttcgtcttcaagcttgcagtcaaccagtcataccgttccaagttagaggaggcgaacctggagttcgctctgcgagcattcttgatcaagctgactgttgctgagcctgttaccagaccccttccaccagatggtagctgggaggtgaccgcctacttccggtccctccccggcgacggtgaccgagaagctcagctgtggattcctacggacgccgagctgtggatgcagcctccgcagatcacccccatcaagtcagtcagctgtgaccctctgacgatgcagctctacttggagcaccctagcgtcacggaaccgaaggagccaccggcataatgacaggagcctgcacctgtgggctgtgatacactgcaatgtatagaatttttttttgcaaggcaactttggcacgaaccctcgagtcagtgaaaccttttttgttcagacagaggcaaggaaactacttctatccagtggcttcaacttctggctagagaaggcgacactgtaacaatcttgggccttgggattttggctgaggctgaggctgaggggggtggcagagacggacgacacatgggtgagaagcacatggctagaagaagagtggggag

SEQ ID NO: 45267 - DNA, 1079 bp, Zea Mays
cccagctagctcgtagcccattatctgctagtagcctggcagttccgacgctgcttgcggcggcgcttggcaaggccgacaaacggcgaccaggcaggcgagctcgtcgcctcgggggcagggaggaccggagcccctcgcctcggaggaagggaggacctgagggtgcacctgaagggagttatggatcggaagaatcaaactcctcaaggtcaaatagcacaggtggttgtggaatttcttgaggtagcaatcagctgcatcgtcttcctcaaaggcttctatcctcctcgtgcctttgagaggagaaggtacatgaatgtggtggtccagaaagcactgcatcctgagcttactagctatattcactctgtgactttcggtcttctacctttcattcagaagggattggtagagagggtcgtggtcatcttctatgacaaagggcatgtaccgaccgagaagttcgtcttcaagcttgcagtcaaccagtcataccgttccaagttagaggaggcgaacctggagttcgctctgcgagcattcttgatcaagctgactgttgctgagcctgttaccagaccccttccaccagatggtagctgggaggtgaccgcctacttccggtccctccccggcgacggtgaccgagaagctcagctgtggattcctacggacgccgagctgtggatgcagcctccgcagatcacccccatcaagtcagtcagctgtgaccctctgacgatgcagctctacttggagcaccctagcgtcacggaaccgaaggagccaccggcataatgacaggagcctgcacctgtgggctgtgatacactgcaatgtatagaatttttttttgcaaggcaactttggcacgaaccctcgagtcagtgaaaccttttttgttcagacagaggcaaggaaactacttctatccagtggcttcaacttctggctagagaaggcgacactgtaacaatcttgggccttgggattttggctgaggctgaggctgaggggggtggcagagacggacgacacatgggtgagaagcacatggctagaagaagagtggggag

SEQ ID NO: 45268 - DNA, 2824 bp, Zea Mays
cccagctagctcgtagcccattatctgctagtagcctggcagttccgacgctgcttgcggcggcgcttggcaaggccgacaaacggcgaccaggcaggcgagctcgtcgcctcgggggcagggaggaccggagcccctcgcctcggaggaagggaggacctgaggtttcagtgttgggtgacagttccccatatcctccaagcgcgtgcttgcctgcagcaacagatcgcttgtcaactccattggctttaatgggtgcaccttcacaaatatttgttgggaagtcaaaagccttctgcattgccaaaagctcttttcctgaacacaaatatgccctttcaattttaatcccacgactctcccattgccatattcccctcctcctctcccagtcaattgtttcaggtcttctcctcaaagctcccccttgtccactctgtcctccgatctctctctttggggcatttcccatctctatccctcgatttactcgccctgctacgccattctggatgtatgaccctcgatagctactccctcaacattgctttctatgccactgcccgcctcccatctgtttctgttggtgcccagcttcattccctttctgtcaaacttggcttggtttcagatacatttgtccttaattctcttatcaacatgtactcgtcttgtagctatccaacaactgcaagacaagttctcgattctgctccccaaggagcttgtgacacagtttcttggaacacaataatttctggatacctacgatgtgggatgcctaataaggctctgcaggcttttggccagatggtcaaggagccagttagactggatgatgtcacattgctgaacgcactcgttgcttctgccaaggcaggcaaagcgaaggtcgggaggctgtgtcacagtttagttgtggtgaacggggctggaattaattgttatatgggatcctctctgattagtatgtatgccaagtgtggattggttgaggatgcccgcaaggtatttcacggaatgcatgagagaaacgtcgtttgctggacatcaatgatttctgggtacacacagttgggtaagtttaaaaaggctgtcgatcttttcagggatatgcaaattactggaatgaaggctgatgatgggacgattgctactgttgtgtcttcatgtgcccaaatgggagcacttgacttgggacgatatgttcatgcttactgtgatgttcatggtttagggaaggagctttctgttaagaattcactgattgatatgtactcgaaatgtggggatataactaaggctcatgagatattctgtggattgaccaagagagatgtgttttcttggacggcaatgataatgggctttactgttaatggcttatgtaatgaagcacttgatttgtttgctcagatggaaggagagggtaaggttatgccaaatgaggtcacttttttgggtgtccttacttcttgtagccatggagggttagtggaacaagggttccatcacttccagcgtatgtccatggtctacaatcttgcaccgaggattgaacactatggatgcatggttgatctcttgggacgtgcaaagctattgacagaggcagaacaatttattaacgggatgcctattgccccagatgttgtagtatggcggtctttattgtttgcctgcagagcttgtggagaggtgggacttgcagaatttgtagcagaaaggatcctagaactggagccaaaaaagtgtgcaggacatgttttactttctaatgtctatgctgccacatcaaggtgggttgatgtgaataaattgcggacatctatggacagttgtaggatgactttatgatcaagcaggagctctgattaacagaattttttgaattctccccaaattgaagggtgcacctgaagggagttatggatcggaagaatcaaactcctcaaggtcaaatagcacaggtggttgtggaatttcttgaggtagcaatcagctgcatcgtcttcctcaaaggcttctatcctcctcgtgcctttgagaggagaaggtacatgaatgtggtggtccagaaagcactgcatcctgagcttactagctatattcactctgtgactttcggtcttctacctttcattcagaagggattggtagagagggtcgtggtcatcttctatgacaaagggcatgtaccgaccgagaagttcgtcttcaagcttgcagtcaaccagtcataccgttccaagttagaggaggcgaacctggagttcgctctgcgagcattcttgatcaagctgactgttgctgagcctgttaccagaccccttccaccagatggtagctgggaggtgaccgcctacttccggtccctccccggcgacggtgaccgagaagctcagctgtggattcctacggacgccgagctgtggatgcagcctccgcagatcacccccatcaagtcagtcagctgtgaccctctgacgatgcagctctacttggagcaccctagcgtcacggaaccgaaggagccaccggcataatgacaggagcctgcacctgtgggctgtgatacactgcaatgtatagaatttttttttgcaaggcaactttggcacgaaccctcgagtcagtgaaaccttttttgttcagacagaggcaaggaaactacttctatccagtggcttcaacttctggctagagaaggcgacactgtaacaatcttgggccttgggattttggctgaggctgaggctgaggggggtggcagagacggacgacacatgggtgagaagcacatggctagaagaagagtggggag

SEQ ID NO: 45269 - DNA, 1152 bp, Zea Mays
cccagctagctcgtagcccattatctgctagtagcctggcagttccgacgctgcttgcggcggcgcttggcaaggccgacaaacggcgaccaggcaggcgagctcgtcgcctcgggggcagggaggaccggagcccctcgcctcggaggaagggaggacctgagttctgtttctcagctttatgatcaagcaggagctctgattaacagaattttttgaattctccccaaattgaagggtgcacctgaagggagttatggatcggaagaatcaaactcctcaaggtcaaatagcacaggtggttgtggaatttcttgaggtagcaatcagctgcatcgtcttcctcaaaggcttctatcctcctcgtgcctttgagaggagaaggtacatgaatgtggtggtccagaaagcactgcatcctgagcttactagctatattcactctgtgactttcggtcttctacctttcattcagaagggattggtagagagggtcgtggtcatcttctatgacaaagggcatgtaccgaccgagaagttcgtcttcaagcttgcagtcaaccagtcataccgttccaagttagaggaggcgaacctggagttcgctctgcgagcattcttgatcaagctgactgttgctgagcctgttaccagaccccttccaccagatggtagctgggaggtgaccgcctacttccggtccctccccggcgacggtgaccgagaagctcagctgtggattcctacggacgccgagctgtggatgcagcctccgcagatcacccccatcaagtcagtcagctgtgaccctctgacgatgcagctctacttggagcaccctagcgtcacggaaccgaaggagccaccggcataatgacaggagcctgcacctgtgggctgtgatacactgcaatgtatagaatttttttttgcaaggcaactttggcacgaaccctcgagtcagtgaaaccttttttgttcagacagaggcaaggaaactacttctatccagtggcttcaacttctggctagagaaggcgacactgtaacaatcttgggccttgggattttggctgaggctgaggctgaggggggtggcagagacggacgacacatgggtgagaagcacatggctagaagaagagtggggag

SEQ ID NO: 45270 - DNA, 3000 bp, Zea Mays
cccagctagctcgtagcccattatctgctagtagcctggcagttccgacgctgcttgcggcggcgcttggcaaggccgacaaacggcgaccaggcaggcgagctcgtcgcctcgggggcagggaggaccggagcccctcgcctcggaggaagggaggacctgaggtttcagtgttgggtgacagttccccatatcctccaagcgcgtgcttgcctgcagcaacagatcgcttgtcaactccattggctttaatgggtgcaccttcacaaatatttgttgggaagtcaaaagccttctgcattgccaaaagctcttttcctgaacacaaatatgccctttcaattttaatcccacgactctcccattgccatattcccctcctcctctcccagtcaattgtttcaggtcttctcctcaaagctcccccttgtccactctgtcctccgatctctctctttggggcatttcccatctctatccctcgatttactcgccctgctacgccattctggatgtatgaccctcgatagctactccctcaacattgctttctatgccactgcccgcctcccatctgtttctgttggtgcccagcttcattccctttctgtcaaacttggcttggtttcagatacatttgtccttaattctcttatcaacatgtactcgtcttgtagctatccaacaactgcaagacaagttctcgattctgctccccaaggagcttgtgacacagtttcttggaacacaataatttctggatacctacgatgtgggatgcctaataaggctctgcaggcttttggccagatggtcaaggagccagttagactggatgatgtcacattgctgaacgcactcgttgcttctgccaaggcaggcaaagcgaaggtcgggaggctgtgtcacagtttagttgtggtgaacggggctggaattaattgttatatgggatcctctctgattagtatgtatgccaagtgtggattggttgaggatgcccgcaaggtatttcacggaatgcatgagagaaacgtcgtttgctggacatcaatgatttctgggtacacacagttgggtaagtttaaaaaggctgtcgatcttttcagggatatgcaaattactggaatgaaggctgatgatgggacgattgctactgttgtgtcttcatgtgcccaaatgggagcacttgacttgggacgatatgttcatgcttactgtgatgttcatggtttagggaaggagctttctgttaagaattcactgattgatatgtactcgaaatgtggggatataactaaggctcatgagatattctgtggattgaccaagagagatgtgttttcttggacggcaatgataatgggctttactgttaatggcttatgtaatgaagcacttgatttgtttgctcagatggaaggagagggtaaggttatgccaaatgaggtcacttttttgggtgtccttacttcttgtagccatggagggttagtggaacaagggttccatcacttccagcgtatgtccatggtctacaatcttgcaccgaggattgaacactatggatgcatggttgatctcttgggacgtgcaaagctattgacagaggcagaacaatttattaacgggatgcctattgccccagatgttgtagtatggcggtctttattgtttgcctgcagagcttgtggagaggtgggacttgcagaatttgtagcagaaaggatcctagaactggagccaaaaaagtgtgcaggacatgttttactttctaatgtctatgctgccacatcaaggtgggttgatgtgaataaattgcggacatctatggacagttgtaggatgagtaagcaacctggatgctctttcattgaagtggacggatgtgtgcacgagttctttgcaggagatgaatcacaccttgagatagatgctatatataacattcttttggggatcaatgaactgttagtagcagagtccttgtatgaaagttgtgatatttttttgtcaattaagtagctttatgatcaagcaggagctctgattaacagaattttttgaattctccccaaattgaagggtgcacctgaagggagttatggatcggaagaatcaaactcctcaaggtcaaatagcacaggtggttgtggaatttcttgaggtagcaatcagctgcatcgtcttcctcaaaggcttctatcctcctcgtgcctttgagaggagaaggtacatgaatgtggtggtccagaaagcactgcatcctgagcttactagctatattcactctgtgactttcggtcttctacctttcattcagaagggattggtagagagggtcgtggtcatcttctatgacaaagggcatgtaccgaccgagaagttcgtcttcaagcttgcagtcaaccagtcataccgttccaagttagaggaggcgaacctggagttcgctctgcgagcattcttgatcaagctgactgttgctgagcctgttaccagaccccttccaccagatggtagctgggaggtgaccgcctacttccggtccctccccggcgacggtgaccgagaagctcagctgtggattcctacggacgccgagctgtggatgcagcctccgcagatcacccccatcaagtcagtcagctgtgaccctctgacgatgcagctctacttggagcaccctagcgtcacggaaccgaaggagccaccggcataatgacaggagcctgcacctgtgggctgtgatacactgcaatgtatagaatttttttttgcaaggcaactttggcacgaaccctcgagtcagtgaaaccttttttgttcagacagaggcaaggaaactacttctatccagtggcttcaacttctggctagagaaggcgacactgtaacaatcttgggccttgggattttggctgaggctgaggctgaggggggtggcagagacggacgacacatgggtgagaagcacatggctagaagaagagtggggag

SEQ ID NO: 45271 - DNA, 2774 bp, Zea Mays
cccagctagctcgtagcccattatctgctagtagcctggcagttccgacgctgcttgcggcggcgcttggcaaggccgacaaacggcgaccaggcaggcgagctcgtcgcctcgggggcagggaggaccggagcccctcgcctcggaggaagggaggacctgaggtttcagtgttgggtgacagttccccatatcctccaagcgcgtgcttgcctgcagcaacagatcgcttgtcaactccattggctttaatgggtgcaccttcacaaatatttgttgggaagtcaaaagccttctgcattgccaaaagctcttttcctgaacacaaatatgccctttcaattttaatcccacgactctcccattgccatattcccctcctcctctcccagtcaattgtttcaggtcttctcctcaaagctcccccttgtccactctgtcctccgatctctctctttggggcatttcccatctctatccctcgatttactcgccctgctacgccattctggatgtatgaccctcgatagctactccctcaacattgctttctatgccactgcccgcctcccatctgtttctgttggtgcccagcttcattccctttctgtcaaacttggcttggtttcagatacatttgtccttaattctcttatcaacatgtactcgtcttgtagctatccaacaactgcaagacaagttctcgattctgctccccaaggagcttgtgacacagtttcttggaacacaataatttctggatacctacgatgtgggatgcctaataaggctctgcaggcttttggccagatggtcaaggagccagttagactggatgatgtcacattgctgaacgcactcgttgcttctgccaaggcaggcaaagcgaaggtcgggaggctgtgtcacagtttagttgtggtgaacggggctggaattaattgttatatgggatcctctctgattagtatgtatgccaagtgtggattggttgaggatgcccgcaaggtatttcacggaatgcatgagagaaacgtcgtttgctggacatcaatgatttctgggtacacacagttgggtaagtttaaaaaggctgtcgatcttttcagggatatgcaaattactggaatgaaggctgatgatgggacgattgctactgttgtgtcttcatgtgcccaaatgggagcacttgacttgggacgatatgttcatgcttactgtgatgttcatggtttagggaaggagctttctgttaagaattcactgattgatatgtactcgaaatgtggggatataactaaggctcatgagatattctgtggattgaccaagagagatgtgttttcttggacggcaatgataatgggctttactgttaatggcttatgtaatgaagcacttgatttgtttgctcagatggaaggagagggtaaggttatgccaaatgaggtcacttttttgggtgtccttacttcttgtagccatggagggttagtggaacaagggttccatcacttccagcgtatgtccatggtctacaatcttgcaccgaggattgaacactatggatgcatggttgatctcttgggacgtgcaaagctattgacagaggcagaacaatttattaacgggatgcctattgccccagatgttgtagtatggcggtctttattgtttgcctgcagagcttgtggagaggtgggacttgcagaatttgtagcagaaaggatcctagaactggagccaaaaaagtgtgcaggacatgttttactttctaatgtctatgctgccacatcaagctttatgatcaagcaggagctctgattaacagaattttttgaattctccccaaattgaagggtgcacctgaagggagttatggatcggaagaatcaaactcctcaaggtcaaatagcacaggtggttgtggaatttcttgaggtagcaatcagctgcatcgtcttcctcaaaggcttctatcctcctcgtgcctttgagaggagaaggtacatgaatgtggtggtccagaaagcactgcatcctgagcttactagctatattcactctgtgactttcggtcttctacctttcattcagaagggattggtagagagggtcgtggtcatcttctatgacaaagggcatgtaccgaccgagaagttcgtcttcaagcttgcagtcaaccagtcataccgttccaagttagaggaggcgaacctggagttcgctctgcgagcattcttgatcaagctgactgttgctgagcctgttaccagaccccttccaccagatggtagctgggaggtgaccgcctacttccggtccctccccggcgacggtgaccgagaagctcagctgtggattcctacggacgccgagctgtggatgcagcctccgcagatcacccccatcaagtcagtcagctgtgaccctctgacgatgcagctctacttggagcaccctagcgtcacggaaccgaaggagccaccggcataatgacaggagcctgcacctgtgggctgtgatacactgcaatgtatagaatttttttttgcaaggcaactttggcacgaaccctcgagtcagtgaaaccttttttgttcagacagaggcaaggaaactacttctatccagtggcttcaacttctggctagagaaggcgacactgtaacaatcttgggccttgggattttggctgaggctgaggctgaggggggtggcagagacggacgacacatgggtgagaagcacatggctagaagaagagtggggag

SEQ ID NO: 45272 - DNA, 3398 bp, Zea Mays
cccagctagctcgtagcccattatctgctagtagcctggcagttccgacgctgcttgcggcggcgcttggcaaggccgacaaacggcgaccaggcaggcgagctcgtcgcctcgggggcagggaggaccggagcccctcgcctcggaggaagggaggacctgaggtttcagtgttgggtgacagttccccatatcctccaagcgcgtgcttgcctgcagcaacagatcgcttgtcaactccattggctttaatgggtgcaccttcacaaatatttgttgggaagtcaaaagccttctgcattgccaaaagctcttttcctgaacacaaatatgccctttcaattttaatcccacgactctcccattgccatattcccctcctcctctcccagtcaattgtttcaggtcttctcctcaaagctcccccttgtccactctgtcctccgatctctctctttggggcatttcccatctctatccctcgatttactcgccctgctacgccattctggatgtatgaccctcgatagctactccctcaacattgctttctatgccactgcccgcctcccatctgtttctgttggtgcccagcttcattccctttctgtcaaacttggcttggtttcagatacatttgtccttaattctcttatcaacatgtactcgtcttgtagctatccaacaactgcaagacaagttctcgattctgctccccaaggagcttgtgacacagtttcttggaacacaataatttctggatacctacgatgtgggatgcctaataaggctctgcaggcttttggccagatggtcaaggagccagttagactggatgatgtcacattgctgaacgcactcgttgcttctgccaaggcaggcaaagcgaaggtcgggaggctgtgtcacagtttagttgtggtgaacggggctggaattaattgttatatgggatcctctctgattagtatgtatgccaagtgtggattggttgaggatgcccgcaaggtatttcacggaatgcatgagagaaacgtcgtttgctggacatcaatgatttctgggtacacacagttgggtaagtttaaaaaggctgtcgatcttttcagggatatgcaaattactggaatgaaggctgatgatgggacgattgctactgttgtgtcttcatgtgcccaaatgggagcacttgacttgggacgatatgttcatgcttactgtgatgttcatggtttagggaaggagctttctgttaagaattcactgattgatatgtactcgaaatgtggggatataactaaggctcatgagatattctgtggattgaccaagagagatgtgttttcttggacggcaatgataatgggctttactgttaatggcttatgtaatgaagcacttgatttgtttgctcagatggaaggagagggtaaggttatgccaaatgaggtcacttttttgggtgtccttacttcttgtagccatggagggttagtggaacaagggttccatcacttccagcgtatgtccatggtctacaatcttgcaccgaggattgaacactatggatgcatggttgatctcttgggacgtgcaaagctattgacagaggcagaacaatttattaacgggatgcctattgccccagatgttgtagtatggcggtctttattgtttgcctgcagagcttgtggagaggtgggacttgcagaatttgtagcagaaaggatcctagaactggagccaaaaaagtgtgcaggacatgttttactttctaatgtctatgctgccacatcaaggtgggttgatgtgaataaattgcggacatctatggacagttgtaggatgagtaagcaacctggatgctctttcattgaagtggacggatgtgtgcacgagttctttgcaggagatgaatcacaccttgagatagatgctatatataacattcttttggggatcaatgaactgttagtagcagagtccttgtatgaaagttgtgatatttttttgtcaattaagtaggtaggttcaaaatgtaataagctgtcattttatgtggagcagaaagaatgtttacatttttgtatttctccagaaggcgggaaatttcatttttctgctagacacatcccttcctgtatatgcttttgctagaacatactgggttgtccactagcgttatttcatttttctgctagacacatctcttcctgtatatgcttttgctagaacatgctgggttggccactagcgtcattgatgagaaatgggttcttatatggcatgttttacctcgagtattgactgctatgcttctgtcatctagctgtctattgcattgctttcctggtccttttctcgtgcttatgtaattggccatatactaacatttgatttaaaactgaagttctgtttctcagctttatgatcaagcaggagctctgattaacagaattttttgaattctccccaaattgaagggtgcacctgaagggagttatggatcggaagaatcaaactcctcaaggtcaaatagcacaggtggttgtggaatttcttgaggtagcaatcagctgcatcgtcttcctcaaaggcttctatcctcctcgtgcctttgagaggagaaggtacatgaatgtggtggtccagaaagcactgcatcctgagcttactagctatattcactctgtgactttcggtcttctacctttcattcagaagggattggtagagagggtcgtggtcatcttctatgacaaagggcatgtaccgaccgagaagttcgtcttcaagcttgcagtcaaccagtcataccgttccaagttagaggaggcgaacctggagttcgctctgcgagcattcttgatcaagctgactgttgctgagcctgttaccagaccccttccaccagatggtagctgggaggtgaccgcctacttccggtccctccccggcgacggtgaccgagaagctcagctgtggattcctacggacgccgagctgtggatgcagcctccgcagatcacccccatcaagtcagtcagctgtgaccctctgacgatgcagctctacttggagcaccctagcgtcacggaaccgaaggagccaccggcataatgacaggagcctgcacctgtgggctgtgatacactgcaatgtatagaatttttttttgcaaggcaactttggcacgaaccctcgagtcagtgaaaccttttttgttcagacagaggcaaggaaactacttctatccagtggcttcaacttctggctagagaaggcgacactgtaacaatcttgggccttgggattttggctgaggctgaggctgaggggggtggcagagacggacgacacatgggtgagaagcacatggctagaagaagagtggggag

SEQ ID NO: 45273 - DNA, 2628 bp, Zea Mays
cccagctagctcgtagcccattatctgctagtagcctggcagttccgacgctgcttgcggcggcgcttggcaaggccgacaaacggcgaccaggcaggcgagctcgtcgcctcgggggcagggaggaccggagcccctcgcctcggaggaagggaggacctgaggtttcagtgttgggtgacagttccccatatcctccaagcgcgtgcttgcctgcagcaacagatcgcttgtcaactccattggctttaatgggtgcaccttcacaaatatttgttgggaagtcaaaagccttctgcattgccaaaagctcttttcctgaacacaaatatgccctttcaattttaatcccacgactctcccattgccatattcccctcctcctctcccagtcaattgtttcaggtcttctcctcaaagctcccccttgtccactctgtcctccgatctctctctttggggcatttcccatctctatccctcgatttactcgccctgctacgccattctggatgtatgaccctcgatagctactccctcaacattgctttctatgccactgcccgcctcccatctgtttctgttggtgcccagcttcattccctttctgtcaaacttggcttggtttcagatacatttgtccttaattctcttatcaacatgtactcgtcttgtagctatccaacaactgcaagacaagttctcgattctgctccccaaggagcttgtgacacagtttcttggaacacaataatttctggatacctacgatgtgggatgcctaataaggctctgcaggcttttggccagatggtcaaggagccagttagactggatgatgtcacattgctgaacgcactcgttgcttctgccaaggcaggcaaagcgaaggtcgggaggctgtgtcacagtttagttgtggtgaacggggctggaattaattgttatatgggatcctctctgattagtatgtatgccaagtgtggattggttgaggatgcccgcaaggtatttcacggaatgcatgagagaaacgtcgtttgctggacatcaatgatttctgggtacacacagttgggtaagtttaaaaaggctgtcgatcttttcagggatatgcaaattactggaatgaaggctgatgatgggacgattgctactgttgtgtcttcatgtgcccaaatgggagcacttgacttgggacgatatgttcatgcttactgtgatgttcatggtttagggaaggagctttctgttaagaattcactgattgatatgtactcgaaatgtggggatataactaaggctcatgagatattctgtggattgaccaagagagatgtgttttcttggacggcaatgataatgggctttactgttaatggcttatgtaatgaagcacttgatttgtttgctcagatggaaggagagggtaaggttatgccaaatgaggtcacttttttgggtgtccttacttcttgtagccatggagggttagtggaacaagggttccatcacttccagcgtatgtccatggtctacaatcttgcaccgaggattgaacactatggatgcatggttgatctcttgggacgtgcaaagctattgacagaggcagaacaatttattaacgggatgcctattgccccagatgttgtagtatggcggtctttattgtttgcctgcagagcttgtggagaggtgggacttgcagaatttgtagcagaaaggatcctagaactggagccaaaaaagtgtgcaggacatgttttactttctaatgtctatgctgccacatcaaggtgggttgatgtgaataaattgcggacatctatggacagttgtaggatgagtcaaatagcacaggtggttgtggaatttcttgaggtagcaatcagctgcatcgtcttcctcaaaggcttctatcctcctcgtgcctttgagaggagaaggtacatgaatgtggtggtccagaaagcactgcatcctgagcttactagctatattcactctgtgactttcggtcttctacctttcattcagaagggattggtagagagggtcgtggtcatcttctatgacaaagggcatgtaccgaccgagaagttcgtcttcaagcttgcagtcaaccagtcataccgttccaagttagaggaggcgaacctggagttcgctctgcgagcattcttgatcaagctgactgttgctgagcctgttaccagaccccttccaccagatggtagctgggaggtgaccgcctacttccggtccctccccggcgacggtgaccgagaagctcagctgtggattcctacggacgccgagctgtggatgcagcctccgcagatcacccccatcaagtcagtcagctgtgaccctctgacgatgcagctctacttggagcaccctagcgtcacggaaccgaaggagccaccggcataatgacaggagcctgcacctgtgggctgtgatacactgcaatgtatagaatttttttttgcaaggcaactttggcacgaaccctcgagtcagtgaaaccttttttgttcagacagaggctgaggctgaggggggtggcagagacggacgacacatgggtgagaagcacatggctagaagaagagtggggag

SEQ ID NO: 45274 - DNA, 3013 bp, Zea Mays
cccagctagctcgtagcccattatctgctagtagcctggcagttccgacgctgcttgcggcggcgcttggcaaggccgacaaacggcgaccaggcaggcgagctcgtcgcctcgggggcagggaggaccggagcccctcgcctcggaggaagggaggacctgaggtttcagtgttgggtgacagttccccatatcctccaagcgcgtgcttgcctgcagcaacagatcgcttgtcaactccattggctttaatgggtgcaccttcacaaatatttgttgggaagtcaaaagccttctgcattgccaaaagctcttttcctgaacacaaatatgccctttcaattttaatcccacgactctcccattgccatattcccctcctcctctcccagtcaattgtttcaggtcttctcctcaaagctcccccttgtccactctgtcctccgatctctctctttggggcatttcccatctctatccctcgatttactcgccctgctacgccattctggatgtatgaccctcgatagctactccctcaacattgctttctatgccactgcccgcctcccatctgtttctgttggtgcccagcttcattccctttctgtcaaacttggcttggtttcagatacatttgtccttaattctcttatcaacatgtactcgtcttgtagctatccaacaactgcaagacaagttctcgattctgctccccaaggagcttgtgacacagtttcttggaacacaataatttctggatacctacgatgtgggatgcctaataaggctctgcaggcttttggccagatggtcaaggagccagttagactggatgatgtcacattgctgaacgcactcgttgcttctgccaaggcaggcaaagcgaaggtcgggaggctgtgtcacagtttagttgtggtgaacggggctggaattaattgttatatgggatcctctctgattagtatgtatgccaagtgtggattggttgaggatgcccgcaaggtatttcacggaatgcatgagagaaacgtcgtttgctggacatcaatgatttctgggtacacacagttgggtaagtttaaaaaggctgtcgatcttttcagggatatgcaaattactggaatgaaggctgatgatgggacgattgctactgttgtgtcttcatgtgcccaaatgggagcacttgacttgggacgatatgttcatgcttactgtgatgttcatggtttagggaaggagctttctgttaagaattcactgattgatatgtactcgaaatgtggggatataactaaggctcatgagatattctgtggattgaccaagagagatgtgttttcttggacggcaatgataatgggctttactgttaatggcttatgtaatgaagcacttgatttgtttgctcagatggaaggagagggtaaggttatgccaaatgaggtcacttttttgggtgtccttacttcttgtagccatggagggttagtggaacaagggttccatcacttccagcgtatgtccatggtctacaatcttgcaccgaggattgaacactatggatgcatggttgatctcttgggacgtgcaaagctattgacagaggcagaacaatttattaacgggatgcctattgccccagatgttgtagtatggcggtctttattgtttgcctgcagagcttgtggagaggtgggacttgcagaatttgtagcagaaaggatcctagaactggagccaaaaaagtgtgcaggacatgttttactttctaatgtctatgctgccacatcaaggtgggttgatgtgaataaattgcggacatctatggacagttgtaggatgagtaagcaacctggatgctctttcattgaagtggacggatgtgtgcacgagttctttgcaggagatgaatcacaccttgagatagatgctatatataacattcttttggggatcaatgaactgttagtagcagagtccttgtatgaaagttgtgatatttttttgtcaattaagtagttctgtttctcagctttatgatcaagcaggagctctgattaacagaattttttgaattctccccaaattgaagggtgcacctgaagggagttatggatcggaagaatcaaactcctcaaggtcaaatagcacaggtggttgtggaatttcttgaggtagcaatcagctgcatcgtcttcctcaaaggcttctatcctcctcgtgcctttgagaggagaaggtacatgaatgtggtggtccagaaagcactgcatcctgagcttactagctatattcactctgtgactttcggtcttctacctttcattcagaagggattggtagagagggtcgtggtcatcttctatgacaaagggcatgtaccgaccgagaagttcgtcttcaagcttgcagtcaaccagtcataccgttccaagttagaggaggcgaacctggagttcgctctgcgagcattcttgatcaagctgactgttgctgagcctgttaccagaccccttccaccagatggtagctgggaggtgaccgcctacttccggtccctccccggcgacggtgaccgagaagctcagctgtggattcctacggacgccgagctgtggatgcagcctccgcagatcacccccatcaagtcagtcagctgtgaccctctgacgatgcagctctacttggagcaccctagcgtcacggaaccgaaggagccaccggcataatgacaggagcctgcacctgtgggctgtgatacactgcaatgtatagaatttttttttgcaaggcaactttggcacgaaccctcgagtcagtgaaaccttttttgttcagacagaggcaaggaaactacttctatccagtggcttcaacttctggctagagaaggcgacactgtaacaatcttgggccttgggattttggctgaggctgaggctgaggggggtggcagagacggacgacacatgggtgagaagcacatggctagaagaagagtggggag

SEQ ID NO: 45275 - DNA, 2018 bp, Zea Mays
aagattattcctttcttctcagcgacaccgctcgataccttgcgatcccaagatggcatcgccgccgatacccacacagtaatcctctcctcgctcccctgtcccctctctccccgccgccgacgccgagcctactctgtccatttccggactcgccgtccctcgcgggccggttcggtccgagcctgcgccccagccgcgccgggatccgcgagagaaccgcttgccctccgtgctttgcgggcggtccggtgactggctttgggattcctatgccggggggctcgtgagcgcaatggggctgtttgggtgaactagggcttgcttctgtgaattctgtgagggtgagcggagctgtgggagggaggatgcaggggaaggcacagctctctgattccaaccggcggatcatggagctcgacgcgccgccacggcgggtgtaccaggcgtggaagggcagcaacttatttttccttggtgggagacttatctttggcccagatgtgaggtcactcgtgctcacagtatgtttgattgtagtcccagtgatcttctttgctgccaccgtttgtccacaacttggtcatgagttccacagccaaattggaggttgggtggcatctgtggctgtcatctttacagcatatattcttattgttctacttatcacatctggccgtgatcctggaattgttcctcgaaacactcatcccccagagcctgaagacatcgatgaatcctccaacttaccagattgcccgggtggtcaacaaggttcgacaggtttaccacctacccgggatgttcttgtcaatggtgtttcagtcaaggtcaaatattgccatacatgcatgctttatcgtccgccaagaggaattaccgattcttcttcatgtttgtgtcttcaactactgtactatgcatatacgtgtttgcattctgctgggtcaatctcaggagaattatggacacgcatcaatgcaaaattggtagagctcttttgaagtctcctatctccggtcttctcatcctatacacatttattgctgtgtggtttgtaggaggattgacctcattccacatctatttgatttctacaaatcagactacttatgagaacttcagataccgctatgaccggagaacaaatccttacaaccttggagtgggtcagaatttcatcgacgtcttgttttcaaggatacccagctcaaaacacgatttcagagcaaaagttaaggccgattcttcgaccttcgcgtcatccctcagtatgggacgggttctaagcccacccaagacgagcgtggaccttgagatgggcatgaaaaggcaagcggtggccgcagaggactttgaagacttgcacagccagatcggcagtgctatggggctggagagatgtggcaccgagccgccgcattttgtcggccggaagggctgctctgagatgtcacctgacatagaggcgttcgcagaagagtttggcatggaaggtgggctcagtgagaggaaaaagattgagcggcggacaaatgatgattcgtaggaagtttcccacgtcacaaaccacctcttcggccttcctccaggccccaaacttggtaaaagcttgcaaagaagaaagtgaagtaggacaaaacggacggtagagtgaatcaggcattggttagtttgttttgggtgtcatttctagccaagacttgagttagaagtgaaagatgttccttgacgatatagaaatgatgaatccacatctggtttggacttcttagtctatgtgatgtattggatgtgtggtgtggcagtgttgcttctgattttgttgaaggtgtaatctgttgatttaacttggctatgcattcatttaagcgatcaaatttctgcacttttgcgctaaatctttagatattgttcagataagggtggattgaagggaattaaatcatttgttactgaaaattgaataggaagagatttaatctacattaacccctctgattctcatgcaacttagg

SEQ ID NO: 45276 - DNA, 1930 bp, Zea Mays
aagattattcctttcttctcagcgacaccgctcgataccttgcgatcccaagatggcatcgccgccgatacccacacagtaatcctctcctcgctcccctgtcccctctctccccgccgccgacgccgagcctactctgtccatttccggactcgccgtccctcgcgggccggttcggtccgagcctgcgccccagccgcgccgggatccgcgagagaaccgcttgccctccgtgctttgcgggcggtccggtgactggctttgggattcctatgccggggggctcgtgagcgcaatggggctgtttgggtgaactagggcttgcttctgtgaattctgtgagggtgagcggagctgtgggagggaggatgcaggggaaggcacagctctctgattccaaccggcggatcatggagctcgacgcgccgccacggcgggtgtaccaggcgtggaagggcagcaacttatttttccttggtgggagacttatctttggcccagatgtgaggtcactcgtgctcacagtatgtttgattgtagtcccagtgatcttctttgctgccaccgtttgtccacaacttggtcatgagttccacagccaaattggaggttgggtggcatctgtggctgtcatctttacagcatatattcttattgttctacttatcacatctggccgtgatcctggaattgttcctcgaaacactcatcccccagagcctgaagacatcgatgaatcctccaacttaccagattgcccgggtggtcaacaaggttcgacagaggaattaccgattcttcttcatgtttgtgtcttcaactactgtactatgcatatacgtgtttgcattctgctgggtcaatctcaggagaattatggacacgcatcaatgcaaaattggtagagctcttttgaagtctcctatctccggtcttctcatcctatacacatttattgctgtgtggtttgtaggaggattgacctcattccacatctatttgatttctacaaatcagactacttatgagaacttcagataccgctatgaccggagaacaaatccttacaaccttggagtgggtcagaatttcatcgacgtcttgttttcaaggatacccagctcaaaacacgatttcagagcaaaagttaaggccgattcttcgaccttcgcgtcatccctcagtatgggacgggttctaagcccacccaagacgagcgtggaccttgagatgggcatgaaaaggcaagcggtggccgcagaggactttgaagacttgcacagccagatcggcagtgctatggggctggagagatgtggcaccgagccgccgcattttgtcggccggaagggctgctctgagatgtcacctgacatagaggcgttcgcagaagagtttggcatggaaggtgggctcagtgagaggaaaaagattgagcggcggacaaatgatgattcgtaggaagtttcccacgtcacaaaccacctcttcggccttcctccaggccccaaacttggtaaaagcttgcaaagaagaaagtgaagtaggacaaaacggacggtagagtgaatcaggcattggttagtttgttttgggtgtcatttctagccaagacttgagttagaagtgaaagatgttccttgacgatatagaaatgatgaatccacatctggtttggacttcttagtctatgtgatgtattggatgtgtggtgtggcagtgttgcttctgattttgttgaaggtgtaatctgttgatttaacttggctatgcattcatttaagcgatcaaatttctgcacttttgcgctaaatctttagatattgttcagataagggtggattgaagggaattaaatcatttgttactgaaaattgaataggaagagatttaatctacattaacccctctgattctcatgcaacttagg

SEQ ID NO: 45277 - DNA, 1992 bp, Zea Mays
aagattattcctttcttctcagcgacaccgctcgataccttgcgatcccaagatggcatcgccgccgatacccacacagtaatcctctcctcgctcccctgtcccctctctccccgccgccgacgccgagcctactctgtccatttccggactcgccgtccctcgcgggccggttcggtccgagcctgcgccccagccgcgccgggatccgcgagagaaccgcttgccctccgtgctttgcgggcggtccggtgactggctttgggattcctatgccggggggctcgtgagcgcaatggggctgtttgggtgaactagggcttgcttctgtgaattctgtgagggtgagcggagctgtgggagggaggatgcaggggaaggcacagctctctgattccaaccggcggatcatggagctcgacgcgccgccacggcgggtgtaccaggcgtggaagggcagcaacttatttttccttggtgggagacttatctttggcccagatgtgaggtcactcgtgctcacagtatgtttgattgtagtcccagtgatcttctttgctgccaccgtttgtccacaacttggtcatgagttccacagccaaattggagagcctgaagacatcgatgaatcctccaacttaccagattgcccgggtggtcaacaaggttcgacaggtttaccacctacccgggatgttcttgtcaatggtgtttcagtcaaggtcaaatattgccatacatgcatgctttatcgtccgccaaggtgctcccattgctcaatctgcaacaactgtgtagaacgttttgatcaccactgtccttgggtaggccagtgcattggcaagaggaattaccgattcttcttcatgtttgtgtcttcaactactgtactatgcatatacgtgtttgcattctgctgggtcaatctcaggagaattatggacacgcatcaatgcaaaattggtagagctcttttgaagtctcctatctccggtcttctcatcctatacacatttattgctgtgtggtttgtaggaggattgacctcattccacatctatttgatttctacaaatcagactacttatgagaacttcagataccgctatgaccggagaacaaatccttacaaccttggagtgggtcagaatttcatcgacgtcttgttttcaaggatacccagctcaaaacacgatttcagagcaaaagttaaggccgattcttcgaccttcgcgtcatccctcagtatgggacgggttctaagcccacccaagacgagcgtggaccttgagatgggcatgaaaaggcaagcggtggccgcagaggactttgaagacttgcacagccagatcggcagtgctatggggctggagagatgtggcaccgagccgccgcattttgtcggccggaagggctgctctgagatgtcacctgacatagaggcgttcgcagaagagtttggcatggaaggtgggctcagtgagaggaaaaagattgagcggcggacaaatgatgattcgtaggaagtttcccacgtcacaaaccacctcttcggccttcctccaggccccaaacttggtaaaagcttgcaaagaagaaagtgaagtaggacaaaacggacggtagagtgaatcaggcattggttagtttgttttgggtgtcatttctagccaagacttgagttagaagtgaaagatgttccttgacgatatagaaatgatgaatccacatctggtttggacttcttagtctatgtgatgtattggatgtgtggtgtggcagtgttgcttctgattttgttgaaggtgtaatctgttgatttaacttggctatgcattcatttaagcgatcaaatttctgcacttttgcgctaaatctttagatattgttcagataagggtggattgaagggaattaaatcatttgttactgaaaattgaataggaagagatttaatctacattaacccctctgattctcatgcaacttagg

SEQ ID NO: 45278 - DNA, 1544 bp, Zea Mays
aagattattcctttcttctcagcgacaccgctcgataccttgcgatcccaagatggcatcgccgccgatacccacacattatttttccttggtgggagacttatctttggcccagatgtgaggtcactcgtgctcacagtatgtttgattgtagtcccagtgatcttctttgctgccaccgtttgtccacaacttggtcatgagttccacagccaaattggaggttgggtggcatctgtggctgtcatctttacagcatatattcttattgttctacttatcacatctggccgtgatcctggaattgttcctcgaaacactcatcccccagagcctgaagacatcgatgaatcctccaacttaccagattgcccgggtggtcaacaaggttcgacagaggaattaccgattcttcttcatgtttgtgtcttcaactactgtactatgcatatacgtgtttgcattctgctgggtcaatctcaggagaattatggacacgcatcaatgcaaaattggtagagctcttttgaagtctcctatctccggtcttctcatcctatacacatttattgctgtgtggtttgtaggaggattgacctcattccacatctatttgatttctacaaatcagactacttatgagaacttcagataccgctatgaccggagaacaaatccttacaaccttggagtgggtcagaatttcatcgacgtcttgttttcaaggatacccagctcaaaacacgatttcagagcaaaagttaaggccgattcttcgaccttcgcgtcatccctcagtatgggacgggttctaagcccacccaagacgagcgtggaccttgagatgggcatgaaaaggcaagcggtggccgcagaggactttgaagacttgcacagccagatcggcagtgctatggggctggagagatgtggcaccgagccgccgcattttgtcggccggaagggctgctctgagatgtcacctgacatagaggcgttcgcagaagagtttggcatggaaggtgggctcagtgagaggaaaaagattgagcggcggacaaatgatgattcgtaggaagtttcccacgtcacaaaccacctcttcggccttcctccaggccccaaacttggtaaaagcttgcaaagaagaaagtgaagtaggacaaaacggacggtagagtgaatcaggcattggttagtttgttttgggtgtcatttctagccaagacttgagttagaagtgaaagatgttccttgacgatatagaaatgatgaatccacatctggtttggacttcttagtctatgtgatgtattggatgtgtggtgtggcagtgttgcttctgattttgttgaaggtgtaatctgttgatttaacttggctatgcattcatttaagcgatcaaatttctgcacttttgcgctaaatctttagatattgttcagataagggtggattgaagggaattaaatcatttgttactgaaaattgaataggaagagatttaatctacattaacccctctgattctcatgcaacttagg

SEQ ID NO: 45279 - DNA, 1944 bp, Zea Mays
gtttacgaaaagttatattgtgaaccaaatttatattcagaatcaaatagagaaaaattatattttaagagctaaggtgtcaaataaaaaaccgtttctatttttttaattttgtcagtaatagagcctgcgcaaagggtctttattcgaaataaccttgtttggaagggttaataacgaaggtggcactgaactctccagtcttcacagttgcagacttcagagctcccaagattattcctttcttctcagcgacaccgctcgataccttgcgatcccaagatggcatcgccgccgatacccacacattatttttccttggtgggagacttatctttggcccagatgtgaggtcactcgtgctcacagtatgtttgattgtagtcccagtgatcttctttgctgccaccgtttgtccacaacttggtcatgagttccacagccaaattggaggttgggtggcatctgtggctgtcatctttacagcatatattcttattgttctacttatcacatctggccgtgatcctggaattgttcctcgaaacactcatcccccagagcctgaagacatcgatgaatcctccaacttaccagattgcccgggtggtcaacaaggttcgacaggtttaccacctacccgggatgttcttgtcaatggtgtttcagtcaaggtcaaatattgccatacatgcatgctttatcgtccgccaaggtgctcccattgctcaatctgcaacaactgtgtagaacgttttgatcaccactgtccttgggtaggccagtgcattggcaagaggaattaccgattcttcttcatgtttgtgtcttcaactactgtactatgcatatacgtgtttgcattctgctgggtcaatctcaggagaattatggacacgcatcaatgcaaaattggtagagctcttttgaagtctcctatctccggtcttctcatcctatacacatttattgctgtgtggtttgtaggaggattgacctcattccacatctatttgatttctacaaatcagactacttatgagaacttcagataccgctatgaccggagaacaaatccttacaaccttggagtgggtcagaatttcatcgacgtcttgttttcaaggatacccagctcaaaacacgatttcagagcaaaagttaaggccgattcttcgaccttcgcgtcatccctcagtatgggacgggttctaagcccacccaagacgagcgtggaccttgagatgggcatgaaaaggcaagcggtggccgcagaggactttgaagacttgcacagccagatcggcagtgctatggggctggagagatgtggcaccgagccgccgcattttgtcggccggaagggctgctctgagatgtcacctgacatagaggcgttcgcagaagagtttggcatggaaggtgggctcagtgagaggaaaaagattgagcggcggacaaatgatgattcgtaggaagtttcccacgtcacaaaccacctcttcggccttcctccaggccccaaacttggtaaaagcttgcaaagaagaaagtgaagtaggacaaaacggacggtagagtgaatcaggcattggttagtttgttttgggtgtcatttctagccaagacttgagttagaagtgaaagatgttccttgacgatatagaaatgatgaatccacatctggtttggacttcttagtctatgtgatgtattggatgtgtggtgtggcagtgttgcttctgattttgttgaaggtgtaatctgttgatttaacttggctatgcattcatttaagcgatcaaatttctgcacttttgcgctaaatctttagatattgttcagataagggtggattgaagggaattaaatcatttgttactgaaaattgaataggaagagatttaatctacattaacccctctgattctcatgcaacttagg

SEQ ID NO: 45280 - DNA, 1199 bp, Zea Mays
cttattctgattctgattcttttctcccttagattagagactataaaatggtactactacttaatacttggaattatcgacgtggaagccaactacatcgtggtcaagtcgtaccagtacacgtcgttgacgagcgtgatgctgctggactgctggtcgatcccgtgcgtcatcctgctcacctgggtgttcctcaagaccaagtacggggcgaggaagttcctgggcgtcggggtctgcgtgcttggcctcatcctggtcgtgttctcggacgtccacgcctccgaccgagccaaagggcctaacccgctgaagggcgacctgttcgtgatccttggttcgatgctctacgcctgcagcaatgtcaccgaggagttcgtcatcaagaaaagcaacagggtggagctgatggcgatgctggggcttttcggagcgcttatcagcgccatacaaattagtgtacttgagcgagaagagcttcactccattacatggactagtggtgctgtgctcccttttctcgggttcgcggtagcaatgttcctgttctactcggctgtgccagtaatattgaagttatgcggcgcgaccatgctgaacctctcgctcctgacctcggacatgtgggctgtcctcatccgcatcttcgcttaccatgagaaggtcgactggatctacttcgttgctttcgccgccactgcgggcggcatcgtcttgtactcgtacagtggctctaatgaagtggaggagacggcacaggtggccggggccagcgacgagcacggcaagggccgggacgaggaggctgggacgcggaacccagcgtgaagctctggcgccagccagcaatggaggtgggttgccccctgccaggcatccaggagtgacgagttgttgttgcatgccttgacggcgagtgtagcagagaactttgtcaagtgtcgcaggagactgcttcaagatttgacgacggagatagtattggttttcatgtaaaacaagaacagttggtaacataccgacaccgaaccgtcgtcagaaatgattagatctaagaatcgaagattttacaggtgtttttggtaggtgtgtttggttgagaaatagagcggtttcatttttattttctgatgcttgatttccaataaaagataagcagagcacagttttcgtacgaagctttatcataaataattgaa

SEQ ID NO: 45281 - DNA, 2079 bp, Zea Mays
ctccccccccgctctggtggccgtagcccgtgggatcgaattcgacggaccacgcctcacctaatactatagcggggcttatttaaagcaagaatttcggaggattgggaaaccctagccatttggctcctgatttctttggtcggtcaccacttggtcttctcctctcggccgtcgactaagccgacttcgtcatcacgatggagttccttgccgatttccttctctcctctgagtccacttgtttcggatgtcctccctacctatctgtgttggttggctccgaccactctctattctatggtcggctctatgctctaccttagaatgttggcaatggtcagtgcaagctcagccctgcagaccctcccgatggcaagcacgtccccacgggcaggcgcgtcgccgtcgggagggttcgtgcggaggtcttcagccatcggcgagataagtcacaggtgggcgtaagataaaaacccgacggccactttgccatttgcacaaactgtcagcctcttggtcgtttctctatgacttctatacacccggatctagtcctctttactcgcttcccatactgtgtgtatgattgtatgaaatgtatctgatgtattattcgggatcgagttttgagttgataaaaagcgtagatctgatccccacgttatttctgtgctgtttgtgcgcttaaactgagatttgggcctgatatttattcatcccgaaccccatgtgtctttttcttgaacactgttagtgcatctgtgcacttcggtccagtcgaattttggggaaaaacctaacctgtttcttgcgttctattacactttcttgatctgttcatggtcattgaccaccgacaccgagctcatgtgtggtttctattgactcgatttggggtttgggaaaaccctaaccctagcgtgtcttgtttcttacttggtctgttcacgtttcttggccctggatctgtgaatcccgagccttgtgcggtctctgttgacacgaatttggatttgggttaacaaaccctaatcctaagcagtggaggctctattgatctctcgaatccatgggtatggtcaagaccaagtctcaatgtgtcctaaaaccctagaacttagggttaggtaaaaaaaacctaatggggggacctaattaatctcgtttcttgatttaatctgtctttctgttctcagggtgatgaactatgatgaacaaaattgagtttattcacattgacccgagatcgttctgtgatctcaaaaaccgaatgtggattaggatatctaggggtcttagggttggcctctgataccattgttagattttgtggtgcctaggatcgatttataagcccctaaaatatcaatccataactgcaaaacctcgacggcgagtagatctattctactgagaggaaataggtaacagacctttgttgttgttcatcatgacaaccatggcgacggtgtcttgtagcaaaaaccagtcccctccttcgcctccacctccctgcatgtggcgaagatactgattctcatcgccgatcggcggtggatcgactcctctagtggcatctgcaggggaggctcagatcccgttcctgttggggagatcactgggatcgaagctgttgggggccttcctcttctgaaggtcctaaaaaacgtgactaatatgtttttgtgtaacatagactgctacaggagactttgactttgagatgaaggtatgcgtgatatggagatacaacctgaaggcaggatgaacggatgccgaagttgtggctgaaggagcttcggcttagtttaatgatgaaggtggaagatgaaaccgacctaaaggggaaaatactacttagtccttgatagctcgccttatgattagcagtaaatgttagggacatgaatgtaattttgtctgggctgcgtcccatgcctataaatagatgaacagtaatatcgtactgttcacgctgaattgtaatcactctcgtgtcactcgcgcattctcaccttctagcaagccgaagcatccgagagcaaggaccaacattggttcccacctccggtgaac

SEQ ID NO: 45282 - DNA, 838 bp, Zea Mays
ctccccccccgctctggtggccgtagcccgtgggatcgaattcgacggaccacgcctcacctaatactatagcggggcttatttaaagcaagaatttcggaggattgggaaaccctagccatttggctcctgatttctttggtcggtcaccacttggtcttctcctctcggccgtcgactaagccgacttcgtcatcacgatggagttccttgccgatttccttctctcctctgagtccacttgtttcggatgtcctccctacctatctgtgttggttggctccgaccactctctattctatggtcggctctatgctctaccttagaatgttggcaatggtcagtgcaagctcagccctgcagaccctcccgatggcaagcacgtccccacgggcaggcgcgtcgccgtcgggagggttcgtgcggaggtcttcagccatcggcgagataagtcacagactgctacaggagactttgactttgagatgaaggtatgcgtgatatggagatacaacctgaaggcaggatgaacggatgccgaagttgtggctgaaggagcttcggcttagtttaatgatgaaggtggaagatgaaaccgacctaaaggggaaaatactacttagtccttgatagctcgccttatgattagcagtaaatgttagggacatgaatgtaattttgtctgggctgcgtcccatgcctataaatagatgaacagtaatatcgtactgttcacgctgaattgtaatcactctcgtgtcactcgcgcattctcaccttctagcaagccgaagcatccgagagcaaggaccaacattggttcccacctccggtgaac

SEQ ID NO: 45283 - DNA, 501 bp, Zea Mays
ctccaagagcctgcaaagggtggtgacttccaatccgaagcagatctatgagattaaggacttcctcctcaccgcgaggaggaaggatgcccgctcagtgaagatcaagaggagcaaggatgttgtcaagttcaaggtgcgctgctccaagtacttgtacacgctctgcgtcttcgatgctgagaaggcaaacaagttgaagcaatctcttcccccaggtttgaccgtcgaggaggtctgattggatacatggcaacgccgggttgaactacccaagcttctttatcagtagcagagcatgctactcatgtacttttggaacctaagctattagacctgtcagtgttggatgtgtggatcttgcatttttgtggagaaataccaatttacctcgttcaaggatgcacctttcagtatatttcttgtttaactgcacattactttatatttatgcctgtttcatacctttcctctacaaacatagttactagatttttgtgc

SEQ ID NO: 45284 - DNA, 411 bp, Zea Mays
cccacctgcagcgagcgaggacgtgggcatttctggaatcgccccagtctagggtttcacctgcgtgccctatataattctctccatccacacccgccgtcgtctccgcatttccatcctgtcgtgggatcccagccaccgccgctagaagaagagctcggcgattcccaggtcccgcgagaagatgccgaagcagatctatgagattaaggacttcctcctcaccgcgaggaggaaggatgcccgctcagtgaagatcaagaggagcaaggatgttgtcaagttcaaggtgcgctgctccaagtacttgtacacgctctgcgtcttcgatgctgagaaggcaaacaagttgaagcaatctcttcccccaggttcagtcccattgaagaaaatattatttgaccatagatg

SEQ ID NO: 45285 - DNA, 2031 bp, Zea Mays
ggaataaggaggagccatgattggaagtccccccaataggccaaaacaagcatgacgcgattggccgtccccaacggccaacgagttgtccgccccgcccctcgctttcgtccccgttttccggtgccttgcttccccctcctcactcaaatgcctcacaggccgaggctccgaggccgcggggaggaggaggagcggcagccagcaggggaggaggacacgaatcgtagtcggcctcccgcccgccccggcaattgttgttgctgctgcgcgcagggcggttctggattgcggtctgccccacccacgaacaatccatggctccatctccgcctcggcgtgctgcgctcctcctcgccacggtgcttctgctggcggcggccgggtccacccccggcgccacggctgctggcatcttccaggtgcgccgcaagttcaccgccggggtgggagggggtgctggcgccaacatcagcgcccttcgcgcccacgatggcacccgtcacggccgcctcctcgcagccgccgacctccctcttggcggcctcggcctccccactgacactggcctctattacacggagatcaagctcgggacgccacccaagcactactacgtccaggtcgacaccggcagcgacatcctctgggtcaactgcatcacctgcgagcaatgcccccacaagagcgggctcgggttagacttgacgctttacgaccccaaggcatcctcgaccgggagcatggtgatgtgcgatcaggcattctgtgcagccacctttggcggaaagctgccgaagtgcggcgccaatgtgccctgcgaatatagtgtcacctacggtgatggtagctcgacgataggttcctttgtcaccgatgcgctgcagtttgatcaggtgactagggatgggcagacacagccggctaatgccagcgtcattttcgggtgcggtgctcaacaaggtggggatttgggaagttcaaaccaagcccttgacggaattcttggttttggtgaggcaaatacatcaatgctatcacaactaactaccgctggtaaagtgaagaagatatttgcccattgtttggataccataaaaggaggtggaattttttctattggggatgtggtgcagccaaaagtaaaaacaacgccattggtagccgacaagccacactacaatgtgaaccttaagacaatcgatgttggtggcactactctacaactcccagctcatatttttgaaccaggagaaaaaaagggtaccataatcgacagtggtaccaccttgacataccttccagaattggttttcaaagaagtaatgctcgcgtgtagatgatggattcccaaccatcacattccattttgaggatgatcttgcactacatgtgtatccccatgagtactttttcgcaaatgggaatgacgtatactgcgtgggattccaaaatggtgcatcacagtcaaaggatggaaaggacattgtgcttatgggagatcttgtcctttccaacaagttggttatctatgacttggaaaatcgagtcattgggtggactgactacaactgttcgtcgagcattaaaattaaggacgacaaaacgggcgcaacatctactgttaattcacatgacttgtcctcaggatggaagttccactggcacatgtccccggttctattgttggtaacaacggtgtgcagttatttaatatgctaactccactgtacaggaaatccatctggttcgtatatcctttccacgaaaaggatcggagagatgtagggctatctttaggttgtgttctccgaccacggaaaacaatggaaatagaaaaatactgtaatgctatactgagccattgtttgactagggtaatgccgaggtgaccgcacgtgagttcagtttcccgtttaaaaaatatgcatgtacagcagcaatgtatatggccaaataagaatttcttttgtttgcagtacagcaatgttctgtcatttctttgggaaaacaattgttgtttagtgtgag

SEQ ID NO: 45286 - DNA, 2097 bp, Zea Mays
ggaataaggaggagccatgattggaagtccccccaataggccaaaacaagcatgacgcgattggccgtccccaacggccaacgagttgtccgccccgcccctcgctttcgtccccgttttccggtgccttgcttccccctcctcactcaaatgcctcacaggccgaggctccgaggccgcggggaggaggaggagcggcagccagcaggggaggaggacacgaatcgtagtcggcctcccgcccgccccggcaattgttgttgctgctgcgcgcagggcggttctggattgcggtctgccccacccacgaacaatccatggctccatctccgcctcggcgtgctgcgctcctcctcgccacggtgcttctgctggcggcggccgggtccacccccggcgccacggctgctggcatcttccaggtgcgccgcaagttcaccgccggggtgggagggggtgctggcgccaacatcagcgcccttcgcgcccacgatggcacccgtcacggccgcctcctcgcagccgccgacctccctcttggcggcctcggcctccccactgacactggcctctattacacggagatcaagctcgggacgccacccaagcactactacgtccaggtcgacaccggcagcgacatcctctgggtcaactgcatcacctgcgagcaatgcccccacaagagcgggctcgggttagacttgacgctttacgaccccaaggcatcctcgaccgggagcatggtgatgtgcgatcaggcattctgtgcagccacctttggcggaaagctgccgaagtgcggcgccaatgtgccctgcgaatatagtgtcacctacggtgatggtagctcgacgataggttcctttgtcaccgatgcgctgcagtttgatcaggtgactagggatgggcagacacagccggctaatgccagcgtcattttcgggtgcggtgctcaacaaggtggggatttgggaagttcaaaccaagcccttgacggaattcttggttttggtgaggcaaatacatcaatgctatcacaactaactaccgctggtaaagtgaagaagatatttgcccattgtttggataccataaaaggaggtggaattttttctattggggatgtggtgcagccaaaagtaaaaacaacgccattggtagccgacaagccacactacaatgtgaaccttaagacaatcgatgttggtggcactactctacaactcccagctcatatttttgaaccaggagaaaaaaagggtaccataatcgacagtggtaccaccttgacataccttccagaattggttttcaaagaagtaatgctcgcggtatttaacaagcatcaggatataaccttccatgatgttcaaggttttttgtgtttccaatatcctggaagatgatggattcccaaccatcacattccattttgaggatgatcttgcactacatgtgtatccccatgagtactttttcgcaaatgggaatgacgtatactgcgtgggattccaaaatggtgcatcacagtcaaaggatggaaaggacattgtgcttatgggagatcttgtcctttccaacaagttggttatctatgacttggaaaatcgagtcattgggtggactgactacaactgttcgtcgagcattaaaattaaggacgacaaaacgggcgcaacatctactgttaattcacatgacttgtcctcaggatggaagttccactggcacatgtccccggttctattgttggtaacaacggtgtgcagttatttaatatgctaactccactgtacaggaaatccatctggttcgtatatcctttccacgaaaaggatcggagagatgtagggctatctttaggttgtgttctccgaccacggaaaacaatggaaatagaaaaatactgtaatgctatactgagccattgtttgactagggtaatgccgaggtgaccgcacgtgagttcagtttcccgtttaaaaaatatgcatgtacagcagcaatgtatatggccaaataagaatttcttttgtttgcagtacagcaatgttctgtcatttctttgggaaaacaattgttgtttagtgtgag

SEQ ID NO: 45287 - DNA, 2421 bp, Zea Mays
tgagcttccacctacatagtatggagattagttgtggataacctagaaaatggaataaggaggagccatgattggaagtccccccaataggccaaaacaagcatgacgcgattggccgtccccaacggccaacgagttgtccgccccgcccctcgctttcgtccccgttttccggtgccttgcttccccctcctcactcaaatgcctcacaggccgaggctccgaggccgcggggaggaggaggagcggcagccagcaggggaggaggacacgaatcgtagtcggcctcccgcccgccccggcaattgttgttgctgctgcgcgcagggcggttctggattgcggtctgccccacccacgaacaatccatggctccatctccgcctcggcgtgctgcgctcctcctcgccacggtgcttctgctggcggcggccgggtccacccccggcgccacggctgctggcatcttccaggtgcgccgcaagttcaccgccggggtgggagggggtgctggcgccaacatcagcgcccttcgcgcccacgatggcacccgtcacggccgcctcctcgcagccgccgacctccctcttggcggcctcggcctccccactgacactggcctctattacacggagatcaagctcgggacgccacccaagcactactacgtccaggtcgacaccggcagcgacatcctctgggtcaactgcatcacctgcgagcaatgcccccacaagagcgggctcgggttagacttgacgctttacgaccccaaggcatcctcgaccgggagcatggtgatgtgcgatcaggcattctgtgcagccacctttggcggaaagctgccgaagtgcggcgccaatgtgccctgcgaatatagtgtcacctacggtgatggtagctcgacgataggttcctttgtcaccgatgcgctgcagtttgatcaggtgactagggatgggcagacacagccggctaatgccagcgtcattttcgggtgcggtgctcaacaaggtggggatttgggaagttcaaaccaagcccttgacggaattcttggttttggtgaggcaaatacatcaatgctatcacaactaactaccgctggtaaagtgaagaagatatttgcccattgtttggataccataaaaggaggtggaattttttctattggggatgtggtgcagccaaaagtaaaaacaacgccattggtagccgacaagccacactacaatgtgaaccttaagacaatcgatgttggtggcactactctacaactcccagctcatatttttgaaccaggagaaaaaaagggtaccataatcgacagtggtaccaccttgacataccttccagaattggttttcaaagaagtaatgctcgcggtatttaacaagcatcaggatataaccttccatgatgttcaaggttttttgtgtttccaatatcctggaaggtatggtttagtagtttacacagttgtaaaagtactaattattacctgcaattccttccatgctgtgtttcactgaaatatatttattgaattattcgatggataatgtcctctaatacttctttcatgaattgacatcctcgtctgtttgcagttgctctgttttcatttgaattggcacaaagacgaatcaccggctgaccggcccatatattagattctcttgctatgattatgattctaactgttgtgttcatttctcttgcagtgtagatgatggattcccaaccatcacattccattttgaggatgatcttgcactacatgtgtatccccatgagtactttttcgcaaatgggaatgacgtatactgcgtgggattccaaaatggtgcatcacagtcaaaggatggaaaggacattgtgcttatgggagatcttgtcctttccaacaagttggttatctatgacttggaaaatcgagtcattgggtggactgactacaactgttcgtcgagcattaaaattaaggacgacaaaacgggcgcaacatctactgttaattcacatgacttgtcctcaggatggaagttccactggcacatgtccccggttctattgttggtaacaacggtgtgcagttatttaatatgctaactccactgtacaggaaatccatctggttcgtatatcctttccacgaaaaggatcggagagatgtagggctatctttaggttgtgttctccgaccacggaaaacaatggaaatagaaaaatactgtaatgctatactgagccattgtttgactagggtaatgccgaggtgaccgcacgtgagttcagtttcccgtttaaaaaatatgcatgtacagcagcaatgtatatggccaaataagaatttcttttgtttgcagtacagcaatgttctgtcatttctttgggaaaacaattgttgtttagtgtgag

SEQ ID NO: 45288 - DNA, 921 bp, Zea Mays
atactccctgacgcccttaccctcacaagtcgcagccaggtctctctgtccgccgaagtcctccctcgtcgcgagagacgagtcgcgttcctgttcgccgcccccgccgcccatctcccaatccggactcaggagatcgactcctcctctcggttgaggttgaaggggaaggaactagaaggctactcaagggatggctgaggatgcttctcacggggccagcagctcgactgtgatacctgctgatggtccagagtctaccatcgagatcaacatcaagaccctggattcacaagtccacaaacttcgcgtggataagaatatgttaatatgtgtgttatgcaatggttcgggagagcaagtaataaccgcctcatttttaggcgcctgtttccgttctaaaagagaaggttgttgaagcgactggagttccattggatcagcagcgcttgatttttcgaggaagagtcttgaaggatgaccacctcctatcagaataccatttggaggatgggtatacattgcatctggttgctcggcgtgcagcagaggcccagacttcttctggggcttctgaaggaaacacaaatgctaatgtaaacgttactggaaatggaggattgttggatgatatttccaggagtgttcgggatcttctgggttccttaggtgttgcaatgtctggtggtgtcactaacacggcattttcggttcctttgactagcacaccagaagggcccaataatgtgcctggaagaactcagccaatgaacccagcacaacctggattctcagttctaaatcatcaaatacaagtaacacaacttcatccgccaggagctattcctcgcaatatgattctttgacaactctttcggagtacatggatcgcattgacagagtactacagaataatggtac

SEQ ID NO: 45289 - DNA, 484 bp, Zea Mays
cacgcgctccccaaggccccaaatactccctgacgcccttaccctcacaagtcgcagccaggtctctctgtccgccgaagtcctccctcgtcgcgagagacgagtcgcgttcctgttcgccgcccccgccgcccatctcccaatccggactcaggagatcgactcctcctctcggttgaggttgaaggggaaggaactagaaggctactcaagggatggctgaggatgcttctcacggggccagcagctcgactgtgatacctgctgatggtccagagtctaccatcgagatcaacatcaagaccctggattcacaagtccacaaacttcgcgtggataagaatggagatgcgtcgaacccaggaccttcggctcagtggaaaggcttctcaccactgcgctaggcttgtcttttctattttcccacttgtatggttttaaaatgctttgctgtgtcatttaccattcctatgtgtttgttagt

SEQ ID NO: 45290 - DNA, 4999 bp, Zea Mays
  misc_feature (4999)..(4999): n is a, c, g, or t
cacacgcacgcacatccactatccccggaccccgggccagtctcacctccttccctcgatcgcacgccactcccgtaggaatcccgaatccccccacccaaattcccgtctagccgtctacccgatcgccgtccttctcgctgcccgtaaaccctagcccagccctctacccccgccgtcgttgcccgtgcgctgtcgtgctcgggctgcccccgcggcgccgcgagccaaaccctagctgcctcctccagatcccgattccgcagggaagccggagaggtgagggccgccccgccgcagatggagcccgcgggggcgcgcaaggagtggcgcgccgtccccgactcctcgctccgctccaatggcgccgaggatgccgcggagcatgggaagctggggcagtcggaggaacgagctatctacgaggaaggggcgggtggactgggcgacttctgtaccatcactattgatgggagcggagggctcagcgaggacatcctgcagcagcgcctgcaaagtgtcgcacggcagcgggaggagctgcagcaagtcgagatcgagttgcgtgcgcaggccattgcacacccgcagatcatcgaggcgcaacaaagcttccaggctgctgccaaggagcatgctgcagctgtggcaaagatcaaggagcaattgcatgagcgggagcagtacattcttgaattagaaatgaaactcaatgacaaggatagagaactaaatgctctgaagattgatcatcaaacggtgtgggcaaatcaagatcttctcagagaacagaccaaagagctggcaagtgtcagaagggaacgtgacaactctgaagctgaaagagcccaacatcttaaacaaatccacgatctccaggaacttttgcgagaaaaagaaagccagttcattgcaatagaggaacagcatagggctgctcaagagaacattctttacaaagatgagcagttgagggaagcccatgcttgggtttctcaagttcgagaaatggatgcattgcagtctcagtccctacaagttgagttacgtgagcgcatggagcaatttaatcaatattggattagttctcaacaacagtatgctgaaatgcagcggagccttctccatacaatacaacaactccagcaagaattagctgaggcaagggaacggtctggtgcacaaaaggatggcccacatgtttctagggagggatcagctgaatcatcacttgttcaaagcatagcgaacagcgtgacttcaaatggtagtgcaactgcagatgggagccagcaactgttgaaaaacaatggaagtgtggatgtctctcttaagggcaataatgcctcagctgtacctgttccatctttattgggaataggtggtccggctgcgcatattgctgcaatgcattcttttatgattcatcctcaaggcattcctcaacctttagcatcacccaactctggcattcctcagtttggcagttttcagacacagcctatgattcaaccaaactcacattggccaaatcagcaggaagtacaaattgtctcacaaccacaagatgaaacaaactatcagacatcccaatcaggtcagactgcattgcaacaagacactattaatactgatgagctgtcccccaaggcaagtgagggtggccatccagaccatcttaatgcccaggggaaacaacagcagagccctgcaagtgcacctactgaatcaactcatgaacttactgttgttgaaacaaacatagctgaacatgtaccttatgatgaacaacaaaaaaccttaaaagaacaggattcactatcaaatataaaaagccatgttggaagagttgagcctcaagagcaaaatgctgaatccaaggttgaaagagctgcatctgacaagcaatctgaacctcaatctagacagcataaaccttcaaacttccctccaactacccagcttaacttgaaaaacagtgcaacagagaatcctaatgttgtaaatcaggttgatacaatgaaatcagttacaggtggttttggttcacagttacctcgtgtacctaaggaacctgctctcctagatgagagatctctattggcttgtattgtacgtgcagttcctgctggacctgagggtggaatcaggattagctcaactctgccaaataggcttgggaaaatgttggctcctcttcactggcatgattataagaagcaatatgggaagcttgatgattttgtggctagtcgtccagagctgtttgtgattgagggagacttcattcaccttcgtgaaggagcacagcagatcatttctgctactacagctgctgcaaaaatagctgctgctacagcatcttctgccccttactcatccttactgccttctgttgctgttactcctgtggcacaaagcactcggcaaaagaggggccctgcagttgattccagatcatcaaatgcaattctttctggaaatggcttcacagatcaatttaacatcattcagggggttagtgacgtacctgtttcaggcaaagtaagaaacaccctagataatggcttcttaggtgaagttcgaactgggcagccatctgtgctcacagctgctgcgaatggagcaagacatgacaaaggtacaaataatgtcatacagggttatggtggaaagcaacaagggaggtcaactgggatggcttacctttccagaagatgaagtagttttcactcgctttgcgctgcagaggaggggcggtggctctgcagggggagaacggtggctgctgcagcagggggagaccggaggctgctgcagcaggggagaccggcggctctctaccgcagaggaggggcggcggctctgcagcagaggggcgcggctgttgcagaggagaggcgcgcagaggaagggcggcgactgctgtagcagaggaggggcggcggctatgtgctgcagagggcgaccggcggcttcaggtaagttagggtttatgtgtaggtttagatttgttaatgggcctttggttgggccgtaaagggacaagtcgaccgacttcttagcccacttattttttcagtcgtcggcaagtcgggcgacttacgagaaaagtcgagtcggacctccaagtcggtctctgaagaccgcctggacgactagtcgacgacttgaaaacagggatcaaaatcttagggcttatttgggaacacggtattttcttagttccaagataataccgtggtatttgagcataccatggtattttagaccaaaaagcgtttgggagcacatacaagaactctgtattttaaaccatggttttgccaataccatggtatttttggggtcaaaaaaactttggtctagtccaaagtttttttttgcttgcacgcagctacagtcttcttttcccctacactacaactaaaatactatgtttccaaataggtgttggattggactgatataaaatatacaatagttatgtcatggcatacattaaaccgtggtattataaacggtattataatttataaactgtggttttgagaaacaaacttctagaacaggcccttattgacataaattgcataatataagaggttagtggtcaaagtgtgatcttgaagatcaccaaagtcaaatcacgccttatctttttggaccgagtatttggttttataccgctttttagggtccctttagttgggcttttgaaccagtttttgccatagtcacaatgttcccgagtcgattgtgttgagtaagagtcgtgggtcgacacttgaaaaaatatggtagaaggagcgtgttatacctctatggtatgtgaatcgtgggtttggtacgtgaacccaattctaatgggtcaataatcccaggtcgactccatgggtcgaggttcgtgttccaaaattccaaggaccctacgtgctatgcctcactggcctagcctagtactaccttaacacaacataacaccagcccaattaccaacccattatagcaatgaagccctgtacttctgccctagactcacataggagccatagagctcatatagcagaagcatcgccgcccagcccaggacctctggaacctgcaggaggagcactgatgcaagaatccagagtgtcaccatttgctggccataggaggatctccgtcctcgtctccttacacatcgacatcgctttgctgtcatctgcgctgccttgccccaatctgagctgccctgccccaacctgcatgatcctccatcacgaacgagcactggtcgtcgtccccatctgtattggtacgatgactccctagcgtttgggacgattacctatggtgacctagacccacgatttgggatgccgaccttgggtcatggaatgcggcattgaccctgtttctgtgactatggtttttgcttttgcaaaagcaaaaagacagccaaagggggctgaaaagccacaattgcattggaccaaaagctgcttttgcctaatacaagagctgaaagcaacttcctctgcttttacctcttgtgaaggcctgcatttgactgaaaacagctcatcctctgttcggtgggcgatgctccttcctctcccgtggttggatctggcgactcctctagccttctcagtgtgaggctatccccttgaccatgtccttggtcgccatgtggacgagcgtgggccttttgccgttggtgagcatgatctcgactgccatacgggaagcgccacctcagctgggtatccatccgaaggaagaatgaggctgacggatggggccacttgtcactaagagaagttgacaataggttccccccccccccccccccccaaaaaaaacaactattgaaccaaatggctttcatctctggtacaatccataacccacaattgctttttcacagcccacatccataatccgcattagcttttcaaaagccacaactcaaccaaacaaacccttagaagccttttgcaattttgatacn

SEQ ID NO: 45291 - DNA, 4993 bp, Zea Mays
  misc_feature (4993)..(4993): n is a, c, g, or t
cacacgcacgcacatccactatccccggaccccgggccagtctcacctccttccctcgatcgcacgccactcccgtaggaatcccgaatccccccacccaaattcccgtctagccgtctacccgatcgccgtccttctcgctgcccgtaaaccctagcccagccctctacccccgccgtcgttgcccgtgcgctgtcgtgctcgggctgcccccgcggcgccgcgagccaaaccctagctgcctcctccagatcccgattccgcagggaagccggagaggtgagggccgccccgccgcagatggagcccgcgggggcgcgcaaggagtggcgcgccgtccccgactcctcgctccgctccaatggcgccgaggatgccgcggagcatgggaagctggggcagtcggaggaacgagctatctacgaggaaggggcgggtggactgggcgacttctgtaccatcactattgatgggagcggagggctcagcgaggacatcctgcagcagcgcctgcaaagtgtcgcacggcagcgggaggagctgcagcaagtcgagatcgagttgcgtgcgcaggccattgcacacccgcagatcatcgaggcgcaacaaagcttccaggctgctgccaaggagcatgctgcagctgtggcaaagatcaaggagcaattgcatgagcgggagcagtacattcttgaattagaaatgaaactcaatgacaaggatagagaactaaatgctctgaagattgatcatcaaacggtgtgggcaaatcaagatcttctcagagaacagaccaaagagctggcaagtgtcagaagggaacgtgacaactctgaagctgaaagagcccaacatcttaaacaaatccacgatctccaggaacttttgcgagaaaaagaaagccagttcattgcaatagaggaacagcatagggctgctcaagagaacattctttacaaagatgagcagttgagggaagcccatgcttgggtttctcaagttcgagaaatggatgcattgcagtctcagtccctacaagttgagttacgtgagcgcatggagcaatttaatcaatattggattagttctcaacaacagtatgctgaaatgcagcggagccttctccatacaatacaacaactccagcaagaattagctgaggcaagggaacggtctggtgcacaaaaggatggcccacatgtttctagggagggatcagctgaatcatcacttgttcaaagcatagcgaacagcgtgacttcaaatggtagtgcaactgcagatgggagccagcaactgttgaaaaacaatggaagtgtggatgtctctcttaagggcaataatgcctcagctgtacctgttccatctttattgggaataggtggtccggctgcgcatattgctgcaatgcattcttttatgattcatcctcaaggcattcctcaacctttagcatcacccaactctggcattcctcagtttggcagttttcagacacagcctatgattcaaccaaactcacattggccaaatcagcaggaagtacaaattgtctcacaaccacaagatgaaacaaactatcagacatcccaatcaggtcagactgcattgcaacaagacactattaatactgatgagctgtcccccaaggcaagtgagggtggccatccagaccatcttaatgcccaggggaaacaacagcagagccctgcaagtgcacctactgaatcaactcatgaacttactgttgttgaaacaaacatagctgaacatgtaccttatgatgaacaacaaaaaaccttaaaagaacaggattcactatcaaatataaaaagccatgttggaagagttgagcctcaagagcaaaatgctgaatccaaggttgaaagagctgcatctgacaagcaatctgaacctcaatctagacagcataaaccttcaaacttccctccaactacccagcttaacttgaaaaacagtgcaacagagaatcctaatgttgtaaatcaggttgatacaatgaaatcagttacaggtggttttggttcacagttacctcgtgtacctaaggaacctgctctcctagatgagagatctctattggcttgtattgtacgtgcagttcctgctggacctgagggtggaatcaggattagctcaactctgccaaataggcttgggaaaatgttggctcctcttcactggcatgattataagaagcaatatgggaagcttgatgattttgtggctagtcgtccagagctgtttgtgattgagggagacttcattcaccttcgtgaaggagcacagcagatcatttctgctactacagctgctgcaaaaatagctgctgctacagcatcttctgccccttactcatccttactgccttctgttgctgttactcctgtggcacaaagcactcggcaaaagaggggccctgcagttgattccagatcatcaaatgcaattctttctggaaatggcttcacagatcaatttaacatcattcaggggccatctgtgctcacagctgctgcgaatggagcaagacatgacaaaggtacaaataatgtcatacagggttatggtggaaagcaacaagggaggtcaactgggatggcttacctttccagaagatgaagtagttttcactcgcaacatcaccatgaccaccaacaaggtgctgcttcaaccttctaacacctgcatgaacgattttgccacaaactttgcgctgcagaggaggggcggtggctctgcagggggagaacggtggctgctgcagcagggggagaccggaggctgctgcagcaggggagaccggcggctctctaccgcagaggaggggcggcggctctgcagcagaggggcgcggctgttgcagaggagaggcgcgcagaggaagggcggcgactgctgtagcagaggaggggcggcggctatgtgctgcagagggcgaccggcggcttcaggtaagttagggtttatgtgtaggtttagatttgttaatgggcctttggttgggccgtaaagggacaagtcgaccgacttcttagcccacttattttttcagtcgtcggcaagtcgggcgacttacgagaaaagtcgagtcggacctccaagtcggtctctgaagaccgcctggacgactagtcgacgacttgaaaacagggatcaaaatcttagggcttatttgggaacacggtattttcttagttccaagataataccgtggtatttgagcataccatggtattttagaccaaaaagcgtttgggagcacatacaagaactctgtattttaaaccatggttttgccaataccatggtatttttggggtcaaaaaaactttggtctagtccaaagtttttttttgcttgcacgcagctacagtcttcttttcccctacactacaactaaaatactatgtttccaaataggtgttggattggactgatataaaatatacaatagttatgtcatggcatacattaaaccgtggtattataaacggtattataatttataaactgtggttttgagaaacaaacttctagaacaggcccttattgacataaattgcataatataagaggttagtggtcaaagtgtgatcttgaagatcaccaaagtcaaatcacgccttatctttttggaccgagtatttggttttataccgctttttagggtccctttagttgggcttttgaaccagtttttgccatagtcacaatgttcccgagtcgattgtgttgagtaagagtcgtgggtcgacacttgaaaaaatatggtagaaggagcgtgttatacctctatggtatgtgaatcgtgggtttggtacgtgaacccaattctaatgggtcaataatcccaggtcgactccatgggtcgaggttcgtgttccaaaattccaaggaccctacgtgctatgcctcactggcctagcctagtactaccttaacacaacataacaccagcccaattaccaacccattatagcaatgaagccctgtacttctgccctagactcacataggagccatagagctcatatagcagaagcatcgccgcccagcccaggacctctggaacctgcaggaggagcactgatgcaagaatccagagtgtcaccatttgctggccataggaggatctccgtcctcgtctccttacacatcgacatcgctttgctgtcatctgcgctgccttgccccaatctgagctgccctgccccaacctgcatgatcctccatcacgaacgagcactggtcgtcgtccccatctgtattggtacgatgactccctagcgtttgggacgattacctatggtgacctagacccacgatttgggatgccgaccttgggtcatggaatgcggcattgaccctgtttctgtgactatggtttttgcttttgcaaaagcaaaaagacagccaaagggggctgaaaagccacaattgcattggaccaaaagctgcttttgcctaatacaagagctgaaagcaacttcctctgcttttacctcttgtgaaggcctgcatttgactgaaaacagctcatcctctgttcggtgggcgatgctccttcctctcccgtggttggatctggcgactcctctagccttctcagtgtgaggctatccccttgaccatgtccttggtcgccatgtggacgagcgtgggccttttgccgttggtgagcatgatctcgactgccatacgggaagcgccacctcagctgggtatccatccgaaggaagaatgaggctgacggatggggccacttgtcactaagagaagttgacaataggttccccccccccccccccccccaaaaaaaacaactattgaaccaaatggctttcatctctggtacaatccataacccacaattgctttttcacagcccacatccataatccgcattagcttttcaaaagccacaactcaaccaaacaaacccttagaagccttttgcaattttgatacn

SEQ ID NO: 45292 - DNA, 783 bp, Zea Mays
ttctacggttgaaagagctgcatctgacaagcaatctgaacctcaatctagacagcataaaccttcaaacttccctccaactacccagcttaacttgaaaaacagtgcaacagagaatcctaatgttgtaaatcaggttgatacaatgaaatcagttacaggtggttttggttcacagttacctcgtgtacctaaggaacctgctctcctagatgagagatctctattggcttgtattgtacgtgcagttcctgctggacctgagggtggaatcaggattagctcaactctgccaaataggcttgggaaaatgttggctcctcttcactggcatgattataagaagcaatatgggaagcttgatgattttgtggctagtcgtccagagctgtttgtgattgagggagacttcattcaccttcgtgaaggagcacagcagatcatttctgctactacagctgctgcaaaaatagctgctgctacagcatcttctgccccttactcatccttactgccttctgttgctgttactcctgtggcacaaagcactcggcaaaagaggggccctgcagttgattccagatcatcaaatgcaattctttctggaaatggcttcacagatcaatttaacatcattcagggggttagtgacgtacctgtttcaggcaaagtaagaaacaccctagataatggcttcttaggtgaagttcgaactgggcagccatctgtgctcacagctgctgcgaatggagcaagacatgacaaaggtacaaataatgtcat

SEQ ID NO: 45293 - DNA, 447 bp, Zea Mays
gcatggtgaagatcatactggctaacataagtacgcagggcacgggaaagcaacaggtcaagaagaagcactgaaggagcagcaggatggggcatcgggagaagctcacattcaaactcactaagtgcgaatcattatcattattatttatgttacatttcgtaaaccaaacagcacctaaagccagcctcatcatggtcatgtgttgtgtgctctgtggtctgcgctgcttcctgctcctgcgaggaaataggaatttgaaggtttaatgctggcctaacaagggtcctcactgactggctgctagtctcttctgtctttgtacatataagacgatatgtagcggttattcctaaatttctctccatatatcctacttttacgccacatcgtcaagattttgtctcctgtttttcatcttctgcagcggtttcctcaaaatacttt

SEQ ID NO: 45294 - DNA, 1140 bp, Zea Mays
gctgtcaagattcaaaaactgaaacaatgacaaacaacacagttccattttctgaatcttaataattacactgtttgcgctccccttggatctactcgtattcctttacatgattagttactactaattcatttctctcctagaaatttatgcacacttttgcaacaagacctttcttcccagcccttttctacagttttgttaggaagtggttgctgcctgaccctagtcgtgtattgcagccatcgcacggcaaattggccagcggcggcggcaggtggtggtgtgagcctgcgaggcttcctacctgcgctggaagtttaggtgcttgatggcgaggaagaagagaaagacgaagaggccaatgatggcaagatggaggcaggtcaccagcacaaagtagcgatcctgcaggcccaggtacccctctaggaactcacgcaccgtctgctccccgagccccggcaccaggatctgctccgtcctgtctgcgagctgtgagaacattagcccataaaccgtccatgccgccggatccgcccagtacacccaccgccaccacacaggcatcatctgcagcaaatttactcaactcgtcagccgattcagatggggggttacctctctcacgattatgaagccagagaagacgttccaaaagataaagatgaggaacgacagccccatggcgatctcgatgttgggggtcagggccaccgtcatcatcccgtatagagtgtagtacatgaagctcatcacctggtataggaagaaccagaagaatttgctcgctgtcacctggaacccaatcattgggtacacgattgatgagaagatcatcacttgcaccaacatgtaagggcacgggaaagcaacaggtcaagaagaagcactgaaggagcagcaggatggggcatcgggagaagctcacattcaaactcactaagaatttgaaggtttaatgctggcctaacaagggtcctcactgactggctgctagtctcttctgtctttgtacatataagacgatatgtagcggttattcctaaatttctctccatatatcctacttttacgccacatcgtcaagattttgtctcctgtttttcatcttctgcagcggtttcctcaaaatacttt

SEQ ID NO: 45295 - DNA, 1264 bp, Zea Mays
gctgtcaagattcaaaaactgaaacaatgacaaacaacacagttccattttctgaatcttaataattacactgtttgcgctccccttggatctactcgtattcctttacatgattagttactactaattcatttctctcctagaaatttatgcacacttttgcaacaagacctttcttcccagcccttttctacagttttgttaggaagtggttgctgcctgaccctagtcgtgtattgcagccatcgcacggcaaattggccagcggcggcggcaggtggtggtgtgagcctgcgaggcttcctacctgcgctggaagtttaggtgcttgatggcgaggaagaagagaaagacgaagaggccaatgatggcaagatggaggcaggtcaccagcacaaagtagcgatcctgcaggcccaggtacccctctaggaactcacgcaccgtctgctccccgagccccggcaccaggatctgctccgtcctgtctgcgagctgtgagaacattagcccataaaccgtccatgccgccggatccgcccagtacacccaccgccaccacacaggcatcatctgcagcaaatttactcaactcgtcagccgattcagatggggggttacctctctcacgattatgaagccagagaagacgttccaaaagataaagatgaggaacgacagccccatggcgatctcgatgttgggggtcagggccaccgtcatcatcccgtatagagtgtagtacatgaagctcatcacctggtataggaagaaccagaagaatttgctcgctgtcacctggaacccaatcattgggtacacgattgatgagaagatcatcacttgcaccaacatggcacgggaaagcaacaggtcaagaagaagcactgaaggagcagcaggatggggcatcgggagaagctcacattcaaactcactaagtgcgaatcattatcattattatttatgttacatttcgtaaaccaaacagcacctaaagccagcctcatcatggtcatgtgttgtgtgctctgtggtctgcgctgcttcctgctcctgcgaggaaataggaatttgaaggtttaatgctggcctaacaagggtcctcactgactggctgctagtctcttctgtctttgtacatataagacgatatgtagcggttattcctaaatttctctccatatatcctacttttacgccacatcgtcaagattttgtctcctgtttttcatcttctgcagcggtttcctcaaaatacttt

SEQ ID NO: 45296 - DNA, 1441 bp, Zea Mays
gctgtcaagattcaaaaactgaaacaatgacaaacaacacagttccattttctgaatcttaataattacactgtttgcgctccccttggatctactcgtattcctttacatgattagttactactaattcatttctctcctagaaatttatgcacacttttgcaacaagacctttcttcccagcccttttctacagttttgttaggaagtggttgctgcctgaccctagtcgtgtattgcagccatcgcacggcaaattggccagcggcggcggcaggtggtggtgtgagcctgcgaggcttcctacctgcgctggaagtttaggtgcttgatggcgaggaagaagagaaagacgaagaggccaatgatggcaagatggaggcaggtcaccagcacaaagtagcgatcctgcaggcccaggtacccctctaggaactcacgcaccgtctgctccccgagccccggcaccaggatctgctccgtcctgtctgcgagctgtgagaacattagcccataaaccgtccatgccgccggatccgcccagtacacccaccgccaccacacaggcatcatctgcagcaaatttactcaactcgtcagccgattcagatggggggttacctctctcacgattatgaagccagagaagacgttccaaaagataaagatgaggaacgacagccccatggcgatctcgatgttgggggtcagggccaccgtcatcatcccgtatagagtgtagtacatgaagctcatcacctggtataggaagaaccagaagaatttgctcgctgtcacctggaacccaatcattgggtacacgattgatgagaagatcatcacttgcaccaacatgtaaggtaattccaccgacacctgcaacacgtaaaccttcggttcataatctgtgccaagcctgttctggtgatcagaacaactggattttcttaggacaggttgattgttgatgtgttatgttacctgagcgatagcgtatgccatggtggagtacatgcctgccgccttttcacgggcacgggaaagcaacaggtcaagaagaagcactgaaggagcagcaggatggggcatcgggagaagctcacattcaaactcactaagtgcgaatcattatcattattatttatgttacatttcgtaaaccaaacagcacctaaagccagcctcatcatggtcatgtgttgtgtgctctgtggtctgcgctgcttcctgctcctgcgaggaaataggaatttgaaggtttaatgctggcctaacaagggtcctcactgactggctgctagtctcttctgtctttgtacatataagacgatatgtagcggttattcctaaatttctctccatatatcctacttttacgccacatcgtcaagattttgtctcctgtttttcatcttctgcagcggtttcctcaaaatacttt

SEQ ID NO: 45297 - DNA, 744 bp, Zea Mays
ccatggtttcgaacaagtccgtagcattttctcggggaccatgatacacaatttgcccctcacataaaagtataatgtcgtcaaataattccaatgtctcaggcggtggttgcaacaaggaaattaccattgtgagatccatcaaatgggccatctgttggagaaacttcatgatctcaaatgccgtggagctatcaagacctgttgatatatcatccataaagaagcatcttgccagaccaactagcatctcccctgcattaaacaacttcactttagcgtatgccaacttaggttaggttccaatattcctcttctcatctcgtctcctactagggtatcagcacactcagacaggccaagtatctgcatataatcaactgttactattatatcttcaagatatagcaaatcaagcaagtaaccaagttaccttgataatatagtttgttgtgaggttgcttccttctccaaaggtggtggcctgagagaagagctatttgagtaactaaacaaaacataatccagtcttgcaaaaacaaagtagtgcaatggaactaccttaatgaatgaatcaagatcttgatccacttcattgatgacacccttttttcttcttattgcttctcctagcatatctgagtttgtcattccattcaaacaggaaatttgtgtcagtatagatgccatggaaaaattgatttagcttgagtattgtgtagacacttcattcttaagtatttg

SEQ ID NO: 45298 - DNA, 1211 bp, Zea Mays
attttctcctggcaagatgtggctacgataatctaaagccatcgcacggcaaattggccagcggcggcggcaggtggtggtgtgagcctgcgaggcttcctacctgcgctggaagtttaggtgcttgatggcgaggaagaagagaaagacgaagaggccaatgatggcaagatggaggcaggtcaccagcacaaagtagcgatcctgcaggcccaggtacccctctaggaactcacgcaccgtctgctccccgagccccggcaccaggatctgctccgtcctgtctgcgagctgtgagaacattagcccataaaccgtccatgccgccggatccgcccagtacacccaccgccaccacacaggcatcatctgcagcaaatttactcaactcgtcagccgattcagatggggggttacctctctcacgattatgaagccagagaagacgttccaaaagataaagatgaggaacgacagccccatggcgatctcgatgttgggggtcagggccaccgtcatcatcccgtatagagtgtagtacatgaagctcatcacctggtataggaagaaccagaagaatttgctcgctgtcacctggaacccaatcattgggtacacgattgatgagaagatcatcacttgcaccaacatgtaaggtgaacggggacgtccaatatccccagcgcaaccatggttggagatcatctgtttcagtttgcagaattggttaacaacttgttgcacaaacttttagtaaagattgtatgtcttgtactcatgcatgtttcatggtgtatgctaagctacattcatctaaccttttgatatgacgaatcctccaagtatgtagattgcaataagagctgcagtccctagcatgttggccatcacttgcgtccttcctatggccgctaagaagcgatacaagcccattgacatttgatgcatggcaaaaagtaccagaaagtgctggatgaacctgccataagcaatgtaatttcatttcttgcttttacctattgaagctgaagcatcagaagtcattcagcatgtaagtaccaggagatgagtacctgatagcagaaggtgcatatccaatcacatagtaggttaagcctgtccaaaggcctgtctcaacaagcgatattgggatgctaataaggaaaagtgtggagatcaccaaagccataacagttatctgaatggtcttg

SEQ ID NO: 45299 - DNA, 4248 bp, Zea Mays
cgaacaactacttcccctccctatcagatctccttcttcctctagaatctcccttctcctactctcgtcattcctagattatgttgcttggagcggacgctcacaaattgatatcggagacactgatctaagcgctagcacacacctactacacgcgtcgcgcgaaggaatccggatccatggagcccaacctgaagatggcgatcgaggaacaatccaagcttcttcgcgacatctgtgaccacctctttgctcaggagacgcgttggtgcacgctcgagacaaccgtcgcgtggaacaccgcgtcaccgcaacatctggaagccaacatcgccatcgagagtctgacatcgatccacgtggaactcgacgcccaggtcaccgcagcgatcgagcgcctcgatgaagtcgaggccgctttcgtaatgcgcctcggtgccctcgtgtcggcttacgcggccttcgagtcgtggcggcccgacgtggaggcttcggtcgacgagatccacacctccgtgcatcttctgcgtgacgaggtgtccaagtgggctgcccaagcgccgccgccacagctcgataccgccgcgggtattctcggcccgtaccagtcggtggcggagcgctcgcctgctgccgcgtacaacaccgacagcccagatgggaattgcttcgacaaaaatcgctgggggcatggttttgggcatctccttgcccaaaaccatctcccgatcaatggaggagattgtggaggcatcaagaattcgggagtacaagaaatttgattccagtacagccagcaagactccatctcgtggtccttttccgctacctccaccgcccaagtctgctcctggcaagctagtggactctaaagccctagaacatcttgatgcaccagttatggcggattgtctctactccgtctatgctttttgtaaggcctagggcctctgctacaaatgtggattgtcatatttccgaggccatcaatgtccggatactgttccgcttcacttggtagaagaattatggcatcagtttcaacctccatctaaagataatcaatcagtgttggggatcaaagccgagctcagggtgctccatctatgtcagtcggttgtaaccactggagcaaacctgaaaaccatgagatttgtcagctagctagcaagattttcattgctcatttttattagaatcgggtggttcagtttcctttgtcagctccaccataacaaggcactgtccaaatattgttccactctcgactcctttatggatccaagtagcgaatggtgctagtgtgtcttgtgtttcagaggtgctcacagctgattagtctattcaaggataccatttcacctctgacctcaagatattggatctcccaacctatgatatgattgtggggatggattggttgtctacacatagtcctatggtcgtgcattgggcagataagtggctatctctatcaactagtggcatttcagttaagctttttggcgtgcaggcatcacaaacacacggtgctctggtgtagctatgtagcctggataccttgcccgcatctgaacaagaactagtcaaagagcttcccacagatcttcaactgttattggacaagtactcatcagtgttttagttacctactagtcttcctcctgtcagggactgtgatcaccagatccctctgctacccggagctaatcctatgcaaatgtgtccgtatagatatgctccttctttcaaatctgagattgagaaataggtgaatgagatgttggattctgacataatccagcatagcaaaagtcccttcgcatcatcggtaattttggtaaaaaagaaggatgggactcatcggttttgtgtggattatcgccatctaaatgccatcatggctaaggccaagtttcatgtacccataattgatgagtttcttgatgaactccatggggcagcatggttctccactttggatctccgcgctaggtttcatcagatcagaatggcacctcctgatctgtacaaaacaacgttccaaacgtaccatgggcattttgagtttcgttttatggcatttggtctcacgggggcactggctacatttcaaggagcaatgaactgcaccctgaagccattattgcggcagcgcgccctgttattgcttcaagaccactggcaagtcaagcttactaagtgcacatttgcaaaacaagaaatagcttacttggaccatattattagtaaagttggcgtggccactggtccggccaaagtggaggcagttgtatcctggcctacaccaactaactctaaggagttgcgaggttttcttgggttgacaggttattaccgcaaattcgttcaaaacttcggtgtcattgccaagccccttactgctctcctgaagaagcatgttgtgtttttttatgaacatcggatcatgctactgcttttgccttgttgaaatcagcctttgtcttcagcacccgtgttgggcctcctagattttaccaaacaatttgccattgaaacaaatgcttctagagcaggtgtgggggcagtcctgctacaaaacaaccatcctctcgcttacgtaagcaagcctttgggtgtcaagaatatgggtctttctgcttatgaaaaggagaacctcgccatcttgcttgcagtgaatcactggagatcatacttgcagcatggaacattcctcatcttcacgaatcagtgaagcttaactcatctcaatgaacagcgtctgaagactccttggcagtagtgtgtcttcactaaattgttgggactccaataccaggtggtatacaagcagggatcggccaacagggctgtggatgccctctctcggtgtcctcattcgcctctttcactcaatgcaatatcagtgggcactcttcaatggctatcgaatgtggtggtaggatatcatcaagattctcacgccttaaactgttggcagatctgtctaattcctctacaacagatggtccttacaagttgtaggaaggcattattcggtacaaaggccgcatttggattgtccacaatcccacactacaacaacagataatcttctcattgcacgacagttcggttggccactctggttttccagtaacgtacagtcgcctgaaacatctgtttgcctagccagcaatgaagtatgttgtccgacaatacgtctactcctgtgacatctgctcgcgtgccaaatcggatagatctcagtaccctaggttgttacagctgttgcaagttccttcacatgcttggcaggtgttgtctttggatttcatcgaaggcctccccaaatctggcaagtttgactgcattgtcatcgtggtggataaattttcgaaatttgcccatttcattgtcctcgctcatccttttactgcctacaagatagctcaggtgttcttggacagtatctaccgcttacatggtatgcactcggctattatctcggatcgcgatcggatattcacaagtgccttttggcaaggcttgttcaagctttcaggaactgagttacgcatgagcacatcttaccattcgcaaacagatggccagatggccagacagagcgagtaaatcaatgccttgaaaccttcttgcgttgttttgtcagttctcaaccgagccaatggagcaagtggctgcctcttgcagagtattggtacaactcctcattcaattcctccttgggtaaatctccgtttgaggtgttgtatggctatcatccacaccacctgggtatatctacagtagatgcaattcccttgtcagacttgcaatcatggttatagcagagggagcttatgacccatgatgtccgtcatcatctgctatgtgcacagcaacgtatgaagcctcaagcggacaaacgcctatcggaacgtgtctttgctgtcggcgacatggtgtatcttaagcttcagccttatatccagaattcagtggctactcgcgccaaccataagctctcctacatatattttggtccttacaaggtactccaacgtgtcggcagtgtggcatacaggctgcagttaccatcatctccgtcaatccatcccgtattccatgtgtcccagctgaagcccagtgtcaaatcttctattctggtcagcacttctttaccttatacatgtgctcgaccgacgatccttttcttggggcggccacaacgtcgaccaataagttcgagtgcgctggtctggt

SEQ ID NO: 45300 - DNA, 2420 bp, Zea Mays
gtcatctctctcccgcccctagctgatcgtggacttgttaaccgtggatttgtgattggcgatggggaggggccgcaaacgcaaacatagaaccgtaccatgggtggatgtttttgacgacggcagccaacagggaggcagatttgatgaagagggcagatatgtaggcgtagtaatacccggcgtggtaatgcccaataggacggatttggaggagatggcgagaatgacagatgacaagctacggcgggagatcatgctcatcagccgcatgcaccctcggatcgaagtgtttctcaaaagtggacgcggaagtaacctcatccgttgcccgttgctcgaggccgaggcgcgccgccggggcatcaacacgagcatgaagatttttgctgacaaccaataaaatttctatgctaaatttcagatttcctctactatgttgttaagctaattgtccatattttcttactgcttgaatgaatacaaatctgaattatgccattattaaaactgggtttcaacactttaccattaatcgaacgggcttcgcttgaataccattacgaaacttgacataaatgttgtaatgtcgtttcattattttataaagctaaaaaagaaaataagagagatggagagacaattttgctctcttcccccagcgcacggtggtctgtgtgtggccgtgtgggtgtgggtgtggtgtctgtagtctgtactcgtactcgtagatagaggcttcttcaagtgccacctacgcaattgcaattcaagaatgaatcgatggtggagagaaatttggcaaaatgggtcgctctagcttgccgctctgcaaaacacaccgcttctagctgtactcgtaaaaacgggtcgctcaagtctgatcgctcgccagaaggggtcacggatacttttggggcacctggcaagtgggcccgcgaaggcttatcccgattatgcccttacggtataatcgcacatcgtcgtcgtcgtcgcccccgagtgctggccaccacggctagcccacaccggcctcctccgacccatccagccacacggataacttccccaaagatcctatctccttcattaaaataagcattcacagcttcatttagatcatgaccatgttcctgagtaaaaaaacaactggtcatccattgttgctaattttagtccaaaaagacagtcacatttatattaacaatgattatgtgtaatatctgcacttcgtttcttcagttacacattatactatttgactaagaacaacttattatttaatgaaattaaaaccaataggggttaatatgcagcacactgaatgataattatttcttcatttgaaacaacattctttgcatagaatggaaatgccctaaacagattatatttgcagtcagagagagtatttactcatgataacttttgagtcttttactaggttaaaaagtaccaagtttgatgtagcgaaagggtgaatagagaatagctgatagatagaaaaatattcgatgtttaacaaaaaatacccagttttataatttccaaaaaattatagagatactacataaacagatatgtgaaacgcataaaccagagcctaccttcatcacagagacagaaataattcaattcttgctgtggattacagtttaaactgcaccattagatcagagacaaataaactggagcttatgtgctcaaatgatgtcacatgttcaacgatttagcacacattattgaagtgtttcagtcagcgctctttactctgcattattacaaactcaaacaggacaaatgcaaaccttcaaccagccagtagacaacaacattcatgaccccacataaacaaacattccaatcaggcaccaagtgtttttccctcaccaaatcgacccaatcacccaatctaacatcccagaaactgaacctccaacagaatttaacacaaatgaacttacaacttagttcaccggctaaacaattaaggaattcacagttacaacatttgatgagatctgatgcacccgctttactctgttcgtccgccccgatccagtgaagtctcggcatttcacaccgcacaaatgcaaactaaaaactaagtgcacggattagtcccatcacaaccagaaaacctcatatgcattacactctttagaaactcaaattccgcaatttgtgcgacccctaaacccacagggaaggggttacgattacgcacacgaaaccctgggctggttcaagtcgtacatctcacatcgatccgccacggccaagcacacgcaccgccatctaacgaacccacggcgtgcggagccgaagtcgaaacctagcccgaaaccccgagcaacgaatccccaaactgtcccgaccataacaccaatgagcagaaacgtagagacggggaagggagg

SEQ ID NO: 45301 - DNA, 5810 bp, Zea Mays
gcccactctgcaacggcccagccggagggtggcacgcatgacataactcgggacgaacggggcataacgagggatttttttaaccaaacctgaaattcgcccccgagggggatcgaactcgggacctgaatttgctactcgaaagccttaaccattacgctaagtgctacgtttggtcactacaagatgacactttggactcgtcttagatggtctgagtatcactccttaggtcctgggttcgactctccatgggagcgaaatttaggctgtggttaaaaaaaatcgctcttttgtcccacatcaaagcacaagtctaaggcttaaccccggtcgcgatcgttctcacatgggcttcgatgccactgtgtatgggtggagcagtggttcaggggttttctcgacctatgtgagaaggtcttcttaatacaatactcgggggctctcttaccctcacaggtcgagttttttaagccaactaaactttggctcctattttttattttactgtagtatattgaaaaggtaaaaatatatctgatgtatctttcgaaacaaatctacttgtatcatttccaaacattcaaacccaacacgactgtttgtaatcaaggtttgtaaatgactacttaagacagccacaaaacttcacttatctatgactggagaggcctccactcactaaaagatgatggtttagacagtagagcgaaacttgtactatgcttgttttacttatctgaaacgacatcgtttaatgaatggaggtagtagttgtttggtatactctctccttacgttttggcttttctagattcatagcaattgctaagcacttagatatactctgtctagatatatagtaaaggcaatgtatctaaaaaagataaaatgtcttgtaatttgaaacaaaacggagtagtttgcaacaacgcataggtcgaggctactatggtccgtggataccacgttacctagtacagactgcagagtgagatgtaagctttagtgtagttgtcctttatgattgaaacttacccaactaccagcaagaggagtgcagcaacccacaagacatactggtacgatttgtactttggaggttgattagtctgaggtagctcgctgcgttccatccaaccaaattgaggtcttgccagcagcacagatccaataagaaatccagaagcaaatccaccaaggtgagcaaaattatcagcatgaggtaatatcccaatggccagattaattacaattataaaaagtagagttatgattgccgctgcctgcaggaacgaattgactgaaacttagccaaaaaaacagagagaaaaactagagcaaaacagtacacacataatacgctttctgctgaccttgttggaatagatagtccagttcataataagctctgaaagcatagatccaaggaggccaaacaaagccccagaggcaccaacagagatgtagttactgtgtaagaaaagtgcagacaacacactgcccccaaagccagatatcaagtagatgacaccagtgcgcacttgcaagtcagaaaactgaagtgagttgacagacacagactactgccaaaaccagatgccagagcccagaggcattgacgaaggtaaacatagcatacttccaaatccatgatggaataaaaagaaagtgaggccccaaataacatgtgaaacatgattacgccatagatgaataccaaccagcaaattcatacttagattgatgaaggaaatggtttttctttgcaatcctaacaaaatggtgcatatagaaaactaagtagttgcaacacaaaggcaaagcctgaaaagaaacctaaatgactagttaattcagatttacttcagctttccataagctccaagacataaccggctcataatatttcaatgcttatgacatgaagtacatcttccaggcagagattgatgttgataacaatggatagtcaagtatccaatcaaggtaggtgcaaaactgggaaacataaataatgtggtgatggcagagtgaaccaacaagcccatgtaagaagcttaccaaacccaaattgttgctcaaggcggattccaatgaagagcaagcttagcatgttgacaaccaagtgaactaggccagcatggagccagatacagctaatgaggcgccacccttggtgctcatgaactactttggcccagttgagagctcccatcttctccaagctgcacaaatattggaacttaagcagaacatcggtgtgctttagtataggacaatgtgaagcgaatgttgaatgcggacccggtttgatactggtatctaaaaactgtcccacgtaatggaacaacaagaacagacaaattcgtctattcagccagatttttaaaatccacgagtaagggcataatgggtaccttgcatgattttggcaccttgcatgatgggagtcatgaggtaacagtaggaatacaaatccacgaggaatttggcaaaatgggtcgctctaggttgccgctctgcaaaacacaccgcttctagatgtactcgtaaaaacgggtcgctcaagtctgctcgcttgccagaaggggtcacagatacttttgggtcacctggcaagtgggcccgcgaaggcttgttcccattatgcccttacgccgttctcaagtctgtttcccttcctcttcttctctggacgctgaggactccttctctgtcttcgcacgcagcttcctcctcctcctctatccaagcggcggtcgtcggagacgaacctgggaacggcgattaggcacgtcgtccactagtcccctcgcatggatgtcgaagagcactgaaatcgcagataaagcaatcatcttgatgcaggatcatgccaagcatatctatcatatatgcaatgagaagctaatattgggtaaagggttgacttcatttgaggttaaagaacttcgtgaagcacttgaattcgccgccgaaggattggaccaggactcccttttttgccaagaggaattggatgcaactgttaaagaggaacaattggagcatgacgagaaggtggctttacagaggattgaaagcccactaccttctcctgattcggactgcttcctatcccttgaagagcacattgagaagttttggggcgttgattatcaactcagaccagatgcctagctactccgactaggttgagtttatggtgttgtgaaattctggatgtttgggtgtaatggtatgtttggatgtgtatgtgaactgaaattctggatgtaatggtgaactgactgaatggtgtcttgtgtaatggtatgtttggatgtctatgtgaactctagttctgggtttaatggtgaactgaaattcagtgttcattgttcagtatacatccaaacgcaaccgggtacatccaattgtgtccatctaacgctgttgcagctgctaggtgaccatttcatctaccattgagtgcagttgaatccacactaaggtaaggcctacacgcagcacgaaacccttctatacaaggctcaagtgcacagaaaaatctatggaagtagaccttttcatctaccacttgggtgtctatctccaccacactatgaggggcttttatcaagacttctttcttccacctgtacaacatactgaaactatcatcccaattgccatacatctcttttagagcttcttgcattcctttccatgtcacatcataactgaccctacaattgtaagtgtcttgtaacctcttttgcaaagccttagcaccaagtgaaggctcatttcttagtaaaggcaaggccttctgtgctacccatgcttgattggcattcccataactaatccggctgcttgaagcatatttatgctcatgcactaggacggtaacgtacaaaacaaaataaagatgtaagtaaaaccaacttttgtgaacaaaattatacaattggagagaaacagaagaaaggttagtaccataacactagaatccggccttgtagaaccattcagtttccaagggcatgtgcaatcattccctttgcagtacactctatatctatttctatctgactttgttatgccaagctcaaactcctcatttatagcatattgcctcacagctagcctaaactctttcatcgatggatagagagtacccaacttcatatcagggtggtcaatatcgtgcaatatattgaccatttctgcattttcatcatcaactggcatggcagcatctagatcacttggatcaaaactattactttctgatgtaaaatgagatgcaaagttgcttggttccgggtgggttcaattcatctcgtcatcctcatctccaagtcccaagaacgcatacatctcatcctcgtcacagattctaaacatatcactcgtctccccattatccttattttcagcattctcaataataaagctactccagtcaatggacatggtgtcatcatcattaccatccatgatgcgagcacggaattgtcaccacctatttctattgttagcacaaattattacacacaattatcaaacatatcctcactgaaaatatggtgttgccgcggcggtgatagaccttgggcgccgccataattgaggggcaccgcgacgccgcaacagaggggaggggaaaggttacctgaaaagtggagggagtggtagacgtcgtcgtcaccggatatcacaggattggacgaccactggatccacccgctcgcgtccgtcgcacatccgcctgtgaaggaaaatgttacagagggttgggggaagttaggggaaagcttacagaggaggggactggtggacgtcgtcaccgtcgccgttcccaggttcgtctccgacgaccgccgcttggacagaggaggaggaagctgcgtgcgaagacagagaaggagtcctcggcgtccagagaagaggaagggaaacagacggcatgcgattataccgtaagggcataatcgggacaagccttcgcgggcccacttgccaggtgccccaaaagtatccgtgaccccttctgacgagcgatcagacttgagcgacccgtttttacgagtacagctagaagcggtgtgttttacagagcggcaagctagagcgacccattttgccaaatttctctccatcgattcattcttgaattgcacttgcgtaggtggcacttgaaaagcctctatctacgagtacgagtacagactacagacaccacacccacacggccacacccagaccaccgtgcgctgcggggaagagagcaaaattgtctctccatctctcttatttcctttttagctttataaaataatgaaacggcattacaacatttatgtcaagtttcgtaatggtattcaagcgaaacccgttcgattaatggtaaagtgttgaaacccagttttaataatagcataattccagatttctattcattcgagcagtaagaaaacatggacaattagcttaacagcatagtagaggaaatctaaaatttagcacagaaattttattggttgtcagcaaaaaaaccttcatgcccgtgttgatgccccggcggcgcgcctcggcctcgagcaacgggcagcggatgaggttacttccgcgtccatttttaagaaacacttcgatccgagagtgcatgcgactgatgagcatgatctcccgtcgtagcttgtcatctgtcattctcgccatctcctcctccaaatccgtcctgttgggcattaccacgtcgggtattaccacgcctacatatctgccctctacatcaaatcttgcctccctgttggctg

SEQ ID NO: 45302 - DNA, 1730 bp, Zea Mays
ccaccccaccccacccgcgacgcgggcgacttggcttccgcgcccggtcggtcttgcccggcagccggcacgagtggctggcgaggcgggtcgccctcgccatattagcgcctccctcctcctcctcctgctcctgcgcgcccctgctcgtaatcctaaccgccctggtttctctacacgctacgggaccggtaacttctagaacccaccaccttccatccttccttcctttcctctctctctctctctctcctcgcgcccacggtgcccgccagccagatccgcgcgttcaccggcgccatggccgccgagcatgccaccgccgcggtgggtgagccgcctcccgccacgtcgcagccggcggagggcgtgacggcggcggcgggccagaggtccgtgcccacgccgttcctcagcaagacgtaccagctggtggacgacccggcggtggacgacatcatctcgtggaacgacgacgggtctgccttcatcgtgtggcgcccggcggagttcgcgcgcgatctgttgcccaagtacttcaagcacaacaacttctccagcttcgtgcgccagctcaacacctacgaagatcgtgccggacaggtgggagttcgcgaacgactgcttccgccgaggggagaagcggctgctctgcgacatacaccgccggaaggtgtcgccggccacgggggcggtcacggtggccgccgccgctgcggccatcccgatggcgctgcccgtgggctctccggtgtactccggcgaggagcaggtgctgtcaagctcgtccccggagcccccgtcgctgcagcagcacccgccggcgccgtccgggtcgggctccggcggggtggtctcgggcgacgtgggcgaggagaacgagcggttgcggcgggagaacgcgcggctggcgcgcgagctcggacagatgaagaagctctgcaacaacatcctcctcctcatgtccaagtacgccgccactcagcagccggacgccgccaaggaggcggccgccgggaactgcaccggcgagtcgtcggatgccgccgcggcgcctccgctcccttcgatcctggagctcctaccctcgtgccgcgccgaccccgcgcccgctgcagccggaacggatcacgaggatgacgaaaaggcgggcgctaggctgttcggcgtctccatcgggcggaaacgaatgcgggacgagagcgaccaccacgccggcgtctgcgcagcggaggtgaaagccgagccggtggacgcgcgtcccgaccagcagcggcagcgcaacgccacggagccgcagtcgtggcccatttaccggcccaggcctgtgtaccacccgctccgggcctgcaacggctcgggcagcgctgggagcgaccacgacgggtccaacgactcgagttaaaattgagatgaagcatcttcacgaagaagttggacggagggggaaaaggagggagtaaaactgttctctgttcttgttgaagctagttggtgatgcaacgcaacagtggaatccttgtcagctagatagctagtccaaattgcgctttgcactttctgttttgctggggttaatttgatacgtgtgagcatgtataggaacgtgtccagaacatctagattagctgaggtggtcgctggtcagaatttgagatggatattccgataaacgggtgtacgtctacgtcgactcgtcgattccaggtggattacgcagcgtttctcac

SEQ ID NO: 45303 - DNA, 1762 bp, Zea Mays
aaaccttctcgcagtttcgtcgccccaccccaccccacccgcgacgcgggcgacttggcttccgcgcccggtcggtcttgcccggcagccggcacgagtggctggcgaggcgggtcgccctcgccatattagcgcctccctcctcctcctcctgctcctgcgcgcccctgctcgtaatcctaaccgccctggtttctctacacgctacgggaccggtaacttctagaacccaccaccttccatccttccttcctttcctctctctctctctctctcctcgcgcccacggtgcccgccagccagatccgcgcgttcaccggcgccatggccgccgagcatgccaccgccgcggtgggtgagccgcctcccgccacgtcgcagccggcggagggcgtgacggcggcggcgggccagaggtccgtgcccacgccgttcctcagcaagacgtaccagctggtggacgacccggcggtggacgacatcatctcgtggaacgacgacgggtctgccttcatcgtgtggcgcccggcggagttcgcgcgcgatctgttgcccaagtacttcaagcacaacaacttctccagcttcgtgcgccagctcaacacctacgggttcaggaagatcgtgccggacaggtgggagttcgcgaacgactgcttccgccgaggggagaagcggctgctctgcgacatacaccgccggaaggtgtcgccggccacgggggcggtcacggtggccgccgccgctgcggccatcccgatggcgctgcccgtgggctctccggtgtactccggcgaggagcaggtgctgtcaagctcgtccccggagcccccgtcgctgcagcagcacccgccggcgccgtccgggtcgggctccggcggggtggtctcgggcgacgtgggcgaggagaacgagcggttgcggcgggagaacgcgcggctggcgcgcgagctcggacagatgaagaagctctgcaacaacatcctcctcctcatgtccaagtacgccgccactcagcagccggacgccgccaaggaggcggccgccgggaactgcaccggcgagtcgtcggatgccgccgcggcgcctccgctcccttcgatcctggagctcctaccctcgtgccgcgccgaccccgcgcccgctgcagccggaacggatcacgaggatgacgaaaaggcgggcgctaggctgttcggcgtctccatcgggcggaaacgaatgcgggacgagagcgaccaccacgccggcgtctgcgcagcggaggtgaaagccgagccggtggacgcgcgtcccgaccagcagcggcagcgcaacgccacggagccgcagtcgtggcccatttaccggcccaggcctgtgtaccacccgctccgggcctgcaacggctcgggcagcgctgggagcgaccacgacgggtccaacgactcgagttaaaattgagatgaagcatcttcacgaagaagttggacggagggggaaaaggagggagtaaaactgttctctgttcttgttgaagctagttggtgatgcaacgcaacagtggaatccttgtcagctagatagctagtccaaattgcgctttgcactttctgttttgctggggttaatttgatacgtgtgagcatgtataggaacgtgtccagaacatctagattagctgaggtggtcgctggtcagaatttgagatggatattccgataaacgggtgtacgtctacgtcgactcgtcgattccaggtggattacgcagcgtttctcac

SEQ ID NO: 45304 - DNA, 2503 bp, Zea Mays
ataagggcaggccctcgcgactgaccggaccacgacaccctcgcttcacctcctcactcgcgtcgcgcctccgcttccatgtcatttgacagcgcaacacggcgctgcagggtaaagctctcccccgctcgccggtctctgtgcccaggccagcaggacgaagaagaagccggctgggaagacccaggcctgaccgcctgagctaggggagaggaggacgacgacgacgacgatggggctgctgtctcagcgggtggagcggtcggagatggagcccggcgaccacatctacacctggcgcgccggctacacctattcccaccacggtacggcgcactagccgctctggtcttcagtatccctcccgccccgatctcctcctcctcggcttcccaatccggccctggagttgtccattctcttgcttttaacctgtgcagtggccattgcacctgtgaatccaagagcattgcaaatgctcttgacgccggagtaataatgctgtgcccatccagccggcgtccggacagaaaccacgctgcccgtggtcacctctctcgccagctcatagtcatagctctgccctttcttatttcgttttcgttgtatgaaattgcttggactttggacatttctgcaaccgctgcttgttcatcagagtagagtactgacaatgaacttcctcacgggatcagatatcaattagaaacccattttgtttaccaaagaatccttaccgccgccgtctttactaacttggtcagctcgtcgtcactagatccggtgaccagcaaagatatgcacatgcatgcattcctcaccttttgctttgcatctccttatcagctacagcactggcctaatgacagccagcggctgcagttataaaaacaaaattactgtagaagtcgtagcagtagccgaattaaaaccgcagtgcatcccaaagcgcgtaaaagatgcatctcttccacatcatgtcactctacgcgcgctgctacaggcaccgacattttgtgcccgcacgttatggacgtccttcctccctacacacccagatcaccactgcatgacatatgtgtggggaatggcatgccggctagcacgcatgtgggagtggtagcatggatagcacttctccgcatggatggacagtgttttctcttacaccttttgtcacgatcttgccagtaaatcttctgatttggcaataataatgtcgatctgtaatcgtttcattcgtcgtttgagatccaatccaactttgtatctcaacatgcatggtcattacagcttgagtaattaagccatgacgaatgtattcattagggcctatttggaaggtgataggataaggtagcgtgccatgttcttatctgacgcgccaggtgttgcattgcatggatgatatggatccatccatgacccagggatttacgtcggcggcagcaaggtggtgcacttcacgcggaagagggaggcgggcggcgcgggtctggactcggccatcgccgtgtccagcctcctcctctcgcggggctcggacgagtgccccaccttcccggactgcggcttccagctccccgacagcggcgtggtgctgacctgcgtggactgcttcctcggcggcggcgcgctgcaccggttcgagtacggcgtgccggccgcggcgttcctggccaaggtccgcgggggcacgtccaccacggcgcgcgccgacccgggcgacgccgccgtgcgccgcgccatgcacctcctccggcacggcttcggcgactacgacgtgttcgagaacaactgcgaggacttcgcgctctactgcaagacggggctcctgctcctccccgccgccgcggctggcggcggggtcgggatcgggaggagcgggcaggccgcggccgccctcggcgtgccgctggccgcgctcttctccaccccgttcaagctcgtggccgccggcccgctcggcatggccgccgtcaccgcgggcgtgtactgcgccggcaggtacgtcaccgacatcggggtgaggacggacgtggtgaaggtggaggtgaaggacctgtcggcgcacctcggctggcgccgcgccagggctcaggagaagaagaagaagcagcagcaggaggaggcgccggcggcggccaagagcttgcttccgctcaagcggaaacgggagacctgcgtttgattggcgtgcggttgcaaatagatttgatttcttcgtctttagttactgcatagaaattaataagcccgatatagatagatatatgtcctagcgttcttgcccgatgccccgatcgatattgttcgttgttctttgtacgtactctgtatcattctaagagtttcagttactcctacatacattcttcattactgcaacaagatagttgagaacacagttgttaattgagctgagctgtatgtctcgtactgttccacaatagaatgcgaaggcatgcatgaggtccacgacatttggtccatttctgaatta

SEQ ID NO: 45305 - DNA, 1437 bp, Zea Mays
atttaacatccgaatccctgccccttcgcccttcccctccggccgcagccccttccctgccgctccggcctcctccgtcgggaccgccgacgacgcgccgcgcggaagcctgcgggtgagcgtccagatccacccgcccccttcggcattccccgccgctccagcctcctccgccgggaccgccgccgacgcgccacggggaaggcctgcggggatattgggtaagcagttgtgatcctgttctcttgctcggatgccgggttactatgacatcgatgacatcctcatggaggatgagcctatttcagttgttttccaagtaactgcaaatggtgttggcctgctagatcctggtgctgaaagtaactgtgtagagaagggcgccaaggtggacctcccattttggcttgcgcatgggctgctgtctctggaacaagctgtgtcaataaacccacctccatgcttcacacagaagtagtttttttcagtgtttgttattgcattacaccatacacagaaattcttggatcaacagcaaagcatgggagagcaaggagtattcttatttggaaaaacatatatggaattccctatcaacaacttaataaaaggatctgatctttttgacaccattgtggcctactgtagcttttcatagtaaatagtagcattttgcagatctttctcttataacttgatgatagaacttattaaagacatgaatctattcaaacggttctccagaatttgacttttgctgcatggcttgggttttggttctgactatgaactaaagcgtgaaatacagattctgcagtattattctcctaacaaatctgtattctgttatctccatatcatatatactgcagaacttggaaggagatccaagctgatgcggcctgtgtggatttgagggttcgttgcccgtacttttatgagctaggatgcaagattgttcctttggtgagtgacaagagcattggcctgttcttgcgatatgcattcaccagtaggtacaaagaggttctaagtaagtcccacagttcttccatgatgacagtgcccaagttcgttccacgccttacaaaagaagaaactcggggtgggatgagactgcaaaaggcttccattcttggccggaagaggaagacaaagctgcctgaatgagttttaaggtgatgtgcgctgctttgatttgctagcaccgtgagcaaagagaaaagtgaatggcagattaaatctggatgtactatgatctgctgtacattgtgcacttgtgtacagcagctctgatcagtccgtcctttgtaaggaaaatgaacaccgtcttaaatcatgatatcctgtttggagcaggtgtcatgattttcagcagggtatcttgaatgagtttgaatcatgatatcctgtcttaaatttcacatgttctcaaaa

SEQ ID NO: 45306 - DNA, 977 bp, Zea Mays
atttaacatccgaatccctgccccttcgcccttcccctccggccgcagccccttccctgccgctccggcctcctccgtcgggaccgccgacgacgcgccgcgcggaagcctgcggggatattgggtaagcagttgtgatcctgttctcttgctcggatgccgggttactatgacatcgatgacatcctcatggaggatgagcctatttcagttgttttccaagtaactgcaaatggtgttggcctgctagatcctggtgctgaaagtaactgtgtagagaagggcgccaaggtggacctcccattttggcttgcgcatgggctgctgtctctggaacaagctgtgtcaataaacccacctccatgcttcacacagaaaacttggaaggagatccaagctgatgcggcctgtgtggatttgagggttcgttgcccgtacttttatgagctaggatgcaagattgttcctttggtgagtgacaagagcattggcctgttcttgcgatatgcattcaccagtaggtacaaagaggttctaagtaagtcccacagttcttccatgatgacagtgcccaagttcgttccacgccttacaaaagaagaaactcgggagaatcgatgactggtttcaagaaatggcgagcaggtgggatgagactgcaaaaggcttccattcttggccggaagaggaagacaaagctgcctgaatgagttttaaggtgatgtgcgctgctttgatttgctagcaccgtgagcaaagagaaaagtgaatggcagattaaatctggatgtactatgatctgctgtacattgtgcacttgtgtacagcagctctgatcagtccgtcctttgtaaggaaaatgaacaccgtcttaaatcatgatatcctgtttggagcaggtgtcatgattttcagcagggtatcttgaatgagtttgaatcatgatatcctgtcttaaatttcacatgttctcaaaa

SEQ ID NO: 45307 - DNA, 942 bp, Zea Mays
atttaacatccgaatccctgccccttcgcccttcccctccggccgcagccccttccctgccgctccggcctcctccgtcgggaccgccgacgacgcgccgcgcggaagcctgcggggatattgggtaagcagttgtgatcctgttctcttgctcggatgccgggttactatgacatcgatgacatcctcatggaggatgagcctatttcagttgttttccaagtaactgcaaatggtgttggcctgctagatcctggtgctgaaagtaactgtgtagagaagggcgccaaggtggacctcccattttggcttgcgcatgggctgctgtctctggaacaagctgtgtcaataaacccacctccatgcttcacacagaaaacttggaaggagatccaagctgatgcggcctgtgtggatttgagggttcgttgcccgtacttttatgagctaggatgcaagattgttcctttggtgagtgacaagagcattggcctgttcttgcgatatgcattcaccagtaggtacaaagaggttctaagtaagtcccacagttcttccatgatgacagtgcccaagttcgttccacgccttacaaaagaagaaactcggggtgggatgagactgcaaaaggcttccattcttggccggaagaggaagacaaagctgcctgaatgagttttaaggtgatgtgcgctgctttgatttgctagcaccgtgagcaaagagaaaagtgaatggcagattaaatctggatgtactatgatctgctgtacattgtgcacttgtgtacagcagctctgatcagtccgtcctttgtaaggaaaatgaacaccgtcttaaatcatgatatcctgtttggagcaggtgtcatgattttcagcagggtatcttgaatgagtttgaatcatgatatcctgtcttaaatttcacatgttctcaaaa

SEQ ID NO: 45308 - DNA, 1678 bp, Zea Mays
atttaacatccgaatccctgccccttcgcccttcccctccggccgcagccccttccctgccgctccggcctcctccgtcgggaccgccgacgacgcgccgcgcggaagcctgcgggtgagcgtccagatccacccgcccccttcggcattccccgccgctccagcctcctccgccgggaccgccgctccggcctcctctgccctaatccccttaatgcgtcgcctaatgagcgccttaccgccgcctgaggcgatagggcgacgccttacgcataacttaaggcgggtcgttggacgccttggttttttccggcgccttaccgcctaagcgtcgacgcttaggcgacgcctttatgttcttcttactcattgacaagacacaaattgctgctgtacaattagggatattgggtaagcagttgtgatcctgttctcttgctcggatgccgggttactatgacatcgatgacatcctcatggaggatgagcctatttcagttgttttccaagtaactgcaaatggtgttggcctgctagatcctggtgctgaaagtaactgtgtagagaagggcgccaaggtggacctcccattttggcttgcgcatgggctgctgtctctggaacaagctgtgtcaataaacccacctccatgcttcacacagaagtagtttttttcagtgtttgttattgcattacaccatacacagaaattcttggatcaacagcaaagcatgggagagcaaggagtattcttatttggaaaaacatatatggaattccctatcaacaacttaataaaaggatctgatctttttgacaccattgtggcctactgtagcttttcatagtaaatagtagcattttgcagatctttctcttataacttgatgatagaacttattaaagacatgaatctattcaaacggttctccagaatttgacttttgctgcatggcttgggttttggttctgactatgaactaaagcgtgaaatacagattctgcagtattattctcctaacaaatctgtattctgttatctccatatcatatatactgcagaacttggaaggagatccaagctgatgcggcctgtgtggatttgagggttcgttgcccgtacttttatgagctaggatgcaagattgttcctttggtgagtgacaagagcattggcctgttcttgcgatatgcattcaccagtaggtacaaagaggttctaagtaagtcccacagttcttccatgatgacagtgcccaagttcgttccacgccttacaaaagaagaaactcgggtgtttgaatctgccagagaatcgatgactggtttcaagaaatggcgagcaggtgggatgagactgcaaaaggcttccattcttggccggaagaggaagacaaagctgcctgaatgagttttaaggtgatgtgcgctgctttgatttgctagcaccgtgagcaaagagaaaagtgaatggcagattaaatctggatgtactatgatctgctgtacattgtgcacttgtgtacagcagctctgatcagtccgtcctttgtaaggaaaatgaacaccgtcttaaatcatgatatcctgtttggagcaggtgtcatgattttcagcagggtatcttgaatgagtttgaatcatgatatcctgtcttaaatttcacatgttctcaaaa

SEQ ID NO: 45309 - DNA, 2835 bp, Zea Mays
gacgattggaacccacacccaactcccaagttgcttgcttgatttcgccgagcagacaaagatcgggtcgagtcctacgccgacgccggcgacgaacaaggatggtgaaggcggtgctcggcgacgaggagcacctcaaggcctttgaggaaacgctcgcctcgccctcctctcctccatgtcaagcccaggtgggcctcgtcgtcggcaagctcagctcttcctccgaccgtgccctcgtctacgcgttgctccccacgccgctcaccgacgccgccgcccccgcatgctctctccgcgccgcccccaagtccaagccttccaagggcggcggcaaagctccttcctcctcggacgcctctctcgacttcgatgtcgaatggatctccgagcacgcgcggcaggatgctgctcggtggtatgagtgtcatgggtgcttacgtatgggcttccgaggcatcattcaaggccacatcccctgctgtcctgtcgcaggtcattcgagcgatttgccaagcttgctatggcagtgcatccggtgtgaggctgctcgtccacatttcttacagtcctcgaagatgggcctgccgtatatgcgaggttgcatcaggaagtctgcgtccgtgcgattttaagtacagcaaactattagcttctcttcaaactttcagatgcacatataattttgagataaggttgacatctgttcaagctgagccgtttaagaaaattattttgaaggcaatcagtcatctcacagaggaagtgcagaatgccagagctttggtagatgggcaactgttttcagaagagatgaacataagtacagaggacccacaccaagttgattttcttgtgccattcaagaatgctgtgcctgttgaagaatgcagtttagagggagttgctgggctcattcgctttattggatctgtcagcgccttggcatatttaggccctaaagaatctatttcagaagctatatctgatctaaaggcggacatcgttacaagtctaaaaagccggttggatatcatccttgatgaggcagatgatggccctgccactgctgaagtggagaaatcaccatctcagaaggccactcaagttatatttcatgagttgagagaaccttacagtttttcattcccgagaagggtcctgataccttggctgagcggcacctatgtttgtgattacttgcaacaaccagagacagcagaggatgcagtggatcgcttcaaggaagtgataggcgcactggaaacagccgtggagaggtcttcaatcctggaaccagaaagcgcagcagcagcttgtagcgtactagaatccttttgggatatggtgcctggatctggcagcggaggacaaggtggatccagcaagctgaaggacagtcattctatacagaaggatgattcaagcaaaggacaaggcggtttgcatttcagtatcgtagccgctctgattgtgctactggttgctctgatagctggactgttcttcactggttccgccggatacccagtaacgtaactaactgcgctgtaccccaccagtagatgcgaaaagcaaagatgttagaaactgttgaagtggagagttgaatttgtttaatgttagaagctgttgttcacatctctgttggctatttttgatgagctattggggctcccatggacgagagaatccatacgtcattcctcccttgaacttgaaattatttagggcaaaatatacatatgcctcctcagagatctaaacccatgcacgccatgcaaagaacttataatatttttttatgatatttagtttagtcacacagaaacacgggacaaacatataaatctgtactgtacaccacaggcaacatcgatccctgatatagtagcatgcagcagcttgacgctgagtcagatgatggtgttgtaccgggtcccgtcaatatcgacgatggcaagcacgacggcgacgccgaggaggagcacggtgacggaggtgaagttgacgagcagcgcctctgcgccgtacttgggcaggcgcagtggcgggccctgcatgaaggtgagcttctcgaggaagcccagctgcgcggtgccgacggcgagcacgaagacgaggaggccgaagacggcgtgccacggcagcgttctgcgcctggtggcgggggaggcgcccgggaagaagtaggcgaggaacccggcggtccactggaggccgtagagggtgatggcggcgatgccgacccaggagtgcagcgagtagaggtttgggatgccgctctcgacgtggaacttgaagacggcgtagacgccgaggacgcccgcagcgaggcccgcggcgtgcagcgccaggtgcaccttcttcctggcgtcgcgggcgagcgggagagagcggtagctgaggatggcttctccgccgaggacgatggggccgaggaccatgagcacggggtggacgttgaagatgagcggcttgtcctgggagcggagggcgaggccgccgcggaagtggatgcaccacaggagcaccagcacgacggcgctcgctgccaggacgtgcgccaccagcgtgcgcgcgtccaccgaaccacccttcgacttggtcattgatcggatcggatcggagcaaaaaggaaaggagagatggaaatcaggaggagagatgacagttaaatggccgtggacgtggttgctctctcggccgctattaccggtgtggtatccagccagccagccagccacaaaccaaacccagctactataatcccttttcgatctgtctttatttttttctcttccaaacaattaacaatctctctctcttcagcct

SEQ ID NO: 45310 - DNA, 2829 bp, Zea Mays
gacgattggaacccacacccaactcccaagttgcttgcttgatttcgccgagcagacaaagatcgggtcgagtcctacgccgacgccggcgacgaacaaggatggtgaaggcggtgctcggcgacgaggagcacctcaaggcctttgaggaaacgctcgcctcgccctcctctcctccatgtcaagcccaggtgggcctcgtcgtcggcaagctcagctcttcctccgaccgtgccctcgtctacgcgttgctccccacgccgctcaccgacgccgccgcccccgcatgctctctccgcgccgcccccaagtccaagccttccaagggcggcggcaaagctccttcctcctcggacgcctctctcgacttcgatgtcgaatggatctccgagcacgcgcggcaggtgtctaggatgctgctcggtggtatgagtgtcatgggtgcttacgtatgggcttccgaggcatcattcaaggccacatcccctgctgtcctgtcgcaggtcattcgagcgatttgccaagcttgctatggcagtgcatccggtgtgaggctgctcgtccacatttcttacagtcctcgaagatgggcctgccgtatatgcgaggttgcatcaggaagtctgcgtccgtgcgattttaagtacagcaaactattagcttctcttcaaactttcagatgcacatataattttgagataaggttgacatctgttcaagctgagccgtttaagaaaattattttgaaggcaatcagtcatctcacagaggaagtgcagaatgccagagctttggtagatgggcaactgttttcagaagagatgaacataagtacagaggacccacaccaagttgattttcttgtgccattcaagaatgctgtgcctgttgaagtttagagggagttgctgggctcattcgctttattggatctgtcagcgccttggcatatttaggccctaaagaatctatttcagaagctatatctgatctaaaggcggacatcgttacaagtctaaaaagccggttggatatcatccttgatgaggcagatgatggccctgccactgctgaagtggagaaatcaccatctcagaaggccactcaagttatatttcatgagttgagagaaccttacagtttttcattcccgagaagggtcctgataccttggctgagcggcacctatgtttgtgattacttgcaacaaccagagacagcagagtggatcgcttcaaggaagtgataggcgcactggaaacagccgtggagaggtcttcaatcctggaaccagaaagcgcagcagcagcttgtagcgtactagaatccttttgggatatggtgcctggatctggcagcggaggacaaggtggatccagcaagctgaaggacagtcattctatacagaaggatgattcaagcaaaggacaaggcggtttgcatttcagtatcgtagccgctctgattgtgctactggttgctctgatagctggactgttcttcactggttccgccggatacccagtaacgtaactaactgcgctgtaccccaccagtagatgcgaaaagcaaagatgttagaaactgttgaagtggagagttgaatttgtttaatgttagaagctgttgttcacatctctgttggctatttttgatgagctattggggctcccatggacgagagaatccatacgtcattcctcccttgaacttgaaattatttagggcaaaatatacatatgcctcctcagagatctaaacccatgcacgccatgcaaagaacttataatatttttttatgatatttagtttagtcacacagaaacacgggacaaacatataaatctgtactgtacaccacaggcaacatcgatccctgatatagtagcatgcagcagcttgacgctgagtcagatgatggtgttgtaccgggtcccgtcaatatcgacgatggcaagcacgacggcgacgccgaggaggagcacggtgacggaggtgaagttgacgagcagcgcctctgcgccgtacttgggcaggcgcagtggcgggccctgcatgaaggtgagcttctcgaggaagcccagctgcgcggtgccgacggcgagcacgaagacgaggaggccgaagacggcgtgccacggcagcgttctgcgcctggtggcgggggaggcgcccgggaagaagtaggcgaggaacccggcggtccactggaggccgtagagggtgatggcggcgatgccgacccaggagtgcagcgagtagaggtttgggatgccgctctcgacgtggaacttgaagacggcgtagacgccgaggacgcccgcagcgaggcccgcggcgtgcagcgccaggtgcaccttcttcctggcgtcgcgggcgagcgggagagagcggtagctgaggatggcttctccgccgaggacgatggggccgaggaccatgagcacggggtggacgttgaagatgagcggcttgtcctgggagcggagggcgaggccgccgcggaagtggatgcaccacaggagcaccagcacgacggcgctcgctgccaggacgtgcgccaccagcgtgcgcgcgtccaccgaaccacccttcgacttggtcattgatcggatcggatcggagcaaaaaggaaaggagagatggaaatcaggaggagagatgacagttaaatggccgtggacgtggttgctctctcggccgctattaccggtgtggtatccagccagccagccagccacaaaccaaacccagctactataatcccttttcgatctgtctttatttttttctcttccaaacaattaacaatctctctctcttcagcct

SEQ ID NO: 45311 - DNA, 2843 bp, Zea Mays
gacgattggaacccacacccaactcccaagttgcttgcttgatttcgccgagcagacaaagatcgggtcgagtcctacgccgacgccggcgacgaacaaggatggtgaaggcggtgctcggcgacgaggagcacctcaaggcctttgaggaaacgctcgcctcgccctcctctcctccatgtcaagcccaggtgggcctcgtcgtcggcaagctcagctcttcctccgaccgtgccctcgtctacgcgttgctccccacgccgctcaccgacgccgccgcccccgcatgctctctccgcgccgcccccaagtccaagccttccaagggcggcggcaaagctccttcctcctcggacgcctctctcgacttcgatgtcgaatggatctccgagcacgcgcggcaggtgtctaggatgctgctcggtggtatgagtgtcatgggtgcttacgtatgggcttccgaggcatcattcaaggccacatcccctgctgtcctgtcgcaggtcattcgagcgatttgccaagcttgctatggcagtgcatccggtgtgaggctgctcgtccacatttcttacagtcctcgaagatgggcctgccgtatatgcgaggttgcatcaggaagtctgcgtccgtgcgattttaagtacagcaaactattagcttctcttcaaactttcagatgcacatataattttgagataaggttgacatctgttcaagctgagccgtttaagaaaattattttgaaggcaatcagtcatctcacagaggaagtgcagaatgccagagctttggtagatgggcaactgttttcagaagagatgaacataagtacagaggacccacaccaagttgattttcttgtgccattcaagaatgctgtgcctgttgaagaatgcagtttagagggagttgctgggctcattcgctttattggatctgtcagcgccttggcatatttaggccctaaagaatctatttcagaagctatatctgatctaaaggcggacatcgttacaagtctaaaaagccggttggatatcatccttgatgaggcagatgatggccctgccactgctgaagtggagaaatcaccatctcagaaggccactcaagttatatttcatgagttgagagaaccttacagtttttcattcccgagaagggtcctgataccttggctgagcggcacctatgtttgtgattacttgcaacaaccagagacagcagaggatgcagtggatcgcttcaaggaagtgataggcgcactggaaacagccgtggagaggtcttcaatcctggaaccagaaagcgcagcagcagcttgtagcgtactagaatccttttgggatatggtgcctggatctggcagcggaggacaaggtggatccagcaagctgaaggacagtcattctatacagaaggatgattcaagcaaaggacaaggcggtttgcatttcagtatcgtagccgctctgattgtgctactggttgctctgatagctggactgttcttcactggttccgccggatacccagtaacgtaactaactgcgctgtaccccaccagtagatgcgaaaagcaaagatgttagaaactgttgaagtggagagttgaatttgtttaatgttagaagctgttgttcacatctctgttggctatttttgatgagctattggggctcccatggacgagagaatccatacgtcattcctcccttgaacttgaaattatttagggcaaaatatacatatgcctcctcagagatctaaacccatgcacgccatgcaaagaacttataatatttttttatgatatttagtttagtcacacagaaacacgggacaaacatataaatctgtactgtacaccacaggcaacatcgatccctgatatagtagcatgcagcagcttgacgctgagtcagatgatggtgttgtaccgggtcccgtcaatatcgacgatggcaagcacgacggcgacgccgaggaggagcacggtgacggaggtgaagttgacgagcagcgcctctgcgccgtacttgggcaggcgcagtggcgggccctgcatgaaggtgagcttctcgaggaagcccagctgcgcggtgccgacggcgagcacgaagacgaggaggccgaagacggcgtgccacggcagcgttctgcgcctggtggcgggggaggcgcccgggaagaagtaggcgaggaacccggcggtccactggaggccgtagagggtgatggcggcgatgccgacccaggagtgcagcgagtagaggtttgggatgccgctctcgacgtggaacttgaagacggcgtagacgccgaggacgcccgcagcgaggcccgcggcgtgcagcgccaggtgcaccttcttcctggcgtcgcgggcgagcgggagagagcggtagctgaggatggcttctccgccgaggacgatggggccgaggaccatgagcacggggtggacgttgaagatgagcggcttgtcctgggagcggagggcgaggccgccgcggaagtggatgcaccacaggagcaccagcacgacggcgctcgctgccaggacgtgcgccaccagcgtgcgcgcgtccaccgaaccacccttcgacttggtcattgatcggatcggatcggagcaaaaaggaaaggagagatggaaatcaggaggagagatgacagttaaatggccgtggacgtggttgctctctcggccgctattaccggtgtggtatccagccagccagccagccacaaaccaaacccagctactataatcccttttcgatctgtctttatttttttctcttccaaacaattaacaatctctctctcttcagcct

SEQ ID NO: 45312 - DNA, 2836 bp, Zea Mays
gacgattggaacccacacccaactcccaagttgcttgcttgatttcgccgagcagacaaagatcgggtcgagtcctacgccgacgccggcgacgaacaaggatggtgaaggcggtgctcggcgacgaggagcacctcaaggcctttgaggaaacgctcgcctcgccctcctctcctccatgtcaagcccaggtgggcctcgtcgtcggcaagctcagctcttcctccgaccgtgccctcgtctacgcgttgctccccacgccgctcaccgacgccgccgcccccgcatgctctctccgcgccgcccccaagtccaagccttccaagggcggcggcaaagctccttcctcctcggacgcctctctcgacttcgatgtcgaatggatctccgagcacgcgcggcaggtgtctaggatgctgctcggtggtatgagtgtcatgggtgcttacgtatgggcttccgaggcatcattcaaggccacatcccctgctgtcctgtcgcaggtcattcgagcgatttgccaagcttgctatggcagtgcatccggtgtgaggctgctcgtccacatttcttacagtcctcgaagatgggcctgccgtatatgcgaggttgcatcaggaagtctgcgtccgtgcgattttaagtacagcaaactattagcttctcttcaaactttcagatgcacatataattttgagataaggttgacatctgttcaagctgagccgtttaagaaaattattttgaaggcaatcagtcatctcacagaggaagtgcagaatgccagagctttggtagatgggcaactgttttcagaagagatgaacataagtacagaggacccacaccaagttgattttcttgtgccattcaagaatgctgtgcctgttgaagtttagagggagttgctgggctcattcgctttattggatctgtcagcgccttggcatatttaggccctaaagaatctatttcagaagctatatctgatctaaaggcggacatcgttacaagtctaaaaagccggttggatatcatccttgatgaggcagatgatggccctgccactgctgaagtggagaaatcaccatctcagaaggccactcaagttatatttcatgagttgagagaaccttacagtttttcattcccgagaagggtcctgataccttggctgagcggcacctatgtttgtgattacttgcaacaaccagagacagcagaggatgcagtggatcgcttcaaggaagtgataggcgcactggaaacagccgtggagaggtcttcaatcctggaaccagaaagcgcagcagcagcttgtagcgtactagaatccttttgggatatggtgcctggatctggcagcggaggacaaggtggatccagcaagctgaaggacagtcattctatacagaaggatgattcaagcaaaggacaaggcggtttgcatttcagtatcgtagccgctctgattgtgctactggttgctctgatagctggactgttcttcactggttccgccggatacccagtaacgtaactaactgcgctgtaccccaccagtagatgcgaaaagcaaagatgttagaaactgttgaagtggagagttgaatttgtttaatgttagaagctgttgttcacatctctgttggctatttttgatgagctattggggctcccatggacgagagaatccatacgtcattcctcccttgaacttgaaattatttagggcaaaatatacatatgcctcctcagagatctaaacccatgcacgccatgcaaagaacttataatatttttttatgatatttagtttagtcacacagaaacacgggacaaacatataaatctgtactgtacaccacaggcaacatcgatccctgatatagtagcatgcagcagcttgacgctgagtcagatgatggtgttgtaccgggtcccgtcaatatcgacgatggcaagcacgacggcgacgccgaggaggagcacggtgacggaggtgaagttgacgagcagcgcctctgcgccgtacttgggcaggcgcagtggcgggccctgcatgaaggtgagcttctcgaggaagcccagctgcgcggtgccgacggcgagcacgaagacgaggaggccgaagacggcgtgccacggcagcgttctgcgcctggtggcgggggaggcgcccgggaagaagtaggcgaggaacccggcggtccactggaggccgtagagggtgatggcggcgatgccgacccaggagtgcagcgagtagaggtttgggatgccgctctcgacgtggaacttgaagacggcgtagacgccgaggacgcccgcagcgaggcccgcggcgtgcagcgccaggtgcaccttcttcctggcgtcgcgggcgagcgggagagagcggtagctgaggatggcttctccgccgaggacgatggggccgaggaccatgagcacggggtggacgttgaagatgagcggcttgtcctgggagcggagggcgaggccgccgcggaagtggatgcaccacaggagcaccagcacgacggcgctcgctgccaggacgtgcgccaccagcgtgcgcgcgtccaccgaaccacccttcgacttggtcattgatcggatcggatcggagcaaaaaggaaaggagagatggaaatcaggaggagagatgacagttaaatggccgtggacgtggttgctctctcggccgctattaccggtgtggtatccagccagccagccagccacaaaccaaacccagctactataatcccttttcgatctgtctttatttttttctcttccaaacaattaacaatctctctctcttcagcct

SEQ ID NO: 45313 - DNA, 1273 bp, Zea Mays
gcatcatagaatagttcattcatgtagcaacgataacgggggatattcactactgactatcttcctcttccctctagcttgaaacaagtgacatttctaactagacgctcacatctgccatccatttacagagatgggagagtggcctctgccatctacatgtcgtcatccaactcgttcttctcatcctcgtcttcctggtcaccatcgtcatcctcgtcctcgtgaagagccttgcactttctgagcttctttgctggctgatccacctcctggtcatctgtcttggctttcttagtggcaacattgttctcaccactgccctcgccattctcggcctcagccttgagctccgcggccttttcaatgtaaggcttcttctcctggtccagaaaaatgaacagcatagcgtgaatgaatgaatgaagagcaagagttggaaactcgacagattcagattcaggacttacctcgtctgtcatggacttccacctctcccctccttcctttgcaacggtggcgacactcttgttgtcaggatgggtggccttgaactccttcctgaagtcgtccctggaagaaataaatcgacgatgtaacgaaacgcgtatacatcaggagggcgaggaacaaaggagaatgcgcgaatgtgcgtgtcgcgctgcgtctgcagcatacatgaagaggaagaaggcggtgggcgagcgcttgcgcttggcgtccttgttaccacctcccttggcggaggacttcttgcggtccgcactggcgacctcgacggtcttctcgacgacctgcgcctcgagcgtcatcctgatcttctcgtcgaggctgcagctgtgcatgtcgatgaggacgacggggacatccttgttgcaggcctcgctgcatgcatgatgggattcgctcgcatcagaatcatcagatagcggtccggtcgagcagggagaggaggaagggagagttggagaggcaggcaggccaggtggttaccatctggtgaaggcgctcccgtccctggagcgcttgaggacggttgcctcgacgcgcttcctgctgcgcgcggcattgccggtggacttgcctcccgccatggatggatggatgctcaacttgcttggggactcggcgggttgggtggcgatgaggattgatggatgtccaggcagggagaggagatcggagtaataaagacggaggggaggcgacgaaggattcggcgggaggcggcagcccaaattgcaggcggcggggggaggaggagggaagccag

SEQ ID NO: 45314 - DNA, 2437 bp, Zea Mays
gggtcatttcgacctcaacaccaacaatattttaaagcaaactatgagagccaagacaatatatatttgaaaattttaactataagactaaaagtttacgtattcgattatttaaagactaaaataaaataaaaaactaaaaactagtccctaaaaatcaaaatattttgagagtatgcaatgcaaagccaacagttttggtaattggtagagtaaatgggtttggggagtttaattaaaatcaatcgtatcgggcaggggctgcaacccaggctgtgcgggcgcggcagggcagcggcggcgacatctgcatctgcatctcccacctcgtctccctcccgcatctgccctgcctcgatcccgccgccagccatctaagggagccgggagccatgtctccctccggcgagctgctggcgtccatctcctccgctctcgccgtggccttcgtcttcctcgcctgcgtcgagctcggcgacgccgccgccgccgtcagcgtctaccgcctcatccagtacgacctcgccggcgccccgctcggctcccgcgccgcggtcctcaatcaccacgccgcggtgctcccgctccctgccggcgcagacctctcccgctccgccctcgtcgcgccgctcctcgaccttccgctctccttcctcagagagtacctggtggagaaaaaacagctggggggattgctcattttgctcccgacaaaccagggtgataaggatagtgcggatgacaagggtcaagtcaaaggtgtactgactgagctggagaagttgcttgtgcacgaacaagttccatatccagtgtactttgctttggatgacgacaattttggtaacctgctggcagatatccataaaattgcctcttcaggccaaccagcctctgcaacaacaggaggttacaaacttgtggtgtcctcagcagagcctagaaaagtgtcatctccgaccatttctaatatccagggatggttacctggattgaaaggagagggtgatagtgaacagcttccgactattgccatagttgcaaactatgacaccttcggtgctgcacctgcactttctctgggaagcgacagcaatggaagtggagttgtggctcttctagagattgcaagactattttcacgtttgtattcaaatcctaagacaaggggcaagtacaatattctctttgggttaacatctggtggaccctacaattacaatggaactagcaagtggctaagaggttttgatcagcgtgtacgcgagagcattgactatgcaatttgcttgaacagtgttggttcctggagcaatgacctctggatgcatgtatcaaagcctccagaaaatccctatatcaagcaaatctttgaagaattttcggatgtctctaaagaaatgggtgtttcagttggaatcaagcacaagaagattaatgtctcaaatcctagagtagcatgggaacacgaacagttctcgaggtttagagtgaccgcacttactctttcagaaatgtctacccctcctgaatttttggaaagcactggtggtcttcatgacactagagaatctacagatgttgagtcagtaatccgaactgtcagattagtttctgagagtcttgcgagacacatctatggattgagagggaggaatatcgatgtttttgcagagaatagcagcttagccatcaatcctcgctacgtccggtcctggttggatcttttgtcacggacaccacgagtcgcaccttttctacagaagaatgatcccttcatagcagcgctgaaaaaggaactgtccgagcacacgtctgatgtgcatgttcaaagtgatgcgcttgaaggcatgttcactttctatgatacaactaaagcgactctaaatgtgtaccaggttgcaagtgttacctttgatctgctgttccttctggtgctgggttcctacctgatcgttctcttctgtttcctagtaatcagtacacggggtgtcgacgacctcattaacatattccggcggcctccgtcacgcaaactcaagggggcataggctaggttgtgttttgtgttctagaagaagagatagacatgaggatgacaggagcttcatcattagaaaagtttcagtacaacacaagagaagcgaagcaagctttgcctgataagcttcatcacggtgaaacgggtagacaacgtggcttcagaataacgaaaaggaagtacaacgaagcacgcctcatcaaacatgctttgtcacgatgaaacaatgagacgatccaaggagaaggtgtcactcaagttactagatacaaatgacgatgttactcttgtgacattttgtaaactctgtatgtaattgttgagggcataaatgtaatgacatacgaacccttacgattgcatataaatagatgaacagtacccctgtacttttca

SEQ ID NO: 45315 - DNA, 2092 bp, Zea Mays
aatgcaacgcttggtccgctgacagtaggtagctcacaaaggctgacagatttcaaccacaataactcaatcgtaatcatatgcgatgcaatgatcctcgacaaaaaaaatgatgccatgtcccgtttgcaaattcatagcacattacttgaaggccccactgggattagataacgcaaagttgttcaggaagagaatgcagtggactctcctcagtaggcccatggttgtcctccttgccctgctcgtcacccagttgccctgcagcctgactcaagaaacaaaaggaaaggagaggagagggaatcgaatacgataccttctcttctccctccattcctttcctttgccccaaccatgccatattggagaggcgtcgagatcttatccctcgatccaattccaaacagaaaccgccggagctggaacaagagccgctcgcagcttgctggactctcccgctcctggccccggagccgccggccatggccaagcacaagcagcgcagggtgtaccaagtctggaaaggcaaaaacataatactatgtggtggaaggttgatctttggaccagatgccaaggccaccctgatttccttcgccctaatcgccatccctgtccttgtcttctgcgtctttgtggccagacatctcatacacatcttccctgcatataacgcaggatacgcaattcttgctgccaccataggccttaccatttatatccaggtattgtaccacgaaattcacatccacctgtggaagagttctcttatgatgcttcggctccacatgctcttcagttccctcgagtaaaagaggtcatggtcaatggagttcatgtgaaaatgaaatactgtgaaacttgcatgatataccggcctcctcggtgctcgcactgctccaaatgtgataactgtgtcgagcgctttgatcatcactgcccttgggttgggcaatgtattggagagcgaaattaccggtacttcttctgttttgttgcttcagcggcagtgctttgtatctatgtatgtgcaatgtgtggattgtacatcaggcttctcatgaataggggtcattattcggtggggaaagccattaaagaatctccagcttcattggcagtcatggcatattgtttcatttgcttctggttcgtcggtggtctcactgggttccactcttatcttattgtgacaaacaagacaacatatgagaatatcaagtacaagtacagcaaccaaccaaatgtgtatgaccatggttgtgtgctcaactgccatgaggttttgtgcaaaaaaaggaaaccttctaagatcaacctaagagctattgtccaagaagaacaagaggtagcacggccacagaccagctcttccaatatacgagaagatgaggcaccccaccgtccacgagccaaggttgaggatgatctagaaatgggtcttgacatcctcaagaccacagggcgcaggacggataaattcagcgatgaggaattggagcctgcaactggaagcaatggtattgaatatcgcatgccagattcagagactgagattcctgttaccagaactaagacagagatctttaatgaagttagggatctggacttatcggttagtaatggtgcacaatcttcatctcctgaacaagaacagcacccagacaaactttgctgatggaacaaatggtctctctgcatttccgtagtgcagacaccaaattattcaccagggctgtgaatggttggatttgaaggcagatttcctcctttgccgtctgctttcaggatttaagcctttgcttggccaatcatagattcataggtgtgtaaggatcctccagtttgtgcggtttatggaggttctaaaagattctaggaactgtttgagattcttctggtgtgtgaaggctaattgtacataattttcatagctatatgatcactgaaatgcaaaatgcgtcctctcggcatgggaatgggaataggctgtacctggtcttttctagaaccatacacatcatttggtgaatgctcgatctaaaaccttggttgtcgaaagaattgcaaataaagctatatagtactc

SEQ ID NO: 45316 - DNA, 3402 bp, Zea Mays
aatgcaacgcttggtccgctgacagtaggtagctcacaaaggctgacagatttcaaccacaataactcaatcgtaatcatatgcgatgcaatgatcctcgacaaaaaaaatgatgccatgtcccgtttgcaaattcatagcacattacttgaaggccccactgggattagataacgcaaagttgttcaggaagagaatgcagtggactctcctcagtaggcccatggttgtcctccttgccctgctcgtcacccagttgccctgcagcctgactcaagaaacaaaaggaaaggagaggagagggaatcgaatacgataccttctcttctccctccattcctttcctttgccccaaccatgccatattggagaggcgtcgagatcttatccctcgatccaattccaaacagaaaccgccggagctggaacaagagccgctcgcagcttgctggactctcccgctcctggccccggagccgccggccatggccaagcacaagcagcgcagggtgtaccaagtctggaaaggcaaaaacataatactatgtggtggaaggttgatctttggaccagatgccaaggccaccctgatttccttcgccctaatcgccatccctgtccttgtcttctgcgtctttgtggccagacatctcatacacatcttccctgcatataacgcaggatacgcaattcttgctgccaccataggccttaccatttatgtgagtacccgttctttgcctacttacttctcatttacaacagggtgttatcacccccagtacattcaaattcaattggagaagtttttctaatatgacatcaaatagcatatcggaatagtgaaatctgatggtgctttctaaggaaaaccggtctttttctctctctcaaaccattatattaagaaaaaagaaatgaatgtctaaagcagactttcttaaggaggtcgaaaactcaaaaacgataagactatctgcactcatactactttaaatttatactctaaaaaaatattatgtcctcatcaacaagattatctactctataccacaatcctctacggtcatatttactctatatcttaaccttataccaactaccacatattatattatttcttttcacttcactcccttcactgcataaatcctcctcccttttcagttttcaccacctccgtctgtttacagtaggagagtgtgtacgctataagggctagtttgggagccacaaaaccggaggaggttagaggagctaaaatctcatctttattcaattttgaataagaaggaaattttagcccctctaatctcctccgatttttagatgtagttgcgcgtgccctctcacctctctacgattaattacagtcgttggtgaggtgccctactgtggcattttgtttactgcatgttggtagggtccgctttacaacccccctagaattttgttgtaaccccctagaattgagcctcagggatagtggccgccaggaggcccttggccccagtctttttcccagagaaaaaaaattacactcattttgttgtaacaaaattcagttaatcccacagaggaaggtgaacatgctttacaatttttctgtagtttctacgaggatggggtatttgacatcattatagccatgaaaggaaccataagtggtatttatttttcttttggtcaataccaactaacagcgctatattgcaaccttaagtccctctcatcattaaacatctcaccactcgacatacttggttcttgtacatcttattattattatttgaatagtaaaactatgatcaatcctaaattgctttatgatcatatcttctcctgcatgctatgttctataagcacctgttctccagaatttatgtcctctttgagcaatgtagactttgttatgccactatttatttcctactctctctttttaatgtgtgtagcaccaaaatcatagtacccttctctgcaaaacctgattgttaggtactgttactgctcttccttacatcatctcaagatccaggtattgtaccacgaaattcacatccacctgtggaagagttctcttatgatgcttcggctccacatgctcttcagttccctcgagtaaaagaggtcatggtcaatggagttcatgtgaaaatgaaatactgtgaaacttgcatgatataccggcctcctcggtgctcgcactgctccaaatgtgataactgtgtcgagcgctttgatcatcactgcccttgggttgggcaatgtattggagagcgaaattaccggtacttcttctgttttgttgcttcagcggcagtgctttgtatctatgtatgtgcaatgtgtggattgtacatcaggcttctcatgaataggggtcattattcggtggggaaagccattaaagaatctccagcttcattggcagtcatggcatattgtttcatttgcttctggttcgtcggtggtctcactgggttccactcttatcttattgtgacaaacaagacaacatatgagaatatcaagtacaagtacagcaaccaaccaaatgtgtatgaccatggttgtgtgctcaactgccatgaggttttgtgcaaaaaaaggaaaccttctaagatcaacctaagagctattgtccaagaagaacaagaggtagcacggccacagaccagctcttccaatatacgagaagatgaggcaccccaccgtccacgagccaaggttgaggatgatctagaaatgggtcttgacatcctcaagaccacagggcgcaggacggataaattcagcgatgaggaattggagcctgcaactggaagcaatggtattgaatatcgcatgccagattcagagactgagattcctgttaccagaactaagacagagatctttaatgaagttagggatctggacttatcggttagtaatggtgcacaatcttcatctcctgaacaagaacagcacccagacaaactttgctgatggaacaaatggtctctctgcatttccgtagtgcagacaccaaattattcaccagggctgtgaatggttggatttgaaggcagatttcctcctttgccgtctgctttcaggatttaagcctttgcttggccaatcatagattcataggtgtgtaaggatcctccagtttgtgcggtttatggaggttctaaaagattctaggaactgtttgagattcttctggtgtgtgaaggctaattgtacataattttcatagctatatgatcactgaaatgcaaaatgcgtcctctcggcatgggaatgggaataggctgtacctggtcttttctagaaccatacacatcatttggtgaatgctcgatctaaaaccttggttgtcgaaagaattgcaaataaagctatatagtactc

SEQ ID NO: 45317 - DNA, 3707 bp, Zea Mays
aatgcaacgcttggtccgctgacagtaggtagctcacaaaggctgacagatttcaaccacaataactcaatcgtaatcatatgcgatgcaatgatcctcgacaaaaaaaatgatgccatgtcccgtttgcaaattcatagcacattacttgaaggccccactgggattagataacgcaaagttgttcaggaagagaatgcagtggactctcctcagtaggcccatggttgtcctccttgccctgctcgtcacccagttgccctgcagcctgactcaagaaacaaaaggaaaggagaggagagggaatcgaatacgataccttctcttctccctccattcctttcctttgccccaaccatgccatattggagaggcgtcgagatcttatccctcgatccaattccaaacagaaaccgccggagctggaacaagagccgctcgcagcttgctggactctcccgctcctggccccggagccgccggccatggccaagcacaagcagcgcagggtgtaccaagtctggaaaggcaaaaacgtgagtttgattttgccgtccctcgtaccgacaagaaaaggtcgcgcctttcttcgttttggggattgcctaccgtgctaatttcatcttgctttgttgcttgcatccggcggcctagctagctagcatggtcatgtgatggcctagcatggacgggactcataatagttgtaaatatagtctgatttctcatgcctcaacaagctaacatactcctattcagcaacttggttggtgtgagatttttcagtaccttccattctgccgctgctcatctgtgtacgtttctgtttctctttgttcagataatactatgtggtggaaggttgatctttggaccagatgccaaggccaccctgatttccttcgccctaatcgccatccctgtccttgtcttctgcgtctttgtggccagacatctcatacacatcttccctgcatataacgcaggatacgcaattcttgctgccaccataggccttaccatttatgtgagtacccgttctttgcctacttacttctcatttacaacagggtgttatcacccccagtacattcaaattcaattggagaagtttttctaatatgacatcaaatagcatatcggaatagtgaaatctgatggtgctttctaaggaaaaccggtctttttctctctctcaaaccattatattaagaaaaaagaaatgaatgtctaaagcagactttcttaaggaggtcgaaaactcaaaaacgataagactatctgcactcatactactttaaatttatactctaaaaaaatattatgtcctcatcaacaagattatctactctataccacaatcctctacggtcatatttactctatatcttaaccttataccaactaccacatattatattatttcttttcacttcactcccttcactgcataaatcctcctcccttttcagttttcaccacctccgtctgtttacagtaggagagtgtgtacgctataagggctagtttgggagccacaaaaccggaggaggttagaggagctaaaatctcatctttattcaattttgaataagaaggaaattttagcccctctaatctcctccgatttttagatgtagttgcgcgtgccctctcacctctctacgattaattacagtcgttggtgaggtgccctactgtggcattttgtttactgcatgttggtagggtccgctttacaacccccctagaattttgttgtaaccccctagaattgagcctcagggatagtggccgccaggaggcccttggccccagtctttttcccagagaaaaaaaattacactcattttgttgtaacaaaattcagttaatcccacagaggaaggtgaacatgctttacaatttttctgtagtttctacgaggatggggtatttgacatcattatagccatgaaaggaaccataagtggtatttatttttcttttggtcaataccaactaacagcgctatattgcaaccttaagtccctctcatcattaaacatctcaccactcgacatacttggttcttgtacatcttattattattatttgaatagtaaaactatgatcaatcctaaattgctttatgatcatatcttctcctgcatgctatgttctataagcacctgttctccagaatttatgtcctctttgagcaatgtagactttgttatgccactatttatttcctactctctctttttaatgtgtgtagcaccaaaatcatagtacccttctctgcaaaacctgattgttaggtactgttactgctcttccttacatcatctcaagatccaggtattgtaccacgaaattcacatccacctgtggaagagttctcttatgatgcttcggctccacatgctcttcagttccctcgagtaaaagaggtcatggtcaatggagttcatgtgaaaatgaaatactgtgaaacttgcatgatataccggcctcctcggtgctcgcactgctccaaatgtgataactgtgtcgagcgctttgatcatcactgcccttgggttgggcaatgtattggagagcgaaattaccggtacttcttctgttttgttgcttcagcggcagtgctttgtatctatgtatgtgcaatgtgtggattgtacatcaggcttctcatgaataggggtcattattcggtggggaaagccattaaagaatctccagcttcattggcagtcatggcatattgtttcatttgcttctggttcgtcggtggtctcactgggttccactcttatcttattgtgacaaacaagacaacatatgagaatatcaagtacaagtacagcaaccaaccaaatgtgtatgaccatggttgtgtgctcaactgccatgaggttttgtgcaaaaaaaggaaaccttctaagatcaacctaagagctattgtccaagaagaacaagaggtagcacggccacagaccagctcttccaatatacgagaagatgaggcaccccaccgtccacgagccaaggttgaggatgatctagaaatgggtcttgacatcctcaagaccacagggcgcaggacggataaattcagcgatgaggaattggagcctgcaactggaagcaatggtattgaatatcgcatgccagattcagagactgagattcctgttaccagaactaagacagagatctttaatgaagttagggatctggacttatcggttagtaatggtgcacaatcttcatctcctgaacaagaacagcacccagacaaactttgctgatggaacaaatggtctctctgcatttccgtagtgcagacaccaaattattcaccagggctgtgaatggttggatttgaaggcagatttcctcctttgccgtctgctttcaggatttaagcctttgcttggccaatcatagattcataggtgtgtaaggatcctccagtttgtgcggtttatggaggttctaaaagattctaggaactgtttgagattcttctggtgtgtgaaggctaattgtacataattttcatagctatatgatcactgaaatgcaaaatgcgtcctctcggcatgggaatgggaataggctgtacctggtcttttctagaaccatacacatcatttggtgaatgctcgatctaaaaccttggttgtcgaaagaattgcaaataaagctatatagtactc

SEQ ID NO: 45318 - DNA, 2241 bp, Zea Mays
ctttcttaaccaatactagctgagcgcgggtggacctgaattgatacagaaacacacattgaattcccctgcaatgcaacgcttggtccgctgacagtaggtagctcacaaaggctgacagatttcaaccacaataactcaatcgtaatcatatgcgatgcaatgatcctcgacaaaaaaaatgatgccatgtcccgtttgcaaattcatagcacattacttgaaggccccactgggattagataacgcaaagttgttcaggaagagaatgcagtggactctcctcagtaggcccatggttgtcctccttgccctgctcgtcacccagttgccctgcagcctgactcaagaaacaaaaggaaaggagaggagagggaatcgaatacgataccttctcttctccctccattcctttcctttgccccaaccatgccatattggagaggcgtcgagatcttatccctcgatccaattccaaacagaaaccgccggagctggaacaagagccgctcgcagcttgctggactctcccgctcctggccccggagccgccggccatggccaagcacaagcagcgcagggtgtaccaagtctggaaaggcaaaaacataatactatgtggtggaaggttgatctttggaccagatgccaaggccaccctgatttccttcgccctaatcgccatccctgtccttgtcttctgcgtctttgtggccagacatctcatacacatcttccctgcatataacgcaggatacgcaattcttgctgccaccataggccttaccatttatcaccaaaatcatagtacccttctctgcaaaacctgattgttaggtactgttactgctcttccttacatcatctcaagatccaggtattgtaccacgaaattcacatccacctgtggaagagttctcttatgatgcttcggctccacatgctcttcagttccctcgagtaaaagaggtcatggtcaatggagttcatgtgaaaatgaaatactgtgaaacttgcatgatataccggcctcctcggtgctcgcactgctccaaatgtgataactgtgtcgagcgctttgatcatcactgcccttgggttgggcaatgtattggagagcgaaattaccggtacttcttctgttttgttgcttcagcggcagtgctttgtatctatgtatgtgcaatgtgtggattgtacatcaggcttctcatgaataggggtcattattcggtggggaaagccattaaagaatctccagcttcattggcagtcatggcatattgtttcatttgcttctggttcgtcggtggtctcactgggttccactcttatcttattgtgacaaacaagacaacatatgagaatatcaagtacaagtacagcaaccaaccaaatgtgtatgaccatggttgtgtgctcaactgccatgaggttttgtgcaaaaaaaggaaaccttctaagatcaacctaagagctattgtccaagaagaacaagaggtagcacggccacagaccagctcttccaatatacgagaagatgaggcaccccaccgtccacgagccaaggttgaggatgatctagaaatgggtcttgacatcctcaagaccacagggcgcaggacggataaattcagcgatgaggaattggagcctgcaactggaagcaatggtattgaatatcgcatgccagattcagagactgagattcctgttaccagaactaagacagagatctttaatgaagttagggatctggacttatcggttagtaatggtgcacaatcttcatctcctgaacaagaacagcacccagacaaactttgctgatggaacaaatggtctctctgcatttccgtagtgcagacaccaaattattcaccagggctgtgaatggttggatttgaaggcagatttcctcctttgccgtctgctttcaggatttaagcctttgcttggccaatcatagattcataggtgtgtaaggatcctccagtttgtgcggtttatggaggttctaaaagattctaggaactgtttgagattcttctggtgtgtgaaggctaattgtacataattttcatagctatatgatcactgaaatgcaaaatgcgtcctctcggcatgggaatgggaataggctgtacctggtcttttctagaaccatacacatcatttggtgaatgctcgatctaaaaccttggttgtcgaaagaattgcaaataaagctatatagtactc

SEQ ID NO: 45319 - DNA, 1810 bp, Zea Mays
aaaaagaaaataaaaatatggttcccaaattagcccttgattagtaaggtcaatcaacggatagttttatgcggccgccatgttaataactgttagtaaatagtgtatctaaagttttattctactctcttttatttttcatagaactctcttatatctctttattaaattacatctcataagaatggtgtagctgtgctgttgcaataaaaaaaaggttgtaggccgagtcctctgtcctcctcagtcctcaccaaaccaccacgagagcgcttcgccgcttcctcctgctcgtcctcctcggccctcgccgttgccgtccatcccaatcaatcaatggcgcctgcccgtctcctgccacggctgccgctcttctgggccgccctgctcttgttgccgtttgcgcacccggcagcggcggcgcaggtgggcgacgcgtgctcctcctcctccggcgccgcctccgccaccggctccgcgctcatcaccgagaccaaccaggaggacgccgtcaccgcgcagctcaagaacggtgttaggggcctgatgctcgacacgtacgacttcgacaacgatgtctggttgtgccactcgttccaaggaaaatgctacaacttcactgccttccaacctgccatcaatgtgttcaaagagatccagacattcctcgacgcgaacccgtcgcaagtggtcacgatcttcctagaagactacaccgcggtagggtccttgccgagagtgttcaacgcctccggcctcacgaagtactggttcccggtggcaaagatgccgaagagcggcggcgactggcctctgctcaaggacatgatcagccagaaccagcgcctgctagtcttcacctcaaagagagccaaggaggcgagcgaggggatcgcgtatgagtggaactacgtcgtggagaaccaatacggagatgagggcatggtagcaggcaaatgcccccaaccgcgcagagtctccggccatggattccaaaggccagtcgcttgtcctgatgaacttcttcacgactaacccgagccagaccggtgcctgcgggaacaattcggcgccactcgacagcatgctgaagacgtgccatgacgcttcaggcaaccggtggccgaactacatcgctgttgatttttacatgagaagtgacggtggaggagctcccttggctacggacattgcgaacggtcatatggtgtgcggatgcgacaacatcgcgtattgcaaggcgaattcgacattcgggacctgcgtgatacccccaccgccgccgccgtcaccgcccaaggcatccacccccggcagcagaggctcaacagcaggcggcgatgctagcgctggaacgatggccctgtcctcgcaatggagcttcttgctgggactggcttctctgcttcttttgtcgcgctcgtgagagccgagcggcattggtgactggttttgctgctcttgctacatgctctgcgagctgataggagcatcgtcccatgagatgagctgaggctgagctgaactgagctgtatatttgggtttactgcgcaacgtagttagttggatacgggaatcagttaaattcatcattcatttttattgattggcgtcgttatcgtgaatgttctaataagttccttaaaaaaatgtctcatggccctactgtcagtgacgtagccatgtgaaccgggagagagaaattacagcgtgtttatcttgttcgaagtgctttcaggctattttcagaggaacatattggttgcggtatagtgtattgctgcagcatgaggacgtgacaaaggagaa

SEQ ID NO: 45320 - DNA, 1476 bp, Zea Mays
actgcccctttttatctttccaaatggtgtcatctggaacttgagctcaaattgactccaatgttcagttggtggtcaacagatgagttgaacggtgttaggggcctgatgctcgacacgtacgacttcgacaacgatgtctggttgtgccactcgttccaaggaaaatgctacaacttcactgccttccaacctgccatcaatgtgttcaaagagatccagacattcctcgacgcgaacccgtcgcaagtggtcacgatcttcctagaagactacaccgcggtagggtccttgccgagagtgttcaacgcctccggcctcacgaagtactggttcccggtggcaaagatgccgaagagcggcggcgactggcctctgctcaaggacatgatcagccagaaccagcgcctgctagtcttcacctcaaagagagccaaggaggcgagcgaggggatcgcgtatgagtggaactacgtcgtggagaaccaatacggagatgagggcatggtagcaggcaaatgcccccaaccgcgcagagtctccggccatggattccaaaggccagtcgcttgtcctgatgaacttcttcacgactaacccgagccagaccggtgcctgcgggaacaattcggcgccactcgacagcatgctgaagacgtgccatgacgcttcaggcaaccggtggccgaactacatcgctgttgatttttacatgagaagtgacggtggaggagctcccttggctacggacattgcgaacggtcatatggtgtgcggatgcgacaacatcgcgtattgcaaggcgaattcgacattcgggacctgcgtgatacccccaccgccgccgccgtcaccgcccaaggcatccacccccggcagcagaggctcaacagcaggcggcgatgctagcgctggaacgatggccctgtcctcgcaatggagcttcttgctgggactggcttctctgcttcttttgtcgcgctcgtgagagccgagcggcattggtgactggttttgctgctcttgctacatgctctgcgagctgataggagcatcgtcccatgagatgagctgaggctgagctgaactgagctgtatatttgggtttactgcgcaacgtagttagttggatacgggaatcagttaaattcatcattcatttttattgattggcgtcgttatcgtgaatgttctaataagttccttaaaaaaatgtctcatggccctactgtcagtgacgtagccatgtgaaccgggagagagaaattacagcgtgtttatcttgttcgaagtgctttcaggtccggactatcgattttttttttctattgtctcctttagctcggcatcgctgcagtgcataggcttatctcagaaccacggcagttttagctcggtatacccaaaagcatgaaattgttactaagtgtttttgaagaactttcagtctaaagataaatttccataaaaacaaaa

SEQ ID NO: 45321 - DNA, 2533 bp, Zea Mays
cccctctctgcttgttcttagcactgcaattgatatctctaggaaactatggcatttttcctttgtgggattaaccaagttctgctagaacagtatgaagtaaaccatgctaagacatcgatttggacaatattgacgacattgacatcgagagcagaggtgacttcatttgcataatgtgatgctcacgcctggtttaggtagtagagtagtagcaatgagcttcctttgattgtcgctcacgagagagtagaagagtagcagtacgacaggttcaggtagcagaatagcagtagcattgccatagatcatgcacttatatgctgagatctgcacaaaaattctatgaccagttgaatcagcacatccattcccctacgatttctgttatcgatcagaaatggtatagcttgtatcacttcaacaatctgtagttcgtttttatagaatcatttcatggatctcaatattagcggccatagtttttagctgcatataaatgtcatttgtttgtaacccaataaagtattttaggcaaattttgactgatttaaatgttcagcctggacagtgacttcagacagtatagatggtaccagtgtcagtccattacaaggttttgcattatactgcattttctgcaaaagtagcagttaccaagtgccatgtgccctcgttctgcatcatcactttgctcgttcagaagtactgaagtagtaattaacacccctttctataatgattagatgcaccaaactataaaacacatgacaccagtttgtaaaaatacctgcatcctaaggttattctgctctactctgctgctaaattcaacatccagattacttggtagaggtagcaaggccttgatcctagcacgaaatgagaaaaaagttgacgtcaccttcttgtatgaactatacactttaggatcccttcttcctaaacgcgggctggcagtgttgggttcttctattgtgcttttgtgcattggacaagacaagaagttcttgggacaaactggaggtttcatgtgcccattggcgcgggagtccggggaagagagcgtcggctcctttaggatcgggtcgtcgatgctgctgggccacggggtgacgatccgtgtgctcctcttcagctcgatgtggcacctgcgggggcgcgcgtacgccgccatctcgcgcgtgcgcagcgcgacgttgccggtggcggcgtcctggctgcgcttcaagaacacccacgtcctcctcatggtcgtcctcttcgccctcttcttacggaagctctctggcgctgatcttccgagatgtttgcaatgttgtctttgcgatgcattgccagacgccacctcttgctcacagggacctaaaggtagaaaatgttcttgctgctgatggggcatggaaactatgtgattttggtagtgtatcgacaaatcataagtgctttgataaacctgaggagatgggcattgaagaagataacatcaggaagcacactactccttcatataagttaccagtgagaaagtagatatctggactcttgggtgtctcttgtatagaatctgctacttcaaatcagcattcgatggagaatcaaagctccaaatacttaacgggaactatcgcatcctagaattgccgaagtacagttcttctaattcaacacttaccaaagacatgcttaattcttctacagatgccagacaggacatcacacaggcaagtgctttgcttgattggccattcacagtgaacaggcaggacaagattgcgagttcaaaataatgtcaacctggcagtctattatatcatatattgtggcaccacatctcagataaaaaggtgagtccaggaatgaggattcacgaacactgcaattcaattatggttcattcaaacataagggatttttgaagcactaattgcagtgtatcaactccgctctcaaatataagtgaaaaaagaacctatgtcagtcctttagaaaatatcttctcagggatggtttcagcttgaaggttcgagctttgcatattgccaaagaagctttagatatggtacttgcagatgataacttcagtactatagttgcagcagttggtgaagggaggtctatttacaacaacatgaaggcttttattaggtccattttttagataatctatggccaaacattttttgaatcctaggcctgttgcagcggtgagagttgtctagaaaggcttgtctcagttaatcccttactccaaccctactgatggggagcctttggtgccgtatgtgcactaagggacttcattctatctgattatgcaaagaaaaacaatgtcaatacttctgcactaacacaatctgaaatgcgagatatcatccttggtgctgaattgctccaccatcacagcaacagtcgagagactgctcagttagctgctgtaatcacaaggatagcgaatgtgcacggagatgaactcattatcacaaccacaagtccatatgagcaacaagcattcgcatcgaagactgattga

SEQ ID NO: 45322 - DNA, 2482 bp, Zea Mays
cccctctctgcttgttcttagcactgcaattgatatctctaggaaactatggcatttttcctttgtgggattaaccaagttctgctagaacagtatgaagtaaaccatgctaagacatcgatttggacaatattgacgacattgacatcgagagcagaggtgacttcatttgcataatgtgatgctcacgcctggtttaggtagtagagtagtagcaatgagcttcctttgattgtcgctcacgagagagtagaagagtagcagtacgacaggttcaggtagcagaatagcagtagcattgccatagatcatgcacttatatgctgagatctgcacaaaaattctatgaccagttgaatcagcacatccattcccctacgatttctgttatcgatcagaaatggtatagcttgtatcacttcaacaatctgtagttcgtttttatagaatcatttcatggatctcaatattagcggccatagtttttagctgcatataaatgtcatttgtttgtaacccaataaagtattttaggcaaattttgactgatttaaatgttcagcctggacagtgacttcagacagtatagatggtaccagtgtcagtccattacaaggttttgcattatactgcattttctgcaaaagtagcagttaccaagtgccatgtgccctcgttctgcatcatcactttgctcgttcagaagtactgaagtagtaattaacacccctttctataatgattagatgcaccaaactataaaacacatgacaccagtttgtaaaaatacctgcatcctaaggttattctgctctactctgctgctaaattcaacatccagattacttggtagaggtagcaaggccttgatcctagcacgaaatgagaaaaaagttgacgtcaccttcttgtatgaactatacactttaggatcccttcttcctaaacgcgggctggcagtgttgggttcttctattgtgcttttgtgcattggacaagacaagaagttcttgggacaaactggaggtttcatgtgcccattggcgcgggagtccggggaagagagcgtcggctcctttaggatcgggtcgtcgatgctgctgggccacggggtgacgatccgtgtgctcctcttcagctcgatgtggcacctgcgggggcgcgcgtacgccgccatctcgcgcgtgcgcagcgcgacgttgccggtggcggcgtcctggctgcgcttcaagaacacccacgtcctcctcatggtcgtcctcttcgccctcttcttacggaagctctctggcgctgatcttccgagatgtttgcaatgttgtctttgcgatgcattgccagacgccacctcttgctcacagggacctaaaggtagaaaatgttcttgctgctgatggggcatggaaactatgtgattttggtagtgtatcgacaaatcataagtgctttgataaacctgaggagatgggcattgaagaagataacatcaggaagcacactactccttcatataagttaccagtgagaaagtagatatctggactcttgggtgtctcttgtatagaatctgctacttcaaatcagcattcgatggagaatcaaagctccaaatacttaacgggaactatcgcatcctagaattgccgaagtacagttcttctaattcaacacttaccaaagacatgcttaattcttctacagatgccagacaggacatcacacaggcaagtgctttgcttgattggccattcacagtgaacaggcaggacaagattgcgagttcaaaataatgtcaacctggcagtctattatatcatatattgtggcaccacatctcagataaaaaggtgagtccaggaatgaggattcacgaacactgcaattcaattatggttcattcaaacataagggatttttgaagcactaattgcagtgtatcaactccgctctcaaatataagtgaaaaaagaacctatgtcagtcctttattgccaaagaagctttagatatggtacttgcagatgataacttcagtactatagttgcagcagttggtgaagggaggtctatttacaacaacatgaaggcttttattaggtccattttttagataatctatggccaaacattttttgaatcctaggcctgttgcagcggtgagagttgtctagaaaggcttgtctcagttaatcccttactccaaccctactgatggggagcctttggtgccgtatgtgcactaagggacttcattctatctgattatgcaaagaaaaacaatgtcaatacttctgcactaacacaatctgaaatgcgagatatcatccttggtgctgaattgctccaccatcacagcaacagtcgagagactgctcagttagctgctgtaatcacaaggatagcgaatgtgcacggagatgaactcattatcacaaccacaagtccatatgagcaacaagcattcgcatcgaagactgattga

SEQ ID NO: 45323 - DNA, 3231 bp, Zea Mays
cccctctctgcttgttcttagcactgcaattgatatctctaggaaactatggcatttttcctttgtgggattaaccaagttctgctagaacagtatgaagtaaaccatgctaagacatcgatttggacaatattgacgacattgacatcgagagcagaggtgacttcatttgcataatgtgatgctcacgcctggtttaggtagtagagtagtagcaatgagcttcctttgattgtcgctcacgagagagtagaagagtagcagtacgacaggttcaggtagcagaatagcagtagcattgccatagatcatgcacttatatgctgagatctgcacaaaaattctatgaccagttgaatcagcacatccattcccctacgatttctgttatcgatcagaaatggtatagcttgtatcacttcaacaatctgtagttcgtttttatagaatcatttcatggatctcaatattagcggccatagtttttagctgcatataaatgtcatttgtttgtaacccaataaagtattttaggcaaattttgactgatttaaatgttcagcctggacagtgacttcagacagtatagatggtaccagtgtcagtccattacaaggttttgcattatactgcattttctgcaaaagtagcagttaccaagtgccatgtgccctcgttctgcatcatcactttgctcgttcagaagtactgaagtagtaattaacacccctttctataatgattagatgcaccaaactataaaacacatgacaccagtttgtaaaaatacctgcatcctaaggttattctgctctactctgctgctaaattcaacatccagattacttggtagaggtagcaaggccttgatcctagcacgaaatgagaaaaaagttgacgtcaccttcttgtatgaactatacactttaggatcccttcttcctaaacgcgggctggcagtgttgggttcttctattgtgcttttgtgcattggacaagacaagaagttcttgggacaaactggaggtttcatgtgcccattggcgcgggagtccggggaagagagcgtcggctcctttaggatcgggtcgtcgatgctgctgggccacggggtgacgatccgtgtgctcctcttcagctcgatgtggcacctgcgggggcgcgcgtacgccgccatctcgcgcgtgcgcagcgcgacgttgccggtggcggcgtcctggctgcgcttcaagaacacccacgtcctcctcatggtcgtcctcttcgccctcttcttacggaagctctctggcgctgatcttccgagatgtttgcaatgttgtctttgcgatgcattgccagacgccacctcttgctcacagggacctaaaggtagaaaatgttcttgctgctgatggggcatggaaactatgtgattttggtagtgtatcgacaaatcataagtgctttgataaacctgaggagatgggcattgaagaagataacatcaggaagcacactactccttcatataagttaccagtgagaaagtagatatctggactcttgggtgtctcttgtatagaatctgctacttcaaatcagcattcgatggagaatcaaagctccaaatacttaacgggaactatcgcatcctagaattgccgaagtacagttcttctaattcaacacttaccaaagacatgcttaattcttctacagatgccagacaggacatcacacaggcaagtgctttgcttgattggccattcacagtgaacaggcaggacaagattgcgagttcaaaataatgtcaacctggcagtctattatatcatatattgtggcaccacatctcagataaaaaggtatcttactagagtcaaaaggggccgagtgtcacttgcaaattgtcagaaaaatacataaatatacggaacattgatgattattatatgatgcatagatagatagatccatcatcattggctcatagcaaaacaacattcatcttcaatgatagtttttagactagaaaataacctaatacatgcagcagcaaccagagattaagttgatctgtccagtgcattcccatccccaccatctggtgagtccttttatttgttcttctgtaaaaatttagaaatgtctctttgttttacaggtgagtccaggaatgaggattcacgaacactgcaattcaattatggttcattcaaacataagggatttttgaagcactaattgcagtgtatcaactccgctctcaaatataagtgaaaaaagaacctatgtcagtcctttgtatcctggatttctatgaaattttagttgtttgcctcttcaattttgtgcttggcattgttggttttatactctgatcactgcattgacactgtgttttggtttggtgttttcagtctgcatgcttgatagaaatgcttctattagcacgcattttgcatttaagatatggtcacttttatgttcttttttattgcaagtcgcaatcacatatgacccaagcaacatgtatctgctctcaaaactgagatatggacatgtggtatgtatatattgctgatgcatatttcaaaatttggagctgatacatgttgctctttaatctattcattgtggttgaaaaatatatctgacaaccagccatctgtttagtttatagttttagtccttaagcttcagagaaaatatcttctcagggatggtttcagcttgaaggttcgagctttgcatattgccaaagaagctttagatatggtacttgcagatgataacttcagtactatagttgcagcagttggtgaagggaggtctatttacaacaacatgaaggcttttattaggtccattttttagataatctatggccaaacattttttgaatcctaggcctgttgcagcggtgagagttgtctagaaaggcttgtctcagttaatcccttactccaaccctactgatggggagcctttggtgccgtatgtgcactaagggacttcattctatctgattatgcaaagaaaaacaatgtcaatacttctgcactaacacaatctgaaatgcgagatatcatccttggtgctgaattgctccaccatcacagcaacagtcgagagactgctcagttagctgctgtaatcacaaggatagcgaatgtgcacggagatgaactcattatcacaaccacaagtccatatgagcaacaagcattcgcatcgaagactgattga

SEQ ID NO: 45324 - DNA, 2454 bp, Zea Mays
cccctctctgcttgttcttagcactgcaattgatatctctaggaaactatggcatttttcctttgtgggattaaccaagttctgctagaacagtatgaagtaaaccatgctaagacatcgatttggacaatattgacgacattgacatcgagagcagaggtgacttcatttgcataatgtgatgctcacgcctggtttaggtagtagagtagtagcaatgagcttcctttgattgtcgctcacgagagagtagaagagtagcagtacgacaggttcaggtagcagaatagcagtagcattgccatagatcatgcacttatatgctgagatctgcacaaaaattctatgaccagttgaatcagcacatccattcccctacgatttctgttatcgatcagaaatggtatagcttgtatcacttcaacaatctgtagttcgtttttatagaatcatttcatggatctcaatattagcggccatagtttttagctgcatataaatgtcatttgtttgtaacccaataaagtattttaggcaaattttgactgatttaaatgttcagcctggacagtgacttcagacagtatagatggtaccagtgtcagtccattacaaggttttgcattatactgcattttctgcaaaagtagcagttaccaagtgccatgtgccctcgttctgcatcatcactttgctcgttcagaagtactgaagtagtaattaacacccctttctataatgattagatgcaccaaactataaaacacatgacaccagtttgtaaaaatacctgcatcctaaggttattctgctctactctgctgctaaattcaacatccagattacttggtagaggtagcaaggccttgatcctagcacgaaatgagaaaaaagttgacgtcaccttcttgtatgaactatacactttaggatcccttcttcctaaacgcgggctggcagtgttgggttcttctattgtgcttttgtgcattggacaagacaagaagttcttgggacaaactggaggtttcatgtgcccattggcgcgggagtccggggaagagagcgtcggctcctttaggatcgggtcgtcgatgctgctgggccacggggtgacgatccgtgtgctcctcttcagctcgatgtggcacctgcgggggcgcgcgtacgccgccatctcgcgcgtgcgcagcgcgacgttgccggtggcggcgtcctggctgcgcttcaagaacacccacgtcctcctcatggtcgtcctcttcgccctcttcttacggaagctctctggcgctgatcttccgagatgtttgcaatgttgtctttgcgatgcattgccagacgccacctcttgctcacagggacctaaaggtagaaaatgttcttgctgctgatggggcatggaaactatgtgattttggtagtgtatcgacaaatcataagtgctttgataaacctgaggagatgggcattgaagaagataacatcaggaagcacactactccttcatataagttaccagtgagaaagtagatatctggactcttgggtgtctcttgtatagaatctgctacttcaaatcagcattcgatggagaatcaaagctccaaatacttaacgggaactatcgcatcctagaattgccgaagtacagttcttctaattcaacacttaccaaagacatgcttaattcttctacagatgccagacaggacatcacacaggcaagtgctttgcttgattggccattcacagtgaacaggcaggacaagattgcgagttcaaaataatgtcaacctggcagtctattatatcatatattgtggcaccacatctcagataaaaagggatttttgaagcactaattgcagtgtatcaactccgctctcaaatataagtgaaaaaagaacctatgtcagtcctttggatggtttcagcttgaaggttcgagctttgcatattgccaaagaagctttagatatggtacttgcagatgataacttcagtactatagttgcagcagttggtgaagggaggtctatttacaacaacatgaaggcttttattaggtccattttttagataatctatggccaaacattttttgaatcctaggcctgttgcagcggtgagagttgtctagaaaggcttgtctcagttaatcccttactccaaccctactgatggggagcctttggtgccgtatgtgcactaagggacttcattctatctgattatgcaaagaaaaacaatgtcaatacttctgcactaacacaatctgaaatgcgagatatcatccttggtgctgaattgctccaccatcacagcaacagtcgagagactgctcagttagctgctgtaatcacaaggatagcgaatgtgcacggagatgaactcattatcacaaccacaagtccatatgagcaacaagcattcgcatcgaagactgattga

SEQ ID NO: 45325 - DNA, 2469 bp, Zea Mays
cccctctctgcttgttcttagcactgcaattgatatctctaggaaactatggcatttttcctttgtgggattaaccaagttctgctagaacagtatgaagtaaaccatgctaagacatcgatttggacaatattgacgacattgacatcgagagcagaggtgacttcatttgcataatgtgatgctcacgcctggtttaggtagtagagtagtagcaatgagcttcctttgattgtcgctcacgagagagtagaagagtagcagtacgacaggttcaggtagcagaatagcagtagcattgccatagatcatgcacttatatgctgagatctgcacaaaaattctatgaccagttgaatcagcacatccattcccctacgatttctgttatcgatcagaaatggtatagcttgtatcacttcaacaatctgtagttcgtttttatagaatcatttcatggatctcaatattagcggccatagtttttagctgcatataaatgtcatttgtttgtaacccaataaagtattttaggcaaattttgactgatttaaatgttcagcctggacagtgacttcagacagtatagatggtaccagtgtcagtccattacaaggttttgcattatactgcattttctgcaaaagtagcagttaccaagtgccatgtgccctcgttctgcatcatcactttgctcgttcagaagtactgaagtagtaattaacacccctttctataatgattagatgcaccaaactataaaacacatgacaccagtttgtaaaaatacctgcatcctaaggttattctgctctactctgctgctaaattcaacatccagattacttggtagaggtagcaaggccttgatcctagcacgaaatgagaaaaaagttgacgtcaccttcttgtatgaactatacactttaggatcccttcttcctaaacgcgggctggcagtgttgggttcttctattgtgcttttgtgcattggacaagacaagaagttcttgggacaaactggaggtttcatgtgcccattggcgcgggagtccggggaagagagcgtcggctcctttaggatcgggtcgtcgatgctgctgggccacggggtgacgatccgtgtgctcctcttcagctcgatgtggcacctgcgggggcgcgcgtacgccgccatctcgcgcgtgcgcagcgcgacgttgccggtggcggcgtcctggctgcgcttcaagaacacccacgtcctcctcatggtcgtcctcttcgccctcttcttacggaagctctctggcgctgatcttccgagatgtttgcaatgttgtctttgcgatgcattgccagacgccacctcttgctcacagggacctaaaggtagaaaatgttcttgctgctgatggggcatggaaactatgtgattttggtagtgtatcgacaaatcataagtgctttgataaacctgaggagatgggcattgaagaagataacatcaggaagcacactactccttcatataagttaccagtgagaaagtagatatctggactcttgggtgtctcttgtatagaatctgctacttcaaatcagcattcgatggagaatcaaagctccaaatacttaacgggaactatcgcatcctagaattgccgaagtacagttcttctaattcaacacttaccaaagacatgcttaattcttctacagatgccagacaggacatcacacaggcaagtgctttgcttgattggccattcacagtgaacaggcaggacaagattgcgagttcaaaataatgtcaacctggcagtctattatatcatatattgtggcaccacatctcagataaaaagggatttttgaagcactaattgcagtgtatcaactccgctctcaaatataagtgaaaaaagaacctatgtcagtcctttaaaatatcttctcagggatggtttcagcttgaaggttcgagctttgcatattgccaaagaagctttagatatggtacttgcagatgataacttcagtactatagttgcagcagttggtgaagggaggtctatttacaacaacatgaaggcttttattaggtccattttttagataatctatggccaaacattttttgaatcctaggcctgttgcagcggtgagagttgtctagaaaggcttgtctcagttaatcccttactccaaccctactgatggggagcctttggtgccgtatgtgcactaagggacttcattctatctgattatgcaaagaaaaacaatgtcaatacttctgcactaacacaatctgaaatgcgagatatcatccttggtgctgaattgctccaccatcacagcaacagtcgagagactgctcagttagctgctgtaatcacaaggatagcgaatgtgcacggagatgaactcattatcacaaccacaagtccatatgagcaacaagcattcgcatcgaagactgattga

SEQ ID NO: 45326 - DNA, 2157 bp, Zea Mays
ctactatgtgcaatcacacatacagggcaaccacctcaatgattcgttggtgttttcccctctctgcttgttcttagcactgcaattgatatctctaggaaactatggcatttttcctttgtgggattaaccaagttctgctagaacagtatgaagtaaaccatgctaagacatcgatttggacaatattgacgacattgacatcgagagcagaggtgacttcatttgcataatgtgatgctcacgcctggtttaggtagtagagtagtagcaatgagcttcctttgattgtcgctcacgagagagtagaagagtagcagtacgacaggttcaggtagcagaatagcagtagcattgccatagatcatgcacttatatgctgagatctgcacaaaaattctatgaccagttgaatcagcacatccattcccctacgatttctgttatcgatcagaaatggtatagcttgtatcacttcaacaatctgtagttcgtttttatagaatcatttcatggatctcaatattagcggccatagtttttagctgcatataaatgtcatttgtttgtaacccaataaagtattttaggcaaattttgactgatttaaatgttcagcctggacagtgacttcagacagtatagatggtaccagtgtcagtccattacaaggttttgcattatactgcattttctgcaaaagtagcagttaccaagtgccatgtgccctcgttctgcatcatcactttgctcgttcagaagtactgaagtagtaattaacacccctttctataatgattagatgcaccaaactataaaacacatgacaccagtttgtaaaaatacctgcatcctaaggttattctgctctactctgctgctaaattcaacatccagattacttggtagaggtagcaaggccttgatcctagcacgaaatgagaaaaaagttgacgtcaccttcttgtatgaactatacactttaggatcccttcttcctaaacgcgggctggcagtgttgggttcttctattgtgcttttgtgcattggacaagacaagaagttcttgggacaaactggaggtttcatgtgcccattggcgcgggagtccggggaagagagcgtcggctcctttaggatcgggtcgtcgatgctgctgggccacggggtgacgatccgtgtgctcctcttcagctcgatgtggcacctgcgggggcgcgcgtacgccgccatctcgcgcgtgcgcagcgcgacgttgccggtggcggcgtcctggctgcgcttcaagaacacccacgtcctcctcatggtcgtcctcttcgccctcttcttacggaagctctctggcgctgatcttccgagatgtttgcaatgttgtctttgcgatgcattgccagacgccacctcttgctcacagggacctaaaggtagaaaatgttcttgctgctgatggggcatggaaactatgtgattttggtagtgtatcgacaaatcataagtgctttgataaacctgaggagatgggcattgaagaagataacatcaggaagcacactactccttcatataagttaccagtgagaaagtagatatctggactcttgggtgtctcttgtatagaatctgctacttcaaatcagcattcgatggagaatcaaagctccaaatacttaacgggaactatcgcatcctagaattgccgaagtacagttcttctaattcaacacttaccaaagacatgcttaattcttctacagatgccagacaggacatcacacaggtgagtccaggaatgaggattcacgaacactgcaattcaattatggttcattcaaacataaggcattggataaatccttaactaaaaagtttatagttttagtccttaagcttcagagaaaatatcttctcagggatggtttcagcttgaaggttcgagctttgcataaaaacaatgtcaatacttctgcactaacacaatctgaaatgcgagatatcatccttggtgctgaattgctccaccatcacagcaacagtcgagagactgctcagttagctgctgtaatcacaaggatagcgaatgtgcacggagatgaactcattatcacaaccacaagtccatatgagcaacaagcattcgcatcgaagactgattga

SEQ ID NO: 45327 - DNA, 3023 bp, Zea Mays
gtcagttttacttgatattctgtttctgttccttgtttgtttgaactgaggttgatttaggttgtgaacttgtgatgacaaaaatagcatcttgttgaaactatgcatgtatatacagaaatgatttggacagcgagatatcctgatacatcaagcttttaatgcaatcatagattttgacgttgatagtttttgccaaaaagagtcatagatttttatttactattttaattgccttttttacttacccagtctaataccatctacaaggtacttaattgggtggagttttggttgtgagtctgtcaaattagtatatctatatatatcgaagaatttgtcatctttgtcatttgctcagggaagactagcaaatgttggtgatttagcagtcaaaagagtaaacccagaagcggggatcgtggagctaacaaatcatgtgaactactatgtgcaatcacacatacagggcaaccacctcaatgattcgttggtgttttcccctctctgcttgttcttagcactgcaattgatatctctaggaaactatggcatttttcctttgtgggattaaccaagttctgctagaacagtatgaagtaaaccatgctaagacatcgatttggacaatattgacgacattgacatcgagagcagaggtgacttcatttgcataatgtgatgctcacgcctggtttaggtagtagagtagtagcaatgagcttcctttgattgtcgctcacgagagagtagaagagtagcagtacgacaggttcaggtagcagaatagcagtagcattgccatagatcatgcacttatatgctgagatctgcacaaaaattctatgaccagttgaatcagcacatccattcccctacgatttctgttatcgatcagaaatggtatagcttgtatcacttcaacaatctgtagttcgtttttatagaatcatttcatggatctcaatattagcggccatagtttttagctgcatataaatgtcatttgtttgtaacccaataaagtattttaggcaaattttgactgatttaaatgttcagcctggacagtgacttcagacagtatagatggtaccagtgtcagtccattacaaggttttgcattatactgcattttctgcaaaagtagcagttaccaagtgccatgtgccctcgttctgcatcatcactttgctcgttcagaagtactgaagtagtaattaacacccctttctataatgattagatgcaccaaactataaaacacatgacaccagtttgtaaaaatacctgcatcctaaggttattctgctctactctgctgctaaattcaacatccagattacttggtagaggtagcaaggccttgatcctagcacgaaatgagaaaaaagttgacgtcaccttcttgtatgaactatacactttaggatcccttcttcctaaacgcgggctggcagtgttgggttcttctattgtgcttttgtgcattggacaagacaagaagttcttgggacaaactggaggtttcatgtgcccattggcgcgggagtccggggaagagagcgtcggctcctttaggatcgggtcgtcgatgctgctgggccacggggtgacgatccgtgtgctcctcttcagctcgatgtggcacctgcgggggcgcgcgtacgccgccatctcgcgcgtgcgcagcgcgacgttgccggtggcggcgtcctggctgcgcttcaagaacacccacgtcctcctcatggtcgtcctcttcgccctcttcttacggaagctctctggcgctgatcttccgagatgtttgcaatgttgtctttgcgatgcattgccagacgccacctcttgctcacagggacctaaaggtagaaaatgttcttgctgctgatggggcatggaaactatgtgattttggtagtgtatcgacaaatcataagtgctttgataaacctgaggagatgggcattgaagaagataacatcaggaagcacactactccttcatataagttaccagtgagaaagtagatatctggactcttgggtgtctcttgtatagaatctgctacttcaaatcagcattcgatggagaatcaaagctccaaatacttaacgggaactatcgcatcctagaattgccgaagtacagttcttctaattcaacacttaccaaagacatgcttaattcttctacagatgccagacaggacatcacacaggcaagtgctttgcttgattggccattcacagtgaacaggcaggacaagattgcgagttcaaaataatgtcaacctggcagtctattatatcatatattgtggcaccacatctcagataaaaaggtatcttactagagtcaaaaggggccgagtgtcacttgcaaattgtcagaaaaatacataaatatacggaacattgatgattattatatgatgcatagatagatagatccatcatcattggctcatagcaaaacaacattcatcttcaatgatagtttttagactagaaaataacctaatacatgcagcagcaaccagagattaagttgatctgtccagtgcattcccatccccaccatctggtgagtccttttatttgttcttctgtaaaaatttagaaatgtctctttgttttacaggtgagtccaggaatgaggattcacgaacactgcaattcaattatggttcattcaaacataaggcattggataaatccttaactaaaaagtttatagttttagtccttaagcttcagagaaaatatcttctcagggatggtttcagcttgaaggttcgagctttgcataaaaacaatgtcaatacttctgcactaacacaatctgaaatgcgagatatcatccttggtgctgaattgctccaccatcacagcaacagtcgagagactgctcagttagctgctgtaatcacaaggatagcgaatgtgcacggagatgaactcattatcacaaccacaagtccatatgagcaacaagcattcgcatcgaagactgattga

SEQ ID NO: 45328 - DNA, 3493 bp, Zea Mays
gtcagttttacttgatattctgtttctgttccttgtttgtttgaactgaggttgatttaggttgtgaacttgtgatgacaaaaatagcatcttgttgaaactatgcatgtatatacagaaatgatttggacagcgagatatcctgatacatcaagcttttaatgcaatcatagattttgacgttgatagtttttgccaaaaagagtcatagatttttatttactattttaattgccttttttacttacccagtctaataccatctacaaggtacttaattgggtggagttttggttgtgagtctgtcaaattagtatatctatatatatcgaagaatttgtcatctttgtcatttgctcagggaagactagcaaatgttggtgatttagcagtcaaaagagtaaacccagaagcggggatcgtggagctaacaaatcatgtgaactactatgtgcaatcacacatacagggcaaccacctcaatgattcgttggtgttttcccctctctgcttgttcttagcactgcaattgatatctctaggaaactatggcatttttcctttgtgggattaaccaagttctgctagaacagtatgaagtaaaccatgctaagacatcgatttggacaatattgacgacattgacatcgagagcagaggtgacttcatttgcataatgtgatgctcacgcctggtttaggtagtagagtagtagcaatgagcttcctttgattgtcgctcacgagagagtagaagagtagcagtacgacaggttcaggtagcagaatagcagtagcattgccatagatcatgcacttatatgctgagatctgcacaaaaattctatgaccagttgaatcagcacatccattcccctacgatttctgttatcgatcagaaatggtatagcttgtatcacttcaacaatctgtagttcgtttttatagaatcatttcatggatctcaatattagcggccatagtttttagctgcatataaatgtcatttgtttgtaacccaataaagtattttaggcaaattttgactgatttaaatgttcagcctggacagtgacttcagacagtatagatggtaccagtgtcagtccattacaaggttttgcattatactgcattttctgcaaaagtagcagttaccaagtgccatgtgccctcgttctgcatcatcactttgctcgttcagaagtactgaagtagtaattaacacccctttctataatgattagatgcaccaaactataaaacacatgacaccagtttgtaaaaatacctgcatcctaaggttattctgctctactctgctgctaaattcaacatccagattacttggtagaggtagcaaggccttgatcctagcacgaaatgagaaaaaagttgacgtcaccttcttgtatgaactatacactttaggatcccttcttcctaaacgctcacatgcacgtcggtgccaattattattacacgagtcaaccattttcctatggacaaaagagagccagcacaccaatattcaaagatgactgtcggcacaagatagctttgactcgcctgccatctcattcctgttgtaaaaggatagtcgtagaatccaccagattgcattaactttcttgtgtaatcctatctcagggtatgttgcggcttatggcaattctgagccaacatatactacattgtatggaaaccctgatgcaacatatactacacaagcctatccagatgtttaaagcactaatcagttcaagaagcacttgatgtcagtgaggtagccagagaagtaaggcgatagaaagtcattggaaacatagtgttaatatgcgttggagccatcatcttgatttctgcggtttctgtctcctttttgccattttatgtgcaaaggattgcatgcactgtaggcgggctggcagtgttgggttcttctattgtgcttttgtgcattggacaagacaagaagttcttgggacaaactggaggtttcatgtgcccattggcgcgggagtccggggaagagagcgtcggctcctttaggatcgggtcgtcgatgctgctgggccacggggtgacgatccgtgtgctcctcttcagctcgatgtggcacctgcgggggcgcgcgtacgccgccatctcgcgcgtgcgcagcgcgacgttgccggtggcggcgtcctggctgcgcttcaagaacacccacgtcctcctcatggtcgtcctcttcgccctcttcttacggaagctctctggcgctgatcttccgagatgtttgcaatgttgtctttgcgatgcattgccagacgccacctcttgctcacagggacctaaaggtagaaaatgttcttgctgctgatggggcatggaaactatgtgattttggtagtgtatcgacaaatcataagtgctttgataaacctgaggagatgggcattgaagaagataacatcaggaagcacactactccttcatataagttaccagtgagaaagtagatatctggactcttgggtgtctcttgtatagaatctgctacttcaaatcagcattcgatggagaatcaaagctccaaatacttaacgggaactatcgcatcctagaattgccgaagtacagttcttctaattcaacacttaccaaagacatgcttaattcttctacagatgccagacaggacatcacacaggcaagtgctttgcttgattggccattcacagtgaacaggcaggacaagattgcgagttcaaaataatgtcaacctggcagtctattatatcatatattgtggcaccacatctcagataaaaaggtatcttactagagtcaaaaggggccgagtgtcacttgcaaattgtcagaaaaatacataaatatacggaacattgatgattattatatgatgcatagatagatagatccatcatcattggctcatagcaaaacaacattcatcttcaatgatagtttttagactagaaaataacctaatacatgcagcagcaaccagagattaagttgatctgtccagtgcattcccatccccaccatctggtgagtccttttatttgttcttctgtaaaaatttagaaatgtctctttgttttacaggtgagtccaggaatgaggattcacgaacactgcaattcaattatggttcattcaaacataaggcattggataaatccttaactaaaaagtttatagttttagtccttaagcttcagagaaaatatcttctcagggatggtttcagcttgaaggttcgagctttgcataaaaacaatgtcaatacttctgcactaacacaatctgaaatgcgagatatcatccttggtgctgaattgctccaccatcacagcaacagtcgagagactgctcagttagctgctgtaatcacaaggatagcgaatgtgcacggagatgaactcattatcacaaccacaagtccatatgagcaacaagcattcgcatcgaagactgattga

SEQ ID NO: 45329 - DNA, 2666 bp, Zea Mays
gtccatgttcctcgcccccgcaatcgacgcgatgctcgcccctagccagccttgccccaccatcagtgaccccgccccggctccatggaaggtgcagcaaggccaccgcgatgggatctgggagctccgtgcgcccccgccgtgctgcatgcctccaccgtgccagtcgtgccaccgctagaaccacgcatgaggatctccctgctcgccagcggatctccgccacgcacgtcgtgatctctgtcgcggcctcgcctcctactcaatcccactgcgcgccaccgcgatgggatctgggagcagcaaggccactgtgatgggatctgggaggaggcaagcggtcctcctccatcttcggcgacgagctcgtacgttccccttcatcccctccgtacccttcccaccaccatcacccgaccaagcgggcctgctgcttcccatcacgggaggttctgctccgccacctcctccccatcttcccggacatctagaagctgaagagtgaggaggccctgctcgtcgccgctagcaccgagctcttcctaggcagcctcacggcagggggccacacaacgacggcgcggcaattccggcaagcggtccatgccgtgcatgtctggaccgcagcctgcgggcactgtcccatgacagacttcctccttgactgcctcgctgcgaagagaagtctccccgcatccggtgcttggtatagttgacgtcaccttcttgtatgaactatacactttaggatcccttcttcctaaacgcgggctggcagtgttgggttcttctattgtgcttttgtgcattggacaagacaagaagttcttgggacaaactggaggtttcatgtgcccattggcgcgggagtccggggaagagagcgtcggctcctttaggatcgggtcgtcgatgctgctgggccacggggtgacgatccgtgtgctcctcttcagctcgatgtggcacctgcgggggcgcgcgtacgccgccatctcgcgcgtgcgcagcgcgacgttgccggtggcggcgtcctggctgcgcttcaagaacacccacgtcctcctcatggtcgtcctcttcgccctcttcttacggaagctctctggcgctgatcttccgagatgtttgcaatgttgtctttgcgatgcattgccagacgccacctcttgctcacagggacctaaaggtagaaaatgttcttgctgctgatggggcatggaaactatgtgattttggtagtgtatcgacaaatcataagtgctttgataaacctgaggagatgggcattgaagaagataacatcaggaagcacactactccttcatataagttaccagtgagaaagtagatatctggactcttgggtgtctcttgtatagaatctgctacttcaaatcagcattcgatggagaatcaaagctccaaatacttaacgggaactatcgcatcctagaattgccgaagtacagttcttctaattcaacacttaccaaagacatgcttaattcttctacagatgccagacaggacatcacacaggcaagtgctttgcttgattggccattcacagtgaacaggcaggacaagattgcgagttcaaaataatgtcaacctggcagtctattatatcatatattgtggcaccacatctcagataaaaaggtatcttactagagtcaaaaggggccgagtgtcacttgcaaattgtcagaaaaatacataaatatacggaacattgatgattattatatgatgcatagatagatagatccatcatcattggctcatagcaaaacaacattcatcttcaatgatagtttttagactagaaaataacctaatacatgcagcagcaaccagagattaagttgatctgtccagtgcattcccatccccaccatctggtgagtccttttatttgttcttctgtaaaaatttagaaatgtctctttgttttacaggtgagtccaggaatgaggattcacgaacactgcaattcaattatggttcattcaaacataagggatttttgaagcactaattgcagtgtatcaactccgctctcaaatataagtgaaaaaagaacctattttatagttttagtccttaagcttcagagaaaatatcttctcagggatggtttcagcttgaaggttcgagctttgcatattgccaaagaagctttagatatggtacttgcagatgataacttcagtactatagttgcagcagttggtgaagggaggtctatttacaacaacatgaaggcttttattaggtccattttttagataatctatggccaaacattttttgaatcctaggcctgttgcagcggtgagagttgtctagaaaggcttgtctcagttaatcccttactccaaccctactgatggggagcctttggtgccgtatgtgcactaagggacttcattctatctgattatgcaaagaaaaacaatgtcaatacttctgcactaacacaatctgaaatgcgagatatcatccttggtgctgaattgctccaccatcacagcaacagtcgagagactgctcagttagctgctgtaatcacaaggatagcgaatgtgcacggagatgaactcattatcacaaccacaagtccatatgagcaacaagcattcgcatcgaagactgattga

SEQ ID NO: 45330 - DNA, 2684 bp, Zea Mays
gtccatgttcctcgcccccgcaatcgacgcgatgctcgcccctagccagccttgccccaccatcagtgaccccgccccggctccatggaaggtgcagcaaggccaccgcgatgggatctgggagctccgtgcgcccccgccgtgctgcatgcctccaccgtgccagtcgtgccaccgctagaaccacgcatgaggatctccctgctcgccagcggatctccgccacgcacgtcgtgatctctgtcgcggcctcgcctcctactcaatcccactgcgcgccaccgcgatgggatctgggagcagcaaggccactgtgatgggatctgggaggaggcaagcggtcctcctccatcttcggcgacgagctcgtacgttccccttcatcccctccgtacccttcccaccaccatcacccgaccaagcgggcctgctgcttcccatcacgggaggttctgctccgccacctcctccccatcttcccggacatctagaagctgaagagtgaggaggccctgctcgtcgccgctagcaccgagctcttcctaggcagcctcacggcagggggccacacaacgacggcgcggcaattccggcaagcggtccatgccgtgcatgtctggaccgcagcctgcgggcactgtcccatgacagacttcctccttgactgcctcgctgcgaagagaagtctccccgcatccggtgcttggtatagttgacgtcaccttcttgtatgaactatacactttaggatcccttcttcctaaacgcgggctggcagtgttgggttcttctattgtgcttttgtgcattggacaagacaagaagttcttgggacaaactggaggtttcatgtgcccattggcgcgggagtccggggaagagagcgtcggctcctttaggatcgggtcgtcgatgctgctgggccacggggtgacgatccgtgtgctcctcttcagctcgatgtggcacctgcgggggcgcgcgtacgccgccatctcgcgcgtgcgcagcgcgacgttgccggtggcggcgtcctggctgcgcttcaagaacacccacgtcctcctcatggtcgtcctcttcgccctcttcttacggaagctctctggcgctgatcttccgagatgtttgcaatgttgtctttgcgatgcattgccagacgccacctcttgctcacagggacctaaaggtagaaaatgttcttgctgctgatggggcatggaaactatgtgattttggtagtgtatcgacaaatcataagtgctttgataaacctgaggagatgggcattgaagaagataacatcaggaagcacactactccttcatataagttaccagtgagaaagtagatatctggactcttgggtgtctcttgtatagaatctgctacttcaaatcagcattcgatggagaatcaaagctccaaatacttaacgggaactatcgcatcctagaattgccgaagtacagttcttctaattcaacacttaccaaagacatgcttaattcttctacagatgccagacaggacatcacacaggcaagtgctttgcttgattggccattcacagtgaacaggcaggacaagattgcgagttcaaaataatgtcaacctggcagtctattatatcatatattgtggcaccacatctcagataaaaaggtatcttactagagtcaaaaggggccgagtgtcacttgcaaattgtcagaaaaatacataaatatacggaacattgatgattattatatgatgcatagatagatagatccatcatcattggctcatagcaaaacaacattcatcttcaatgatagtttttagactagaaaataacctaatacatgcagcagcaaccagagattaagttgatctgtccagtgcattcccatccccaccatctggtgagtccttttatttgttcttctgtaaaaatttagaaatgtctctttgttttacaggtgagtccaggaatgaggattcacgaacactgcaattcaattatggttcattcaaacataaggcattggataaatccttaactaaaaaggttcctaaaaatcgtttgaattcaaatactaaactaacacaatgttgctctattgtagggatttttgaagcactaattgcagtgtatcaactccgctctcaaatataagtgaaaaaagaacctatgtcagtcctttattgccaaagaagctttagatatggtacttgcagatgataacttcagtactatagttgcagcagttggtgaagggaggtctatttacaacaacatgaaggcttttattaggtccattttttagataatctatggccaaacattttttgaatcctaggcctgttgcagcggtgagagttgtctagaaaggcttgtctcagttaatcccttactccaaccctactgatggggagcctttggtgccgtatgtgcactaagggacttcattctatctgattatgcaaagaaaaacaatgtcaatacttctgcactaacacaatctgaaatgcgagatatcatccttggtgctgaattgctccaccatcacagcaacagtcgagagactgctcagttagctgctgtaatcacaaggatagcgaatgtgcacggagatgaactcattatcacaaccacaagtccatatgagcaacaagcattcgcatcgaagactgattga

SEQ ID NO: 45331 - DNA, 3220 bp, Zea Mays
gtccatgttcctcgcccccgcaatcgacgcgatgctcgcccctagccagccttgccccaccatcagtgaccccgccccggctccatggaaggtgcagcaaggccaccgcgatgggatctgggagctccgtgcgcccccgccgtgctgcatgcctccaccgtgccagtcgtgccaccgctagaaccacgcatgaggatctccctgctcgccagcggatctccgccacgcacgtcgtgatctctgtcgcggcctcgcctcctactcaatcccactgcgcgccaccgcgatgggatctgggagcagcaaggccactgtgatgggatctgggaggaggcaagcggtcctcctccatcttcggcgacgagctcgtacgttccccttcatcccctccgtacccttcccaccaccatcacccgaccaagcgggcctgctgcttcccatcacgggaggttctgctccgccacctcctccccatcttcccggacatctagaagctgaagagtgaggaggccctgctcgtcgccgctagcaccgagctcttcctaggcagcctcacggcagggggccacacaacgacggcgcggcaattccggcaagcggtccatgccgtgcatgtctggaccgcagcctgcgggcactgtcccatgacagacttcctccttgactgcctcgctgcgaagagaagtctccccgcatccggtgcttggtatagttgacgtcaccttcttgtatgaactatacactttaggatcccttcttcctaaacgctcacatgcacgtcggtgccaattattattacacgagtcaaccattttcctatggacaaaagagagccagcacaccaatattcaaagatgactgtcggcacaagatagctttgactcgcctgccatctcattcctgttgtaaaaggatagtcgtagaatccaccagattgcattaactttcttgtgtaatcctatctcagggtatgttgcggcttatggcaattctgagccaacatatactacattgtatggaaaccctgatgcaacatatactacacaagcctatccagatgtttaaagcactaatcagttcaagaagcacttgatgtcagtgaggtagccagagaagtaaggcgatagaaagtcattggaaacatagtgttaatatgcgttggagccatcatcttgatttctgcggtttctgtctcctttttgccattttatgtgcaaaggattgcatgcactgtaggcgggctggcagtgttgggttcttctattgtgcttttgtgcattggacaagacaagaagttcttgggacaaactggaggtttcatgtgcccattggcgcgggagtccggggaagagagcgtcggctcctttaggatcgggtcgtcgatgctgctgggccacggggtgacgatccgtgtgctcctcttcagctcgatgtggcacctgcgggggcgcgcgtacgccgccatctcgcgcgtgcgcagcgcgacgttgccggtggcggcgtcctggctgcgcttcaagaacacccacgtcctcctcatggtcgtcctcttcgccctcttcttacggaagctctctggcgctgatcttccgagatgtttgcaatgttgtctttgcgatgcattgccagacgccacctcttgctcacagggacctaaaggtagaaaatgttcttgctgctgatggggcatggaaactatgtgattttggtagtgtatcgacaaatcataagtgctttgataaacctgaggagatgggcattgaagaagataacatcaggaagcacactactccttcatataagttaccagtgagaaagtagatatctggactcttgggtgtctcttgtatagaatctgctacttcaaatcagcattcgatggagaatcaaagctccaaatacttaacgggaactatcgcatcctagaattgccgaagtacagttcttctaattcaacacttaccaaagacatgcttaattcttctacagatgccagacaggacatcacacaggcaagtgctttgcttgattggccattcacagtgaacaggcaggacaagattgcgagttcaaaataatgtcaacctggcagtctattatatcatatattgtggcaccacatctcagataaaaaggtgagtccaggaatgaggattcacgaacactgcaattcaattatggttcattcaaacataagggatttttgaagcactaattgcagtgtatcaactccgctctcaaatataagtgaaaaaagaacctatgtcagtcctttgtatcctggatttctatgaaattttagttgtttgcctcttcaattttgtgcttggcattgttggttttatactctgatcactgcattgacactgtgttttggtttggtgttttcagtctgcatgcttgatagaaatgcttctattagcacgcattttgcatttaagatatggtcacttttatgttcttttttattgcaagtcgcaatcacatatgacccaagcaacatgtatctgctctcaaaactgagatatggacatgtggtatgtatatattgctgatgcatatttcaaaatttggagctgatacatgttgctctttaatctattcattgtggttgaaaaatatatctgacaaccagccatctgtttagtttatagttttagtccttaagcttcagagaaaatatcttctcagggatggtttcagcttgaaggttcgagctttgcatattgccaaagaagctttagatatggtacttgcagatgataacttcagtactatagttgcagcagttggtgaagggaggtctatttacaacaacatgaaggcttttattaggtccattttttagataatctatggccaaacattttttgaatcctaggcctgttgcagcggtgagagttgtctagaaaggcttgtctcagttaatcccttactccaaccctactgatggggagcctttggtgccgtatgtgcactaagggacttcattctatctgattatgcaaagaaaaacaatgtcaatacttctgcactaacacaatctgaaatgcgagatatcatccttggtgctgaattgctccaccatcacagcaacagtcgagagactgctcagttagctgctgtaatcacaaggatagcgaatgtgcacggagatgaactcattatcacaaccacaagtccatatgagcaacaagcattcgcatcgaagactgattga

SEQ ID NO: 45332 - DNA, 2517 bp, Zea Mays
cgtctctcctcgcctatggaaagtcacccctccaccgtgatgctcgcccatgctgtcgatggaaggcgcgtccatgttcctcgcccccgcaatcgacgcgatgctcgcccctagccagccttgccccaccatcagtgaccccgccccggctccatggaaggtgcagcaaggccaccgcgatgggatctgggagctccgtgcgcccccgccgtgctgcatgcctccaccgtgccagtcgtgccaccgctagaaccacgcatgaggatctccctgctcgccagcggatctccgccacgcacgtcgtgatctctgtcgcggcctcgcctcctactcaatcccactgcgcgccaccgcgatgggatctgggagcagcaaggccactgtgatgggatctgggaggaggcaagcggtcctcctccatcttcggcgacgagctcgtacgttccccttcatcccctccgtacccttcccaccaccatcacccgaccaagcgggcctgctgcttcccatcacgggaggttctgctccgccacctcctccccatcttcccggacatctagaagctgaagagtgaggaggccctgctcgtcgccgctagcaccgagctcttcctaggcagcctcacggcagggggccacacaacgacggcgcggcaattccggcaagcggtccatgccgtgcatgtctggaccgcagcctgcgggcactgtcccatgacagacttcctccttgactgcctcgctgcgaagagaagtctccccgcatccggtgcttggtatagttgacgtcaccttcttgtatgaactatacactttaggatcccttcttcctaaacgctcacatgcacgtcggtgccaattattattacacgagtcaaccattttcctatggacaaaagagagccagcacaccaatattcaaagatgactgtcggcacaagatagctttgactcgcctgccatctcattcctgttgtaaaaggatagtcgtagaatccaccagattgcattaactttcttgtgtaatcctatctcagggtatgttgcggcttatggcaattctgagccaacatatactacattgtatggaaaccctgatgcaacatatactacacaagcctatccagatgtttaaagcactaatcaggctacaaagaagttgtttacaagtgggcctgggattgaatagatcgctgacaagtctagttcaagaagcacttgatgtcagtgaggtagccagagaagtaaggcgatagaaagtcattggaaacatagtgttaatatgcgttggagccatcatcttgatttctgcggtttctgtctcctttttgccattttatgtgcaaaggattgcatgcactgtaggcgggctggcagtgttgggttcttctattgtgcttttgtgcattggacaagacaagaagttcttgggacaaactggaggtttcatgtgcccattggcgcgggagtccggggaagagagcgtcggctcctttaggatcgggtcgtcgatgctgctgggccacggggtgacgatccgtgtgctcctcttcagctcgatgtggcacctgcgggggcgcgcgtacgccgccatctcgcgcgtgcgcagcgcgacgttgccggtggcggcgtcctggctgcgcttcaagaacacccacgtcctcctcatggtcgtcctcttcgccctcttcttacggaagctctctggcgctgatcttccgagatgtttgcaatgttgtctttgcgatgcattgccagacgccacctcttgctcacagggacctaaaggtagaaaatgttcttgctgctgatggggcatggaaactatgtgattttggtagtgtatcgacaaatcataagtgctttgataaacctgaggagatgggcattgaagaagataacatcaggaagcacactactccttcatataagttaccagtgagaaagtagatatctggactcttgggtgtctcttgtatagaatctgctacttcaaatcagcattcgatggagaatcaaagctccaaatacttaacgggaactatcgcatcctagaattgccgaagtacagttcttctaattcaacacttaccaaagacatgcttaattcttctacagatgccagacaggacatcacacaggtgagtccaggaatgaggattcacgaacactgcaattcaattatggttcattcaaacataaggcattggataaatccttaactaaaaagtttatagttttagtccttaagcttcagagaaaatatcttctcagggatggtttcagcttgaaggttcgagctttgcataaaaacaatgtcaatacttctgcactaacacaatctgaaatgcgagatatcatccttggtgctgaattgctccaccatcacagcaacagtcgagagactgctcagttagctgctgtaatcacaaggatagcgaatgtgcacggagatgaactcattatcacaaccacaagtccatatgagcaacaagcattcgcatcgaagactgattga

SEQ ID NO: 45333 - DNA, 767 bp, Zea Mays
gctcgcccatgctgtcgatggaaggcgcgtccatgttcctcgcccccgcaatcgacgcgatgctcgcccctagccagccttgccccaccatcagtgaccccgccccggctccatggaaggtgcagcaaggccaccgcgatgggatctgggagctccgtgcgcccccgccgtgctgcatgcctccaccgtgccagtcgtgccaccgctagaaccacgcatgaggatctccctgctcgccagcggatctccgccacgcacgtcgtgatctctgtcgcggcctcgcctcctactcaatcccactgcgcgccaccgcgatgggatctgggagcagcaaggccactgtgatgggatctgggaggaggcaagcggtcctcctccatcttcggcgacgagctcgtacgttccccttcatcccctccgtacccttcccaccaccatcacccgaccaagcgggcctgctgcttcccatcacgggaggttctgctccgccacctcctccccatcttcccggacatctagaagctgaagagtgaggaggccctgctcgtcgccgctagcaccgagctcttcctaggcagcctcacggcagggggccacacaacgacggcgcggcaattccggcaagcggtccatgccgtgcatgtctggaccgcagcctgcgggcactgtcccatgacagacttcctccttgactgcctcgctgcgaagagaagtctccccgcatccggtgcttggtataggctcacatgcacgtcggtgccaattat

SEQ ID NO: 45334 - DNA, 1598 bp, Zea Mays
caacgtcccacggccagtagtgaggagcagatcctaaatcaccatccatcgctgaaccgaaagcaaaccccaccacaacaacaccaccgctcgcctgctctcaccgaccagcgccgcgccactcctccgccggatctccagcatgcagccctcctcctcgtcctcctccgctcacccgcccgaccatcccaactccaagcccccggccccgccggcccccgccatgggctaccccgcccccaacgggaaccccagcgcctacttcgccgccgcgccgcccgccgccgccgccgccaacggctccgctccggcgaccttcggcgtcgcgtacccctaccccgcccctcctcaccaccatcacccgccgccgcaccaccactacccgtatcccccgcccccgccgacgcaccaccactacgcggcccacccgccgccgccgcccacctgcctgcgccgcctcctcgccgccgtcgttggcgccttccttctcctcggcgccgccaccttcatagtctggctcctcctccgcccgcgcgccccggccttctccctcacctccctggccctctcccgcgtcgcttactcccccgccaactcctcactctccgcctccttcgacgctgccctcctcgccgccaaccccaacgccaagctctccgtcgcctacttctcacccctcgcatccgtctccttcgcgccctcctccccgctcgccgtcgcctcgctcgcgcccttcggccagggccccggcaacaccaccacgatcgccttccgcctcgtcgtagaggatgcctacgtcgggcccgacgacgccgcagcgctcaagaccggcgccgggggcgctgtcgacgtcgaggtcaggctcatggccgtcgccgtcttcgacagaggtggctggcgcacgcgccggagggtcatgagggttatgtgcgatggcgtcaaggtggttttccgcgggaagaattccactgaggcggccttcgatgggccgccaagaaggtgcgatgtcgtgttgtgaaggatcatcataacaggtttgctgactactctggatgctgatcggggggtacaagaagctaactggcacaatgggggtgcgtttatctgcatttgatttgatgagcaatactcaagctgggtaaccatgcttttatctggctgtaataggagtagcgagtgagagaagtctggaatgatccatatgcttggtgggtaatgagtggtctgtgtagcttcaacagaaatgtttgtgaaagttacggtaagaattactgtgcacgcgtggtggttaactggtttatgtgggcgtgtgctatggagcctctcatgagtcatgaaacgaatcggtgtacattgaactagcgcttggaatgaagccctgccattcttggagatggatggctggatcctgtaaccgtcctgtccacttagggcttgtactgttgcacatggatcgaagggtactgagggggattaaaactcgttttagcctactggatgtatgtgtgcatagcacatatatcaactaaaaaaaactcctctatgtggtggggagagagagagagtatgattatgtctaataaaaaagatcaaaataa

SEQ ID NO: 45335 - DNA, 1546 bp, Zea Mays
gccgtctcaatctcaacgtcccacggccagtagtgaggagcagatcctaaatcaccatccatcgctgaaccgaaagcaaaccccaccacaacaacaccaccgctcgcctgctctcaccgaccagcgccgcgccactcctccgccggatctccagcatgcagccctcctcctcgtcctcctccgctcacccgcccgaccatcccaactccaagcccccggccccgccggcccccgccatgggctaccccgcccccaacgggaaccccagcgcctacttcgccgccgcgccgcccgccgccgccgccgccaacggctccgctccggcgaccttcggcgtcgcgtacccctaccccgcccctcctcaccaccatcacccgccgccgcaccaccactacccgtatcccccgcccccgccgacgcaccaccactacgcggcccacccgccgccgccgcccacctgcctgcgccgcctcctcgccgccgtcgttggcgccttccttctcctcggcgccgccaccttcatagtctggctcctcctccgcccgcgcgccccggccttctccctcacctccctggccctctcccgcgtcgcttactcccccgccaactcctcactctccgcctccttcgacgctgccctcctcgccgccaaccccaacgccaagctctccgtcgcctacttctcacccctcgcatccgtctccttcgcgccctcctccccgctcgccgtcgcctcgctcgcgcccttcggccagggccccggcaacaccaccacgatcgccttccgcctcgtcgtagaggatgcctacgtcgggcccgacgacgccgcagcgctcaagaccggcgccgggggcgctgtcgacgtcgaggtcaggctcatggccgtcgccgtcttcgacagaggtggctggcgcacgcgccggagggtcatgagggttatgtgcgatggcgtcaaggtggttttccgcgggaagaattccactgaggcggccttcgatgggccgccaagaaggtgcgatgtcgtgttgtgaaggagttaaggatcatcataacaggtttgctgactactctggatgctgatcggggggtacaagaagctaactggcacaatgggggagtagcgagtgagagaagtctggaatgatccatatgcttggtgggtaatgagtggtctgtgtagcttcaacagaaatgtttgtgaaagttacggtaagaattactgtgcacgcgtggtggttaactggtttatgtgggcgtgtgctatggagcctctcatgagtcatgaaacgaatcggtgtacattgaactagcgcttggaatgaagccctgccattcttggagatggatggctggatcctgtaaccgtcctgtccacttagggcttgtactgttgcacatggatcgaagggtactgagggggattaaaactcgttttagcctactggatgtatgtgtgcatagcacatatatcaactaaaaaaaactcctctatgtggtggggagagagagagagtatgattatgtctaataaaaaagatcaaaataa

SEQ ID NO: 45336 - DNA, 3362 bp, Zea Mays
cgcaggcatagcagcaggaaaaggaggcacgcagacgcggagagagagagagagacgcccgcgctgctgccgccgtctcaatctcaacgtcccacggccagtagtgaggagcagatcctaaatcaccatccatcgctgaaccgaaagcaaaccccaccacaacaacaccaccgctcgcctgctctcaccgaccagcgccgcgccactcctccgccggatctccagcatgcagccctcctcctcgtcctcctccgctcacccgcccgaccatcccaactccaagcccccggccccgccggcccccgccatgggctaccccgcccccaacgggaaccccagcgcctacttcgccgccgcgccgcccgccgccgccgccgccaacggctccgctccggcgaccttcggcgtcgcgtacccctaccccgcccctcctcaccaccatcacccgccgccgcaccaccactacccgtatcccccgcccccgccgacgcaccaccactacgcggcccacccgccgccgccgcccacctgcctgcgccgcctcctcgccgccgtcgttggcgccttccttctcctcggcgccgccaccttcatagtctggctcctcctccgcccgcgcgccccggccttctccctcacctccctggccctctcccgcgtcgcttactcccccgccaactcctcactctccgcctccttcgacgctgccctcctcgccgccaaccccaacgccaagctctccgtcgcctacttctcacccctcgcatccgtctccttcgcgccctcctccccgctcgccgtcgcctcgctcgcgcccttcggccagggccccggcaacaccaccacgatcgccttccgcctcgtcgtagaggatgcctacgtcgggcccgacgacgccgcagcgctcaagaccggcgccgggggcgctgtcgacgtcgaggtcaggctcatggccgtcgccgtcttcgacagaggtggctggcgcacgcgccggagggtcatgagggttatgtgcgatggcgtcaaggtggttttccgcgggaagaattccactgaggcggccttcgatgggccgccaagaaggtgcgatgtcgtgttgtgaagtcaaataaaagcaaaagaccacacaacgccaggtcagcaacaggctcataccaatacgccaagtcgccaagtgcctagttgtgagtaggcatttggcagtttggctcgtagcacctaggtagagtgaatcttgaagtggtgcctgattcacttatgtaccaactttgtttgccaactcattattatctttctttttcttatttgcaaagcatgcagtgaaccatcaaaactgtattggatattggctgatggaagttttctgttacataaaaagtgttgcctccgttttggtttcaagtcgctagcatttgtcttccattcatgaccttgtttgttcaattggatttgagcaaagtggaaatgttttcttttgtgaatcaatgttggtgatgtgttggtttcaagtgtcaacagaagtatgagactatgagtacaatactgtgaatagagaaaaatatatcaaatgacccagcagatgcttcactgacctgggttcactattccataagctacagagaacccaacaaatctataactattccaatctattattacctgaatacctggcgaacctttgaattgaaagatttaaggttgttttaaattcaaactattaatttattttttatagaatctgttaggtgttcattcatgcatggtgaactgagcacaaaagatcattgcagccagaggttaggaattaggattttctgttttcttccatgtatggttggccctaccagattttttgtatatgacatgcaatggttaaaaaagcatcaaacgctacgttggtgacagagttgatcaggtgggatgatgactcctatcgcgcacacgggcaatttttgtagcaattcatatgaactggcaatagttctggctgtatcacttaggcatcagttgtgtttgctaagaaaatttaaatccccttcttcgtacctttagaaaatgcttattgagaaatttcagccagatgaatataaggcatactccctcagttccaaacttagttcaacttgcggattccaggcaatgtagttttttgtgtggaccataggactagcatatatgtggtgatagtaagtgtgattctgatgtggcgtgcaaaatacgtagcctttgcttgttttctatttgtctttgttcatgtgcaccacttcatttgaaagtagataggaaatactaacatggtattttcattggcggtggcatgttggagtcaaatgtcaatgaggcagtgtcaatgtgtcattatggtgctagaaacagagaaaatgtattaaagaggccaacagatgtttgactaagcctgggttcactagtttcctatgttaagcaatagaaaacctggcaaacttgcaagtagttctattaaacagttcttttagagtttggtttcataaatccatttcccatggaatgcagagtcaaattaaagcaaaataatgcacaatgccatgttaacgacatgttgatgtcaggtgcctagccgtgattaggcatttggcagcttggtccttagcgcctaggaaagatattttaacgacacagttaatttgaactaatataggtggtgcttgattcacttttgtaccaactttgtttgccactccatagtatgtctttttcttatttataaagtgtgccactacccatcaaaattgtgtttgttggctaatggaggttttggttacatcacctcagtttgggtttcaaggagctagcggttggcttccatttcatgtccttgtttgttcaagctatttgttcaattggttatgagggcagatctagtgctagaggctcccacatgaagacccgtaacctagtgattcattgagacagctctcaccactgcaccgggcctgcccttcatgaaatgttttcttttgtgaatcaatgttggtgtcaagtgtcttatgcgtataatactgtgaatagagaaaaatatagtaacgaacccaacagatgcttgactgacctggcttcactattcccttatattaggcgttctaacttccaacctattaatacctggcaaacctttgaattggaaagtgttttagattgtattatttttcttttttcaccttttagaatatggcatgtatggtgagcacaaaagatcattgcagcaccaaggatgggattgggtcatggttctgtattctttcatgttgtggttggccttatcacttatcagatttgtttatatggcatggaatgatctaaaaagcatcaagtgctactttggt

SEQ ID NO: 45337 - DNA, 2323 bp, Zea Mays
cgcacgcacgaatcttacgcggcgttcgaacgaatctccccttcctccgtgtagacgtgtagtatacccgttgccctccctccttccttcgttcctcccacggcgacacaccacgcgtcgccgaccaccgccaccgaatcgccgcttcccatcatcatagactatcgaggcgtcgtcacacggcccgctcttccatcagggcgcgtccaccggccaagccgccctgacccccggcgcattctcctctcggtgccgactgccgagatctccccggccctctcccgagaggagtgcccgctcttgacccgacgtccgcgatgacggtggcggcgctgcaggcgatggacgcgctgtcgcggcgggcgaccatgctgcgggactctctgcggcgaagccaggggaacacggacggcatggtcaccatcctcggctccttcgaccaccgcctctccgcgctcgaggccgcaatgcgccccacccaggtgaggacgcacgcgatccggacggcgcatgagaatatcgaccggaccatcaaggccgccgacggcatcctctcccagttcgatctcgctcgccgggctgaggcaacaatattgaggggtccccatgaggatttggagagctacctggaggcagtggatgtgctgaaaggcatttctcgcttcttttcctcaaacaagaacttcaagagtagtgaaggagttctgaatcatgtcaacaatctgttagctaaatctactctgaagattgaagaggaatttaagcagctgatgagtacatacagcaaacctatcgagccagatcgcctgtttgactgtctacccaagtctcttcgtccaacaaaaggtgaccacgagaccgatggaggcagccatcatccatccaaaggcttggaggctgccgtatacaggaccccaacattaattcctcccagaatattgcctctcatgaatgacatagctcagcagttggttcaggctggaaatcagcaaacttgctataaaatctacagagattatcgtgcttcagcactagaggtgagccttcggaagttaggagtggaaaaacttactaaagatgatgtacaaaaaatgcaatgggaggctttggaggctaaaattggaaactggatacattttatgcgaatcgcggtcaaattattactagcaggagaaagaaaaatctgtgatcagatttttgatggtgtgaattttaacaaaggccattgttttgctgaactcacagcaaatagtattataactcttttcagctttggagatgctgttgctaaaagcaaaaggtctcctgaaaagctgtttgtgttgcttgacatgtatgaagtaatgcgtgaacttcaaccagagatcgatgaaatatttgaaggcaaaccttgcactgagatgcgggaagctgcatcaagcttaacaaagcgcttggcgcagactgcccaggaaacatttgcagattttgaggaggcagttgaaaaagatgcttcaaaaactattgttcaggatggaacagtccatcctttgactagctatgtgatcaattatgtcaaattcctattcgattaccagtcaacattgaagctactgtttcaggaatttgatagtggcactgaggcagaatctcagcttgctgcagttaccacaaggataatgcaggccctacagaataacctagatgggaaatctaaacaatataaggatcctgcattgacacacttgtttcttatgaacaacatccactatatggttagatctgttcgcagatcagaagcaaaagatatacttggtgatgactggattcagaggcatcgcaggattgtgcagcaaaatgccaatcaatataaacgtgttgcttgggcaaagattcttcagacactttctgttcaaggtgcgggcagcgggggtgaccttaccagcagtagtgtttcaagagccacaatcaaagaacggtttaagtctttcaatacacaattcgaagagcttcacgcgaagcaatcacaatggatcgtacctgatcaagaactacgagaatccttgaggctcgctgtagccgaagtcctgttgccagcctaccgatcttttatcaaacgctttggcaatcttgtggacaacaacaagaacccgcagaagtacgtgcggtacagcccagaagcagtggaccaacttctaggccagttcttcgaagggcagcaatgggcggagcaaaagcgctgagcaacatagagtgagagtgacggcatgagtacagccagatgccaccacgcttgcagagctcgatctggcggtctcgtgtttggcctcctttttcagctgct

SEQ ID NO: 45338 - DNA, 2661 bp, Zea Mays
cgcacgcacgaatcttacgcggcgttcgaacgaatctccccttcctccgtgtagacgtgtagtatacccgttgccctccctccttccttcgttcctcccacggcgacacaccacgcgtcgccgaccaccgccaccgaatcgccgcttcccatcatcatagactatcgaggcgtcgtcacacggcccgctcttccatcagggcgcgtccaccggccaagccgccctgacccccggcgcattctcctctcggtgccgactgccgagatctccccggccctctcccgagaggagtgcccgctcttgacccgacgtccgcgatgacggtggcggcgctgcaggcgatggacgcgctgtcgcggcgggcgaccatgctgcgggactctctgcggcgaagccaggggaacacggacggcatggtcaccatcctcggctccttcgaccaccgcctctccgcgctcgaggccgcaatgcgccccacccaggtgaggacgcacgcgatccggacggcgcatgagaatatcgaccggaccatcaaggccgccgacggcatcctctcccagttcgatctcgctcgccgggctgaggcaacaatattgaggggtccccatgaggatttggagagctacctggaggcagtggatgtgctgaaaggcatttctcgcttcttttcctcaaacaagaacttcaagagtagtgaaggagttctgaatcatgtcaacaatctgttagctaaatctactctgaagattgaagaggaatttaagcagctgatgagtacatacagcaaacctatcgagccagatcgcctgtttgactgtctacccaagtctcttcgtccaacaaaaggtgaccacgagaccgatggaggcagccatcatccatccaaaggcttggaggctgccgtatacaggaccccaacattaattcctcccagaatattgcctctcatgaatgacatagctcagcagttggttcaggctggaaatcagcaaacttgctataaaatctacagagattatcgtgcttcagcactagaggtgagccttcggaagttaggagtggaaaaacttactaaagatgatgtacaaaaaatgcaatgggaggctttggaggctaaaattggaaactggatacattttatgcgaatcgcggtcaaattattactagcaggagaaagaaaaatctgtgatcagatttttgatggtgtgaattttaacaaaggccattgttttgctgaactcacagcaaatagtattataactcttttcagctttggagatgctgttgctaaaagcaaaaggtctcctgaaaagctgtttgtgttgcttgacatgtatgaagtaatgcgtgaacttcaaccagagatcgatgaaatatttgaaggcaaaccttgcactgagatgcgggaagctgcatcaagcttaacaaagcgcttggcgcagactgcccaggaaacatttgcagattttgaggaggcagttgaaaaagatgcttcaaaaactattgttcaggatggaacagtccatcctttgactagctatgtgatcaattatgtcaaattcctattcgattaccagtcaacattgaagctactgtttcaggaatttgatagtggcactgaggcagaatctcagcttgctgcagttaccacaaggataatgcaggccctacagaataacctagatgggaaatctaaacaatataaggatcctgcattgacacacttgtttcttatgaacaacatccactatatggttagatctgttcgcagaagcaaaagatatacttggtgatgactggattcagaggcatcgcaggattgtgcagcaaaatgccaatcaatataaacgtgttgcttgggcaaagattcttcagacactttctgttcaaggtgcgggcagcgggggtgaccttaccagcagtagtgtttcaagagccacaatcaaagaacggtttaagtctttcaatacacaattcgaagagcttcacgcgaagcaatcacaatggatcgtacctgatcaagaactacgagaatccttgaggctcgctgtagccgaagtcctgttgccagcctaccgatcttttatcaaacgctttggcaatcttgtggacaacaacaagaacccgcagaagtacgtgcggtacagcccagaagcagtggaccaacttctaggccagttcttcgaagggcagcaatgggcggagcaaaagcgctgagcaacatagagtgagagtgacggcatgagtacagccagatgccagcactacctagttttcttttctcagaaaaagcgcgcctaagtttcttttctcgccatttgggtggctggaacggaaagctaacggcaaaaaagtgttggtggaactttcttgctggaggttcctaaacttattagtgttgatctataaaaggtaaaagaacgagacctctacggttgtggccttgtgggttcacaatcagcagttccaacaccaaggactagtttgataattccatttttccaaaggattttcatttttcaagggaaattcattcatttttccttaggaaaacgggaatcccttagaaaaatatagtaacttttttttgggtgccgtagaagtattgttttcatcagtatagaaccatatgttgcaataaaattgttccttaaagataga

SEQ ID NO: 45339 - DNA, 1265 bp, Zea Mays
cttgggatgacatcactgccatagacaaccagtgcaaaagcaatgaaacccataatgaatccaaattttagactcaacaattagcaaagtcaaggccgcttgatgtatgacattatgttagatataagcacatcagtatactaggccgatcagctgatcaagcagttgtgatcacattaggtgattaggaaaaatagagctacaataacaattgaattcatataaacacatcaatcacatgttgcacatctcatcttctgttctttgtcacaagtgctgttcatatttaataaagttttttttgtctttttgcgtactctgtgtaaccatcctctatatttagcatagatccagtagcatgaaaataagtatttgatgtaacgttatgtctatcttggttccaatggcaatgaaccaaaacaatgcaattcaatgttttctaatttgatcaattgatctccaggactactgccacctcaaaacaattctgttaagctgaggcccttgatgtgtgaattcaaattgcaagcacccgatgaagtgggatcatttcccagtcaagctatgtgattgattgtagactctgtctcagaaaagtgtatacatgtaacactcaaaaacctgtgtaagctgataattcacatccgatcacatggaatcaaattctgcaaaacagaacaacaacgatgacaaagccttttagtcccaacaagttaggtaggctagagttgaaacccaacagaaaccacaagtcaagatccaggcacataaatagttattttccatgaactcctaagtcctaacaagactaaaactttaggtatattccattctttcaagtcacattttattgcctctttttgtgtcaatttcggtccctgtctctcttcctattgctgtcgtgccttaggattccacgatgcacgggtacctctccgttggacaatcttttcaattagtttatcctagcgtatcacgtaccggacccgatctcttgtatggccacaaatccaatgtcgcatacatattttcgcaatatttatctgttgaacatgaacatgtcatcttcagtaacaagcatgacgcaagaatgccggttttagtaacaagcatgtgctactgaagcctaatctattctcaggtcgatatgatccagaagaagagaagacatcggggcacgtcgcgagcacacaagaagcgttagtaaggaaggggaaatacgaatcggactaggattaaagagcagcgaaaaagggatgagagcg

SEQ ID NO: 45340 - DNA, 1783 bp, Zea Mays
aagctcaagttacatgtggccaaagtgaagatgaggcttccagtagtttggaacagtcatcactgattgatgaaaacgtggttgaagtgatcggtagatgttgcatcttattgcatctcaagcaaggcaatgttgatgcatcacagttttcagctatctatccccagaagtctgtaccaagtatatcagtgattggactgaatggagttctgctgtggaatcatgatggatatatcaactctgaaaatctgaaagaaagcattgagaaagcgtgggctgctcttcatctacaggagacagcagcgaccttgttgacagcatcacttgctacaagaaattctgaacctgtgaattctgctactactgttttgccagctcaagggggctcttctactttagaaaatccttctgatttatccagtcaatcaccagatgtttctggtgccagtgaagttgctcattcaactgatctggtatcacaaattcctaatagcactgccctttatgaacctcttgagataaatgaaaaagaagggtcaaaatcaaactcggatgataaaactgttgagaagctaggttcaacaagtactgaatttgattgtgatttgcttgatagttcaaggaagtcaaatacggtcagttctgcagattcgaagggagaagacattacaccatcagcaaaaagaaagaacaaagatgatggaagtcacacttctattcccttggaggatactcctagtacactcactaataaaggagtttcttcccagtcacgcgtggaacaagacaaggcaacttcttttgtttctgtgaagtcagatgatattcagcttagtattcgtatgcccagtggaaatagactggagatcaaactaacaaaacaagatgttttaaggaaagtgaagaatttcgtggatgaaaaccaaggcaatgggcttggctcatatgacctttctctggtttatcctaaaagagttttctttgaacaagatatggaagcaacactatccgagctgggtattcaaaaccgtcatgcaatgattgttgttccacatcggcagtctggtcaggtatcaaggcgtcactcctcggcatcttatgatatgggtgtcaattcaggtgcggatgatgttggtggcaattcaggtgcggggggatactttggttacctgagaaccgtcctgtcttatgtgaatccactctcctacctgaggggaaataccaactcatcaaatacagagctacagtcaaatgaaggcctgcggcagcttagacatggatctggtccatggagtgagccacggcctcttggcaataggggccatgaagtgactgatgcagactctgcaaacacgctgcgaaggcggcctagaccatttggtgccaatatccacactctggggagcgaggatcatggtccgtctgatgaaagaaatgttttctggaacgggaactcgacagagtttggaggcgacgacagaaaataggttgtggcgtggctggcagggcctgggacgacactatcagacagaatcaaagttgcgaatagacagctgaaacaaatgcctcgacaggcttattgaggaataagtattgagattatagtgctgaaataatcgctgaattgtgatgtttacatttgtggaaacatacggtcgctggatccgtatactcgttgtatagtacatagccacagatatattaaatccgaactgcttggttctactgtctgatcgaacgacatttgttttggcgttggctacgaagaaaatttgccgctacc

SEQ ID NO: 45341 - DNA, 1905 bp, Zea Mays
gccattcctacctgttgccacatctagtggttcggcctttccatctgccgttcgcccagcgtgttctccctctagtgcggcaactgggcgaccgccgccgccgctctactccgggtgcccaggcgttcgtccgtaccttctcaggccttcatcgcgtccttcgccggcgacgatcaccgacaaggatggaaagaacaattaattccttgatgtacaaaggatctattcctgatgcaattaatcaatcaagaagggagaagaagctctttgtagtctacatatcaggtgaagatgaggcttccagtagtttggaacagtcatcactgattgatgaaaacgtggttgaagtgatcggtagatgttgcatcttattgcatctcaagcaaggcaatgttgatgcatcacagttttcagctatctatccccagaagtctgtaccaagtatatcagtgattggactgaatggagttctgctgtggaatcatgatggatatatcaactctgaaaatctgaaagaaagcattgagaaagcgtgggctgctcttcatctacaggagacagcagcgaccttgttgacagcatcacttgctacaagaaattctgaacctgtgaattctgctactactgttttgccagctcaagggggctcttctactttagaaaatccttctgatttatccagtcaatcaccagatgtttctggtgccagtgaagttgctcattcaactgatctggtatcacaaattcctaatagcactgccctttatgaacctcttgagataaatgaaaaagaagggtcaaaatcaaactcggatgataaaactgttgagaagctaggttcaacaaattcgaagggagaagacattacaccatcagcaaaaagaaagaacaaagatgatggaagtcacacttctattcccttggaggatactcctagtacactcactaataaaggagtttcttcccagtcacgcgtggaacaagacaaggcaacttcttttgtttctgtgaagtcagatgatattcagcttagtattcgtatgcccagtggaaatagactggagatcaaactaacaaaacaagatgttttaaggaaagtgaagaatttcgtggatgaaaaccaaggcaatgggcttggctcatatgacctttctctggtttatcctaaaagagttttctttgaacaagatatggaagcaacactatccgagctgggtattcaaaaccgtcatgcaatgattgttgttccacatcggcagtctggtcaggtgcggggggatactttggttacctgagaaccgtcctgtcttatgtgaatccactctcctacctgaggggaaataccaactcatcaaatacagagctacagtcaaatgaaggcctgcggcagcttagacatggatctggtccatggagtgagccacggcctcttggcaataggggccatgaagtgactgatgcagactctgcaaacacgctgcgaaggcggcctagaccatttggtgccaatatccacactctggggagcgaggatcatggtccgtctgatgaaagaaatgttttctggaacgggaactcgacagagtttggaggcgacgacagaaaataggttgtggcgtggctggcagggcctgggacgacactatcagacagaatcaaagttgcgaatagacagctgaaacaaatgcctcgacaggcttattgaggaataagtattgagattatagtgctgaaataatcgctgaattgtgatgtttacatttgtggaaacatacggtcgctggatccgtatactcgttgtatagtacatagccacagatatattaaatccgaactgcttggttctactgtctgatcgaacgacatttgttttggcgttggctacgaagaaaatttgccgctacc

SEQ ID NO: 45342 - DNA, 1896 bp, Zea Mays
gccattcctacctgttgccacatctagtggttcggcctttccatctgccgttcgcccagcgtgttctccctctagtgcggcaactgggcgaccgccgccgccgctctactccgggtgcccaggcgttcgtccgtaccttctcaggccttcatcgcgtccttcgccggcgacgatcaccgacaaggatggaaagaacaattaattccttgatgtacaaaggatctattcctgatgcaattaatcaatcaagaagggagaagaagctctttgtagtctacatatcaggtgaagatgaggcttccagtagtttggaacagtcatcactgattgatgaaaacgtggttgaagtgatcggtagatgttgcatcttattgcatctcaagcaaggcaatgttgatgcatcacagttttcagctatctatccccagaagtctgtaccaagtatatcagtgattggactgaatggagttctgctgtggaatcatgatggatatatcaactctgaaaatctgaaagaaagcattgagaaagcgtgggctgctcttcatctacaggagacagcagcgaccttgttgacagcatcacttgctacaagaaattctgaacctgtgaattctgctactactgttttgccagctcaagggggctcttctactttagaaaatccttctgatttatccagtcaatcaccagatgtttctggtgccagtgaagttgctcattcaactgatctggtatcacaaattcctaatagcactgccctttatgaacctcttgagataaatgaaaaagaagggtcaaaatcaaactcggatgataaaactgttgagaagctagattcgaagggagaagacattacaccatcagcaaaaagaaagaacaaagatgatggaagtcacacttctattcccttggaggatactcctagtacactcactaataaaggagtttcttcccagtcacgcgtggaacaagacaaggcaacttcttttgtttctgtgaagtcagatgatattcagcttagtattcgtatgcccagtggaaatagactggagatcaaactaacaaaacaagatgttttaaggaaagtgaagaatttcgtggatgaaaaccaaggcaatgggcttggctcatatgacctttctctggtttatcctaaaagagttttctttgaacaagatatggaagcaacactatccgagctgggtattcaaaaccgtcatgcaatgattgttgttccacatcggcagtctggtcaggtgcggggggatactttggttacctgagaaccgtcctgtcttatgtgaatccactctcctacctgaggggaaataccaactcatcaaatacagagctacagtcaaatgaaggcctgcggcagcttagacatggatctggtccatggagtgagccacggcctcttggcaataggggccatgaagtgactgatgcagactctgcaaacacgctgcgaaggcggcctagaccatttggtgccaatatccacactctggggagcgaggatcatggtccgtctgatgaaagaaatgttttctggaacgggaactcgacagagtttggaggcgacgacagaaaataggttgtggcgtggctggcagggcctgggacgacactatcagacagaatcaaagttgcgaatagacagctgaaacaaatgcctcgacaggcttattgaggaataagtattgagattatagtgctgaaataatcgctgaattgtgatgtttacatttgtggaaacatacggtcgctggatccgtatactcgttgtatagtacatagccacagatatattaaatccgaactgcttggttctactgtctgatcgaacgacatttgttttggcgttggctacgaagaaaatttgccgctacc

SEQ ID NO: 45343 - DNA, 2276 bp, Zea Mays
gagcagggcgcatttgcaatgggactccacatgctcccgctccgtcgccccgcctccctcgccgcccgccgcctcctccgcgacaaccagcgcatcagcgccctcgcccgcgcgggcgatgtcgccgcggcgcgccgagtgttcgacgccatgactcaccgcgatgttgtctcctggaacgcgctcctcaccgcgctctggcgcgccggccgccaccacctcccagccgctcgccgcctcttcgacgaggccatgccttcccgcgacgtcgtctcctggaactcaatcatcgccggctgcctcgctcacggggacttggacgccgcctccgcctacttcgccggcgccccggagcgcaacgtggccacgtggaacgccatgctcgcggggctcgtccggctcggccgagtggttgacgcccagaggctgttcgacgaaatgcccgagaggaacgtggtgtcgtatacaaccatggtggactggctcgcgcggcgcggtgaggtggagagggcgcgggaggtgtttgactccatgccagacaggaatttggtgtcgtgggccgcgatgatcagtgggtgtgttgagaatggcatgtttgtcgaggcgagggaattgtttgaagcgatgcccgagaagaatgttgtggcatgcactgcgatgatcactggacactgcaaacagggggatgtggatagcgctaggaggctgtttgatgggattcgtgccaaggatgtcatctcctggaatgccatgattgctggatatgttcacaatggacacggggaagaagccatgagattgcatgctttaatgttcagagaaggtgtaaaaccggatcatgcgactcttattgcagtcctgacagcttgttctgcccttgctttgctcaggcaaggaaaatccacacatgctattgccatcaaagcaatgctagaatctggcatctctttttctaatgccttgatgacaatgtacagtaaatgcggcaatgtgggtgagtcagagttagtcttcatcaatcttagaaccaaggatattgtttcttggaacacaataattgctgcatatgcacaacatggcaaatatcagaaagttatagcacttttccatgagatggaagtgactggacttattcctgatgatatcaccttccttagtgtgttatcggcatgcgggcatgttggcatggtggatgccagcttgaaattgttcgatctgatgtcatctaaatacgccatatccccaagagctgaacactatgcttgtattgtggatatattgagccgagcaggacaattggagaaagcttctagttatataaaacatatgccattaaaagctgagaaaaatgtatggggctctttgcttggagcatgtcagatacatggtaacgtgcaactcggtgaacttgctgctaagatgcttgttcaatcagactctcaaagttcaggtccttatgtgattctttcgaatatatatgctgctgctggcatgtggggtcaagtcaatcaaataagaggtcagatgaaagaaagaggtgtgaagaaacaacctggatacagttggactgagattggaaatgaagttcatatgtttgtgggtggagatgcatctcatccagagatgagaaagatcatatctgagctgagaaaaatcagcttccatatgcgaatggtcaccaatgaagctcatataatggtagagctggcacaagaatgtggtcacttttcataatctcaagtgctcatgccatttggaacatccactctgctcagtatcttatgagttcaaggatcattttttttggagtatgggcatgtttggattctttacaggttactgtgtcacctagctgggcaaggggttggtgtggaatcagagtttggttctctggttagcatcgccttggtgcctgtgctttccagattttcttttctaacaagagtgaggcaaagctgctcaccatcgtgggcaaggttatgcttgcctggcaaagctagccatagaaccaaacttgctctcacctcggccacataggattccaacaatccagcatgtcctttaaacagccaagtttagtggctattgttatgatgacacaattctttgcaagaaaaaaaaagaaaggaagggactcaagtttttggaaaacttgatggttggagctacaaattataatgagcagttcttaaagggttttttatgtcgtccagacgagtagatctttcgacatcagaatacacataatctgctgccacagaagtttccttcatctt

SEQ ID NO: 45344 - DNA, 2289 bp, Zea Mays
gagcagggcgcatttgcaatgggactccacatgctcccgctccgtcgccccgcctccctcgccgcccgccgcctcctccgcgacaaccagcgcatcagcgccctcgcccgcgcgggcgatgtcgccgcggcgcgccgagtgttcgacgccatgactcaccgcgatgttgtctcctggaacgcgctcctcaccgcgctctggcgcgccggccgccaccacctcccagccgctcgccgcctcttcgacgaggccatgccttcccgcgacgtcgtctcctggaactcaatcatcgccggctgcctcgctcacggggacttggacgccgcctccgcctacttcgccggcgccccggagcgcaacgtggccacgtggaacgccatgctcgcggggctcgtccggctcggccgagtggttgacgcccagaggctgttcgacgaaatgcccgagaggaacgtggtgtcgtatacaaccatggtggactggctcgcgcggcgcggtgaggtggagagggcgcgggaggtgtttgactccatgccagacaggaatttggtgtcgtgggccgcgatgatcagtgggtgtgttgagaatggcatgtttgtcgaggcgagggaattgtttgaagcgatgcccgagaagaatgttgtggcatgcactgcgatgatcactggacactgcaaacagggggatgtggatagcgctaggaggctgtttgatgggattcgtgccaaggatgtcatctcctggaatgccatgattgctggatatgttcacaatggacacggggaagaagccatgagattgcatgctttaatgttcagagaaggtgtaaaaccggatcatgcgactcttattgcagtcctgacagcttgttctgcccttgctttgctcaggcaaggaaaatccacacatgctattgccatcaaagcaatgctagaatctggcatctctttttctaatgccttgatgacaatgtacagtaaatgcggcaatgtgggtgagtcagagttagtcttcatcaatcttagaaccaaggatattgtttcttggaacacaataattgctgcatatgcacaacatggcaaatatcagaaagttatagcacttttccatgagatggaagtgactggacttattcctgatgatatcaccttccttagtgtgttatcggcatgcgggcatgttggcatggtggatgccagcttgaaattgttcgatctgatgtcatctaaatacgccatatccccaagagctgaacactatgcttgtattgtggatatattgagccgagcaggacaattggagaaagcttctagttatataaaacatatgccattaaaagctgagaaaaatgtatggggctctttgcttggagcatgtcagatacatggtaacgtgcaactcggtgaacttgctgctaagatgcttgttcaatcagactctcaaagttcaggtccttatgtgattctttcgaatatatatgctgctgctggcatgtggggtcaagtcaatcaaataagaggtcagatgaaagaaagaggtgtgaagaaacaacctggatacagttggactgagattggaaatgaagttcatatgtttgtgggtggagatgcatctcatccagagatgagaaagatcatatctgagctgagaaaaatcagcttccatatgcgaatggtcaccaatgaagctcatataatggtagagctggcacaagaatgtggtcacttttcataatctcaagtgctcatgccatttggaacatccactctgctcagtatcttatgagttcaaggatcattttttttggagtatgggcatgtttggattctttacaggttactgtgtcacctagctgggcaaggggttggtgtggaatcagagtttggttctctggttagcatcgccttggtgcctgtgctttccagattttcttttctaacaagagtgaggcaaagctgctcaccatcgtgggcaaggttatgcttgcctggcaaagctagccatagaaccaaacttgctctcacctcggccacataggattccaacaatccagcatgtcctttaaacagccaagtttagtggctattgttatgatgacacaattctttgcaagaaaaaaaaagaaaggaagggactcaagtttttggaaaacttgatggttggagctacaaattataatgagcagttcttaaaggtttcacagcaacatctaggaaaaatacaaattacctaatggaaagtgatatggtacttcagacagtgtgtcctccacagacattttagttttcc

SEQ ID NO: 45345 - DNA, 2413 bp, Zea Mays
tccaccccaaaatggcactcgcgccatcacccccagcgctgccgcccaacccggcgctccctttgccgtggtgggggcgggccggccgcggtgcgctcctcggcgcccgcgcccgcgtccgcgccgtccgcgcggcgctacggcccccgagccagtggtccgtcgggagctggcggggccgcccggcgcagcagcagcccgagtacccggacaaggcggacctggaagacgtgctgcggacggtgggaacgttcccgcccatcgtcttcgccggcgaggcgcgcaccctcgaggagcgcctcgcggaggccgccgtcggccgggccttcctcctccagggcggcgactgcgccgagagcttcaaggagttcaacgccaacaacatcagggacaccttccgcgtcctcctgcaaatgtccgttgtgctcatgttcggaggccagatgcctgtcgtcaaggtgggaagaatggcagggcagtttgcgaagccaaggtcagatggttttgaggagcggaatggattgaagttgccaagctatagaggggacaatatcaatggggatgcattcaatggggagtcaaggttgccagatccacaccgcatgataagggcgtactcacagtctgcagcaacactgaatctgctgcgggcattcgcaactggaggttatgctgcaatgcagagggtagcacaatggaaccttgatttcacagagaacagcgaacaaggtgataggtacatggagttggctcaccgagttgacgaagctttggggttcatgtcagctgctgggctccctttagatcaccctataatgacaacagcagaattctggacgtcacatgagtgccttcttctaccttatgagcaagcgctcactcgtgaggattccaccacgggcctctattatgactgctctgcccacttcctatgggtcggagagcgcactcgccagcttgatggtgctcacgttgagttccttcgaggcattgccaaccctcttggtatcaaggttagtgacaagatggacccagcagaacttgtgcggttgattgatatattgaatcccgaaaacagggctgggagaataaccatcatcacaagaatgggacctgaaaacatgagggtgaaacttccacacctgatacgcgctgtccgtggggccggtcagatagtaacatgggttactgacccaatgcatgggaacactatgaaggccccttgcggactcaaaacccgctcgttcgacaggattttgcatggccgctatgggcatcggcgactgcgccaccaccagccagcgcggcgacctggacatcccgtacccgttgagcatcgggcgcgggtgctaccactacacgggcgatcgagggcggggcgacatcacctgcaggcgcaccgcgcgcggcggctaccagcctaccaggccttcagcggcgagtccgttgaggtcatcgccatctccgtgcgccgcggccaggcgcgcgtctgcattctgcaacgacatccagacctggtgctacaacacctagctcacggtccatgggcaaagtacaacagcctgtgggggatcgacctctccgactcgtagttccggatctccgacgaggccaacctcttcgtcgtcgtgcgctgcaactcgctggcgtacgtgcagtccttcaacgccggcatcgagtacatgaccggctgcatggccacgtgcccggacgcgagtgaacggctcctgcgccgggcgccggcatgggctgctggcctgctgccaggcggccatcccgcccagggcatcaacacgtacggcatgcagttcgacgaccgcgtcaacaccgccgcggccgtcacgggcttcagcccctgcagctacgccggccgtgctcatggaggccgccgcgttcgacttccgcaccacctacgtcaccaccggggacttcatgacatccaccggcgggaaggtgcagctgctgctgctggactgggtggtcagtagagagacgtgccgggaggcggcacggaacgccacggcgtacatgtgcgtcagcggcagctgcgagcgcgtcgactcgtggaacggaccgggctacctgcctacctctgcaactgctccgcggcccctacgtccctgccggatcctaacaacaagtacccttgctctgttcctggaacttgcaccaacactcctggaagcttcatctgctcctgccccgacaatcatccacggcgacgtcaagtcgcccaacttcctcattgaggagggctacgccgccaaggtgtccgacttcgtgccagtggcggacccaggatttagagtgtgggtattcgaaaattttctaggatgatttttaaagactaaagtttttctattggtatagatagataattatttgtatatataacatataattaagtataaac

SEQ ID NO: 45346 - DNA, 2696 bp, Zea Mays
tccaccccaaaatggcactcgcgccatcacccccagcgctgccgcccaacccggcgctccctttgccgtggtgggggcgggccggccgcggtgcgctcctcggcgcccgcgcccgcgtccgcgccgtccgcgcggcgctacggcccccgagccagtggtccgtcgggagctggcggggccgcccggcgcagcagcagcccgagtacccggacaaggcggacctggaagacgtgctgcggacggtgggaacgttcccgcccatcgtcttcgccggcgaggcgcgcaccctcgaggagcgcctcgcggaggccgccgtcggccgggccttcctcctccagggcggcgactgcgccgagagcttcaaggagttcaacgccaacaacatcagggacaccttccgcgtcctcctgcaaatgtccgttgtgctcatgttcggaggccagatgcctgtcgtcaaggtgggaagaatggcagggcagtttgcgaagccaaggtcagatggttttgaggagcggaatggattgaagttgccaagctatagaggggacaatatcaatggggatgcattcaatggggagtcaaggttgccagatccacaccgcatgataagggcgtactcacagtctgcagcaacactgaatctgctgcgggcattcgcaactggaggttatgctgcaatgcagagggtagcacaatggaaccttgatttcacagagaacagcgaacaaggtgataggtggggttgctgtgaatcaacaatgattaaccttcatgcctatcgattgacacacttatttcttcaatatttcaattcatcccaagatgtgtgcattttaggttcattctatggtcttagtgattagctatttgtttacacaaaaaatggaaatgttccttttttccgtccctggatccagaggtatcctgatttgcacaaagtgaccgcaacacatttattaacgttcgagagttattcaattgtgccaattcatggtttacatgtgggaaatggttaataggtacatggagttggctcaccgagttgacgaagctttggggttcatgtcagctgctgggctccctttagatcaccctataatgacaacagcagaattctggacgtcacatgagtgccttcttctaccttatgagcaagcgctcactcgtgaggattccaccacgggcctctattatgactgctctgcccacttcctatgggtcggagagcgcactcgccagcttgatggtgctcacgttgagttccttcgaggcattgccaaccctcttggtatcaaggttagtgacaagatggacccagcagaacttgtgcggttgattgatatattgaatcccgaaaacagggctgggagaataaccatcatcacaagaatgggacctgaaaacatgagggtgaaacttccacacctgatacgcgctgtccgtggggccggtcagatagtaacatgggttactgacccaatgcatgggaacactatgaaggccccttgcggactcaaaacccgctcgttcgacaggattttgcatggccgctatgggcatcggcgactgcgccaccaccagccagcgcggcgacctggacatcccgtacccgttgagcatcgggcgcgggtgctaccactacacgggcgatcgagggcggggcgacatcacctgcaggcgcaccgcgcgcggcggctaccagcctaccaggccttcagcggcgagtccgttgaggtcatcgccatctccgtgcgccgcggccaggcgcgcgtctgcattctgcaacgacatccagacctggtgctacaacacctagctcacggtccatgggcaaagtacaacagcctgtgggggatcgacctctccgactcgtagttccggatctccgacgaggccaacctcttcgtcgtcgtgcgctgcaactcgctggcgtacgtgcagtccttcaacgccggcatcgagtacatgaccggctgcatggccacgtgcccggacgcgagtgaacggctcctgcgccgggcgccggcatgggctgctggcctgctgccaggcggccatcccgcccagggcatcaacacgtacggcatgcagttcgacgaccgcgtcaacaccgccgcggccgtcacgggcttcagcccctgcagctacgccggccgtgctcatggaggccgccgcgttcgacttccgcaccacctacgtcaccaccggggacttcatgacatccaccggcgggaaggtgcagctgctgctgctggactgggtggtcagtagagagacgtgccgggaggcggcacggaacgccacggcgtacatgtgcgtcagcggcagctgcgagcgcgtcgactcgtggaacggaccgggctacctgcctacctctgcaactgctccgcggcccctacgtccctgccggatcctaacaacaagtacccttgctctgttcctggaacttgcaccaacactcctggaagcttcatctgctcctgccccgacaatcatccacggcgacgtcaagtcgcccaacttcctcattgaggagggctacgccgccaaggtgtccgacttcgtgccagtggcggacccaggatttagagtgtgggtattcgaaaattttctaggatgatttttaaagactaaagtttttctattggtatagatagataattatttgtatatataacatataattaagtataaac

SEQ ID NO: 45347 - DNA, 1407 bp, Zea Mays
tccaccccaaaatggcactcgcgccatcacccccagcgctgccgcccaacccggcgctccctttgccgtggtgggggcgggccggccgcggtgcgctcctcggcgcccgcgcccgcgtccgcgccgtccgcgcggcgctacggcccccgagccagtggtccgtcgggagctggcggggccgcccggcgcagcagcagcccgagtacccggacaaggcggacctggaagacgtgctgcggacggtgggaacgttcccgcccatcgtcttcgccggcgaggcgcgcaccctcgaggagcgcctcgcggaggccgccgtcggccgggccttcctcctccagggcggcgactgcgccgagagcttcaaggagttcaacgccaacaacatcagggacaccttccgcgtcctcctgcaaatgtccgttgtgctcatgttcggaggccagatgcctgtcgtcaaggtgggaagaatggcagggcagtttgcgaagccaaggtcagatggttttgaggagcggaatggattgaagttgccaagctatagaggggacaatatcaatggggatgcattcaatggggagtcaaggttgccagatccacaccgcatgataagggcgtactcacagtctgcagcaacactgaatctgctgcgggcattcgcaactggaggttatgctgcaatgcagagggtagcacaatggaaccttgatttcacagagaacagcgaacaaggtgataggtacatggagttggctcaccgagttgacgaagctttggggttcatgtcagctgctgggctccctttagatcaccctataatgacaacagcagaattctggacgtcacatgagtgccttcttctaccttatgagcaagcgctcactcgtgaggattccaccacgggcctctattatgactgctctgcccacttcctatgggtcggagagcgcactcgccagcttgatggtgctcacgttgagttccttcgaggcattgccaaccctcttggtatcaaggttagtgacaagatggacccagcagaacttgtgcggttgattgatatattgaatcccgaaaacagggctgggagaataaccatcatcacaagaatgggacctgaaaacatgagggtgaaacttccacacctgatacgcgctgtccgtggggccggtcagatagtaacatgggttactgacccaatgcatgggaacactatgaaggccccttgcggactcaaaacccgctcgttcgacaggattttgaattttgattgacagtgaaagggacttgccgcaagtttcatggaaagagctagcacacttgcatcaagtttcacatggaaagaagattgatataataatccttttcgaaaacacggtctttgtcttggtgttaatggcatccatttcg

SEQ ID NO: 45348 - DNA, 681 bp, Zea Mays
ctgatttgcagcatgcgctgctgcctgctctgcggccgcgcgctcggttgctcgccggacatcacgcgcgcgcctgcgcctagtgaatgtattaccgtacatgacagtttggtcgtccagggtgaggtgcgtgcgttctttgatgtccacgaacaagaagggagccaccctggaggagtgcatctagagatgactggacaaaatgttacagagtgcatcggcggttcacgtacggtgaccttcgatgatctggggtcacgctaccacacgcactgcgacccaaggctcaatgcctcacagtctctggagatggcatttatcatcgccgagcgccttaggaaaaggaggatggcctcgtcgcctttgtacacgaaccagctgggttccattccatcaatgggtctgtgaacaacactaggttcactgtcaaggactagtccttgggttttgtttcagctgctgtgtcaaactttgctggcatgcactggtaaactagatagcctgctgtactgctcattcccggcactgggtctgccctcaaagtataatagatactcatcactttttgaccactctatttatcttgttcattattcctggaatgttttcccgaaatgtctgtctaccatgtactgctgttcctctttcttacatgtgtgttaactaggagcgttttggtcc

SEQ ID NO: 45349 - DNA, 2003 bp, Zea Mays
tccaccccaaaatggcactcgcgccatcacccccagcgctgccgcccaacccggcgctccctttgccgtggtgggggcgggccggccgcggtgcgctcctcggcgcccgcgcccgcgtccgcgccgtccgcgcggcgctacggcccccgagccagtggtccgtcgggagctggcggggccgcccggcgcagcagcagcccgagtacccggacaaggcggacctggaagacgtgctgcggacggtgggaacgttcccgcccatcgtcttcgccggcgaggcgcgcaccctcgaggagcgcctcgcggaggccgccgtcggccgggccttcctcctccagggcggcgactgcgccgagagcttcaaggagttcaacgccaacaacatcagggacaccttccgcgtcctcctgcaaatgtccgttgtgctcatgttcggaggccagatgcctgtcgtcaaggtgggaagaatggcagggcagtttgcgaagccaaggtcagatggttttgaggagcggaatggattgaagttgccaagctatagaggggacaatatcaatggggatgcattcaatggggagtcaaggttgccagatccacaccgcatgataagggcgtactcacagtctgcagcaacactgaatctgctgcgggcattcgcaactggaggttatgctgcaatgcagagggtagcacaatggaaccttgatttcacagagaacagcgaacaaggtgataggtggggttgctgtgaatcaacaatgattaaccttcatgcctatcgattgacacacttatttcttcaatatttcaattcatcccaagatgtgtgcattttaggttcattctatggtcttagtgattagctatttgtttacacaaaaaatggaaatgttccttttttccgtccctggatccagaggtacatggagttggctcaccgagttgacgaagctttggggttcatgtcagctgctgggctccctttagatcaccctataatgacaacagcagaattctggacgtcacatgagtgccttcttctaccttatgagcaagcgctcactcgtgaggattccaccacgggcctctattatgactgctctgcccacttcctatgggtcggagagcgcactcgccagcttgatggtgctcacgttgagttccttcgaggcattgccaaccctcttggtatcaaggttagtgacaagatggacccagcagaacttgtgcggttgattgatatattgaatcccgaaaacagggctgggagaataaccatcatcacaagaatgggacctgaaaacatgagggtgaaacttccacacctgatacgcgctgtccgtggggccggtcagatagtaacatgggttactgacccaatgcatgggaacactatgaaggccccttgcggactcaaaacccgctcgttcgacaggattttgggtgaggtgcgtgcgttctttgatgtccacgaacaagaagggagccaccctggaggagtgcatctagagatgactggacaaaatgttacagagtgcatcggcggttcacgtacggtgaccttcgatgatctggggtcacgctaccacacgcactgcgacccaaggctcaatgcctcacagtctctggagatggcatttatcatcgccgagcgccttaggaaaaggaggatggcctcgtcgcctttgtacacgaaccagctgggttccattccatcaatgggtctgtgaacaacactaggttcactgtcaaggactagtccttgggttttgtttcagctgctgtgtcaaactttgctggcatgcactggtaaactagatagcctgctgtactgctcattcccggcactgggtctgccctcaaagtataatagatactcatcactttttgaccactctatttatcttgttcattattcctggaatgttttcccgaaatgtctgtctaccatgtactgctgttcctctttcttacatgtgtgttaactaggagcgttttggtcc

SEQ ID NO: 45350 - DNA, 1813 bp, Zea Mays
tccaccccaaaatggcactcgcgccatcacccccagcgctgccgcccaacccggcgctccctttgccgtggtgggggcgggccggccgcggtgcgctcctcggcgcccgcgcccgcgtccgcgccgtccgcgcggcgctacggcccccgagccagtggtccgtcgggagctggcggggccgcccggcgcagcagcagcccgagtacccggacaaggcggacctggaagacgtgctgcggacggtgggaacgttcccgcccatcgtcttcgccggcgaggcgcgcaccctcgaggagcgcctcgcggaggccgccgtcggccgggccttcctcctccagggcggcgactgcgccgagagcttcaaggagttcaacgccaacaacatcagggacaccttccgcgtcctcctgcaaatgtccgttgtgctcatgttcggaggccagatgcctgtcgtcaaggtgggaagaatggcagggcagtttgcgaagccaaggtcagatggttttgaggagcggaatggattgaagttgccaagctatagaggggacaatatcaatggggatgcattcaatggggagtcaaggttgccagatccacaccgcatgataagggcgtactcacagtctgcagcaacactgaatctgctgcgggcattcgcaactggaggttatgctgcaatgcagagggtagcacaatggaaccttgatttcacagagaacagcgaacaaggtacatggagttggctcaccgagttgacgaagctttggggttcatgtcagctgctgggctccctttagatcaccctataatgacaacagcagaattctggacgtcacatgagtgccttcttctaccttatgagcaagcgctcactcgtgaggattccaccacgggcctctattatgactgctctgcccacttcctatgggtcggagagcgcactcgccagcttgatggtgctcacgttgagttccttcgaggcattgccaaccctcttggtatcaaggttagtgacaagatggacccagcagaacttgtgcggttgattgatatattgaatcccgaaaacagggctgggagaataaccatcatcacaagaatgggacctgaaaacatgagggtgaaacttccacacctgatacgcgctgtccgtggggccggtcagatagtaacatgggttactgacccaatgcatgggaacactatgaaggccccttgcggactcaaaacccgctcgttcgacaggattttgggtgaggtgcgtgcgttctttgatgtccacgaacaagaagggagccaccctggaggagtgcatctagagatgactggacaaaatgttacagagtgcatcggcggttcacgtacggtgaccttcgatgatctggggtcacgctaccacacgcactgcgacccaaggctcaatgcctcacagtctctggagatggcatttatcatcgccgagcgccttaggaaaaggaggatggcctcgtcgcctttgtacacgaaccagctgggttccattccatcaatgggtctgtgaacaacactaggttcactgtcaaggactagtccttgggttttgtttcagctgctgtgtcaaactttgctggcatgcactggtaaactagatagcctgctgtactgctcattcccggcactgggtctgccctcaaagtataatagatactcatcactttttgaccactctatttatcttgttcattattcctggaatgttttcccgaaatgtctgtctaccatgtactgctgttcctctttcttacatgtgtgttaactaggagcgttttggtcc

SEQ ID NO: 45351 - DNA, 2285 bp, Zea Mays
aagaatcaattttttgaattcaaaccaagaagggaatagttgtgaaaatctttcacaaaaggacaaaaggcaaaaaaaagcccgtcgaatgctggatgaacgctcaaattattcaaaacccacgcgcacgtctcttctcacgcaaggagccccttacgacgctgggccccacccgccacaaggaccaaaaaatgctttgtctgtgtgtccggcccagtacgtatacgtacattgctgcaggaggccccctctcaaaaaaaaatcatgaaaagtcgtgccctgctcagtggtctaccccgtctttccgcttcgtcccggcccgggcacacgcgacggaagcgaaaccctctccctataaaacctctcgactagtcacgtccgcttggcagggaccagtccatctcgtctcgtcccagcaaagcaaaggcagccatgccccacagtctcttcctgctcgtcgtcctcctcgccgccgcgcaagccagcgcggccacgccgcggcagctgttcctcgtgagccggccgcccatcacgctcaccaaccaccacggccagctgctgacgggcaactactccgtcaacctgctctggtacgggcgtttcacgccggcgcagcgcgccgtggtggccgacttcatcctctccctctcggggacggggccggggtccgtggcggcgtggtgggccacgacgtcgcggtaccatcctggcgcagcacggctgtcgctggggcgacaggtgctggacccgtcgcgctccctaggccgccgcctctcggagtcgtcgctagcgtccctggcgacgcgcctggccccgcaccgcggctccgtggcggtcgtggtgacggcgccggacgtgctcgtggacgggttctgcctctcccgctgcggcctccacgcgtcgtccccgaccccgaacgccacccgcgggcgtggccgcgggcggtacgtgtacgcgtgggtggggaaccccgcggagcagtgcccgggggagtgcgcatggcccttccaccagccgctctacggcccgcagccggcggcggcgccgctggtggccccgaacgcggacgtcgggatggacggcgcggtgatcacgctggccacgctgctggcgggcgcggtgaccaacccgtacggcggcggcttcttccagggccccgcggaggcgccgatggaggccgtcacggcgtgcgcgggcgtgttcggggccggcgcctaccaggggtacccggggcagctgcgcgtggacgccgccacgggcgccagctacaacgccgtggggatcgccggccgacgcttcctgctgccggccatgtgggaccccgaaacagcgcagtgctccacgccgctggactagatagatagatagatgcccgtgccgccgtgcatgactgtggtggagtcgagtgtcggtgctgctgtttcttactttctttctcgtgtcccctccctcgcattgtggatataccactcaccaaccatttcgtttgtggcttactactactactccggagggttggtggttaacgttttggaagagcaacagcaatggagcagccagcagagcctctgcatggaaaagtagcgaaaggcaatggcaaggacaggcatggcagcaggagggagcgtcctgtccttgctgccgtgcacagggcaccgcacactgtgccccgaccccgagcgagaagcaagagagaaaggacaacagggtcggagggcgtacgggaggcgtcccgtgggcctgtgcgcttggcccatccgagtcgacgcgacgtgccaatggcccatcatggcactcgctcgctgtgcctgccgctctgccagaacactgcctttggcacccccgcttgcctttcccttttgcagttgggtgggggccaatgctgctgctgctgggacgcgggtcctctgaatttgtgcatttgtgcagttgtgtcactgcacgtgggacccactcctgctcagtcccgcgtgtcagtgacccatcgacaaattcagaggatcccaatccctgctgctgcggcctgctggccatggccgcatgggcacgacgttatgtttgtgggggctgcgtcgtcatgccttgtcgcgttgctggtgtagctacgccgcactacttttcgtcctttttctttttccgcgccttttcttttactcctttcatcatatgatattactttttaagctgtatggaccagtctacttaaattttattcaaaaatattgttttggactgtattatacactattcatagagtgaagtttaaatataatatgagaatggat

SEQ ID NO: 45352 - DNA, 1529 bp, Zea Mays
ggcctcggcgcaacggcccttcccgcgcgactgcacttgcacacgcggcggagaaatgaaagcgccagcggctagtggataagctaagctctccctctcgctgagccggctgttgctctccccacaaccccgcgcgcgggggagcgataaaccctagtcttcgccgtcgtcgcaggaggacccgcgatgtcgcacttcgggaggtcaggcccgccggacatccgcgacaccttctcgctcctcgtcctcaacatcagcttccgcaccacggccgacgacctcttcccgctcttcgagcgctacggcaaggtcgtcgacgtcttcatcccgagggaccggaggaccggggactcgaggggtttcgcgttcgtgcggtacaagtacgccgacgaggcgcagaaggctatagatcggctcgatggccgtgatgtggatgggagaaacatcatggtgcagtttgcaaagtacggccccaatgctgagccaatccgcaaaggaagggttaaagagggggttgagaaatcacaagacagatcaagaagccgcagtccaaggccaaggcacagagatagagatcatagaagccaaagtcgcagcaggagcagagaaaggcatgtccgtgatagagacaggggctatcgtcgtcggagcagaagtagaagccgaagtcttagttcaagccctgacaacagaagtcatcatagagcaagagatgatgataagcgcaagagcatgagtaagagcaggagcaggagcaggagcacaagtagaagccgctcatactatagtgcttcacctgcccggcacagtgctagccctcgcaagagcccaccgccacagaggagccccactcctgcaaagcatgccaatggaaaagtagcacctctgtcacgctgtgtttctccattaccgaagcgtgcaacctcccgcagcccaggcagtgatggcaagaaaacagccttctcacggagtcacgggattgcagaaccttgagaaggttgattgagcacaatggaagtagcagtctgcaatcaaccgcgatccaagttatctgttcgtgagatgggttgctgtttactggtagaacggtattgcacgggaccaactatggtggatgatgtcttgctgtcattggtgttgatatggcaatggtgcagctgatgtgacgatgcagatgccgatgctgctgacagtgaccatcttgtttgcacaatgatcccttacaagttatgttggttcttatccccccttctcgcagatgcttttgcatcagtgctagttggaacatggtgttgaggggttaattatgacgggcatgggtcctgtttatcatgtggtggtgttgagtgactccttttgctatctgtggccctagctttattcattatttgaagcaaccattaataaaatccatgaactcaattattaatttgttagccgaaacgctatatacaggtgacgttgtagtcgtaagcatgtagcaatgtattgactttttggtgattgaattgatagttttttgaaacaat

SEQ ID NO: 45353 - DNA, 1552 bp, Zea Mays
ggcctcggcgcaacggcccttcccgcgcgactgcacttgcacacgcggcggagaaatgaaagcgccagcggctagtggataagctaagctctccctctcgctgagccggctgttgctctccccacaaccccgcgcgcgggggagcgataaaccctagtcttcgccgtcgtcgcaggaggacccgcgatgtcgcacttcgggaggtcaggcccgccggacatccgcgacaccttctcgctcctcgtcctcaacatcagcttccgcaccacggccgacgacctcttcccgctcttcgagcgctacggcaaggtcgtcgacgtcttcatcccgagggaccggaggaccggggactcgaggggtttcgcgttcgtgcggtacaagtacgccgacgaggcgcagaaggctatagatcggctcgatggccgtgatgtggatgggagaaacatcatggtgcagtttgcaaagtacggccccaatgctgagccaatccgcaaaggaagggttaaagagggggttgagaaatcacaagacagatcaagaagccgcagtccaaggccaaggcacagagatagagatcatagaagccaaagtcgcagcaggagcagagaaaggcatgtccgtgatagagacaggggctatcgtcgtcggagcagaagtagaagccgaagtcttagttcaagccctgacaacagaagtcatcatagagcaagagatgatgataagcgcaagagcatgagtaagagcaggagcaggagcaggagcacaagtagaagccgctcatactatagtgcttcacctgcccggcacagtgctagccctcgcaagagcccaccgccacagaggagccccactcctgcaaagcatgccaatggaaaagtagcacctctgtcacgctgtgtttctccattaccgaagcgtgcaacctcccgcagcccaggcagtgatggcaagcttgctgatttggtgatgcctagaaaacagccttctcacggagtcacgggattgcagaaccttgagaaggttgattgagcacaatggaagtagcagtctgcaatcaaccgcgatccaagttatctgttcgtgagatgggttgctgtttactggtagaacggtattgcacgggaccaactatggtggatgatgtcttgctgtcattggtgttgatatggcaatggtgcagctgatgtgacgatgcagatgccgatgctgctgacagtgaccatcttgtttgcacaatgatcccttacaagttatgttggttcttatccccccttctcgcagatgcttttgcatcagtgctagttggaacatggtgttgaggggttaattatgacgggcatgggtcctgtttatcatgtggtggtgttgagtgactccttttgctatctgtggccctagctttattcattatttgaagcaaccattaataaaatccatgaactcaattattaatttgttagccgaaacgctatatacaggtgacgttgtagtcgtaagcatgtagcaatgtattgactttttggtgattgaattgatagttttttgaaacaat

SEQ ID NO: 45354 - DNA, 2885 bp, Zea Mays
gacagtagtgttcgggcccgatcgactgctcctagaagcttcggccgcgcctctatctcatctccttcctcctgttgagcccgccggcctcccacagcttactacgaaaaccctaaccccttcccttatcctctgctccctctccacgtttccacgaacgttggcgcgcaagctcgtggtgtgagcggtcactgtctcccatcccatggctccggcgctgagcgggactctgggcgcgtcgtcggtggcggcgctgcggccctgcgcggggaggagggcgccgtccgccgcgagctcggttgcgccgcgcgggagcggggtggtgaggtgctccagagggctcaggtgggacgcccacagaagcagggggaggttgctcagggtgaggtgcgatgcggccgtcgtggagaagcccgccggggaggaggcggctggggagaagttcgagtaccaggcggaggtgagccgcttaatggacttgatcgtccatagtctgtacagtcataaggaggtatttctccgggagcttgttagcaatgcgagtgatgcgctggataagctgaggttcctcggcgtcactgattcttctttgcttgctgatggcggcgagctagaaataagaattaagcctgaccttgatgctggaacgattactatcactgacactggtgttggtatgactaaagatgagctcaaggactgccttggtaccattgctcagagtggtacctcaaaatttctgaaggccctcaaggaaaacaaagaccttggggcggacaatggtctaattggtcagtttggtgttggattttactcagcttttcttgttgcagagaaggttgtggtgtccaccaagagcccaaaatcagataaacagtatgtgtgggaagctgtggctgacagtagctcttatgtcataaaggaagagactgatcctgagaaaatgcttacacgtggaactcagattaccctgtttctaagacctgatgataagtacgagtttgcggacccttcaaggattcaaggcttagtaaaaaattactctcagtttgtgtctttccccatatacacatggcaggagaaatcaagaactgttgaggttgaagaggatgaagagccgaaagaagttgaagaggcaacaaagggtgagaaaaagaagaagactattacagagaaatattgggattgggaactagccaatgagacaaaacccatatggatgagaaatccaaaggaaattgagaacaccgaatacaatgagttctataagaagacattcaatgagtttttggaccctcttgctcacactcacttcacaactgagggtgaggtggaattcaggagtgttctttatgttccgggcatggcgcctcttagtaatgaggagataatgaaccccaagaccaaaaatatccggctatatgttaaaagagtattcatctctgatgactttgatggtgaactgtttccaagatacttgagctttgtgaaaggtgtggtggattcaaatgaccttcccctcaacgtttctcgggagattcttcaagaaagtcgaattgtaagaattatgcgcaagcgacttgtcagaaagacctttgatatgattgaagagattgcggaaaaggaagataaggaggactataagaagttttgggagagctttggcaagtttatcaagcttggttgcatcgaggacacagggaatcacaagcgccttgctccattgttgcgcttccactcttctaaaaacgagggagatttgataagtcttgatcaatatgtagagagcatgcctgaaagtcaaaaggcaatctactacatcgctacagatagtctccagagtgcaaagactgctcctttcctggaaaagctggtccagaaagatattgaagttctctaccttattgagccgatagatgaggttgccattcagaacttgcagacctacaaagagaagaaatttgtggatatcagcaaagaggatctggaattgggtgatgaagaagaagagactaaagaaaccaaacaggagttcactctcctatgtgattgggttaaacaacagcttggcgacaaggttgcgaaggtccaaatatcaaagcgtttaagttcatctccatgtgttctcgtatctggcaagttcggttggtccgccaatatggaaaggctcatgaaggctcaaacacttggtgacacatcaagtttggaattcatgaggggaagaaggatcttcgaaatcaaccctgaccacccaattatcaaggatttgagcgctgcttgcaaaaatgagcccgaaagcacagaagccaggagggctgttgagctcctatacgaggctgctttaatctcgagtggatatactccggagagtccagcggagttgggtggcaagatctatgagatgatggcgattgccctcggcgggagatggggaaggtccgacatggaggaggccgaagcgtcgacgggtgaggccagcgcagaggcagactcatctgaaggcaccgtagcagaggtgattgagccctcggaagttagacccgagagcgatccgtggagggaccagtgagttctcccacgggcatcctttgttagaactccatatttagcagtgccggggaaaaaaactaagccatgggcaagaacatatttggtcacagttgcttctatatgggttcttgccgtggcaattttttgtaggcttagactttgccggccactaaaatcttattgaggaggtagtggccttagaaaagaataataaagcatgaagactgatgattacatagcaaaattgtgctgtccctctcaataatatttataatgaaaagaacttatttctgcaagcagctgtctcctcccccctttatatacgtacgtagttg

SEQ ID NO: 45355 - DNA, 2595 bp, Zea Mays
tgcccgcgccaagagtgtccacttcaaccctagctccacctgcatctcccctcccgcccgcctccctccgtccactcggatccggaaaaccctaaccctagacgtcgcccggccgccgccatggaccccgacggcgacccggccttccaccgcaacgaggccatctccgcggtccaggatgtcgaccagtactatggcgacgacgacgacttcgacgacctctacaacgacgtcaacgtcggggacggcttcctccacgcctcccaccaggcgccgccgccgctgccgccgccacctccgactcagcaggccccaccgccgcagaagcaccagctccctccgccgtcccagcagctgccgccgccccagcagcatccacctgcccacgtcctcccgccaccgccgccgcaggccccaccgccgcagcagcaggtaagcatcccgggggtggccgtccctgctcctggcagacctcccgcccagaccaacctccctccgcctcctcagccaccggccgctcccgcgccgccgccgccgcctcagcaccaccatattcagcaagacgggatcaaccgccctggagggaacatcgccggtggccccatcgtggtcgggaacggtggccctgctggcgggggtgacggccctggcggcacgacgctgttcgtgggggaactccactggtggacaacggacgcggatctggaatctgagctcagcaagtatgggccggtcaaggaggttaggttcttcgacgagaaggccagtggcaagtcaaagggctactgccaggtcgatttctatgaccctggtgcagctgctgcctgcaaggagggcatgaacggccacacgtttaacggccgtccatgtgttgtggcattcgccacaccgaacagcgtgcgtcgcatgggcgaggcacaggtgaagaatcagcaggctatggctgcacagacatcaaatatgcagccaaaggttggtagagggagcggtggtgccgcagggccacaggcgggtggtaattatggcggtggccgtggaggacctgttggacctggtgccggtggtggagctggtggaggcggtggaaattggggaagaggtggtggaggcatggggaatagaggccctattggtaatatgaggaacaggatgggcccagctggtggtggtcgtgggataatgggaaatggggggatggttgcgccgccgccaccaatgatgcctccaggtggaatgctggggcagggttttgatcctactggttacggcgctatgggaaggatgggtggtggatttggtggttttcctggtggaccaggggctatgccattccctgggctgatgcagccattcccgccagttgttgctccacatgttaacccagctttctttggtcgtggcggaatgggtgccggtggaatgtggcctgatcccaacatgggagcctggggtggggaggaacaatcgagttacggtgatgacgcagcttctgatcagcagtatggtgaaggagggagccatgggaaagagaggccaccagagagggagtggtctggtgcaccagagaggaggcgtgaaagggagaaggatgcgccccctgcacaggagtggccagagaggaggcaacgtgatgagcgtgacatggaccgtgagaggaatcgtgactatgacagagacagggaaaaagaccgtgacagggaaagagaccgagaccgagatagggagagggacagagatagggagagggagagggagagggagagggagagggagaggcatagggatgacagagatcgctatggcgattatcacaggcacagggatcgcgattcggaacgtaatgaagactgggacaggggtagatcatctgggatacgcggcaggtcaagggaggctgaccactctaagcgcaggcggatgacacctcagtagtcgtagctgggtgagctactaatgtagaggcaaacgatgatccagagccgagtcttgcttgcacactggcatggttaacagctagcatcttcttgctgcctctggctgtggtggttctaatatcttgtgtctccggcaatgtgttgtagcaagaacgagagattaattatcatcaatcactccagcgtggcatcttttgttacttgcaatttggagcctaccagacatgatcctgtttgtgttggtacttggaatgtctggttgggacctgttgagctgtgcgaagatggacttccctggatgatagttgctgcctcttattgtacgccatgttaaatgtctgagttttcacaaagacaaaaaaagatctctgttttgtgtgtaattcaggaccgatgctgttgctgttgaaaactgtactatttctgctgtaatcttatgataaaccagtctgtattatgacactgtccttttgttcatcctttctcctttgttcctggttgaagttgtctcatgttttgatggctgcagcgctagttgtgttgccagttggaatattcagaacgcgagacctctaaatatactggcttgtttctttgaaaaaacattgtatttgccattgtttgcttgttcctctgttgatagtggatagatggttttgtc

SEQ ID NO: 45356 - DNA, 2362 bp, Zea Mays
cttcctcctcgcctgtcaccaacagcagggccccacagtgcccgcgccaagagtgtccacttcaaccctagctccacctgcatctcccctcccgcccgcctccctccgtccactcggatccggaaaaccctaaccctagacgtcgcccggccgccgccatggaccccgacggcgacccggccttccaccgcaacgaggccatctccgcggtccaggatgtcgaccagtactatggcgacgacgacgacttcgacgacctctacaacgacgtcaacgtcggggacggcttcctccacgcctcccaccaggcgccgccgccgctgccgccgccacctccgactcagcaggccccaccgccgcagaagcaccagctccctccgccgtcccagcagctgccgccgccccagcagcatccacctgcccacgtcctcccgccaccgccgccgcagcaccaccatattcagcaagacgggatcaaccgccctggagggaacatcgccggtggccccatcgtggtcgggaacggtggccctgctggcgggggtgacggccctggcggcacgacgctgttcgtgggggaactccactggtggacaacggacgcggatctggaatctgagctcagcaagtatgggccggtcaaggaggttaggttcttcgacgagaaggccagtggcaagtcaaagggctactgccaggtcgatttctatgaccctggtgcagctgctgcctgcaaggagggcatgaacggccacacgtttaacggccgtccatgtgttgtggcattcgccacaccgaacagcgtgcgtcgcatgggcgaggcacaggtgaagaatcagcaggctatggctgcacagacatcaaatatgcagccaaaggttggtagagggagcggtggtgccgcagggccacaggcgggtggtaattatggcggtggccgtggaggacctgttggacctggtgccggtggtggagctggtggaggcggtggaaattggggaagaggtggtggaggcatggggaatagaggccctattggtaatatgaggaacaggatgggcccagctggtggtggtcgtgggataatgggaaatggggggatggttgcgccgccgccaccaatgatgcctccaggtggaatgctggggcagggttttgatcctactggttacggcgctatgggaaggatgggtggtggatttggtggttttcctggtggaccaggggctatgccattccctgggctgatgcagccattcccgccagttgttgctccacatgttaacccagctttctttggtcgtggcggaatgggtgccggtggaatgtggcctgatcccaacatgggagcctggggtggggaggaacaatcgagttacggtgatgacgcagcttctgatcagcagtatggtgaaggagggagccatgggaaagagaggccaccagagagggagtggtctggtgcaccagagaggaggcaacgtgatgagcgtgacatggaccgtgagaggaatcgtgactatgacagagacagggaaaaagaccgtgacagggaaagagaccgagaccgagatagggagagggacagagatagggagagggagagggagagggagagggagagggagaggcatagggatgacagagatcgctatggcgattatcacaggcacagggatcgcgattcggaacgtaatgaagactgggacaggggtagatcatctgggatacgcggcaggtcaagggaggctgaccactctaagcgcaggcggatgacacctcagtagtcgtagctgggtgagctactaatgtagaggcaaacgatgatccagagccgagtcttgcttgcacactggcatggttaacagctagcatcttcttgctgcctctggctgtggtggttctaatatcttgtgtctccggcaatgtgttgtagcaagaacgagagatgaatgtctggttgggacctgttgagctgtgcgaagatggacttccctggatgatagttgctgcctcttattgtacgccatgttaaatgtctgagttttcacaaagacaaaaaaagatctctgttttgtgtgtaattcaggaccgatgctgttgctgttgaaaactgtactatttctgctgtaatcttatgataaaccagtctgtattatgacactgtccttttgttcatcctttctcctttgttcctggttgaagttgtctcatgttttgatggctgcagcgctagttgtgttgccagttggaatattcagaacgcgagacctctaaatatactggcttgtttctttgaaaaaacattgtatttgccattgtttgcttgttcctctgttgatagtggatagatggttttgtc

SEQ ID NO: 45357 - DNA, 1868 bp, Zea Mays
acacatcattgagcgcaacgcggtcgtgattgcgagtgaatccgtggtgtccaactcccaagcccctaccggcaaccctagcgaggcgatggggaaggcggaggcgaggtcaagggggcgcggcggcggcggcggcggcggaggcgccagcggcaatccggggaagatcttcgtcggagggctcccgcgggacaccacggatgctacatttgtgaggcattttggacagtatggagaaatagttgattcggtgataatgaaggataggcacacatctcagccacggggttttggcttcattacatactctgaccctgctgttgttgataaagtgatagaggacaatcatgttatcaatggaaagcagttgaaattaagagaaccataccaaaaggttcggtgcaatctagctctaaggatttcaagactaaaaagatatttgttggtgggcttccgtcaacactaacagaagacgaattcaagagtttctttgcaagatatgggactgtggtggaccaccagattatgtttgatcatgaaaccaaacgttcccgaggctttggatttatagtttttgcttctgagcaagttgtagatgatttgttagcaaatggaaatatggttgaccttgctggttcaaaggtggagatcaagaaagcagaaccaaagaaatcctccaatgcaccgccaccaccagtgcatgttagaaatgctaggtcagcatatgatagcggctctagagaccacccttcagctgacaactatggtggaatggccagtgcttatggaaactacaggggtggtggatttggtccttataggagcgatacaggatttggtgctaggctcagcagctatggtggggtaggtgattttggtggtgcatatggtcgttactatgcaggattaggagggggatatggagccgcgtcttcgtttggttatcctggtcgctttgggttatatggaggaggttttggtggatcttatgctggtgctgacttaagtggctatagacgcggtggaggtgatgagagcttcggtgcccctggtggtaatcctgggtttggtggtgatgctgaagagagctttggtggccctagtagttctggctttagtggcaccgcctatggtggggcatatgatcctacgctaggtggttatggatctgctagcacacctgacatgaataggggaagcttcactggaggatatggacgatatcacccatatggataacaagaagagcccttgaaggcttaacacttgcatgcacgtttgctgcccgtcattggagaacacccaccatttctggacaatatccagctgcctgaagcttcaagaacaacttaatgtcatgtgtacatgttttctcgttcccgtgagctttaacttatatatcctatagcatgtagtgtgatccagagtagacgttgtatcgaaggttattgtgtttggcataatatagaattctggtatactttgtagtagtttttaagcttctatgtaagcatactccatctgggagcagattagctgtgtgaacgctaggagggccggtctctaccacttagcattgtacctgatcaagttattcactcttttggtttacccattgagagcattgtccgtgatgtcctccttggttcacctagtattagctgcccttagctggggttgagtagattatgagataatggcatttgtgctctagcttaagtttatcttcattagctggtctgtttggttttaagatagctagagtttagcagataatcattatctaggtgaaactaaaccaaagagcaccttagcttcatctgtgatcactagcaattgatgcctgaaccgcgctgatgattctcgta

SEQ ID NO: 45358 - DNA, 1895 bp, Zea Mays
acacatcattgagcgcaacgcggtcgtgattgcgagtgaatccgtggtgtccaactcccaagcccctaccggcaaccctagcgaggcgatggggaaggcggaggcgaggtcaagggggcgcggcggcggcggcggcggcggaggcgccagcggcaatccggggaagatcttcgtcggagggctcccgcgggacaccacggatgctacatttgtgaggcattttggacagtatggagaaatagttgattcggtgataatgaaggataggcacacatctcagccacggggttttggcttcattacatactctgaccctgctgttgttgataaagtgatagaggacaatcatgttatcaatggaaagcaatacttccctattgctttactccgcaggttgaaattaagagaaccataccaaaaggttcggtgcaatctagctctaaggatttcaagactaaaaagatatttgttggtgggcttccgtcaacactaacagaagacgaattcaagagtttctttgcaagatatgggactgtggtggaccaccagattatgtttgatcatgaaaccaaacgttcccgaggctttggatttatagtttttgcttctgagcaagttgtagatgatttgttagcaaatggaaatatggttgaccttgctggttcaaaggtggagatcaagaaagcagaaccaaagaaatcctccaatgcaccgccaccaccagtgcatgttagaaatgctaggtcagcatatgatagcggctctagagaccacccttcagctgacaactatggtggaatggccagtgcttatggaaactacaggggtggtggatttggtccttataggagcgatacaggatttggtgctaggctcagcagctatggtggggtaggtgattttggtggtgcatatggtcgttactatgcaggattaggagggggatatggagccgcgtcttcgtttggttatcctggtcgctttgggttatatggaggaggttttggtggatcttatgctggtgctgacttaagtggctatagacgcggtggaggtgatgagagcttcggtgcccctggtggtaatcctgggtttggtggtgatgctgaagagagctttggtggccctagtagttctggctttagtggcaccgcctatggtggggcatatgatcctacgctaggtggttatggatctgctagcacacctgacatgaataggggaagcttcactggaggatatggacgatatcacccatatggataacaagaagagcccttgaaggcttaacacttgcatgcacgtttgctgcccgtcattggagaacacccaccatttctggacaatatccagctgcctgaagcttcaagaacaacttaatgtcatgtgtacatgttttctcgttcccgtgagctttaacttatatatcctatagcatgtagtgtgatccagagtagacgttgtatcgaaggttattgtgtttggcataatatagaattctggtatactttgtagtagtttttaagcttctatgtaagcatactccatctgggagcagattagctgtgtgaacgctaggagggccggtctctaccacttagcattgtacctgatcaagttattcactcttttggtttacccattgagagcattgtccgtgatgtcctccttggttcacctagtattagctgcccttagctggggttgagtagattatgagataatggcatttgtgctctagcttaagtttatcttcattagctggtctgtttggttttaagatagctagagtttagcagataatcattatctaggtgaaactaaaccaaagagcaccttagcttcatctgtgatcactagcaattgatgcctgaaccgcgctgatgattctcgta

SEQ ID NO: 45359 - DNA, 1037 bp, Zea Mays
gacggcgaggtgcagagctcctacgggctccgccatcaacaccatggatacactccaagaggccccttcaactccattggaggctacagctgccctctacactatacagtttgcagtatatttcttcttctcggaggaggatgaacggatttccagcaccctattttcaacatcgaggaggatgaacattctacgaaatcaaaaggaccccttaagttctacaactcagaggctgcacttggggaatcaaagaaaagtgaaagtgccatgtcaaagttgatgaccagaagcttgctattggaaccctctctattgaaaaatacccctagatagaaattgatttggttttcaataaagagtgtgagttgtcacacacatcgaaaactacccgtgtatttttctttggttacaaggttgaggaagatgaataatggatcttgattctgaagatgaagagaaggagctaaacattccagtaatcaaggaaaatggctgtggctgtttacaaaagcagtccgtagtgatttactccacaaaatttgcgagagttcaagctggaccagtggacttcgacttcactggcaggcctctggttcttggacgcttgtacaagagttttgacgcatgccactattgaagaaatcgaagcagagaagtccctcatggaagaccaagttgtatgtttaatgtatctacattggaaggcccagttgcagttcctagcagactgtttcttaacaggggcctttccagcagctcttaattgagggaaaagaaagggtgcatgtttggacaaaatccagcagcaaaagcactcggccattctagcagcaacacttatttagtaagtggaaaatattcttgaagcaaatgggtaaggctattgtttgaattgcagctgtaaaacttgccagaagttcagcaaaactgccacatatatgtgaggtttcggttcctgtccaaaatttgcagtttgctgtccgaaaattttagaactatttcctgtccaaaattatggtttgttgtccaaaattttc

SEQ ID NO: 45360 - DNA, 687 bp, Zea Mays
gggtttgtttggtgctcgactgctcggcctccgtctccgtctccgggtttgtttaggcggttcgacctcacttgttcttgcgagtcggtttccagaattccagggagttgggaggagagacgctctcctcgtcgatcagggaggagtggtcatggggtcgtggagaaccctcgcacgatttaacgaggacaacctcataccatgcgttggatttggcgacagtcagttcttaacctgcctacccggcctctgactgtctggctactacggtttttcttttggattttccaggtcacgcgcagcctccaaagaggcagtggcatcctcttctgagcccacaggaaagggagaccgtagatgcaatggatgccaaatattccagtgattaaagactgctcttgacttgccatgaaccgagtgttttggtcatgcatactgaggtcttctgtgtgtctgaagtctgaacactgaatccatcgattctgcagcgactacccactttcaattgtgcttgttggggtttgtggatgcagcactgccggagggtagcttttaaaagcatactaacgaatccgaatgccaactgaaggatgctttgcaggtttgagccttccagtggttgcgagtttgtggcacatttggttactccagtgagtctcacccttgggccaacctgcacgaggaaag

SEQ ID NO: 45361 - DNA, 1696 bp, Zea Mays
gcaaaatcgcaagaaattaaaaagacaacgccgcgagccacagctagcaccaccaccttgcaccgcacccgcaccgagacgaacagatcgaccatggctgccggcggcgacgacaccaccatcgcgcaggtccacagcggcatcgacagcagcaacaagacgctgctcaagagcgaggccctctacaagtacgtgctggacacgtcggtgctgccgcacgagccggagagcatgcgtgagctgcggctggtgaccgacaagcacgagtgggggttcatgcagtcgtccccggacgaggcgtcgctgctgcggatgctgatcaagctgagcggcgcgcggcggacgctggaggtgggcgtgttcacgggctactcgctgctggcgacggctctggcgctgcccgccgacggcaaggtcatcgcattcgacgtgagccgcgagtactacgacatcggccgccccttcatcgagcgcgccggggtggcgggcaaggtggacttccgggagggcccggcgctggagcagctggacgagctcctcgccgacccggccaaccacggcgccttcgacttcgccttcgtcgacgccgacaagcctaactacgtccggtaccacgagcagctgctccgcctggtgcgcgtcgggggtaccgtcgtgtacgacaacacgctgtgggccggtactgtggcgcttccccccgacgcgccgctcagcgacctcgaccgcaggttctccgccgccatcagggaactcaacgtccggctttctcaggatccccgcgtcgaggtctgccagctcgccatcgccgacggcgtcaccatctgccgccgcgtcgtctgatgtgatgatgatccgacgaccaagatcatatatcattcgctcgtcgtctctgtcatctttcaactgcctgcccgccgctgtccgctgccgtcgtcaattaataatgcatggttcttgttctttttttttttgtacttgcactgtgtgtgttgagttgaacatccggcgatgtactgcaacaactggaatgcaatgcaacatcatgcgtgcagctgtaactaaaattgacgacgacagcgtcgtccatgcatggaccgaggcggttatattaggtgtcgatcatccatgagtgaccgaggcggttaggtgtcgatccatgagtgacggagagtggcggccggcggcgaggccatgattggcgcgtcgtcgggtaggggaagggatgggcttgcactgtagtctgcggggagataagcctcctcggtcggtcgggatggcgggcgtgtcgttgtcgtctcgtccgccagcccggcacggagggcaggaggtggaagcaaagaatcacagtcgtcgtcgcccgtaccctacccatggagacatgcatgcatatcctcagagagaccacctcaggaggataacataaacataatagtagtagcgcattacgtgccactcactcgatcggggcccgagatgataatataacctactcctccttcctgacactaacctctgctgcctgctccgatccggatggtgatgcagcgtgcaagcatggtgtgccgagacgacgtcagtcggacgcgtgcgtgtcatcgcccagccgctaacatcccatcgatcaaaaccacctgcactagaaccagcctcccctaagagcttctactagtactagtaaacgaacactagaataagt

SEQ ID NO: 45362 - DNA, 2627 bp, Zea Mays
cctgatttccactgctacgtacaaggtttttgctgccgtggattttttttttgtccgtagaaagacgggtttttttttgtccagacccgtccgactgctctgttcttatcccccgcctggtaaaggcggcgcctttgtccatcggagccgacgccatccggtgggctgttcctgttccttggattgtgtaacatgttagaggcaacctccaaaatggatgattggatgcttccctcacccagcccaagaacactgatgccaagcttcttcagtgaagagttcatctccactccgttctccaacatcttcgctgacgatagaggcagcaaaccccaggatgaaaacgaggacagtaacacctgcattggttccggtgctcacgaaacctctcaagatgtgaaatgccatcgtccacagatcgaatcgaacatttttggcgtgaatcagaaaccgacctctcctggaggtcttgcggagaggatagctgcaagagccggttttggtgtcctgaaaattgacatatcccgtgtcggttcatctggtgcggcgattcggtctcccgtgacaattccatctggtgtgagcccaagggaacttcttgagtcgccggttttccttccaaatgccatttcgcaaccttctcctaccactggtaaattgccattcctgatgcctaataattttaaatcaacaatgctgtgtggccccgagaagtctgaagaccacttacacgaagattctgcgttttccttccagccctttttgaggtctaaaccaccaacattatggactgcaaagaaggggccaagtgttgttcacgaaaccgggtccttatcaaaggatagccaggaggagctaaaccttcatgctaacccagcagctgcgaccgagcatgaaaccgaggaaagtctagttattagacctaaggcatgtgattccatgttcgacaatggtcatccttcttcccctgacgaaggaccagaacagagcgaggaaaaccaaaaccgggaagattgttcagctccggtcactgcccccggcgaggatggatacaactggagaaaatatggacaaaagcaggtgaagaacagtgagcatccaaggagctactacaaatgcactcacccaagttgccctgtcaagaaaaaggtggagcgttctgtagaaggtcatgtaacggagatagtttacagaggttcgcatactcacccactgccgctgcccagccgccggtcgagcgtccctcccacgcagctcgagtgtggttcacaatctgatggtctggagaacttgagctccaagcctgggcctgcctatcactcagcagcttcacaatcacagggaattgctccagatggccagttccaagatgtgcatagggaagctcttgaaacaaaactgtctggctctcttactacaactgagattgctgacaggcccgttatggatgtctcatcaacactctcctccaatgagaatggtgatagggcagttcctccaaccaatggcaggaacgaagatgagaccgaatctaaaagaaggaaaatggaggcatctgccgctactaacactaccaccaacactggcattgacatggcggctatggcatccagggcttcccgtgagccccggattgtcgtgcaaacgacgagtgaggtcgacatccttgacgatggctaccgctggcgcaagtatggccagaaagttgtgaaaggcaacccgaacccaaggagctactacaagtgcacctacgcgggctgctcggtgcgcaagcatgtcgagagggcctcgaacgatctcaagtccgtgatcacgacgtacgaggggaagcacaaccacgaggttccagctgccaggaacagcggcaacgggcatccgagctctggctccacaccagcaccaccacaggggagcggcggccttcaccggaggctggagccgccacaggtcagcatccctcggttgagcgctgctgctgccgccgccgccgccgccgctgcctacggctcgctctcgcttcgtttcccaccacagctcagcgcagctcccgggggtttctccttcggaatgctccgtcccactggcatggcaccgtctctgggcggcttcttgccagcgcagatgccaggccgtgggttgccgatgcagggctgcgcgggcctggtgctgccgagaggcgaggcgaaggtggtgagcccagagcagcagtccggattgccggtggcgaacgggaatgccgcggcaacctaccagcagcagcagcagcagctcatggccaggtgggctcagggtcatcagatgtgaatactcactccagcaggcacaagagatgaagagatagggtttgtttttttctttttcctttttttttgttgcttgtgtacataaacaatgtcattgtttgtggtttcttctaccgtagctcctttgtttgcttttgagtacagatgattctgataatagtgaggagggagaggggaagggatgaacttggctgctgtgtttcactgaactattcagactagtaataactaataagcttcaacatctgctctttcgcagtgctgtaaccattcaaagacagagactatcccatagatcggtcagtattatttttctggtcgttt

SEQ ID NO: 45363 - DNA, 2198 bp, Zea Mays
ctcttccatctgcatctcctctctccctgtccctctcctatcaaaaactgctttgcgccccatatataccagggcgcccacccacacacagagaggtgagagcccagtaccagttcagtcgtctctctcgcaacaggttcttcttcgtggcggtggagggggcaagactgcaagagcctgatttccactgctacgtacaagtcgcaaccttctcctaccactggtaaattgccattcctgatgcctaataattttaaatcaacaatgctgtgtggccccgagaagtctgaagaccacttacacgaagattctgcgttttccttccagccctttttgaggtctaaaccaccaacattatggactgcaaagaaggggccaagtgttgttcacgaaaccgggtccttatcaaaggatagccaggaggagctaaaccttcatgctaacccagcagctgcgaccgagcatgaaaccgaggaaagtctagttattagacctaaggcatgtgattccatgttcgacaatggtcatccttcttcccctgacgaaggaccagaacagagcgaggaaaaccaaaaccgggaagattgttcagctccggtcactgcccccggcgaggatggatacaactggagaaaatatggacaaaagcaggtgaagaacagtgagcatccaaggagctactacaaatgcactcacccaagttgccctgtcaagaaaaaggtggagcgttctgtagaaggtcatgtaacggagatagtttacagaggttcgcatactcacccactgccgctgcccagccgccggtcgagcgtccctcccacgcagctcgagtgtggttcacaatctgatggtctggagaacttgagctccaagcctgggcctgcctatcactcagcagcttcacaatcacagggaattgctccagatggccagttccaagatgtgcatagggaagctcttgaaacaaaactgtctggctctcttactacaactgagattgctgacaggcccgttatggatgtctcatcaacactctcctccaatgagaatggtgatagggcagttcctccaaccaatggcaggaacgaagatgagaccgaatctaaaagaaggaaaatggaggcatctgccgctactaacactaccaccaacactggcattgacatggcggctatggcatccagggcttcccgtgagccccggattgtcgtgcaaacgacgagtgaggtcgacatccttgacgatggctaccgctggcgcaagtatggccagaaagttgtgaaaggcaacccgaacccaaggagctactacaagtgcacctacgcgggctgctcggtgcgcaagcatgtcgagagggcctcgaacgatctcaagtccgtgatcacgacgtacgaggggaagcacaaccacgaggttccagctgccaggaacagcggcaacgggcatccgagctctggctccacaccagcaccaccacaggggagcggcggccttcaccggaggctggagccgccacaggtcagcatccctcggttgagcgctgctgctgccgccgccgccgccgccgctgcctacggctcgctctcgcttcgtttcccaccacagctcagcgcagctcccgggggtttctccttcggaatgctccgtcccactggcatggcaccgtctctgggcggcttcttgccagcgcagatgccaggccgtgggttgccgatgcagggctgcgcgggcctggtgctgccgagaggcgaggcgaaggtggtgagcccagagcagcagtccggattgccggtggcgaacgggaatgccgcggcaacctaccagcagcagcagcagcagctcatggccaggtgggctcagggtcatcagatgtgaatactcactccagcaggcacaagagatgaagagatagggtttgtttttttctttttcctttttttttgttgcttgtgtacataaacaatgtcattgtttgtggtttcttctaccgtagctcctttgtttgcttttgagtacagatgattctgataatagtgaggagggagaggggaagggatgaacttggctgctgtgtttcactgaactattcagactagtaataactaataagcttcaacatctgctctttcgcagtgctgtaaccattcaaagacagagactatcccatagatcggtcagtattatttttctggtcgttt

SEQ ID NO: 45364 - DNA, 3790 bp, Zea Mays
gggaagacgacagctctgcaactcggcaaccaacggatccatccttccagttccagcttctttatctctcacgcacgccgttcccttcgcctcctctgggccaaccgcgctcgtctccccccagtcctccctcttccatctgcatctcctctctccctgtccctctcctatcaaaaactgctttgcgccccatatataccagggcgcccacccacacacagagaggtgagagcccagtaccagttcagtcgtctctctcgcaacaggttcttcttcgtggcggtggagggggcaagactgcaagagcctgatttccactgctacgtacaaggtttttgctgccgtggattttttttttgtccgtagaaagacgggtttttttttgtccagacccgtccgactgctctgttcttatcccccgcctggtaaaggcggcgcctttgtccatcggagccgacgccatccggtgggctgttcctgttccttggattgtgtaacatgttagaggtttgtttggttccgtaaaaagactgcagatttgggatggcagttaccagtggttgtgctcgtggatcgtatgcttgagtcagaactgtatcttgcagtgttgtggttgggttcagtttcaaatgtcagcgatttacctgttgtggtggtgtttatatatatgcgcaactcttgtgttctggtggtgttcatgcataatctcctgggtttagcagtaaagtactctactctcatcgtgtctaagttactttactgttgctgtatactgtgcttgcgcaaaggttgcaccgtttacctgtccatatcctgacttcaagtgtttctgtataattgactgcattgatcttactaacatgactgcgaggttgcaccatttcttctagctatgctaccatgtgccatgtccagcaatatcatttgctttttttttcctacgcacagttgatagaattaccgcacccacctgatcttatactaacatgactgtttagtgtttcaactaaaacaatggttttgctttggacaacctaatggtttcaactaaaacaatgactgttccctgatttctgggacggacaacctaatggattttttttatatataatggaaaaaaccatgttccagccttttgcatcaaggatgcatatggcttcatagtacaatcaacataaacaatccaaaacatcacatactcaacccaactaaaataaaaacatcataacacagtttctcatgaacataaaaaaaacactaataagcctcaattctagcatcgctgcatctccagccatcaccaccacttccattgcacgacaaacatccatccttgatatctcggtgtaaatcatctttttgcagcaacctccaaaatggatgattggatgcttccctcacccagcccaagaacactgatgccaagcttcttcagtgaagagttcatctccactccgttctccaacatcttcgctgacgatagaggcagcaaaccccaggatgaaaacgaggacagtaacacctgcattggttccggtgctcacgaaacctctcaagatgtgaaatgccatcgtccacagatcgaatcgaacatttttggcgtgaatcagaaaccgacctctcctggaggtcttgcggagaggatagctgcaagagccggttttggtgtcctgaaaattgacatatcccgtgtcggttcatctggtgcggcgattcggtctcccgtgacaattccatctggtgtgagcccaagggaacttcttgagtcgccggttttccttccaaatgccatttcgcaaccttctcctaccactggtaaattgccattcctgatgcctaataattttaaatcaacaatgctgtgtggccccgagaagtctgaagaccacttacacgaagattctgcgttttccttccagccctttttgaggtctaaaccaccaacattatggactgcaaagaaggggccaagtgttgttcacgaaaccgggtccttatcaaaggatagccaggaggagctaaaccttcatgctaacccagcagctgcgaccgagcatgaaaccgaggaaagtctagttattagacctaaggcatgtgattccatgttcgacaatggtcatccttcttcccctgacgaaggaccagaacagagcgaggaaaaccaaaaccgggaagattgttcagctccggtcactgcccccggcgaggatggatacaactggagaaaatatggacaaaagcaggtgaagaacagtgagcatccaaggagctactacaaatgcactcacccaagttgccctgtcaagaaaaaggtggagcgttctgtagaaggtcatgtaacggagatagtttacagaggttcgcatactcacccactgccgctgcccagccgccggtcgagcgtccctcccacgcagctcgagtgtggttcacaatctgatggtctggagaacttgagctccaagcctgggcctgcctatcactcagcagcttcacaatcacagggaattgctccagatggccagttccaagatgtgcatagggaagctcttgaaacaaaactgtctggctctcttactacaactgagattgctgacaggcccgttatggatgtctcatcaacactctcctccaatgagaatggtgatagggcagttcctccaaccaatggcaggaacgaagatgagaccgaatctaaaagaaggaaaatggaggcatctgccgctactaacactaccaccaacactggcattgacatggcggctatggcatccagggcttcccgtgagccccggattgtcgtgcaaacgacgagtgaggtcgacatccttgacgatggctaccgctggcgcaagtatggccagaaagttgtgaaaggcaacccgaacccaaggagctactacaagtgcacctacgcgggctgctcggtgcgcaagcatgtcgagagggcctcgaacgatctcaagtccgtgatcacgacgtacgaggggaagcacaaccacgaggttccagctgccaggaacagcggcaacgggcatccgagctctggctccacaccagcaccaccacaggggagcggcggccttcaccggaggctggagccgccacaggtcagcatccctcggttgagcgctgctgctgccgccgccgccgccgccgctgcctacggctcgctctcgcttcgtttcccaccacagctcagcgcagctcccgggggtttctccttcggaatgctccgtcccactggcatggcaccgtctctgggcggcttcttgccagcgcagatgccaggccgtgggttgccgatgcagggctgcgcgggcctggtgctgccgagaggcgaggcgaaggtggtgagcccagagcagcagtccggattgccggtggcgaacgggaatgccgcggcaacctaccagcagcagcagcagcagctcatggccaggtgggctcagggtcatcagatgtgaatactcactccagcaggcacaagagatgaagagatagggtttgtttttttctttttcctttttttttgttgcttgtgtacataaacaatgtcattgtttgtggtttcttctaccgtagctcctttgtttgcttttgagtacagatgattctgataatagtgaggagggagaggggaagggatgaacttggctgctgtgtttcactgaactattcagactagtaataactaataagcttcaacatctgctctttcgcagtgctgtaaccattcaaagacagagactatcccatagatcggtcagtattatttttctggtcgttt

SEQ ID NO: 45365 - DNA, 2769 bp, Zea Mays
ggagagtgagtgggggaagacgacagctctgcaactcggcaaccaacggatccatccttccagttccagcttctttatctctcacgcacgccgttcccttcgcctcctctgggccaaccgcgctcgtctccccccagtcctccctcttccatctgcatctcctctctccctgtccctctcctatcaaaaactgctttgcgccccatatataccagggcgcccacccacacacagagaggtgagagcccagtaccagttcagtcgtctctctcgcaacaggttcttcttcgtggcggtggagggggcaagactgcaagagcctgatttccactgctacgtacaagcaacctccaaaatggatgattggatgcttccctcacccagcccaagaacactgatgccaagcttcttcagtgaagagttcatctccactccgttctccaacatcttcgctgacgatagaggcagcaaaccccaggatgaaaacgaggacagtaacacctgcattggttccggtgctcacgaaacctctcaagatgtgaaatgccatcgtccacagatcgaatcgaacatttttggcgtgaatcagaaaccgacctctcctggaggtcttgcggagaggatagctgcaagagccggttttggtgtcctgaaaattgacatatcccgtgtcggttcatctggtgcggcgattcggtctcccgtgacaattccatctggtgtgagcccaagggaacttcttgagtcgccggttttccttccaaatgccatttcgcaaccttctcctaccactggtaaattgccattcctgatgcctaataattttaaatcaacaatgctgtgtggccccgagaagtctgaagaccacttacacgaagattctgcgttttccttccagccctttttgaggtctaaaccaccaacattatggactgcaaagaaggggccaagtgttgttcacgaaaccgggtccttatcaaaggatagccaggaggagctaaaccttcatgctaacccagcagctgcgaccgagcatgaaaccgaggaaagtctagttattagacctaaggcatgtgattccatgttcgacaatggtcatccttcttcccctgacgaaggaccagaacagagcgaggaaaaccaaaaccgggaagattgttcagctccggtcactgcccccggcgaggatggatacaactggagaaaatatggacaaaagcaggtgaagaacagtgagcatccaaggagctactacaaatgcactcacccaagttgccctgtcaagaaaaaggtggagcgttctgtagaaggtcatgtaacggagatagtttacagaggttcgcatactcacccactgccgctgcccagccgccggtcgagcgtccctcccacgcagctcgagtgtggttcacaatctgatggtctggagaacttgagctccaagcctgggcctgcctatcactcagcagcttcacaatcacagggaattgctccagatggccagttccaagatgtgcatagggaagctcttgaaacaaaactgtctggctctcttactacaactgagattgctgacaggcccgttatggatgtctcatcaacactctcctccaatgagaatggtgatagggcagttcctccaaccaatggcaggaacgaagatgagaccgaatctaaaagaaggaaaatggaggcatctgccgctactaacactaccaccaacactggcattgacatggcggctatggcatccagggcttcccgtgagccccggattgtcgtgcaaacgacgagtgaggtcgacatccttgacgatggctaccgctggcgcaagtatggccagaaagttgtgaaaggcaacccgaacccaaggagctactacaagtgcacctacgcgggctgctcggtgcgcaagcatgtcgagagggcctcgaacgatctcaagtccgtgatcacgacgtacgaggggaagcacaaccacgaggttccagctgccaggaacagcggcaacgggcatccgagctctggctccacaccagcaccaccacaggggagcggcggccttcaccggaggctggagccgccacaggtcagcatccctcggttgagcgctgctgctgccgccgccgccgccgccgctgcctacggctcgctctcgcttcgtttcccaccacagctcagcgcagctcccgggggtttctccttcggaatgctccgtcccactggcatggcaccgtctctgggcggcttcttgccagcgcagatgccaggccgtgggttgccgatgcagggctgcgcgggcctggtgctgccgagaggcgaggcgaaggtggtgagcccagagcagcagtccggattgccggtggcgaacgggaatgccgcggcaacctaccagcagcagcagcagcagctcatggccaggtgggctcagggtcatcagatgtgaatactcactccagcaggcacaagagatgaagagatagggtttgtttttttctttttcctttttttttgttgcttgtgtacataaacaatgtcattgtttgtggtttcttctaccgtagctcctttgtttgcttttgagtacagatgattctgataatagtgaggagggagaggggaagggatgaacttggctgctgtgtttcactgaactattcagactagtaataactaataagcttcaacatctgctctttcgcagtgctgtaaccattcaaagacagagactatcccatagatcggtcagtattatttttctggtcgttt

SEQ ID NO: 45366 - DNA, 2497 bp, Zea Mays
gatctgtgcgtgttcttctcaatccattccagagtccacgctgcagaagccaaggggatggaggtcacaatagcggagaagaagccccgggccgccggcgacggcggcggcctggttgagaggctccccgaggcgctcctggtggaggtgctggcccgtgtcgacgtcgacggcgcctgctccgccgctgcgtcctgccgctcgctctacgctgccgccaacgccgttctccccgccctcacctccatcgacctctccgcctttgccccgtcgaacgccatcctcagcaggattctcgcggggaatggcgcggtccgcagcctcaccgtcaactgcagcctcctcgacgactccgccgcctccgtcatcgccaggggtagcctgcgcgacctctcgctgctcaaatgctccttctcgatgagcttctttgtggctcttggtggggcatgccacgatttaagatcgttgaagctggagatggcggtttgtccatacactctatatccttgcctagcacctgtctacgtgggatgtgttcacttggagttacaaggctggatcacctctcattcctagtaacatcaaggacctgttgctacaacctgtatctcattctagggcaaagacggtcttcctgaaaaccacatctctgaacaaacacatcactgacaacttggaatcactctctttagttcttgacatggtaacggatgaactcgttatgttgatcaccagtaatgtccataagttgtctgagctatgcctggaagatgaacctgatacccaaccaaatttgcctgaagatttgaccaatgtggggcttcaagcacttggcttgtgccacaacttgaaacatttgtctctgacacgacgttcctatgacttcagacgggtaaacgactttgggatactgatgcttgctgacggatgcaagcaactgagaaccattagacttggtgggttttctaaagtaagtgatgcagggtatgcagcccttctccactctggaaaggacctgaagaagtttgaggtcagcaatggctggtgcttgtcagacttggcatgcctagatcttgataaggcagctccaaatattacagaagtgaggttgcttaactgtgctctcctaaccagtgatacagccatatctctagcaccctgcactaacttaaaggttcttgatctttcgggttgcaagagcattgcagactctggcttggtttccatctcacagcttcccaacctaactctactggaccttgctggagctgacattactgatgtgggtttatcggcactcggtaatgggaggtgcttgatatcttctttgtgcttgagaggttgcagaaggatcagcagtaatggaatagcttcactgttgtgcggggctggcaccatcaacaagacattagtttcgcttgacatcggaaatgtgccaagaatatcatgtcgggctgtgacagtgattgctaagaactgtgagcagataagcagcctgtgtctgcggaactgcctcctcataaccgattcatctctcgaggtgctaggttctatgggatgcgactccagtaaatgccccctgagaatgcttgatcttgcctactgcagcaaactgtctcgaaacttcctgagacactttgagccgccgctgttccgaggactgcggtggcttggcatcggtaagaatgtagctcaacgtcgtggctgcagcctgacaattgcggaggttctggagcgaaagccaggattaaccatctgctgcaacgcctgcgacatgggctgcaggaacaagtgccatccagacattcgttttcttcagtagatgtgctgcaaaggctgcaacatgggctgcaggaaccagtgtcatccagagtccagacatttgtttccttaagtagatatgcaggattaagggtctgtttgtttcagtttatagatttatatgagattaaaggatctggattatataatctagattagattatttgggtgtagctgtttggcaacctagtttattgaaaaattcaattattgattttagtcatatgttgcgtggtgggagcaagaaaaaaatagatgaaacatttttttaggtaaggagtgacaatggtgagtaatatcttctgaagttgctataggtagtgagtctagattatttaagccagattgtataatctggacagattataagctaagacaaacagaccctaacccatctgtggcatgggttgcaatagaagtgtcaacccaacattcgttttcttcagtacatgtgtttgatattgttgtgaaacgacacctcttcactaacagatgccttttcaggagatgatctcatctattcaagcataagattagtggattggattagacggttagaattactttcaaagggcatgttcttcaggaatgttcttcaggagagatatttggaataatgcacacaccatgatcttataatttattttttatataattgattattttagtttaagtc

SEQ ID NO: 45367 - DNA, 790 bp, Zea Mays
cgtgtgggccctgagtgccagcggcatatcctgtgattctcgcaccctactcctccagtcctcctctctgcagatctgtgcgtgttcttctcaatccattccagagtccacgctgcagaagccaaggggatggaggtcacaatagcggagaagaagccccgggccgccggcgacggcggcggcctggttgagaggctccccgaggcgctcctggtggaggtgctggcccgtgtcgacgtcgacggcgcctgctccgccgctgcgtcctgccgctcgctctacgctgccgccaacgccgttctccccgccctcacctccatcgacctctccgcctttgccccgtcgaacgccatcctcagcaggattctcgcggggaatggcgcggtccgcagcctcaccgtcaactgcagcctcctcgacgactccgccgcctccgtcatcgccaggggtagcctgcgcgacctctcgctgctcaaatgctccttctcgatgagcttctttgtggctcttggtggggcatgccacgatttaagatcgttgaagctggagatggcggtttgtccatacactctatatccttgcctagcacctgtctacgtgggatgtgttcacttggaggagatgatctcatctattcaagcataagattagtggattggattagacggttagaattactttcaaagggcatgttcttcaggaatgttcttcaggagagatatttggaataatgcacacaccatgatcttataatttattttttatataattgattattttagtttaagtc

SEQ ID NO: 45368 - DNA, 1958 bp, Zea Mays
aactgttctgtttagagttgttcaagtgaacagttggagtaccttgaggagcgccgcctcaaggatctgatcaagaagcactccgagttcatcagctacccaatctctctctggattgagaagaccactgagaaggagatctctgatgatgaagatgaggaggataagaaggatgaggagggtaaggttgaggatgttgatgatgaaaaggaagaaaaggaaaagaagaagaagaagatcaaggaggtttctcatgagtggcaattggtaaacaagcagaagccaatctggatgaggaagcctgaggagattaccaaagaagagtatgctgctttctacaagagcttgaccaacgactgggaggagcatcttgccgtgaagcacttctctgttgagggccagcttgagttcaaggctgtactctttgtgccaaagcgggcccccttcgacctctttgacaccaggaagaagcagaacaacatcaagctctatgtgcgacgtgtcttcatcatggacaactgtgaggagctgatcccagagtggctgagctttgtcaagggtattgttgactctgaggatcttcccctcaacatctctcgtgagactctccagcagaacaagatcctcaaggtcatccgcaagaatcttgtcaagaagtgcgttgagctgttttttgagattgcggagaacaaggaggactacaacaagttctatgaggccttctccaagaacctcaagcttggcatccacgaggactccacgaacaggaccaagattgctgagctcctgaggtaccactcgaccaagagcggggatgagctgaccagcctcaaggattatgtgaccaggatgaaggagggccagaacgacatcttctacatcactgctgaaggagtttgagggcaagaagctcgtctctgccaccaaggagggcctgaagctggacgagagtgaggatgagaagaagcgcaaggaggagctcaaggagaagtttgagggcctctgcaaggtcatcaaggaggtgctgggcgacaaggtggagaaggtggtggtctccgaccgcgtggtggactccccctgctgcctggtgaccggcgagtacggttggaccgccaacatggagcggatcatgaaagcccaggcgctgagggactccagcatgtctgggtacatgtcctccaagaagacgatggagatcaaccccgagaacgccatcatggaggagctccgcaagcgtgccgaggctgacaagaacgacaagtccgttaaggaccttgtcatgctgctgttcgagacggcgctgctcacttctggctttagcctcgacgatcccaacacctttggcagccgcatccaccgcatgctcaagctgggcctgagcatcgacgaggacgaggaggctccggaggctgacaccgacatgccccctctggaggatgacgctggcgagagcaagatggaggaggtcgactaagctgggtttattcttatggaggaaagagagagaacatcgggtctgttctgtgggtcttaccacttatgctattatgcaatctgttgttggtatgctagtgctactattgtctctgctgtcttctagttaattttgttgttgttttgcgtggtcagtttctcatcgcatcagtggtagaaaacattcacctgtgggactaaaaaaatgtttggtaattggaacgcatcgccaagttcttctgttcttggttctattatatgtaaaggtgatttgctttgagaacttaatacgttagtacggttgcctgaaacgatggagggcatgagagctcgccgtattcctatgtaataacaaaatgtacatatattttgtcatccatgatggtttagttcgccaaaaaaaatatgtatgtattgtaacctccgtaagaactcaatcaaaggttgcattgaggcgacgtcacaataactgaagcagccagaca

SEQ ID NO: 45369 - DNA, 2637 bp, Zea Mays
agaacattcgagaacccctcgcctcctcccccaacgataaaatcctcaccgcgccgcaacgcatcttcgccccacaaaccctcgtctcgtgccactttctcagtcccctctagccgccgcctaccgctcgcgctctcctcgcgttcgggaaggtcgtttcgccatggcctcggagacggagacgttcgccttccaggcggagatcaaccagctgctctcgctcatcatcaacaccttctactccaacaaggagatcttcctcagggagctcatctccaactcctccgatgccttggacaagatcaggtttgagagtttgacggacaagaccaagctggatgcacagccagagctgttcatccacattgtccccgacaaggccaacaacacgctgacaatcatcgacagcggcattggtatgaccaagtcagaccttgtgaacaaccttggtaccattgcgcggtcaggcacgaaggaattcatggaggcacttgctgctggtgctgatgtgtccatgattggccagtttggtgtcggtttctactctgcctaccttgttgcagagagggttgtcgtgaccactaagcacaatgatgatgagcagtacgtgtgggagtctcaggctggtggctccttcactgtcgcacgtgatacctctggggagcaacttggcaggggtacaaagatgaccctctacctcaaggatgatcagttggagtaccttgaggagcgccgcctcaaggatctgatcaagaagcactccgagttcatcagctacccaatctctctctggattgagaagaccactgagaaggagatctctgatgatgaagatgaggaggataagaaggatgaggagggtaaggttgaggatgttgatgatgaaaaggaagaaaaggaaaagaagaagaagaagatcaaggaggtttctcatgagtggcaattggtaaacaagcagaagccaatctggatgaggaagcctgaggagattaccaaagaagagtatgctgctttctacaagagcttgaccaacgactgggaggagcatcttgccgtgaagcacttctctgttgagggccagcttgagttcaaggctgtactctttgtgccaaagcgggcccccttcgacctctttgacaccaggaagaagcagaacaacatcaagctctatgtgcgacgtgtcttcatcatggacaactgtgaggagctgatcccagagtggctgagctttgtcaagggtattgttgactctgaggatcttcccctcaacatctctcgtgagactctccagcagaacaagatcctcaaggtcatccgcaagaatcttgtcaagaagtgcgttgagctgttttttgagattgcggagaacaaggaggactacaacaagttctatgaggccttctccaagaacctcaagcttggcatccacgaggactccacgaacaggaccaagattgctgagctcctgaggtaccactcgaccaagagcggggatgagctgaccagcctcaaggattatgtgaccaggatgaaggagggccagaacgacatcttctacatcactgctgaaggagtttgagggcaagaagctcgtctctgccaccaaggagggcctgaagctggacgagagtgaggatgagaagaagcgcaaggaggagctcaaggagaagtttgagggcctctgcaaggtcatcaaggaggtgctgggcgacaaggtggagaaggtggtggtctccgaccgcgtggtggactccccctgctgcctggtgaccggcgagtacggttggaccgccaacatggagcggatcatgaaagcccaggcgctgagggactccagcatgtctgggtacatgtcctccaagaagacgatggagatcaaccccgagaacgccatcatggaggagctccgcaagcgtgccgaggctgacaagaacgacaagtccgttaaggaccttgtcatgctgctgttcgagacggcgctgctcacttctggctttagcctcgacgatcccaacacctttggcagccgcatccaccgcatgctcaagctgggcctgagcatcgacgaggacgaggaggctccggaggctgacaccgacatgccccctctggaggatgacgctggcgagagcaagatggaggaggtcgactaagctgggtttattcttatggaggaaagagagagaacatcgggtctgttctgtgggtcttaccacttatgctattatgcaatctgttgttggtatgctagtgctactattgtctctgctgtcttctagttaattttgttgttgttttgcgtggtcagtttctcatcgcatcagtggtagaaaacattcacctgtgggactaaaaaaatgtttggtaattggaacgcatcgccaagttcttctgttcttggttctattatatgtaaaggtgatttgctttgagaacttaatacgttagtacggttgcctgaaacgatggagggcatgagagctcgccgtattcctatgtaataacaaaatgtacatatattttgtcatccatgatggtttagttcgccaaaaaaaatatgtatgtattgtaacctccgtaagaactcaatcaaaggttgcattgaggcgacgtcacaataactgaagcagccagaca

SEQ ID NO: 45370 - DNA, 2926 bp, Zea Mays
aacaggtctcatagaagtggaaagatcaaacaagaatttgggattgttaattcataggatatggctgatttagtttgtgctctatgcgacaatggaggtgaaattataagctgtgaaggcaggtgtctgaggtcgtttcatgcaactaacgattctagtgaagactgtccaaccttaggatacagcaggcagcagttagatgcggcggaagtttttaagtgcaagaattgtatttccatgtgcttcttcaacttgtggtcacttctatcatgcgatgtgtgttactcagttactcttccctgaaaacgaggccaaagcaactgagtatacagcaaagatagccagtggggcaaaatttgcatgtcccctccacaaatgtggcatctgcaagcatggggagaacaaagaggatagggagctacagtttgctgtctgtcggcggtgcccaaagtcataccacagaagatgcttgccaagggaaattgtctttgaggacttcactgagaatggtcaacatgttttccaaagggcgtgggatgaccttcttcccaacaatcgcatcttgatatattgcttgaagcatgatattaatccagaatatcgaaccgccacgagaaatcatattaagtttcctaaggaccctactgctctcaagaaacccctcaattgtgtcaatggaatgaacacaaagacattgaagatacgacgtcttgaggagcttccttctgcgccattgtctaatgttaaaagattttcttactcagtgaaaagttctactttaagcaatttgaggaataaaagaaggaaagtgattgtgcctgaagaaaaacctgtggttatgacaaaactccctgagattgacagtgacactgagatgagaatgtatgagtttgcacaaaaagcgtcagctggtataacaatggatgatgtgaagaaaaagctagtggtaccatcaacatatgcaccaaatctgcagaatgctgataacattacactggaaaatgtggaaatatatgttgaggccgttaaaggtgctctgcatatgttagaaaatggtgcatctatagcagatgccaaatctgtctgcccacctaatgttctgtttcaacttgtaaagtggaagaacaagttgagtgtagttcttgcaccatttcttcatggcatgcgatacacatcgtatgggcgccacttcacaaaactggacaaactccagctgatagttgataagctacagtggtatattcaaagtggtgacacggtcgttgatttttgctgtggttcaaatgattttagcttgttattgagggaaatattggaatcttctgggaaaaattgcttctacaaaaattatgatctcatccaaccaaagaatgatttcaattttgagagacgagactggatgactgttcaacctgatgaattgcctacaggatgcagactggtcatgggattgaatcctccctttgggactaaagcctctcttgcgaaccagttcatcaacaaagctctcactttcaagccaaagcttataatactcattgttcccaaggaaactgaaagattggacaagaaatacccaccatatgagctaatatggcaggactcagatcagctctcgggaaagtcattctatctacctggatctctggatgctgacaacaaggtgatggagcaatggaatgtgtcacctcctccgctttctctgtggagtcgtagtgactgggctgagaggcactccgagattgccaaatcaatggggcacatctcgaatgaaattggtgacttgcaaagggatctggctgcatctatacataccacagagcacgtggaggcagatgatgcaggggttgcaggcatgtctccatgtttactagatcagttgttgtctgacacgttccatgacccaacaacttctccaggggactgctggaatgataccagcggccgatcacggcaaccatgcaactacgaaacagcaggacaaggaaggggcgatccaacctacaatcatacaacagaaagctgctctgatatgagcatttcattgtcggagagtgatgttcagagaaaagatcaagctttgccaatgccagagcatggaggcaccggctctgatatgagcatttcattgtcggagagtgatgttcggagaaaaggtcaagcctgggatgctgttggaagtgcatctgcagggaaaccaactgctgatgccgattacgatgaggtaacatcagcctgtggtccgtatcatttctcgggggttgcgggcaaacaggcagctggagttgagtactggatgatacaagactcaccagtcctggaggaaggagagctgagcgatgcaccggctgcggcgggcaggcctgcatctggcacgcgtcataaaccgacggaacacacgccagcagcagcaacacccgaagctgcctcctggtggagtgggcagctggatcatcactcgcggtctgtggccgctaggcataatgccagaactctgccaccaagaaacaccttccccggactgcgcttgcggcaaggatgcaacacctctcgtaagttcctgccccaaggcatgggctatgacgccatccatgaagggccatcgaatggctggatcgaggaagaagactactagtataggtgctaatgtgcctcgccctcgcgttgtcttcacaggtgtgagctagttaattctacggccggctttaggagtatgctgctgaggttatgctaacgttggtagagtcggttctgcggtctgtcattggatcagtattttcgttaactgttgcattcatgccctgtatctgtttctgacgaaacatcttaccatggacttgattgcctttgagcctgaattatccaggatcgatctttcgttgcctgctataccttgctgaaattcctgccgtgtcgaagttttgac

SEQ ID NO: 45371 - DNA, 3014 bp, Zea Mays
ctcgaatcgcgcggcgccgcggagggtctcatagaagtggaaagatcaaacaagaatttgggattgttaattcataggatatggctgatttagtttgtgctctatgcgacaatggaggtgaaattataagctgtgaaggcaggtgtctgaggtcgtttcatgcaactaacgattctagtgaagactgtccaaccttaggatacagcaggcagcagttagatgcggcggaagtttttaagtgcaagaattgtgagtatggaatatatcaatgctttgcttgcggaaggctaggctcagctaaaactaatcctcccgaggtatttccatgtgcttcttcaacttgtggtcacttctatcatgcgatgtgtgttactcagttactcttccctgaaaacgaggccaaagcaactgagtatacagcaaagatagccagtggggcaaaatttgcatgtcccctccacaaatgtggcatctgcaagcatggggagaacaaagaggatagggagctacagtttgctgtctgtcggcggtgcccaaagtcataccacagaagatgcttgccaagggaaattgtctttgaggacttcactgagaatggtcaacatgttttccaaagggcgtgggatgaccttcttcccaacaatcgcatcttgatatattgcttgaagcatgatattaatccagaatatcgaaccgccacgagaaatcatattaagtttcctaaggaccctactgctctcaagaaacccctcaattgtgtcaatggaatgaacacaaagacattgaagatacgacgtcttgaggagcttccttctgcgccattgtctaatgttaaaagattttcttactcagtgaaaagttctactttaagcaatttgaggaataaaagaaggaaagtgattgtgcctgaagaaaaacctgtggttatgacaaaactccctgagattgacagtgacactgagatgagaatgtatgagtttgcacaaaaagcgtcagctggtataacaatggatgatgtgaagaaaaagctagtggtaccatcaacatatgcaccaaatctgcagaatgctgataacattacactggaaaatgtggaaatatatgttgaggccgttaaaggtgctctgcatatgttagaaaatggtgcatctatagcagatgccaaatctgtctgcccacctaatgttctgtttcaacttgtaaagtggaagaacaagttgagtgtagttcttgcaccatttcttcatggcatgcgatacacatcgtatgggcgccacttcacaaaactggacaaactccagctgatagttgataagctacagtggtatattcaaagtggtgacacggtcgttgatttttgctgtggttcaaatgattttagcttgttattgagggaaatattggaatcttctgggaaaaattgcttctacaaaaattatgatctcatccaaccaaagaatgatttcaattttgagagacgagactggatgactgttcaacctgatgaattgcctacaggatgcagactggtcatgggattgaatcctccctttgggactaaagcctctcttgcgaaccagttcatcaacaaagctctcactttcaagccaaagcttataatactcattgttcccaaggaaactgaaagattggacaagaaatacccaccatatgagctaatatggcaggactcagatcagctctcgggaaagtcattctatctacctggatctctggatgctgacaacaaggtgatggagcaatggaatgtgtcacctcctccgctttctctgtggagtcgtagtgactgggctgagaggcactccgagattgccaaatcaatggggcacatctcgaatgaaattggtgacttgcaaagggatctggctgcatctatacataccacagagcacgtggaggcagatgatgcaggggttgcaggcatgtctccatgtttactagatcagttgttgtctgacacgttccatgacccaacaacttctccaggggactgctggaatgataccagcggccgatcacggcaaccatgcaactacgaaacagcaggacaaggaaggggcgatccaacctacaatcatacaacagaaagctgctctgatatgagcatttcattgtcggagagtgatgttcagagaaaagatcaagctttgccaatgccagagcatggaggcaccggctctgatatgagcatttcattgtcggagagtgatgttcggagaaaaggtcaagcctgggatgctgttggaagtgcatctgcagggaaaccaactgctgatgccgattacgatgaggtaacatcagcctgtggtccgtatcatttctcgggggttgcgggcaaacaggcagctggagttgagtactggatgatacaagactcaccagtcctggaggaaggagagctgagcgatgcaccggctgcggcgggcaggcctgcatctggcacgcgtcataaaccgacggaacacacgccagcagcagcaacacccgaagctgcctcctggtggagtgggcagctggatcatcactcgcggtctgtggccgctaggcataatgccagaactctgccaccaagaaacaccttccccggactgcgcttgcggcaaggatgcaacacctctcgtaagttcctgccccaaggcatgggctatgacgccatccatgaagggccatcgaatggctggatcgaggaagaagactactagtataggtgctaatgtgcctcgccctcgcgttgtcttcacaggtgtgagctagttaattctacggccggctttaggagtatgctgctgaggttatgctaacgttggtagagtcggttctgcggtctgtcattggatcagtattttcgttaactgttgcattcatgccctgtatctgtttctgacgaaacatcttaccatggacttgattgcctttgagcctgaattatccaggatcgatctttcgttgcctgctataccttgctgaaattcctgccgtgtcgaagttttgac

SEQ ID NO: 45372 - DNA, 3234 bp, Zea Mays
cccactcccacgtcccacccccacacacgctgctcacagcgtctgtgtgcgtgtgggtgtgctgttgctgtgttcgttctccctcctccgaaccacctccactccacctcacgggggttttggttggggttttgctcgctcccagtcccacaaggaaccaaccggagagcgctcaccagcgacgcccgccgcgggggctgacctcggcgtgcatggtagtgctcgaatcgcgcggcgccgcggaggtctcatagaagtggaaagatcaaacaagaatttgggattgttaattcataggatatggctgatttagtttgtgctctatgcgacaatggaggtgaaattataagctgtgaaggcaggtgtctgaggtcgtttcatgcaactaacgattctagtgaagactgtccaaccttaggatacagcaggcagcagttagatgcggcggaagtttttaagtgcaagaattgtgagtatggaatatatcaatgctttgcttgcggaaggctaggctcagctaaaactaatcctcccgaggtatttccatgtgcttcttcaacttgtggtcacttctatcatgcgatgtgtgttactcagttactcttccctgaaaacgaggccaaagcaactgagtatacagcaaagatagccagtggggcaaaatttgcatgtcccctccacaaatgtggcatctgcaagcatggggagaacaaagaggatagggagctacagtttgctgtctgtcggcggtgcccaaagtcataccacagaagatgcttgccaagggaaattgtctttgaggacttcactgagaatggtcaacatgttttccaaagggcgtgggatgaccttcttcccaacaatcgcatcttgatatattgcttgaagcatgatattaatccagaatatcgaaccgccacgagaaatcatattaagtttcctaaggaccctactgctctcaagaaacccctcaattgtgtcaatggaatgaacacaaagacattgaagatacgacgtcttgaggagcttccttctgcgccattgtctaatgttaaaagattttcttactcagtgaaaagttctactttaagcaatttgaggaataaaagaaggaaagtgattgtgcctgaagaaaaacctgtggttatgacaaaactccctgagattgacagtgacactgagatgagaatgtatgagtttgcacaaaaagcgtcagctggtataacaatggatgatgtgaagaaaaagctagtggtaccatcaacatatgcaccaaatctgcagaatgctgataacattacactggaaaatgtggaaatatatgttgaggccgttaaaggtgctctgcatatgttagaaaatggtgcatctatagcagatgccaaatctgtctgcccacctaatgttctgtttcaacttgtaaagtggaagaacaagttgagtgtagttcttgcaccatttcttcatggcatgcgatacacatcgtatgggcgccacttcacaaaactggacaaactccagctgatagttgataagctacagtggtatattcaaagtggtgacacggtcgttgatttttgctgtggttcaaatgattttagcttgttattgagggaaatattggaatcttctgggaaaaattgcttctacaaaaattatgatctcatccaaccaaagaatgatttcaattttgagagacgagactggatgactgttcaacctgatgaattgcctacaggatgcagactggtcatgggattgaatcctccctttgggactaaagcctctcttgcgaaccagttcatcaacaaagctctcactttcaagccaaagcttataatactcattgttcccaaggaaactgaaagattggacaagaaatacccaccatatgagctaatatggcaggactcagatcagctctcgggaaagtcattctatctacctggatctctggatgctgacaacaaggtgatggagcaatggaatgtgtcacctcctccgctttctctgtggagtcgtagtgactgggctgagaggcactccgagattgccaaatcaatggggcacatctcgaatgaaattggtgacttgcaaagggatctggctgcatctatacataccacagagcacgtggaggcagatgatgcaggggttgcaggcatgtctccatgtttactagatcagttgttgtctgacacgttccatgacccaacaacttctccaggggactgctggaatgataccagcggccgatcacggcaaccatgcaactacgaaacagcaggacaaggaaggggcgatccaacctacaatcatacaacagaaagctgctctgatatgagcatttcattgtcggagagtgatgttcagagaaaagatcaagctttgccaatgccagagcatggaggcaccggctctgatatgagcatttcattgtcggagagtgatgttcggagaaaaggtcaagcctgggatgctgttggaagtgcatctgcagggaaaccaactgctgatgccgattacgatgaggtaacatcagcctgtggtccgtatcatttctcgggggttgcgggcaaacaggcagctggagttgagtactggatgatacaagactcaccagtcctggaggaaggagagctgagcgatgcaccggctgcggcgggcaggcctgcatctggcacgcgtcataaaccgacggaacacacgccagcagcagcaacacccgaagctgcctcctggtggagtgggcagctggatcatcactcgcggtctgtggccgctaggcataatgccagaactctgccaccaagaaacaccttccccggactgcgcttgcggcaaggatgcaacacctctcgtaagttcctgccccaaggcatgggctatgacgccatccatgaagggccatcgaatggctggatcgaggaagaagactactagtataggtgctaatgtgcctcgccctcgcgttgtcttcacaggtgtgagctagttaattctacggccggctttaggagtatgctgctgaggttatgctaacgttggtagagtcggttctgcggtctgtcattggatcagtattttcgttaactgttgcattcatgccctgtatctgtttctgacgaaacatcttaccatggacttgattgcctttgagcctgaattatccaggatcgatctttcgttgcctgctataccttgctgaaattcctgccgtgtcgaagttttgac

SEQ ID NO: 45373 - DNA, 984 bp, Zea Mays
atggcctcccccgacctgctcttcaatctgtggaacctcttctacctcgacgcctatcaggcagccattaacatcgacgtcccgggcctcgacaccgacgccaccactgagcgcgacaccatcgtcttccgctcctacatcgccctcggctcctatcagacctatggagataagcacgaaagtgaggccaccaaaattgagggaggtgatacaggttcccaagaaggttggaagggatccaagatttgagcctgtttatggatctgttgacaaagaagggtttaggaaaagatacaatttcttatttgatgaagactttcctgctgaaaaataaactccaaaaaatgattaagaaatctaaggacctagatgccattggagaaatgaagagtcatgtcacgtggattgataagcagttgaagtatcatcctccaaagaacgttgaatcagaaatcttgtgtgagcatatcaagaaagagagggaggcaacaaaggctagaaaacgaccatgctatctgaagaaacctgaacttcacgaaaggaagctgatgaacaagtacaacgagctcaaggaggcaggaaagcttgatgcattcatggaaaagcggcggaggaagaatgcctccaaagatcatcggttcatgtcgtaccaacgcagtggagatgcataatagtttcctgattctggaggcaagcgaaaggatgatggacggtcttctcatggtggctggacactggacagtcagtgtctctgttactttgttgccctagccgtacaatcgtcagctccgtgcacaatctctactagttcttaagaatagagtgcaggcgtccacagtgggtttttatgtttctcatttcactctctgcattttcagttacaactacactgcatatgttgacagatttgttcatatattactccagctgacattttcactatcgcaacaacatctctactattatttgttttttgcatataaa

SEQ ID NO: 45374 - DNA, 1327 bp, Zea Mays
ctttgtgggttggtaggtgggaactgacggttctataatgctgatgctcaattccgccagatcgggacatggattggatgggcgtttcttttctcgggcagttggcacccatgcttgtctttcgtggtgatagggaaagtgtgtgtgacctcagggaatcgattcgttcatccaagtgaaggcaaccagactccaggatggagttcaaagccggcgttttcaccgtggcaatgctagccatcgtcgtgctctccacaccagcagccccgcagaagcccaagagccctcccgctccgcgatccccagtcgtcctggcgccggcgccagcgcccgcaccggcggcgccgcaccacgtggacctcgcggacctcctcagcgtggccgggccgttccacacgttcctggactacctgcagaagaccggcgtcatcgagaccttccagagccaggcgaacgacacgaagcggggcggcatcaccgtcttcgtgcccaaggactcggcgttcgcggcgctgaagcagaccacgttcgccaacctcacccaggaccagctcaggtcgctgctgctgtgccacgcgctgcccaagtactactcgctggccgagttcgaccggctgagcgcgctcggcccggtggccaccctcgccggctcgcagtacacgctgaacctcacctacgacatgggcaccgtccgcgtgaagtccatgtggtccgaccccaagatcagcagcagcgtgtactccacccgccccgtcgcggtgtacgaggtcggcaaggttctcctgccgatgcagatcttcaagagcgaccccccgctggcgcctgcccccgctccggcaccggatgccaaggcatccgacgtcgctcccagcccggcgtcggggaaatcatcagcgagtgcgaaggcgaaggagaaggcgggagagaagagctcgtcgtgccgagccggtgtcgtcgcccattacttggcgatcgctgtctccggcggcctggtgctcttgtggtgaggatcgacgagttcgtcctcaccgtgtgtccgtgtcgaaggagcaagtacggggttcagcttagggccccccgtgtttaatttatatatgggtgtttatggattcattcttttggacatatggtaggccatttgtgtttaggactgagctgttgttgagtgtttgcgtcatatgcttctactaggtgtatgcccgtgcgttgctacgggaccaacatgtattgctaagatacattaagataagaaaacactataataaaatatattgatatacaaaaacactaattgttattcgacactttttattagcatcactaaaat

SEQ ID NO: 45375 - DNA, 1234 bp, Zea Mays
atttcgtgtcttccgcgctgctgagatctgcagcctgcaggagacgtgtgtgtgacctcagggaatcgattcgttcatccaagtgaaggcaaccagactccaggatggagttcaaagccggcgttttcaccgtggcaatgctagccatcgtcgtgctctccacaccagcagccccgcagaagcccaagagccctcccgctccgcgatccccagtcgtcctggcgccggcgccagcgcccgcaccggcggcgccgcaccacgtggacctcgcggacctcctcagcgtggccgggccgttccacacgttcctggactacctgcagaagaccggcgtcatcgagaccttccagagccaggcgaacgacacgaagcggggcggcatcaccgtcttcgtgcccaaggactcggcgttcgcggcgctgaagcagaccacgttcgccaacctcacccaggaccagctcaggtcgctgctgctgtgccacgcgctgcccaagtactactcgctggccgagttcgaccggctgagcgcgctcggcccggtggccaccctcgccggctcgcagtacacgctgaacctcacctacgacatgggcaccgtccgcgtgaagtccatgtggtccgaccccaagatcagcagcagcgtgtactccacccgccccgtcgcggtgtacgaggtcggcaaggttctcctgccgatgcagatcttcaagagcgaccccccgctggcgcctgcccccgctccggcaccggatgccaaggcatccgacgtcgctcccagcccggcgtcggggaaatcatcagcgagtgcgaaggcgaaggagaaggcgggagagaagagctcgtcgtgccgagccggtgtcgtcgcccattacttggcgatcgctgtctccggcggcctggtgctcttgtggtgaggatcgacgagttcgtcctcaccgtgtgtccgtgtcgaaggagcaagtacggggttcagcttagggccccccgtgtttaatttatatatgggtgtttatggattcattcttttggacatatggtaggccatttgtgtttaggactgagctgttgttgagtgtttgcgtcatatgcttctactaggtgtatgcccgtgcgttgctacgggaccaacatgtattgctaagatacattaagataagaaaacactataataaaatatattgatatacaaaaacactaattgttattcgacactttttattagcatcactaaaat

SEQ ID NO: 45376 - DNA, 1391 bp, Zea Mays
ctccttgctcacaagatacgttctcatgcgtgagacccacctctgcctcttcctcacctcatccgtacccgagcactgcacagcacagcacagcacagcacaccacctttagtatatagcaatagcacactcggcccccctcctcttcaactcccccggccgtcctgctcgccggcttctggctggcccctgcatccgcccagtgtgtgtgacctcagggaatcgattcgttcatccaagtgaaggcaaccagactccaggatggagttcaaagccggcgttttcaccgtggcaatgctagccatcgtcgtgctctccacaccagcagccccgcagaagcccaagagccctcccgctccgcgatccccagtcgtcctggcgccggcgccagcgcccgcaccggcggcgccgcaccacgtggacctcgcggacctcctcagcgtggccgggccgttccacacgttcctggactacctgcagaagaccggcgtcatcgagaccttccagagccaggcgaacgacacgaagcggggcggcatcaccgtcttcgtgcccaaggactcggcgttcgcggcgctgaagcagaccacgttcgccaacctcacccaggaccagctcaggtcgctgctgctgtgccacgcgctgcccaagtactactcgctggccgagttcgaccggctgagcgcgctcggcccggtggccaccctcgccggctcgcagtacacgctgaacctcacctacgacatgggcaccgtccgcgtgaagtccatgtggtccgaccccaagatcagcagcagcgtgtactccacccgccccgtcgcggtgtacgaggtcggcaaggttctcctgccgatgcagatcttcaagagcgaccccccgctggcgcctgcccccgctccggcaccggatgccaaggcatccgacgtcgctcccagcccggcgtcggggaaatcatcagcgagtgcgaaggcgaaggagaaggcgggagagaagagctcgtcgtgccgagccggtgtcgtcgcccattacttggcgatcgctgtctccggcggcctggtgctcttgtggtgaggatcgacgagttcgtcctcaccgtgtgtccgtgtcgaaggagcaagtacggggttcagcttagggccccccgtgtttaatttatatatgggtgtttatggattcattcttttggacatatggtaggccatttgtgtttaggactgagctgttgttgagtgtttgcgtcatatgcttctactaggtgtatgcccgtgcgttgctacgggaccaacatgtattgctaagatacattaagataagaaaacactataataaaatatattgatatacaaaaacactaattgttattcgacactttttattagcatcactaaaat

SEQ ID NO: 45377 - DNA, 1113 bp, Zea Mays
gcaatccaatcctttgcttgcgagccggtcatgcacggatcgcctgcaaagaccgactcctcggcgacgtataagacgccggcggcggcggcacgtccttttcgcacctcctgctgtctccatccggctccatggactccaccctgctgctgccgcgtcttcctcctcctcccctcccgtcgtcgcttcgtcgccgtcaccggcagccgcactgtcttcctccgcaccgccgacccaaaaccgtcccgagacatggcaggatgccgccggcggcgcgagaaggacgcgccgacgccggcacgaagttccgcgcccgagggctgttcggcggcggcggaggaggagacaggctccgggccgtgatgaggatggtgaagctcaactcggccatccagaaccggagcgtcagggagctgctggagctgctcggcgacgagtgcctctacttcctcgggaacctccggtccgtcgacgttccgcggctgggcaaggacatgttcctgctcctccacgcgctgatggtccggcaccacgtgtcgttcgtgctcaagccgtcgccggacgacgaggcaggcttcgacctgggcgtcaagtggtctctagagtggaaggggaagaagctgccctgggacctcgactgcaacgtctccaccacccacgtctaccgcggcctcctgctcatcagccaagtgaacaagacctgcgtgccgctgctccagaggattcttgggatcatgcagcagaacctggacgcggtagtcctggccgtcgtgcacaaggtgctgccagaaggcaccctcgacgagaagcagaggagcacgatggttttctgcgccgtcatcggcctcctcgtcatgctgctgttctacgcattgctcaagaacttgtagcttcgtcgtcgccgtcgccaccagcagcaccaccaggagggcaaggagcaagtatctagccttgtacagtaggcaggatcttgtaaacggcctgcatcatgcaggaacagaaaaaagcagtagctagctgttcctttcgtaaacagctgctgccgcatacgatgcacacacaatgatgatacatgcaggggttcaggaaaaggatgagtaaggataacgatct

SEQ ID NO: 45378 - DNA, 1569 bp, Zea Mays
cctggaaattactggacactactccatctcgtgatattttctctcttccatatctccccggaagtcgctggacatctcctaaataatcctcagccggtacttctgctagtccgtgccatgcttatactggtgatcaagatgcctatgtctccaccaccgtcgctcagctgcttgcctctgtgttggctcgccggacctactgtttgcgctgtgcttaaggtcctactcaccggtcttctcgtcgacagcgccagtcgtgtctcccaccacgccgacactttttctccatcgctcgactccgtgctcagcgctctcaccatcaccgcgtctctcctcgccggtgttcgccggacatacgctcaacctcgccaccgtgggacttacctctcctccaaaccgtgttcgccgcagcctagccatcgtctacctctatgctcagcacgaaaccgctcgccctacagcctcgtcgcgtcaccgtcctgcaggcactgagctccacccacctcggcgaaggccaccgtccccttcttcactgtgcactcggcatcaacttcctggtgcacaccgacacaacgctctggtcgcgcgccctccatcgcacgctcagacacttgcccctgttcgtcacctcgggacttcgccgtcacccgtacttcgctggttgtcaacttcgctggctgtgttcgacctccagccacgtcaccatcgtgcccttcatccgttcgaagaacacctagaaaaagtgatgtttgaaggagttcacttcagtgcctgttgatccagtggtggagtttcatctaactacttaccagagtagaataattttgggatcttctgctgcaataaggacatgttcctgctcctccacgcgctgatggtccggcaccacgtgtcgttcgtgctcaagccgtcgccggacgacgaggcaggcttcgacctgggcgtcaagtggtctctagagtggaaggggaagaagctgccctgggacctcgactgcaacgtctccaccacccacgtctaccgcggcctcctgctcatcaggtaccttctgctagctgctttcgcatgcttgcacgtgcagcaaaagaacgaccggctaaataaccgccttgtctccccgtcgccgtcgcaccgcacgcagccaagtgaacaagacctgcgtgccgctgctccagaggattcttgggatcatgcagcagaacctggacgcggtagtcctggccgtcgtgcacaaggtgctgccagaaggcaccctcgacgagaagcagaggagcacgatggttttctgcgccgtcatcggcctcctcgtcatgctgctgttctacgcattgctcaagaacttgtagcttcgtcgtcgccgtcgccaccagcagcaccaccaggagggcaaggagcaagtatctagccttgtacagtaggcaggatcttgtaaacggcctgcatcatgcaggaacagaaaaaagcagtagctagctgttcctttcgtaaacagctgctgccgcatacgatgcacacacaatgatgatacatgcaggggttcaggaaaaggatgagtaaggataacgatct

SEQ ID NO: 45379 - DNA, 868 bp, Zea Mays
cctggaaattactggacactactccatctcgtgatattttctctcttccatatctccccggaagtcgctggacatctcctaaataatcctcagccggtacttctgctagtccgtgccatgcttatactggtgatcaagatgcctatgtctccaccaccgtcgctcagctgcttgcctctgtgttggctcgccggacctactgtttgcgctgtgcttaaggtcctactcaccggtcttctcgtcgacagcgccagtcgtgtctcccaccacgccgacactttttctccatcgctcgactccgtgctcagcgctctcaccatcaccgcgtctctcctcgccggtgttcgccggacatacgctcaacctcgccaccgtgggacttacctctcctccaaaccgtgttcgccgcagcctagccatcgtctacctctatgctcagcacgaaaccgctcgccctacagcctcgtcgcgtcaccgtcctgcaggcactgagctccacccacctcggcgaaggccaccgtccccttcttcactgtgcactcggcatcaacttcctggtgcacaccgacacaacgctctggtcgcgcgccctccatcgcacgctcagacacttgcccctgttcgtcacctcgggacttcgccgtcacccgtacttcgctggttgtcaacttcgctggctgtgttcgacctccagccacgtcaccatcgtgcccttcatccgttcgaagaacacctagaaaaagtgatgtttgaaggagttcacttcagtgcctgttgatccagtggtggagtttcatctaactacttaccagagtagaataattttgggatcttctgctgcaataaggttaaaaacatgtaccgcaag

SEQ ID NO: 45380 - DNA, 1118 bp, Zea Mays
gggtgccggggtagcacgtctcgcggaggtgcgtagacgacggcggagcggcatcctcacctccatggcgccgctgtcgaggaagcaccaagtcctaatccaggcgctgctcgcccgcggcccgctcttcgagcgcgacttccacgctatcttcgatggcgcctttggcaagaacaccgccaatgatcaacaactgttcaatgatacgctttggaacatcaacaaagaactcgcatttgtgagctttgagttgcaagcattcatcaatcaatatgatggaatggtgtactacggagtggtaataatgttgctgacaaagaatcacagctcggaacaaagtattatgtgtcccagattgcattctacaagggactattagaagcaattattcgggaagctggaaacgatgggagcataaccagtattgatgctctcaatgtccaacttgaaaaccaggtttgctgcacagtaattctgggaacaggatttgttggttttcctgtatttaccacacactgtcttatatcaacatgtactaaatggtcatgtgcctggtgtagctcataatagttacaatatacaagtagttaagcatataatagttgctagttttcttgtatttaccagtcttgtatcaacatgtactaaacggtcatgtgcctggtatggctcataacagttacaaatatacaagcagttatgcatataatagttgcatatgctattttgcagttgctatgtcatcattggtagcacctttcagtatttttcgtggcatggcatggcagcaatattatatacactcattgacaaaccttaatcttgattgcaattcactgagttgttgattgttcttttcccaggtcacgactgtagatggttcacaggacaaccaatctcatcttcctataaagaacctctcgttgagcgagaaagagaaagctctagatgaactgatacgggattgttggttgtcatatacctccacaggcaagattggtctgggctccagatcatttcttgatctccgaagctggttctattataatgacatcccatcatgtgtggtatgtggggaagcttgtataaaggtatttatagccctcaaccaccaaaac

SEQ ID NO: 45381 - DNA, 3475 bp, Zea Mays
ggatctctatgtgtcgtgtccaaaaggtgacgggcccgcgagctagggtttccggtcaccgcggatctcggcggcctcctccgccgagctcctcgcagccccgcgacgcaatatcgtcagccgtgccgcctgagtgcccaagcttaacagactccggattatcaaaagttgatgcgatctcaccaccagtgacaagagctagccgttcaatgccctcaaaatcagcatgctcaatcgcgaggatgccagcatcagcaaagagttcttcagggaagttatagattaactgcctgttgacaaaatagttgatcccatgcgctataatcttctgcaccttctctctcattttctgcttttcagcagcttcaatatctgcaaccttaaacattgaatccacccagacacatgccccatagtcttaaatctgtgtccatagcactgtttgcaaccaaaattttggcattctcaattctcttaggttgcccaatgccaattttcttgtcaagaatgaacccttcatccaaaaaggagtccttaagagatcctccaggtttcttcagaatttgaatggcttccaggttggtgctgcccttaagccttaatacagcgtcaactgcaagttcagcaaagtactctttatcctgggaaagaatttttgaactaagggtagtcatagcaatgttcatgagatcagctctgaacttatctgaacaaactgtacatgttaaatcagtgctttactttgaactaataaaacaccgttaactggtaatttatcattgctatggtctttcaggctatttgaggagatgccgccatcgtcatcgtcatccttactctctggctccaatactgcgagtgctgagcttcctctaatcccttgcaagctctgcaatggggtggtgattgagcgggtttccaaacaaccagaaagcacgtcgaggaagttctaccggtgcagagccaagaaattggatgggtctcaatgtgatttttttccactggcaagcgagctatgctgttttgttaatcaaggatggggttgtcagtggtgaccaatgccttgagttgttaatggtcgcacttaatgatcatggcaaagctgttgaatctctaaccaattccatcagagaaatgaagaaaaagttgtccgacctggagttagtgatggaagagctggataacgtgaaaaagtcgatgaaggcagccatggttgagaaattgaggaaaacaagaaatcgatagctgcattgaaattgatggagaatgagatgcaaatgctgaaagggccaactaaagtgaaacctaggaatatggcactgtgttttctgcttttggcgttgattgggtggtttgtgatgggacagatgaattggggggaggaagcatccaatcgatttatgctgggaggctaatgaactttgggtggacttttgtatagctagatgtaatcagaactggttaggcaccctgggagtggaagctagatgtaagaagttgattgtgctgcgatttgatgctctggaggatgaagatgggctctgatcgaagcaaagttgtgccactaatatttttttcttattgaacttagtagttttctgtatgaacttctgtttatcagatacccagttgaacaagttcagtactctatttatgatattcaatattagcggttgactttaggaaatcagaaattatttggctcatgataatctcacgtgatcacgctgcatacagaaggtgaagcctgtttgttggcggagtgagaaaacttaagactaggggaaaatgaacttgtaaacaagaattcttgacaggaattatagttggattaagattctttttatgtacctcacttcggcaccaccgtgaaaccatagtgtccccatccatgttgtccggagtcgaataattgtatgcattttttaatcgaggacacaattcaataatcttggatgcagaggatgaactaacagaggacaaagctcacacaaccatggatacagacgtcaatccaaattctgcttcaatttgtaaaggctcttcaaattctacttcgttttgtgaaggtggcagtcgtgaaggtggccatgaacaaaaaaatccaaacacttttgtgagagaaagcaggtcaaaaaggagggctctgtataaagcttgcatagatttggcttgtacgaaaagtgaaaatgatacatacaaaaaaatcataggaaacagggctgctttggcagacttatcaagcaaatatctgcgtcacctaatgcctgtaaaagaggactatctgcttgtggaaattggagatgctcagttgactacagcttatttttgacatcaatgcaccgtgctggtgatatgagtaacacattgatgagtgttatcgtcgaatacttcaacagtatttctggggccctctttgacactgtttctagaccctctaccatttctaaatatgtcatctgtcctttcttgttggtaagatgggaaaaatgctttctctcctttctttctgtttcatatatttataggtatttaacagtgtttttgctgtgtttgaaaaatagaagaaagttaaaaagggttgcaactttaaagttaaagatagtttactgaagactcttgaggaaacccagaaaagagatatgattatgctcctgattctggatggcagtcattggcaacttgtatgtataaactttctccatagggaaattaactattttgactctttgggatcagatttctgcgctgcagaatcattgcttgctaatttcatcgaattactgaagatacataaatgcataaaatttgatgttaattctttcgaaaaggtcagagtaaaatgtcctaaacagtccaacaacattgattgtggttttttcacaatactgtacatgattgcatggaatggaaaacatttgcggttagatgataagatcaaagctagcgaaattgttgcatgcagaatgaaactcacacatatgctgatcaaatctaaacaaaatagtgctgatccatgttatgtggttaaaaaactagatgcgaatataaagaaatatggcattaattcccgaaaggtgatcacaagtaagaatttgacgatgctgatgggactaatagatcaagagattgaagagattaatgcagaaaagagaaagcgaagtggacatccagcaggaggacaaccagaactgaaggacgatgacggtcaactaagggcaaactcagtcaaggctcgcgacgctgaattgcgttgtgaaagggctgtaaagctacgacgactatagcactttgaaaccgctgttgctccccccgacagagaaagcagtttgaaactgctgtggctacctatagcttcaaagctagacaaggctaattcgtccttcagtagagctgattgacataaacgtagttgcagctcttgcgtgttctgctttttcgtgttgctcttccgcgttcgagttccatgcctgcc

SEQ ID NO: 45382 - DNA, 3203 bp, Zea Mays
ggatctctatgtgtcgtgtccaaaaggtgacgggcccgcgagctagggtttccggtcaccgcggatctcggcggcctcctccgccgagctcctcgcagccccgcgacgcaatatcgtcagccgtgccgcctgagtgcccaagcttaacagactccggattatcaaaagttgatgcgatctcaccaccagtgacaagagctagccgttcaatgccctcaaaatcagcatgctcaatcgcgaggatgccagcatcagcaaagagttcttcagggaagttatagattaactgcctgttgacaaaatagttgatcccatgcgctataatcttctgcaccttctctctcattttctgcttttcagcagcttcaatatctgcaaccttaaacattgaatccacccagacacatgccccatagtcttaaatctgtgtccatagcactgtttgcaaccaaaattttggcattctcaattctcttaggttgcccaatgccaattttcttgtcaagaatgaacccttcatccaaaaaggagtccttaagagatcctccaggtttcttcagaatttgaatggcttccaggttggtgctgcccttaagccttaatacagcgtcaactgcaagttcagcaaagtactctttatcctgggaaagaatttttgaactaagggtagtcatagcaatgttcatgagatcagctctgaacttatctgaacaaactgtacatgttaaatcagtgctttactttgaactaataaaacaccgttaactggtaatttatcattgctatggtctttcaggctatttgaggagatgccgccatcgtcatcgtcatccttactctctggctccaatactgcgagtgctgagcttcctctaatcccttgcaagctctgcaatggggtggtgattgagcgggtttccaaacaaccagaaagcacgtcgaggaagttctaccggtgcagagccaagaaattggatgggtctcaatgtgatttttttccactggcaagcgagctatgctgttttgttaatcaaggatggggttgtcagtggtgaccaatgccttgagttgttaatggtcgcacttaatgatcatggcaaagctgttgaatctctaaccaattccatcagagaaatgaagaaaaagttgtccgacctggagttagtgatggaagagctggataacgtgaaaaagtcgatgaaggcagccatggttgagaaattgaggaaaacaagaaatcgatagctgcattgaaattgatggagaatgagatgcaaatgctgaaagggccaactaaagtgaaacctaggaatatggcactgtgttttctgcttttggcgttgattgggtggtttgtgatgggacagatgaattggggggaggaagcatccaatcgatttatgctgggaggctaatgaactttgggtggacttttgtatagctagatgtaatcagaactggttaggcaccctgggagtggaagctagatgtaagaagttgattgtgctgcgatttgatgctctggaggatgaagatgggctctgatcgaagcaaagttgtgccactaatatttttttcttattgaacttagtagttttctgtatgaacttctgtttatcagatacccagttgaacaagttcagtactctatttatgatattcaatattagcggttgactttaggaaatcagaaattatttggctcatgataatctcacgtgatcacgctgcatacagaaggtgaagcctgtttgttggcggagtgagaaaacttaagactaggggaaaatgaacttgtaaacaagaattcttgacaggaattatagttggattaagattctttttatgtacctcacttcggcaccaccgtgaaaccatagtgtccccatccatgttgtccggagtcgaataattgtatgcattttttaatcgaggacacaattcaataatcttggatgcagaggatgaactaacagaggacaaagctcacacaaccatggatacagacgtcaatccaaattctgcttcaatttgtaaaggctcttcaaattctacttcgttttgtgaaggtggcagtcgtgaaggtggccatgaacaaaaaaatccaaacacttttgtgagagaaagcaggtcaaaaaggagggctctgtataaagcttgcatagatttggcttgtacgaaaagtgaaaatgatacatacaaaaaaatcataggaaacagggctgctttggcagacttatcaagcaaatatctgcgtcacctaatgcctgtaaaagaggactatctgcttgtggaaattggagatgctcagttgactacagcttatttttgacatcaatgcaccgtgctggtgatatgagtaacacattgatgagtgttatcgtcgaatacttcaacagtatttctggggccctctttgacactgtttctagaccctctaccatttctaaatatgtcatctgtcctttcttgttgaagaaagttaaaaagggttgcaactttaaagttaaagatagtttactgaagactcttgaggaaacccagaaaagagatatgattatgctcctgattctggatggcagtcattggcaacttcttgctaatttcatcgaattactgaagatacataaatgcataaaatttgatgttaattctttcgaaaagatcaaagctagcgaaattgttgcatgcagaatgaaactcacacatatgctgatcaaatctaaacaaaatagtgctgatccatgttatgtggttaaaaaactagatgcgaatataaagaaatatggcattaattcccgaaaggtgatcacaagtaagaatttgacgatgctgatgggactaatagatcaagagattgaagagattaatgcagaaaagagaaagcgaagtggacatccagcaggaggacaaccagaactgaaggacgatgacggtcaactaagggcaaactcagtcaaggctcgcgacgctgaattgcgttgtgaaagggctgtaaagctacgacgactatagcactttgaaaccgctgttgctccccccgacagagaaagcagtttgaaactgctgtggctacctatagcttcaaagctagacaaggctaattcgtccttcagtagagctgattgacataaacgtagttgcagctcttgcgtgttctgctttttcgtgttgctcttccgcgttcgagttccatgcctgcc

SEQ ID NO: 45383 - DNA, 3278 bp, Zea Mays
ggatctctatgtgtcgtgtccaaaaggtgacgggcccgcgagctagggtttccggtcaccgcggatctcggcggcctcctccgccgagctcctcgcagccccgcgacgcaatatcgtcagccgtgccgcctgagtgcccaagcttaacagactccggattatcaaaagttgatgcgatctcaccaccagtgacaagagctagccgttcaatgccctcaaaatcagcatgctcaatcgcgaggatgccagcatcagcaaagagttcttcagggaagttatagattaactgcctgttgacaaaatagttgatcccatgcgctataatcttctgcaccttctctctcattttctgcttttcagcagcttcaatatctgcaaccttaaacattgaatccacccagacacatgccccatagtcttaaatctgtgtccatagcactgtttgcaaccaaaattttggcattctcaattctcttaggttgcccaatgccaattttcttgtcaagaatgaacccttcatccaaaaaggagtccttaagagatcctccaggtttcttcagaatttgaatggcttccaggttggtgctgcccttaagccttaatacagcgtcaactgcaagttcagcaaagtactctttatcctgggaaagaatttttgaactaagggtagtcatagcaatgttcatgagatcagctctgaacttatctgaacaaactgtacatgttaaatcagtgctttactttgaactaataaaacaccgttaactggtaatttatcattgctatggtctttcaggctatttgaggagatgccgccatcgtcatcgtcatccttactctctggctccaatactgcgagtgctgagcttcctctaatcccttgcaagctctgcaatggggtggtgattgagcgggtttccaaacaaccagaaagcacgtcgaggaagttctaccggtgcagagccaagaaattggatgggtctcaatgtgatttttttccactggcaagcgagctatgctgttttgttaatcaaggatggggttgtcagtggtgaccaatgccttgagttgttaatggtcgcacttaatgatcatggcaaagctgttgaatctctaaccaattccatcagagaaatgaagaaaaagttgtccgacctggagttagtgatggaagagctggataacgtgaaaaagtcgatgaaggcagccatggttgagaaattgaggaaaacaagaaatcgatagctgcattgaaattgatggagaatgagatgcaaatgctgaaagggccaactaaagtgaaacctaggaatatggcactgtgttttctgcttttggcgttgattgggtggtttgtgatgggacagatgaattggggggaggaagcatccaatcgatttatgctgggaggctaatgaactttgggtggacttttgtatagctagatgtaatcagaactggttaggcaccctgggagtggaagctagatgtaagaagttgattgtgctgcgatttgatgctctggaggatgaagatgggctctgatcgaagcaaagttgtgccactaatatttttttcttattgaacttagtagttttctgtatgaacttctgtttatcagatacccagttgaacaagttcagtactctatttatgatattcaatattagcggttgactttaggaaatcagaaattatttggctcatgataatctcacgtgatcacgctgcatacagaaggtgaagcctgtttgttggcggagtgagaaaacttaagactaggggaaaatgaacttgtaaacaagaattcttgacaggaattatagttggattaagattctttttatgtacctcacttcggcaccaccgtgaaaccatagtgtccccatccatgttgtccggagtcgaataattgtatgcattttttaatcgaggacacaattcaataatcttggatgcagaggatgaactaacagaggacaaagctcacacaaccatggatacagacgtcaatccaaattctgcttcaatttgtaaaggctcttcaaattctacttcgttttgtgaaggtggcagtcgtgaaggtggccatgaacaaaaaaatccaaacacttttgtgagagaaagcaggtcaaaaaggagggctctgtataaagcttgcatagatttggcttgtacgaaaagtgaaaatgatacatacaaaaaaatcataggaaacagggctgctttggcagacttatcaagcaaatatctgcgtcacctaatgcctgtaaaagaggactatctgcttgtggaaattggagatgctcagttgactacagcttatttttgacatcaatgcaccgtgctggtgatatgagtaacacattgatgagtgttatcgtcgaatacttcaacagtatttctggggccctctttgacactgtttctagaccctctaccatttctaaatatgtcatctgtcctttcttgttgaaagttaaaaagggttgcaactttaaagttaaagatagtttactgaagactcttgaggaaacccagaaaagagatatgattatgctcctgattctggatggcagtcattggcaacttgtatgtataaactttctccatagggaaattaactattttgactctttgggatcagatttctgcgctgcagaatcattgcttgctaatttcatcgaattactgaagatacataaatgcataaaatttgatgttaattctttcgaaaagatcaaagctagcgaaattgttgcatgcagaatgaaactcacacatatgctgatcaaatctaaacaaaatagtgctgatccatgttatgtggttaaaaaactagatgcgaatataaagaaatatggcattaattcccgaaaggtgatcacaagtaagaatttgacgatgctgatgggactaatagatcaagagattgaagagattaatgcagaaaagagaaagcgaagtggacatccagcaggaggacaaccagaactgaaggacgatgacggtcaactaagggcaaactcagtcaaggctcgcgacgctgaattgcgttgtgaaagggctgtaaagctacgacgactatagcactttgaaaccgctgttgctccccccgacagagaaagcagtttgaaactgctgtggctacctatagcttcaaagctagacaaggctaattcgtccttcagtagagctgattgacataaacgtagttgcagctcttgcgtgttctgctttttcgtgttgctcttccgcgttcgagttccatgcctgcc

SEQ ID NO: 45384 - DNA, 3157 bp, Zea Mays
ggatctctatgtgtcgtgtccaaaaggtgacgggcccgcgagctagggtttccggtcaccgcggatctcggcggcctcctccgccgagctcctcgcagccccgcgacgcaatatcgtcagccgtgccgcctgagtgcccaagcttaacagactccggattatcaaaagttgatgcgatctcaccaccagtgacaagagctagccgttcaatgccctcaaaatcagcatgctcaatcgcgaggatgccagcatcagcaaagagttcttcagggaagttatagattaactgcctgttgacaaaatagttgatcccatgcgctataatcttctgcaccttctctctcattttctgcttttcagcagcttcaatatctgcaaccttaaacattgaatccacccagacacatgccccatagtcttaaatctgtgtccatagcactgtttgcaaccaaaattttggcattctcaattctcttaggttgcccaatgccaattttcttgtcaagaatgaacccttcatccaaaaaggagtccttaagagatcctccaggtttcttcagaatttgaatggcttccaggttggtgctgcccttaagccttaatacagcgtcaactgcaagttcagcaaagtactctttatcctgggaaagaatttttgaactaagggtagtcatagcaatgttcatgagatcagctctgaacttatctgaacaaactgtacatgttaaatcagtgctttactttgaactaataaaacaccgttaactggtaatttatcattgctatggtctttcaggctatttgaggagatgccgccatcgtcatcgtcatccttactctctggctccaatactgcgagtgctgagcttcctctaatcccttgcaagctctgcaatggggtggtgattgagcgggtttccaaacaaccagaaagcacgtcgaggaagttctaccggtgcagagccaagaaattggttatttctcaatttttgctcaattgataagttatatggtttgggtaattttgagggcccaatgctttcttctttacaggatgggtctcaatgtgatttttttccactggcaagcgagctatgctgttttgttaatcaaggatggggttgtcagtggtgaccaatgccttgagttgttaatggtcgcacttaatgatcatggcaaagctgttgaatctctaaccaattccatcagagaaatgaagaaaaagttgtccgacctggagttagtgatggaagagctggataacgtgaaaaagtcgatgaaggcagccatggttgagaaattgaggaaaacaagaaatcgatagctgcattgaaattgatggagaatgagatgcaaatgctgaaagggccaactaaagtgaaacctaggaatatggcactgtgttttctgcttttggcgttgattgggtggtttgtgatgggacagatgaattggggggaggaagcatccaatcgatttatgctgggaggctaatgaactttgggtggacttttgtatagctagatgtaatcagaactggttaggcaccctgggagtggaagctagatgtaagaagttgattgtgctgcgatttgatgctctggaggatgaagatgggctctgatcgaagcaaagttgtgccactaatatttttttcttattgaacttagtagttttctgtatgaacttctgtttatcagatacccagttgaacaagttcagtactctatttatgatattcaatattagcggttgactttaggaaatcagaaattatttggctcatgataatctcacgtgatcacgctgcatacagaaggtgaagcctgtttgttggcggagtgagaaaacttaagactaggggaaaatgaacttgtaaacaagaattcttgacaggaattatagttggattaagattctttttatgtacctcacttcggcaccaccgtgaaaccatagtgtccccatccatgttgtccggagtcgaataattgtatgcattttttaatcgaggacacaattcaataatcttggatgcagaggatgaactaacagaggacaaagctcacacaaccatggatacagacgtcaatccaaattctgcttcaatttgtaaaggctcttcaaattctacttcgttttgtgaaggtggcagtcgtgaaggtggccatgaacaaaaaaatccaaacacttttgtgagagaaagcagttttcctaaaatgcagaaaagaggactatctgcttgtggaaattggagatgctcagttgactacagcttatttttgacatcaatgcaccgtgctggtgatatgagtaacacattgatgagtgttatcgtcgaatacttcaacagtatttctggggccctctttgacactgtttctagaccctctaccatttctaaatatgtcatctgtcctttcttgttgaagaaagttaaaaagggttgcaactttaaagttaaagatagtttactgaagactcttgaggaaacccagaaaagagatatgattatgctcctgattctggatggcagtcattggcaacttcttgctaatttcatcgaattactgaagatacataaatgcataaaatttgatgttaattctttcgaaaagatcaaagctagcgaaattgttgcatgcagaatgaaactcacacatatgctgatcaaatctaaacaaaatagtgctgatccatgttatgtggttaaaaaactagatgcgaatataaagaaatatggcattaattcccgaaaggtgatcacaagtaagaatttgacgatgctgatgggactaatagatcaagagattgaagagattaatgcagaaaagagaaagcgaagtggacatccagcaggaggacaaccagaactgaaggacgatgacggtcaactaagggcaaactcagtcaaggctcgcgacgctgaattgcgttgtgaaagggctgtaaagctacgacgactatagcactttgaaaccgctgttgctccccccgacagagaaagcagtttgaaactgctgtggctacctatagcttcaaagctagacaaggctaattcgtccttcagtagagctgattgacataaacgtagttgcagctcttgcgtgttctgctttttcgtgttgctcttccgcgttcgagttccatgcctgcc

SEQ ID NO: 45385 - DNA, 2821 bp, Zea Mays
ggatctctatgtgtcgtgtccaaaaggtgacgggcccgcgagctagggtttccggtcaccgcggatctcggcggcctcctccgccgagctcctcgcagccccgcgacgcaatatcgtcagccgtgccgcctgagtgcccaagcttaacagactccggattatcaaaagttgatgcgatctcaccaccagtgacaagagctagccgttcaatgccctcaaaatcagcatgctcaatcgcgaggatgccagcatcagcaaagagttcttcagggaagttatagattaactgcctgttgacaaaatagttgatcccatgcgctataatcttctgcaccttctctctcattttctgcttttcagcagcttcaatatctgcaaccttaaacattgaatccacccagacacatgccccatagtcttaaatctgtgtccatagcactgtttgcaaccaaaattttggcattctcaattctcttaggttgcccaatgccaattttcttgtcaagaatgaacccttcatccaaaaaggagtccttaagagatcctccaggtttcttcagaatttgaatggcttccaggctatttgaggagatgccgccatcgtcatcgtcatccttactctctggctccaatactgcgagtgctgagcttcctctaatcccttgcaagctctgcaatggggtggtgattgagcgggtttccaaacaaccagaaagcacgtcgaggaagttctaccggatgggtctcaatgtgatttttttccactggcaagcgagctatgctgttttgttaatcaaggatggggttgtcagtggtgaccaatgccttgagttgttaatggtcgcacttaatgatcatggcaaagctgttgaatctctaaccaattccatcagagaaatgaagaaaaagttgtccgacctggagttagtgatggaagagctggataacgtgaaaaagtcgatgaaggcagccatggttgagaaattgaggaaaacaagaaatcgatagctgcattgaaattgatggagaatgagatgcaaatgctgaaagggccaactaaagtgaaacctaggaatatggcactgtgttttctgcttttggcgttgattgggtggtttgtgatgggacagatgaattggggggaggaagcatccaatcgatttatgctgggaggctaatgaactttgggtggacttttgtatagctagatgtaatcagaactggttaggcaccctgggagtggaagctagatgtaagaagttgattgtgctgcgatttgatgctctggaggatgaagatgggctctgatcgaagcaaagttgtgccactaatatttttttcttattgaacttagtagttttctgtatgaacttctgtttatcagatacccagttgaacaagttcagtactctatttatgatattcaatattagcggttgactttaggaaatcagaaattatttggctcatgataatctcacgtgatcacgctgcatacagaaggtgaagcctgtttgttggcggagtgagaaaacttaagactaggggaaaatgaacttgtaaacaagaattcttgacaggaattatagttggattaagattctttttatgtacctcacttcggcaccaccgtgaaaccatagtgtccccatccatgttgtccggagtcgaataattgtatgcattttttaatcgaggacacaattcaataatcttggatgcagaggatgaactaacagaggacaaagctcacacaaccatggatacagacgtcaatccaaattctgcttcaatttgtaaaggctcttcaaattctacttcgttttgtgaaggtggcagtcgtgaaggtggccatgaacaaaaaaatccaaacacttttgtgagagaaagcagttttcctaaaatgcagaaaagaggactatctgcttgtggaaattggagatgctcagttgactacagcttatttttgacatcaatgcaccgtgctggtgatatgagtaacacattgatgagtgttatcgtcgaatacttcaacagtatttctggggccctctttgacactgtttctagaccctctaccatttctaaatatgtcatctgtcctttcttgttgaagaaagttaaaaagggttgcaactttaaagttaaagatagtttactgaagactcttgaggaaacccagaaaagagatatgattatgctcctgattctggatggcagtcattggcaacttgtatgtataaactttctccatagggaaattaactattttgactctttgggatcagatttctgcgctgcagaatcattgaatgaaactcacacatatgctgatcaaatctaaacaaaatagtgctgatccatgttatgtggttaaaaaactagatgcgaatataaagaaatatggcattaattcccgaaaggtgatcacaagtaagaatttgacgatgctgatgggactaatagatcaagagattgaagagattaatgcagaaaagagaaagcgaagtggacatccagcaggaggacaaccagaactgaaggacgatgacggtcaactaagggcaaactcagtcaaggctcgcgacgctgaattgcgttgtgaaagggctgtaaagctacgacgactatagcactttgaaaccgctgttgctccccccgacagagaaagcagtttgaaactgctgtggctacctatagcttcaaagctagacaaggctaattcgtccttcagtagagctgattgacataaacgtagttgcagctcttgcgtgttctgctttttcgtgttgctcttccgcgttcgagttccatgcctgcc

SEQ ID NO: 45386 - DNA, 2966 bp, Zea Mays
ggatctctatgtgtcgtgtccaaaaggtgacgggcccgcgagctagggtttccggtcaccgcggatctcggcggcctcctccgccgagctcctcgcagccccgcgacgcaatatcgtcagccgtgccgcctgagtgcccaagcttaacagactccggattatcaaaagttgatgcgatctcaccaccagtgacaagagctagccgttcaatgccctcaaaatcagcatgctcaatcgcgaggatgccagcatcagcaaagagttcttcagggaagttatagattaactgcctgttgacaaaatagttgatcccatgcgctataatcttctgcaccttctctctcattttctgcttttcagcagcttcaatatctgcaaccttaaacattgaatccacccagacacatgccccatagtcttaaatctgtgtccatagcactgtttgcaaccaaaattttggcattctcaattctcttaggttgcccaatgccaattttcttgtcaagaatgaacccttcatccaaaaaggagtccttaagagatcctccaggtttcttcagaatttgaatggcttccaggctatttgaggagatgccgccatcgtcatcgtcatccttactctctggctccaatactgcgagtgctgagcttcctctaatcccttgcaagctctgcaatggggtggtgattgagcgggtttccaaacaaccagaaagcacgtcgaggaagttctaccggatgggtctcaatgtgatttttttccactggcaagcgagctatgctgttttgttaatcaaggatggggttgtcagtggtgaccaatgccttgagttgttaatggtcgcacttaatgatcatggcaaagctgttgaatctctaaccaattccatcagagaaatgaagaaaaagttgtccgacctggagttagtgatggaagagctggataacgtgaaaaagtcgatgaaggcagccatggttgagaaattgaggaaaacaagaaatcgatagctgcattgaaattgatggagaatgagatgcaaatgctgaaagggccaactaaagtgaaacctaggaatatggcactgtgttttctgcttttggcgttgattgggtggtttgtgatgggacagatgaattggggggaggaagcatccaatcgatttatgctgggaggctaatgaactttgggtggacttttgtatagctagatgtaatcagaactggttaggcaccctgggagtggaagctagatgtaagaagttgattgtgctgcgatttgatgctctggaggatgaagatgggctctgatcgaagcaaagttgtgccactaatatttttttcttattgaacttagtagttttctgtatgaacttctgtttatcagatacccagttgaacaagttcagtactctatttatgatattcaatattagcggttgactttaggaaatcagaaattatttggctcatgataatctcacgtgatcacgctgcatacagaaggtgaagcctgtttgttggcggagtgagaaaacttaagactaggggaaaatgaacttgtaaacaagaattcttgacaggaattatagttggattaagattctttttatgtacctcacttcggcaccaccgtgaaaccatagtgtccccatccatgttgtccggagtcgaataattgtatgcattttttaatcgaggacacaattcaataatcttggatgcagaggatgaactaacagaggacaaagctcacacaaccatggatacagacgtcaatccaaattctgcttcaatttgtaaaggctcttcaaattctacttcgttttgtgaaggtggcagtcgtgaaggtggccatgaacaaaaaaatccaaacacttttgtgagagaaagcaggtcaaaaaggagggctctgtataaagcttgcatagatttggcttgtacgaaaagtgaaaatgatacatacaaaaaaatcataggaaacagggctgctttggcagacttatcaagcaaatatctgcgtcacctaatgcctgtaaaagaggactatctgcttgtggaaattggagatgctcagttgactacagcttatttttgacatcaatgcaccgtgctggtgatatgagtaacacattgatgagtgttatcgtcgaatacttcaacagtatttctggggccctctttgacactgtttctagaccctctaccatttctaaatatgtcatctgtcctttcttgttgaagaaagttaaaaagggttgcaactttaaagttaaagatagtttactgaagactcttgaggaaacccagaaaagagatatgattatgctcctgattctggatggcagtcattggcaacttcttgctaatttcatcgaattactgaagatacataaatgcataaaatttgatgttaattctttcgaaaagatcaaagctagcgaaattgttgcatgcagaatgaaactcacacatatgctgatcaaatctaaacaaaatagtgctgatccatgttatgtggttaaaaaactagatgcgaatataaagaaatatggcattaattcccgaaaggtgatcacaagtaagaatttgacgatgctgatgggactaatagatcaagagattgaagagattaatgcagaaaagagaaagcgaagtggacatccagcaggaggacaaccagaactgaaggacgatgacggtcaactaagggcaaactcagtcaaggctcgcgacgctgaattgcgttgtgaaagggctgtaaagctacgacgactatagcactttgaaaccgctgttgctccccccgacagagaaagcagtttgaaactgctgtggctacctatagcttcaaagctagacaaggctaattcgtccttcagtagagctgattgacataaacgtagttgcagctcttgcgtgttctgctttttcgtgttgctcttccgcgttcgagttccatgcctgcc

SEQ ID NO: 45387 - DNA, 3202 bp, Zea Mays
cgaaaccctcttagcgacacaacgatctacaagaataagggagacattcaaatagtaccaactaatgaagaattaggttgatgagccacactaagaagctatggaagagttattaagcatcttctgagaggaataactaggatctctatgtgtcgtgtccaaaaggtgacgggcccgcgagctagggtttccggtcaccgcggatctcggcggcctcctccgccgagctcctcgcagccccgcgacgcaatatcgtcagccgtgccgcctgagtgcccaagcttaacagactccggattatcaaaagttgatgcgatctcaccaccagtgacaagagctagccgttcaatgccctcaaaatcagcatgctcaatcgcgaggatgccagcatcagcaaagagttcttcagggaagttatagattaactgcctgttgacaaaatagttgatcccatgcgctataatcttctgcaccttctctctcattttctgcttttcagcagcttcaatatctgcaaccttaaacattgaatccacccagacacatgccccatagtcttaaatctgtgtccatagcactgtttgcaaccaaaattttggcattctcaattctcttaggttgcccaatgccaattttcttgtcaagaatgaacccttcatccaaaaaggagtccttaagagatcctccaggtttcttcagaatttgaatggcttccaggctatttgaggagatgccgccatcgtcatcgtcatccttactctctggctccaatactgcgagtgctgagcttcctctaatcccttgcaagctctgcaatggggtggtgattgagcgggtttccaaacaaccagaaagcacgtcgaggaagttctaccggtgcagagccaagaaattggatgggtctcaatgtgatttttttccactggcaagcgagctatgctgttttgttaatcaaggatggggttgtcagtggtgaccaatgccttgagttgttaatggtcgcacttaatgatcatggcaaagctgttgaatctctaaccaattccatcagagaaatgaagaaaaagttgtccgacctggagttagtgatggaagagctggataacgtgaaaaagtcgatgaaggcagccatggttgagaaattgaggaaaacaagaaatcgatagctgcattgaaattgatggagaatgagatgcaaatgctgaaagggccaactaaagtgaaacctaggaatatggcactgtgttttctgcttttggcgttgattgggtggtttgtgatgggacagatgaattggggggaggaagcatccaatcgatttatgctgggaggctaatgaactttgggtggacttttgtatagctagatgtaatcagaactggttaggcaccctgggagtggaagctagatgtaagaagttgattgtgctgcgatttgatgctctggaggatgaagatgggctctgatcgaagcaaagttgtgccactaatatttttttcttattgaacttagtagttttctgtatgaacttctgtttatcagatacccagttgaacaagttcagtactctatttatgatattcaatattagcggttgactttaggaaatcagaaattatttggctcatgataatctcacgtgatcacgctgcatacagaaggtgaagcctgtttgttggcggagtgagaaaacttaagactaggggaaaatgaacttgtaaacaagaattcttgacaggaattatagttggattaagattctttttatgtacctcacttcggcaccaccgtgaaaccatagtgtccccatccatgttgtccggagtcgaataattgtatgcattttttaatcgaggacacaattcaataatcttggatgcagaggatgaactaacagaggacaaagctcacacaaccatggatacagacgtcaatccaaattctgcttcaatttgtaaaggctcttcaaattctacttcgttttgtgaaggtggcagtcgtgaaggtggccatgaacaaaaaaatccaaacacttttgtgagagaaagcaggtcaaaaaggagggctctgtataaagcttgcatagatttggcttgtacgaaaagtgaaaatgatacatacaaaaaaatcataggaaacagggctgctttggcagacttatcaagcaaatatctgcgtcacctaatgcctgtaaaagaggactatctgcttgtggaaattggagatgctcagttgactacagcttatttttgacatcaatgcaccgtgctggtgatatgagtaacacattgatgagtgttatcgtcgaatacttcaacagtatttctggggccctctttgacactgtttctagaccctctaccatttctaaatatgtcatctgtcctttcttgttgaagaaagttaaaaagggttgcaactttaaagttaaagatagtttactgaagactcttgaggaaacccagaaaagagatatgattatgctcctgattctggatggcagtcattggcaacttgtatgtataaactttctccatagggaaattaactattttgactctttgggatcagatttctgcgctgcagaatcattgcttgctaatttcatcgaattactgaagatacataaatgcataaaatttgatgttaattctttcgaaaagatcaaagctagcgaaattgttgcatgcagaatgaaactcacacatatgctgatcaaatctaaacaaaatagtgctgatccatgttatgtggttaaaaaactagatgcgaatataaagaaatatggcattaattcccgaaaggtgatcacaagtaagaatttgacgatgctgatgggactaatagatcaagagattgaagagattaatgcagaaaagagaaagcgaagtggacatccagcaggaggacaaccagaactgaaggacgatgacggtcaactaagggcaaactcagtcaaggctcgcgacgctgaattgcgttgtgaaagggctgtaaagctacgacgactatagcactttgaaaccgctgttgctccccccgacagagaaagcagtttgaaactgctgtggctacctatagcttcaaagctagacaaggctaattcgtccttcagtagagctgattgacataaacgtagttgcagctcttgcgtgttctgctttttcgtgttgctcttccgcgttcgagttccatgcctgcc

SEQ ID NO: 45388 - DNA, 3124 bp, Zea Mays
cgaaaccctcttagcgacacaacgatctacaagaataagggagacattcaaatagtaccaactaatgaagaattaggttgatgagccacactaagaagctatggaagagttattaagcatcttctgagaggaataactaggatctctatgtgtcgtgtccaaaaggtgacgggcccgcgagctagggtttccggtcaccgcggatctcggcggcctcctccgccgagctcctcgcagccccgcgacgcaatatcgtcagccgtgccgcctgagtgcccaagcttaacagactccggattatcaaaagttgatgcgatctcaccaccagtgacaagagctagccgttcaatgccctcaaaatcagcatgctcaatcgcgaggatgccagcatcagcaaagagttcttcagggaagttatagattaactgcctgttgacaaaatagttgatcccatgcgctataatcttctgcaccttctctctcattttctgcttttcagcagcttcaatatctgcaaccttaaacattgaatccacccagacacatgccccatagtcttaaatctgtgtccatagcactgtttgcaaccaaaattttggcattctcaattctcttaggttgcccaatgccaattttcttgtcaagaatgaacccttcatccaaaaaggagtccttaagagatcctccaggtttcttcagaatttgaatggcttccaggctatttgaggagatgccgccatcgtcatcgtcatccttactctctggctccaatactgcgagtgctgagcttcctctaatcccttgcaagctctgcaatggggtggtgattgagcgggtttccaaacaaccagaaagcacgtcgaggaagttctaccggtgcagagccaagaaattggatgggtctcaatgtgatttttttccactggcaagcgagctatgctgttttgttaatcaaggatggggttgtcagtggtgaccaatgccttgagttgttaatggtcgcacttaatgatcatggcaaagctgttgaatctctaaccaattccatcagagaaatgaagaaaaagttgtccgacctggagttagtgatggaagagctggataacgtgaaaaagtcgatgaaggcagccatggttgagaaattgaggaaaacaagaaatcgatagctgcattgaaattgatggagaatgagatgcaaatgctgaaagggccaactaaagtgaaacctaggaatatggcactgtgttttctgcttttggcgttgattgggtggtttgtgatgggacagatgaattggggggaggaagcatccaatcgatttatgctgggaggctaatgaactttgggtggacttttgtatagctagatgtaatcagaactggttaggcaccctgggagtggaagctagatgtaagaagttgattgtgctgcgatttgatgctctggaggatgaagatgggctctgatcgaagcaaagttgtgccactaatatttttttcttattgaacttagtagttttctgtatgaacttctgtttatcagatacccagttgaacaagttcagtactctatttatgatattcaatattagcggttgactttaggaaatcagaaattatttggctcatgataatctcacgtgatcacgctgcatacagaaggtgaagcctgtttgttggcggagtgagaaaacttaagactaggggaaaatgaacttgtaaacaagaattcttgacaggaattatagttggattaagattctttttatgtacctcacttcggcaccaccgtgaaaccatagtgtccccatccatgttgtccggagtcgaataattgtatgcattttttaatcgaggacacaattcaataatcttggatgcagaggatgaactaacagaggacaaagctcacacaaccatggatacagacgtcaatccaaattctgcttcaatttgtaaaggctcttcaaattctacttcgttttgtgaaggtggcagtcgtgaaggtggccatgaacaaaaaaatccaaacacttttgtgagagaaagcaggtcaaaaaggagggctctgtataaagcttgcatagatttggcttgtacgaaaagtgaaaatgatacatacaaaaaaatcataggaaacagggctgctttggcagacttatcaagcaaatatctgcgtcacctaatgcctgtaaaagaggactatctgcttgtggaaattggagatgctcagttgactacagcttatttttgacatcaatgcaccgtgctggtgatatgagtaacacattgatgagtgttatcgtcgaatacttcaacagtatttctggggccctctttgacactgtttctagaccctctaccatttctaaatatgtcatctgtcctttcttgttgaagaaagttaaaaagggttgcaactttaaagttaaagatagtttactgaagactcttgaggaaacccagaaaagagatatgattatgctcctgattctggatggcagtcattggcaacttcttgctaatttcatcgaattactgaagatacataaatgcataaaatttgatgttaattctttcgaaaagatcaaagctagcgaaattgttgcatgcagaatgaaactcacacatatgctgatcaaatctaaacaaaatagtgctgatccatgttatgtggttaaaaaactagatgcgaatataaagaaatatggcattaattcccgaaaggtgatcacaagtaagaatttgacgatgctgatgggactaatagatcaagagattgaagagattaatgcagaaaagagaaagcgaagtggacatccagcaggaggacaaccagaactgaaggacgatgacggtcaactaagggcaaactcagtcaaggctcgcgacgctgaattgcgttgtgaaagggctgtaaagctacgacgactatagcactttgaaaccgctgttgctccccccgacagagaaagcagtttgaaactgctgtggctacctatagcttcaaagctagacaaggctaattcgtccttcagtagagctgattgacataaacgtagttgcagctcttgcgtgttctgctttttcgtgttgctcttccgcgttcgagttccatgcctgcc

SEQ ID NO: 45389 - DNA, 3206 bp, Zea Mays
cgaaaccctcttagcgacacaacgatctacaagaataagggagacattcaaatagtaccaactaatgaagaattaggttgatgagccacactaagaagctatggaagagttattaagcatcttctgagaggaataactaggatctctatgtgtcgtgtccaaaaggtgacgggcccgcgagctagggtttccggtcaccgcggatctcggcggcctcctccgccgagctcctcgcagccccgcgacgcaatatcgtcagccgtgccgcctgagtgcccaagcttaacagactccggattatcaaaagttgatgcgatctcaccaccagtgacaagagctagccgttcaatgccctcaaaatcagcatgctcaatcgcgaggatgccagcatcagcaaagagttcttcagggaagttatagattaactgcctgttgacaaaatagttgatcccatgcgctataatcttctgcaccttctctctcattttctgcttttcagcagcttcaatatctgcaaccttaaacattgaatccacccagacacatgccccatagtcttaaatctgtgtccatagcactgtttgcaaccaaaattttggcattctcaattctcttaggttgcccaatgccaattttcttgtcaagaatgaacccttcatccaaaaaggagtccttaagagatcctccaggtttcttcagaatttgaatggcttccaggctatttgaggagatgccgccatcgtcatcgtcatccttactctctggctccaatactgcgagtgctgagcttcctctaatcccttgcaagctctgcaatggggtggtgattgagcgggtttccaaacaaccagaaagcacgtcgaggaagttctaccggtgcagagccaagaaattggatgggtctcaatgtgatttttttccactggcaagcgagctatgctgttttgttaatcaaggatggggttgtcagtggtgaccaatgccttgagttgttaatggtcgcacttaatgatcatggcaaagctgttgaatctctaaccaattccatcagagaaatgaagaaaaagttgtccgacctggagttagtgatggaagagctggataacgtgaaaaagtcgatgaaggcagccatggttgagaaattgaggaaaacaagaaatcgatagctgcattgaaattgatggagaatgagatgcaaatgctgaaagggccaactaaagtgaaacctaggaatatggcactgtgttttctgcttttggcgttgattgggtggtttgtgatgggacagatgaattggggggaggaagcatccaatcgatttatgctgggaggctaatgaactttgggtggacttttgtatagctagatgtaatcagaactggttaggcaccctgggagtggaagctagatgtaagaagttgattgtgctgcgatttgatgctctggaggatgaagatgggctctgatcgaagcaaagttgtgccactaatatttttttcttattgaacttagtagttttctgtatgaacttctgtttatcagatacccagttgaacaagttcagtactctatttatgatattcaatattagcggttgactttaggaaatcagaaattatttggctcatgataatctcacgtgatcacgctgcatacagaaggtgaagcctgtttgttggcggagtgagaaaacttaagactaggggaaaatgaacttgtaaacaagaattcttgacaggaattatagttggattaagattctttttatgtacctcacttcggcaccaccgtgaaaccatagtgtccccatccatgttgtccggagtcgaataattgtatgcattttttaatcgaggacacaattcaataatcttggatgcagaggatgaactaacagaggacaaagctcacacaaccatggatacagacgtcaatccaaattctgcttcaatttgtaaaggctcttcaaattctacttcgttttgtgaaggtggcagtcgtgaaggtggccatgaacaaaaaaatccaaacacttttgtgagagaaagcaggtcaaaaaggagggctctgtataaagcttgcatagatttggcttgtacgaaaagtgaaaatgatacatacaaaaaaatcataggaaacagggctgctttggcagacttatcaagcaaatatctgcgtcacctaatgcctgtaaaagaggactatctgcttgtggaaattggagatgctcagttgactacagcttatttttgacatcaatgcaccgtgctggtgatatgagtaacacattgatgagtgttatcgtcgaatacttcaacagtatttctggggccctctttgacactgtttctagaccctctaccatttctaaatatgtcatctgtcctttcttgttgaagaaagttaaaaagggttgcaactttaaagttaaagatagtttactgaagactcttgaggaaacccagaaaagagatatgattatgctcctgattctggatggcagtcattggcaacttgtatgtataaactttctccatagggaaattaactattttgactctttgggatcagatttctgcgctgcagaatcattgcattgattgtggttttttcacaatactgtacatgattgcatggaatggaaaacatttgcggttagatgataagatcaaagctagcgaaattgttgcatgcagaatgaaactcacacatatgctgatcaaatctaaacaaaatagtgctgatccatgttatgtggttaaaaaactagatgcgaatataaagaaatatggcattaattcccgaaaggtgatcacaagtaagaatttgacgatgctgatgggactaatagatcaagagattgaagagattaatgcagaaaagagaaagcgaagtggacatccagcaggaggacaaccagaactgaaggacgatgacggtcaactaagggcaaactcagtcaaggctcgcgacgctgaattgcgttgtgaaagggctgtaaagctacgacgactatagcactttgaaaccgctgttgctccccccgacagagaaagcagtttgaaactgctgtggctacctatagcttcaaagctagacaaggctaattcgtccttcagtagagctgattgacataaacgtagttgcagctcttgcgtgttctgctttttcgtgttgctcttccgcgttcgagttccatgcctgcc

SEQ ID NO: 45390 - DNA, 3397 bp, Zea Mays
cgaaaccctcttagcgacacaacgatctacaagaataagggagacattcaaatagtaccaactaatgaagaattaggttgatgagccacactaagaagctatggaagagttattaagcatcttctgagaggaataactaggatctctatgtgtcgtgtccaaaaggtgacgggcccgcgagctagggtttccggtcaccgcggatctcggcggcctcctccgccgagctcctcgcagccccgcgacgcaatatcgtcagccgtgccgcctgagtgcccaagcttaacagactccggattatcaaaagttgatgcgatctcaccaccagtgacaagagctagccgttcaatgccctcaaaatcagcatgctcaatcgcgaggatgccagcatcagcaaagagttcttcagggaagttatagattaactgcctgttgacaaaatagttgatcccatgcgctataatcttctgcaccttctctctcattttctgcttttcagcagcttcaatatctgcaaccttaaacattgaatccacccagacacatgccccatagtcttaaatctgtgtccatagcactgtttgcaaccaaaattttggcattctcaattctcttaggttgcccaatgccaattttcttgtcaagaatgaacccttcatccaaaaaggagtccttaagagatcctccaggtttcttcagaatttgaatggcttccaggctatttgaggagatgccgccatcgtcatcgtcatccttactctctggctccaatactgcgagtgctgagcttcctctaatcccttgcaagctctgcaatggggtggtgattgagcgggtttccaaacaaccagaaagcacgtcgaggaagttctaccggtgcagagccaagaaattggatgggtctcaatgtgatttttttccactggcaagcgagctatgctgttttgttaatcaaggatggggttgtcagtggtgaccaatgccttgagttgttaatggtcgcacttaatgatcatggcaaagctgttgaatctctaaccaattccatcagagaaatgaagaaaaagttgtccgacctggagttagtgatggaagagctggataacgtgaaaaagtcgatgaaggcagccatggttgagaaattgaggaaaacaagaaatcgatagctgcattgaaattgatggagaatgagatgcaaatgctgaaagggccaactaaagtgaaacctaggaatatggcactgtgttttctgcttttggcgttgattgggtggtttgtgatgggacagatgaattggggggaggaagcatccaatcgatttatgctgggaggctaatgaactttgggtggacttttgtatagctagatgtaatcagaactggttaggcaccctgggagtggaagctagatgtaagaagttgattgtgctgcgatttgatgctctggaggatgaagatgggctctgatcgaagcaaagttgtgccactaatatttttttcttattgaacttagtagttttctgtatgaacttctgtttatcagatacccagttgaacaagttcagtactctatttatgatattcaatattagcggttgactttaggaaatcagaaattatttggctcatgataatctcacgtgatcacgctgcatacagaaggtgaagcctgtttgttggcggagtgagaaaacttaagactaggggaaaatgaacttgtaaacaagaattcttgacaggaattatagttggattaagattctttttatgtacctcacttcggcaccaccgtgaaaccatagtgtccccatccatgttgtccggagtcgaataattgtatgcattttttaatcgaggacacaattcaataatcttggatgcagaggatgaactaacagaggacaaagctcacacaaccatggatacagacgtcaatccaaattctgcttcaatttgtaaaggctcttcaaattctacttcgttttgtgaaggtggcagtcgtgaaggtggccatgaacaaaaaaatccaaacacttttgtgagagaaagcaggtcaaaaaggagggctctgtataaagcttgcatagatttggcttgtacgaaaagtgaaaatgatacatacaaaaaaatcataggaaacagggctgctttggcagacttatcaagcaaatatctgcgtcacctaatgcctgtaaaagaggactatctgcttgtggaaattggagatgctcagttgactacagcttatttttgacatcaatgcaccgtgctggtgatatgagtaacacattgatgagtgttatcgtcgaatacttcaacagtatttctggggccctctttgacactgtttctagaccctctaccatttctaaatatgtcatctgtcctttcttgttgaagaaagttaaaaagggttgcaactttaaagttaaagatagtttactgaagactcttgaggaaacccagaaaagagatatgattatgctcctgattctggatggcagtcattggcaacttgtatgtataaactttctccatagggaaattaactattttgactctttgggatcagatttctgcgctgcagaatcattgcttgctaatttcatcgaattactgaagatacataaatgcataaaatttgatgttaattctttcgaaaaggtcagagtaaaatgtcctaaacagtccaacaagtatggatgcttcactagtcacacttttcactagtaacactttatttcaagttccaaaatgtcatctgattacatttctttattgacaagcattgattgtggttttttcacaatactgtacatgattgcatggaatggaaaacatttgcggttagatgataagatcaaagctagcgaaattgttgcatgcagaatgaaactcacacatatgctgatcaaatctaaacaaaatagtgctgatccatgttatgtggttaaaaaactagatgcgaatataaagaaatatggcattaattcccgaaaggtgatcacaagtaagaatttgacgatgctgatgggactaatagatcaagagattgaagagattaatgcagaaaagagaaagcgaagtggacatccagcaggaggacaaccagaactgaaggacgatgacggtcaactaagggcaaactcagtcaaggctcgcgacgctgaattgcgttgtgaaagggctgtaaagctacgacgactatagcactttgaaaccgctgttgctccccccgacagagaaagcagtttgaaactgctgtggctacctatagcttcaaagctagacaaggctaattcgtccttcagtagagctgattgacataaacgtagttgcagctcttgcgtgttctgctttttcgtgttgctcttccgcgttcgagttccatgcctgcc

SEQ ID NO: 45391 - DNA, 3318 bp, Zea Mays
cgaaaccctcttagcgacacaacgatctacaagaataagggagacattcaaatagtaccaactaatgaagaattaggttgatgagccacactaagaagctatggaagagttattaagcatcttctgagaggaataactaggatctctatgtgtcgtgtccaaaaggtgacgggcccgcgagctagggtttccggtcaccgcggatctcggcggcctcctccgccgagctcctcgcagccccgcgacgcaatatcgtcagccgtgccgcctgagtgcccaagcttaacagactccggattatcaaaagttgatgcgatctcaccaccagtgacaagagctagccgttcaatgccctcaaaatcagcatgctcaatcgcgaggatgccagcatcagcaaagagttcttcagggaagttatagattaactgcctgttgacaaaatagttgatcccatgcgctataatcttctgcaccttctctctcattttctgcttttcagcagcttcaatatctgcaaccttaaacattgaatccacccagacacatgccccatagtcttaaatctgtgtccatagcactgtttgcaaccaaaattttggcattctcaattctcttaggttgcccaatgccaattttcttgtcaagaatgaacccttcatccaaaaaggagtccttaagagatcctccaggtttcttcagaatttgaatggcttccaggctatttgaggagatgccgccatcgtcatcgtcatccttactctctggctccaatactgcgagtgctgagcttcctctaatcccttgcaagctctgcaatggggtggtgattgagcgggtttccaaacaaccagaaagcacgtcgaggaagttctaccggtgcagagccaagaaattggatgggtctcaatgtgatttttttccactggcaagcgagctatgctgttttgttaatcaaggatggggttgtcagtggtgaccaatgccttgagttgttaatggtcgcacttaatgatcatggcaaagctgttgaatctctaaccaattccatcagagaaatgaagaaaaagttgtccgacctggagttagtgatggaagagctggataacgtgaaaaagtcgatgaaggcagccatggttgagaaattgaggaaaacaagaaatcgatagctgcattgaaattgatggagaatgagatgcaaatgctgaaagggccaactaaagtgaaacctaggaatatggcactgtgttttctgcttttggcgttgattgggtggtttgtgatgggacagatgaattggggggaggaagcatccaatcgatttatgctgggaggctaatgaactttgggtggacttttgtatagctagatgtaatcagaactggttaggcaccctgggagtggaagctagatgtaagaagttgattgtgctgcgatttgatgctctggaggatgaagatgggctctgatcgaagcaaagttgtgccactaatatttttttcttattgaacttagtagttttctgtatgaacttctgtttatcagatacccagttgaacaagttcagtactctatttatgatattcaatattagcggttgactttaggaaatcagaaattatttggctcatgataatctcacgtgatcacgctgcatacagaaggtgaagcctgtttgttggcggagtgagaaaacttaagactaggggaaaatgaacttgtaaacaagaattcttgacaggaattatagttggattaagattctttttatgtacctcacttcggcaccaccgtgaaaccatagtgtccccatccatgttgtccggagtcgaataattgtatgcattttttaatcgaggacacaattcaataatcttggatgcagaggatgaactaacagaggacaaagctcacacaaccatggatacagacgtcaatccaaattctgcttcaatttgtaaaggctcttcaaattctacttcgttttgtgaaggtggcagtcgtgaaggtggccatgaacaaaaaaatccaaacacttttgtgagagaaagcagttttcctaaaatgcagaaaagaggactatctgcttgtggaaattggagatgctcagttgactacagcttatttttgacatcaatgcaccgtgctggtgatatgagtaacacattgatgagtgttatcgtcgaatacttcaacagtatttctggggccctctttgacactgtttctagaccctctaccatttctaaatatgtcatctgtcctttcttgttgaagaaagttaaaaagggttgcaactttaaagttaaagatagtttactgaagactcttgaggaaacccagaaaagagatatgattatgctcctgattctggatggcagtcattggcaacttgtatgtataaactttctccatagggaaattaactattttgactctttgggatcagatttctgcgctgcagaatcattggtgaggcctgactctttgggatcagatttctgcgctgcaaaatcattgatgaggccttttaaatcctgttataagtatagttgctttgcttaggacatgctaacacttgccaagtttcatcctgttgatattgcagcttgctaatttcatcgaattactgaagatacataaatgcataaaatttgatgttaattctttcgaaaaggtcagagtaaaatgtcctaaacagtccaacaacattgattgtggttttttcacaatactgtacatgattgcatggaatggaaaacatttgcggttagatgataagatcaaagctagcgaaattgttgcatgcagaatgaaactcacacatatgctgatcaaatctaaacaaaatagtgctgatccatgttatgtggttaaaaaactagatgcgaatataaagaaatatggcattaattcccgaaaggtgatcacaagtaagaatttgacgatgctgatgggactaatagatcaagagattgaagagattaatgcagaaaagagaaagcgaagtggacatccagcaggaggacaaccagaactgaaggacgatgacggtcaactaagggcaaactcagtcaaggctcgcgacgctgaattgcgttgtgaaagggctgtaaagctacgacgactatagcactttgaaaccgctgttgctccccccgacagagaaagcagtttgaaactgctgtggctacctatagcttcaaagctagacaaggctaattcgtccttcagtagagctgattgacataaacgtagttgcagctcttgcgtgttctgctttttcgtgttgctcttccgcgttcgagttccatgcctgcc

SEQ ID NO: 45392 - DNA, 1194 bp, Zea Mays
aaaaacacaaaacgcactgggtgcaccgtgcacgaggcccatccctccacggcccggcctgctttcctgaggccagttctgcgcccaccacgaagcgcaccaagatccgacggctagaaatctccttccgccgcctatataaccagcagcgaaatgcgcgtggtcaaaccctagccgcctgcctctcctcctccagagctcgtcgccaccggccaccgccaccctcgatcacgccgtccgtcgaggtaaggtcagcatggtgagggtcagtgtgctcaacgatgcgctcaagtccatgtacaacgctgagaagatcggcaagaggcaggtcatgatcaggccgtcgtccaaggtcatcatcaagttcctgacggtcatgcagcgccacggctacattggagagttcgagtacgttgatgaccaccgatcgggcaagatcgtggtcgaactcaacgggaggctgaacaagtgcggcgtcatcagccctcgctttgatatcggcgtgaaagacattgagggatggactgcaaggctgctcccgtccaggcagttcggatacatcgtcctcacaacttcggcaggcatcatggaccacgaggaggcccgccggaagagcgtaggaggcaaggttctaggtttcttctattgaagaagctgagaatctttgttatggcctgcctgcctgtcttactctctcagactagagtacctgttattttactttaatatgtctctctcagactagagcgccttcttttacttgaatattggtgactgcattggtctttcactttaaaatcggtgactgcattgatcgaattatctgagccggttcttcagatactagttggcacaacccttagttgcccatggtaatttgagcagttcggattactaaaaagattagtcacggacatcttattttcccaaggtgctcaaacagtcaaactaactgcaccttggggtcctacatttcgtgcgtgcaaggcaaatgcgctgcaattcgcaagtaaacagcaaagcgaaatcttgaggccaacgtaggtataagcgtggtaatgggttggtaaagtgtttcataataataaggtgctgtttggttttttatatttgtaacatggggtgctgtttggcagatttgtaatgtgatggtaaccgataatgttgcattggatagcaaattagaaagtgata

SEQ ID NO: 45393 - DNA, 2008 bp, Zea Mays
gttgctcttttaataagaaaaaattaggcagaactctgcttttaagaaagcgtagtacaacaagagagtatggccacaaagggatcagcagaactggctggggatgccagcatacaagtagagtatgctgtctggctctcgctgtaaacttgaagaatcatcagtatggtagcatcactcctccactgaaattatgaaacattaaatgatgtatgatgaggagcccttgggcggaacgaactgcattcgtcaagataacaggagcctgtccgagaactggagcggcgtcggtttggaccatgatggcctagaggacgacgaggtggccttctcggatttcgacaaccacaacaccttctcttcgtcgaacagcgagctccatctctcttcgtcgaacgagcacctgcggaacagaagggcgtgcagaaaccatccgtccttccttcaacccaccgcccttgctgctgacggtttgatcaggtcaaccagcaggatgactgacttgactgaattcaaggtcgttacgacgtgcaatacctgcaagcctgcgacgatcaatcgtggggacgacgccaagtccttgaagaaccttgattgcaccgtgccgctgtcaaactaccaccccactgtcgccgcctttccccggacaaggcacaaaggaccacaacatatcctctcctggttgctaccaaagtcaaagaggaagccgaggccagatgtgtcgccgaccaccgtggaatgtgagaacatgtcgcagcttctcaaggactggggcgtgttctcgctggactccctgaagaaagaggttgtcgaggccaacgagcacagggacgccgccctgcaagaagtatcagagatgaaactatcactcggagaactgaccaccaagatagcgagcctggaagcgtactgttcggagctgaagaaggctctaaagcaagcgacaagcgcgaagagcatgcagtctcatcactcgaagagatcgtcgaccaggtcggttagcgggagtcccttgcccgtcagtcacgaggttatggtggaagggtttgtgcaggtcgtgtccgaggcccgcctctccgtaaaacagttctgcaaggcgttgatacagcaggtcgaagaagacgccgacaacgggctatcagagaagttaaatctactcctgcagccgtaccagatcacgctcggcgacaggcgcccgaagctggtgctgtaccacctggaggctctgatgaaccaggcgatgtaccaggacttcgagaactgcgcgttccagaagaacgggccgcgcaggtgcctcgaccctaggcaggagcggcaggagagcttcgcgtcgttcgtggcgctgcgcaacctgagctggagcgaggtcctgaggaagggcaccaggcaccactgcaaggagctcagccgcttctgcgaccagaagatgggctgcgtggcgtcggccctgatgaactggtcgcggccgtgttgggccgagccgctgctgcagtgcttcttcgtggcgtgcaagtgcgtctggctgctccacctgctggccttctccttcagcccgccgctggcgatcctgcgcgtcgaggagggcagggcgttcgagcagacgtacatggaggacgtgctgctcgacatgcagcggtcgcaggaccatgagccgccgccatcggcgcgggtgaaactcatggtggtgcctgggttctacgtccaggacaggctgctcaagtgcagggtgctctgcagttacatcagcggctagatctttgttgctggtcgaaggatgttctagtgttcttttgactgattgttagtgtgatgcagtagcatttgttgttcagctaggttgcaactgggatgccagaatgccattttgaccgttgacgtgcctgtcagatgtatgcatggttttaactacacattcctccaactatcgtgcagcttagaagcaagtgattaatcgattcatcatgttggtcacacacgaatactaacgaaaccaaacaaaaaaaaaaaa

SEQ ID NO: 45394 - DNA, 2656 bp, Zea Mays
atggtacttcaacttctaccagtgaattccctatcttgtaagcaaattgagaggcgatcatgcatttctttggaggcatttatacgtgattactttttatgtgagtcccctgttatactcagtggatgcattgatcattggcctgcaaggaaaaagtggaaggacataaagtacctagagagtgtagctggagatcggactattcctgttcaggttggaaaaaattatgcatgtactgagttgaaacaggagcttatcacattttctcaatttcttgagaggatgtggtcaagtgattctgcaaacttggcatatattgcgcagcatcaattgtttgaccagataaaggagctccacgaagatattgctgttcctgagtactgttcagctggtggtggcaaactccagtcacttaatgcttggttcggccctcatgggacaataactcctttgcatcatgacccacatcacaacctttttgctcaggttttgggaaggaagtatgttagactctatcctgcttctacatctgtgggcctataccctaacacagaaagcatgctaagcaatactagtgagattttctcctggacgccctgatcaaccctatcattcacgttcaacttttgcttcgttacaatccaaatccattccgtagcgtgttgtgatcctgaagctgctctctgcaccgcccaataaggttaattgagttctattgcaatcaaaaatcggtctgcatgtgtgacctctgttgctgcgtgtgatctgtcttgacaggtagacctcgacaacactgacggaaaagagtacccggagactgcagctcttgagttcgtggactgcgtattggaggaagatgtatgatgaggagcccttgggcggaacgaactgcattcgtcaagataacaggagcctgtccgagaactggagcggcgtcggtttggaccatgatggcctagaggacgacgaggtggccttctcggatttcgacaaccacaacaccttctcttcgtcgaacagcgagctccatctctcttcgtcgaacgagcacctgcggaacagaagggcgtgcagaaaccatccgtccttccttcaacccaccgcccttgctgctgacggtttgatcaggtcaaccagcaggatgactgacttgactgaattcaaggtcgttacgacgtgcaatacctgcaagcctgcgacgatcaatcgtggggacgacgccaagtccttgaagaaccttgattgcaccgtgccgctgtcaaactaccaccccactgtcgccgcctttccccggacaaggcacaaaggaccacaacatatcctctcctggttgctaccaaagtcaaagaggaagccgaggccagatgtgtcgccgaccaccgtggaatgtgagaacatgtcgcagcttctcaaggactggggcgtgttctcgctggactccctgaagaaagaggttgtcgaggccaacgagcacagggacgccgccctgcaagaagtatcagagatgaaactatcactcggagaactgaccaccaagatagcgagcctggaagcgtactgttcggagctgaagaaggctctaaagcaagcgacaagcgcgaagagcatgcagtctcatcactcgaagagatcgtcgaccaggtcggttagcgggagtcccttgcccgtcagtcacgaggttatggtggaagggtttgtgcaggtcgtgtccgaggcccgcctctccgtaaaacagttctgcaaggcgttgatacagcaggtcgaagaagacgccgacaacgggctatcagagaagttaaatctactcctgcagccgtaccagatcacgctcggcgacaggcgcccgaagctggtgctgtaccacctggaggctctgatgaaccaggcgatgtaccaggacttcgagaactgcgcgttccagaagaacgggccgcgcaggtgcctcgaccctaggcaggagcggcaggagagcttcgcgtcgttcgtggcgctgcgcaacctgagctggagcgaggtcctgaggaagggcaccaggcaccactgcaaggagctcagccgcttctgcgaccagaagatgggctgcgtggcgtcggccctgatgaactggtcgcggccgtgttgggccgagccgctgctgcagtgcttcttcgtggcgtgcaagtgcgtctggctgctccacctgctggccttctccttcagcccgccgctggcgatcctgcgcgtcgaggagggcagggcgttcgagcagacgtacatggaggacgtgctgctcgacatgcagcggtcgcaggaccatgagccgccgccatcggcgcgggtgaaactcatggtggtgcctgggttctacgtccaggacaggctgctcaagtgcagggtgctctgcagttacatcagcggctagatctttgttgctggtcgaaggatgttctagtgttcttttgactgattgttagtgtgatgcagtagcatttgttgttcagctaggttgcaactgggatgccagaatgccattttgaccgttgacgtgcctgtcagatgtatgcatggttttaactacacattcctccaactatcgtgcagcttagaagcaagtgattaatcgattcatcatgttggtcacacacgaatactaacgaaaccaaacaaaaaaaaaaaa

SEQ ID NO: 45395 - DNA, 900 bp, Zea Mays
atggtacttcaacttctaccagtgaattccctatcttgaaaaagtggaaggacataaagtacctagagagtgtagctggagatcggactattcctgttcaggttggaaaaaattatgcatgtactgagttgaaacaggagcttatcacattttctcaatttcttgagaggatgtggtcaagtgattctgcaaacttggcatatattgcgcagcatcaattgtttgaccagataaaggagctccacgaagatattgctgttcctgagtactgttcagctggtggtggcaaactccagtcacttaatgcttggttcggccctcatgggacaataactcctttgcatcatgacccacatcacaacctttttgctcaggttttgggaaggaagtatgttagactctatcctgcttctacatctgtgggcctataccctaacacagaaagcatgctaagcaatactagtgaggtagacctcgacaacactgacggaaaagagtacccggagactgcagctcttgagttcgtggactgcgtattggaggaaggtgacctgctttacattcccccgaaatggtggcgttacgtgagatctctctctattagcttttctgttagctttcggtggcgaacatcacagcttccttgaggggaggttcataacgatggttttgacaaatttgatcgtacgtccacgatgtcgttccaatcatcctattggtagagacttaataagaagacttcattgagctgagcccatatttcgtggtctaagtgttgtgtgcggtcgcctcactagactgggattgtaaattgttttcacgacaatgattggtttcaaacatactaagcggtactatcaggtactagtgtggccgttttatattgtgaactgattctgc

SEQ ID NO: 45396 - DNA, 1133 bp, Zea Mays
atggtacttcaacttctaccagtgaattccctatcttgtaagcaaattgagaggcgatcatgcatttctttggaggcatttatacgtgattactttttatgtgagtcccctgttatactcagtggatgcattgatcattggcctgcaaggaaaaagtggaaggacataaagtacctagagagtgtagctggagatcggactattcctgttcaggttggaaaaaattatgcatgtactgagttgaaacaggagcttatcacattttctcaatttcttgagaggatgtggtcaagtgattctgcaaacttggcatatattgcgcagcatcaattgtttgaccagataaaggagctccacgaagatattgctgttcctgagtactgttcagctggtggtggcaaactccagtcacttaatgcttggttcggccctcatgggacaataactcctttgcatcatgacccacatcacaacctttttgctcaggttttgggaaggaagtatgttagactctatcctgcttctacatctgtgggcctataccctaacacagaaagcatgctaagcaatactagtgagattttctcctggacgccctgatcaaccctatcattcacgttcaacttttgcttcgttacaatccaaatccattccgtagcgtgttgtgatcctgaagctgctctctgcaccgcccaataaggtagacctcgacaacactgacggaaaagagtacccggagactgcagctcttgagttcgtggactgcgtattggaggaaggtgacctgctttacattcccccgaaatggtggcgttacgtgagatctctctctattagcttttctgttagctttcggtggcgaacatcacagcttccttgaggggaggttcataacgatggttttgacaaatttgatcgtacgtccacgatgtcgttccaatcatcctattggtagagacttaataagaagacttcattgagctgagcccatatttcgtggtctaagtgttgtgtgcggtcgcctcactagactgggattgtaaattgttttcacgacaatgattggtttcaaacatactaagcggtactatcaggtactagtgtggccgttttatattgtgaactgattctgc

SEQ ID NO: 45397 - DNA, 1004 bp, Zea Mays
atggtacttcaacttctaccagtgaattccctatcttgtaagcaaattgagaggcgatcatgcatttctttggaggcatttatacgtgattactttttatgtgagtcccctgttatactcagtggatgcattgatcattggcctgcaaggaaaaagtggaaggacataaagtacctagagagtgtagctggagatcggactattcctgttcagataaaggagctccacgaagatattgctgttcctgagtactgttcagctggtggtggcaaactccagtcacttaatgcttggttcggccctcatgggacaataactcctttgcatcatgacccacatcacaacctttttgctcaggttttgggaaggaagtatgttagactctatcctgcttctacatctgtgggcctataccctaacacagaaagcatgctaagcaatactagtgagattttctcctggacgccctgatcaaccctatcattcacgttcaacttttgcttcgttacaatccaaatccattccgtagcgtgttgtgatcctgaagctgctctctgcaccgcccaataaggtagacctcgacaacactgacggaaaagagtacccggagactgcagctcttgagttcgtggactgcgtattggaggaaggtgacctgctttacattcccccgaaatggtggcgttacgtgagatctctctctattagcttttctgttagctttcggtggcgaacatcacagcttccttgaggggaggttcataacgatggttttgacaaatttgatcgtacgtccacgatgtcgttccaatcatcctattggtagagacttaataagaagacttcattgagctgagcccatatttcgtggtctaagtgttgtgtgcggtcgcctcactagactgggattgtaaattgttttcacgacaatgattggtttcaaacatactaagcggtactatcaggtactagtgtggccgttttatattgtgaactgattctgc

SEQ ID NO: 45398 - DNA, 919 bp, Zea Mays
atggtacttcaacttctaccagtgaattccctatcttgtaagcaaattgagaggcgatcatgcatttctttggaggcatttatacgtgattactttttatgtgagtcccctgttatactcagtggatgcattgatcattggcctgcaaggaaaaagtggaaggacataaagtacctagagagtgtagctggagatcggactattcctgttcaggttggaaaaaattatgcatgtactgagttgaaacaggagcttatcacattttctcaatttcttgagaggatgtggtcaagtgattctgcaaacttggcatatattgcgcagcatcaattgtttgaccagataaaggagctccacgaagatattgctgttcctgagtactgttcagctggtggtggcaaactccagtcacttaatgcttggttcggccctcatgggacaataactcctttgcatcatgacccacatcacaacctttttgctcaggtagacctcgacaacactgacggaaaagagtacccggagactgcagctcttgagttcgtggactgcgtattggaggaaggtgacctgctttacattcccccgaaatggtggcgttacgtgagatctctctctattagcttttctgttagctttcggtggcgaacatcacagcttccttgaggggaggttcataacgatggttttgacaaatttgatcgtacgtccacgatgtcgttccaatcatcctattggtagagacttaataagaagacttcattgagctgagcccatatttcgtggtctaagtgttgtgtgcggtcgcctcactagactgggattgtaaattgttttcacgacaatgattggtttcaaacatactaagcggtactatcaggtactagtgtggccgttttatattgtgaactgattctgc

SEQ ID NO: 45399 - DNA, 1493 bp, Zea Mays
atggtacttcaacttctaccagtgaattccctatcttgtaagcaaattgagaggcgatcatgcatttctttggaggcatttatacgtgattactttttatgtgagtcccctgttatactcagtggatgcattgatcattggcctgcaaggaaaaagtggaaggacataaagtacctagagagtgtagctggagatcggactattcctgttcaggtaaaattgcaaacaaattatggttttatctgggggaaaagcatagtaaaacttcatcccgcaagtgcattgatccagtaatttggccggttgtcattaagtacgcaagcttatttttcaggacttaagttcagctggtttcaggaagaatggaaatataatagtcttgtccgttccataatttatcctttgtattatttatgctacttaagttgactagtgaagttgtgaatttgtggtgcagcataaggttagtttcaaattccaggtgggaaaaccaacttctgagttgctaggacactaaagatccttaactcttcgaactcaacctaaaatttattacatttggaatatcaaattattacacatggatatctgcatcacacgctccattagttaacttgctgtcataattgatggcatcagcaaaacatttttttaactactgccctcttctctttttcataccttaattataacttctgacaccatgcttctgcttacagaattttcttcaccatctggtatgaaagtattaattagacaagtataagaccaaatgtttcaatggctcatcattaaaagttgtctaacttttggattaccagatttgccttgctcaatcatctgcattagatttctagtattcgtttaaagaaatgtgtggcctttattatccatggaaaataaatcctgtccataagcaagtgctgcttctctagagcgtgggctgtactgctgtagcttctttttggttaagttaggtctgctttctggttgaatataccgtcagcaatacttcatggtgcttcaacattcagtgataaatggtccaagcgcactcataacaaatggtgccacaggttggaaaaaattatgcatgtactgagttgaaacaggagcttatcacattttctcaatttcttgagaggatgtggtcaagtgattctgcaaacttggcatatattgcgcagcatcaattgtttgaccagataaaggagctccacgaagatattgctgttcctgagtactgttcagctggtggtggcaaactccagtcacttaatgcttggttcggccctcatgggacaataactcctttgcatcatgacccacatcacaacctttttgctcaggcaaccgtagccacagccgccatcgtccctggcgtcgccgcggtcatcgctgatgcagcgacccgcaccactttcgcgctcgcacaaagcgctgcgaccgcagccgcggcagccagcgcgcgttgccggcgttctcccctctag

SEQ ID NO: 45400 - DNA, 2086 bp, Zea Mays
ctggcgtctacaaaaagccctcggcaggacgccagttgttgggacgggggacggggctataccaaccagccaaaaccaagcagggaatcacaccattcaccaagcagcagatggaagcgaaaggtggcgccgcggcgtggctagctaggccggctcgtgcgcacgcggagacagacacgggactggttgcgtgaccgagctctggtctggtggctggtgctgagagagagggagacagacgacctgcagctcgcatcacagtcccacagtgcaggagggagtggaagagagtagagagagagtgggagcgagagcacagggaggggagttgttttgaaggcaacagcgagccctgctgtccctctgcttcgccacctcctccctccctctctttccttcctcttggaggagagagaagagggggagagccagtcagccagccagcccaagaacagcgtacgtacgttgtcaagtcccgtcgccgccgcagcagcttcgctcctcccgccccgcccaccgtcgcgcgcggcggcggggagcgagcaatggaggccggcggcgccagcggcggcgacgacggggacggccagctgcacggcctcaagttcggcaagaagatctacttcgaggacgccggcggctccagtagcagcggcggcagtggcagtgccagcgcgaccgcgcctccagcgacgcagcagccgtcgccgccggccgcttcgcctagggccgcgcccggtggcggcaggaggggcagggccgcggctggcggcgcgggcccctccttgccgcccgcgcccccgcgctgcctggtcgacggctgcaacgccgacctcaccgacgccaagacctactactgccgccacaaggtgtgcgaaatgcactccaaggagccccgcgtcgtcgtcaacggtctcgagctacgcttctgccagcagtgcagcaggttccacaacctggccgaatttgaccagcaaaagaaaagctgtcgcaagcgtctagcaggccacaacgaacgccggagacggccacctcctggaccccttgcgtcacgatatggccgtctcgctgcaccgctcggtgagcccggcggcaggttcagaagcttcatgctggatttctcatacccaagggttccaagcgccatgagggatgggtttccagcggttcgacctggtggtgaaagggtgcctggcagcaatatccagtggcaagcagcgagcctagatcctcctccccctcaccatcagagcgcggcagcaggatacggtgcccactcgtacgggagcccgggtagctcgtcgtcgtcgaggccaccggtgttccctgctggcccggagctccccccaggcggtggatgtctcgcaggagtccccacggactctagctgtgctctctctcttctgtcaactcagccatgggacgctgctggccacagcgccggccacggccacggccacgccgcgtcactgcccgcaacagcaggcttcgacggcaaccccgtggccatggcgagtagctacatcgcgccgccaagcccctggaccgactcccgggcccacgaaggcgggcggcggaacgtgcctcaactgccacccgacgtccccctcggcgacgtgcactctggcccaggcacccatcacggccagttctcaggtgagctcgagcttgccctgcagggaaacaggccagccccggcgccgcgcaatggccagggctccgcgggcgcgttcgaccaggccggcagcacgacggagtggtcgctctaggaggccaaataaaagcgcggcacatcgtcgtagccgcacagcgagatggagcttgaagcctggctccgctagctacctgcatgcgctgtttgcttgcctagaggctagagcatccagtatgataataagcgaggaactagtgcagtgccggccaggagactgatttcttttgcgcttgtccatgaactcgtctgttgcgtctatgtacacctccatggtttgaactcgtcggggacttcgctcgatgtgttattaatctcatgctcatccttccgctaatgttgcctggcggcatcgccaggaatcggttccaaggc

SEQ ID NO: 45401 - DNA, 3788 bp, Zea Mays
cttgccctcgcccgtgaggctgcgacccatccctcatacagggtcggccccttcctccttctgccgaccgcaccaaccctccgcctccacctccctgccctgctcgcaccaaccctcctcccctagctcccgcctgcgccaaccctgcgccctcgagctccctgcctcgccaagctcgtggaggcgagcagatgcttgaacgtttaatcaaccctgctccaactccccgggcatggcggtggcggcgcgccggtgcatggccgactcgaggcgagattggatgaattgaggagcgggagaagtacaccgtacacgatggagtgggacgcacggacgctgaggtgagatggccaaaacagaaggcgtcggcacagtcgcagtcagagcacaacacaacatataatggcagtggcggcacgtcggagatttgagacactcatcgtccatggaatggggcacatggtagcggatgagggagggccatagtagaaggtgtccgcgctgaagatctttagctcccatctcgccgctgcagcgaggcgtcatgctttgagcctgtggattagcagggtgtgatcctgtcaacgaactacaacaaagctgacagacgacccttgaggaaatgatgggtcctgtgtcgtcgaccttttcgtcgtgccaaaataagcagacagacgattctggcggccaggtatgctggctctaaatggttcttttgatcctgctttatgtttgcatcgcactcacgttgtcgaaataatattcaacttaataaaaaaaactcaacacccgcatgtgtaagacagcctccgtgcatatagaagaaacacatgtgaataaaactcccatacatagcgacatagttaagcaagtgagatttaggctggttttgaacatgtcctttggcatgagacaaagaagggatgtttttaaacaacacacaatattattcaattatgttctattattcttaattatcttgaagcgtgactatatgcatagatgttattccctccgttgtgaatacatagcacatttttttctgcattaaattacatgacactttatttttgtcctaaatcaatcttctaaaactgaccaagttattaggaatgtgcattctcctatacatttcatcaaagatataaaaatttaaagtaagacaaagctaactataatttggtccagggagtattatgtttgtgttctataaatggtaggttgttttcttactttttttgtttgcactgactgatgactgtccttgtgctttagggatgtatgtaatggttatttgtgcatacattgcagcagagtccagggacacttatctagctatcaaggtgccatatccctcacatctcatgtctgcctctgtcttcttgtatgcctcctttcaattgtttaccgagtatttgtagtcctctgtttgttgccatttactaagaattggaaattctctttctgttatctttgttctttaatattattgtcatttacttatctatttttgtgtgcatacgacaaacctcctacaagctgtcttgttttatgtgtgttggtgcgtctcgtaggagaaaacacatatctttccatttcctggcaactaattcgaggccacctccaactccttttttaatgaatattacgttgtttgtttacaaacaaactgcatgtatgacctgtcaaaccactctaagtttgcattacaatatatgctacaacatttatctactgtataactaagggggtgtttagtttctagggactaatgtttagtccctagattttatttcattttagttccaaaattgccaaatatagaaactaaaactttattttagtttctatatttagcaatttatacactaaaaaggaatgaaatgaagggactaaacattagtccctataaaccaaacaccccttaagttttctatttaattaccatcatccaccacgacatcacgctatacacacagatcactctgctccacgcgcgcatgggcgcgcacaatacactagtgatgatatgaacgagaaaaaagaatgcgagggagtagaatccctgggccgcagcctactagacagcccaatttgttggggcgcgttatggcgtgtgagctttttggcttcgtcggttcaggtactcttcctctacacgaaaggtcgccgatacgcgccccttgcattgcagacgctggtatgcaaatgcaatgcgagactcgagctcgctcttgttcgccgcgcgcattgacggccaatcggcgttgctgcactcggctctctttttttccctttatactttttctgcccgttaagcacgtacgtagatacacatagtttggtgtacagcactaggcacgcacgattgctcttgctcgcaacacagctgccgctccagctcgctcttcttcagtcacccaatatccccaggcctactaccaaccagcccccgcgtccaagatctctccctcccacggcccgctcggactccccggcgcaatggcgaccgacgcgatcctggagacgatcaagccgcggcggagcgaggagcagctcccggtgaccacggcggccgccgccggcaccaggctgcggcggcgcgtgtcctcgttctcggcgcacgtgaggccgccgccggggctgtcgtcctcggcggcagcggcgttccggcgcgcgaggtcgatgccgaccgccaaggcgctggcggcggcgggcgcgctgcggcggtggtgggagtgggtgacggcgccgttcgcgccccgcggcgacgacgacgacgaggcaaggccgctgggcggttgccgctgcgcctgcgccggcggaccgggcgggtggcgccacgtcctggtcaggctccgcgccggcgcgcgccgactgctgggccgcgacggccgcccgctcaaggccgccgcgccgccggacttcggctacgactccgtcagctacgcgcgcaacttcgacgacggcgaggcgtgatgcgggtggtggcgggacggccgtggcggtggcggccgggcgtggatcacaggatcagcagtggtccagctgtcgcaataaagcaattgaattttgtttttcggtggtgtatatggcaatatggcatggcttttacatatgtactagaatatggtggtcgtgtgtatggtggtatcgctcgatctcggaaggaaagacgatcgatcgagcgttgccgcgagctggaggcctggaccatgaatggtccggtccgtgaacgaacatgtaactagtgttcttccgtcgtcgttgttttcttgcatgctccttgaatgaacacgccatggtccatggatccgcttcgagaatcagagcagagcagagcagagaaggttcaaagcaacggaagcgcagcctttcagctagataagagcagagcggagaaggttcttcctcctcacccgccctctcgtcagattcaagagcaggttcagattcagatctgcttcggcttcggtgtccctttcgctgcagcggcgggagcgcgacatggcagctacagggctactacaactaccactgctggctgcccccccgtctcggtccggccagatcggtgccgagacagcaaccagacccctgcacgcccgactgcaaatgcaagatggcacgcgacctcgccgacgtggccacgcatgtggagaggacattatttttttatataaaaaaaagctctattgtttttaggacaactgtaattatatcttggctggtcttgtaattatgattttaccttccgtttttaactctttgattttaccctccatttt

SEQ ID NO: 45402 - DNA, 3242 bp, Zea Mays
cctccacagtcttgccccagaaccttctcgatgcttctcttgccctcgcccgtgaggctgcgacccatccctcatacagggtcggccccttcctccttctgccgaccgcaccaaccctccgcctccacctccctgccctgctcgcaccaaccctcctcccctagctcccgcctgcgccaaccctgcgccctcgagctccctgcctcgccaagctcgtggaggcgagcagatgcttgaacgtttaatcaaccctgctccaactccccgggcatggcggtggcggcgcgccggtgcatggccgactcgaggcgagattggatgaattgaggagcgggagaagtacaccgtacacgatggagtgggacgcacggacgctgaggtgagatggccaaaacagaaggcgtcggcacagtcgcagtcagagcacaacacaacatataatggcagtggcggcacgtcggagatttgagacactcatcgtccatggaatggggcacatggtagcggatgagggagggccatagtagaaggtgtccgcgctgaagatctttagctcccatctcgccgctgcagcgaggcgtcatgctttgagcctgtggattagcagggtgtgatcctgtcaacgaactacaacaaagctgacagacgacccttgaggaaatgatgggtcctgtgtcgtcgaccttttcgtcgtgccaaaataagcagacagacgattctggcggccagggatgtatgtaatggttatttgtgcatacattgcagcagagtccagggacacttatctagctatcaaggtgccatatccctcacatctcatgtctgcctctgtcttcttgtatgcctcctttcaattgtttaccgagtatttgtagtcctctgtttgttgccatttactaagaattggaaattctctttctgttatctttgttctttaatattattgtcatttacttatctatttttgtgtgcatacgacaaacctcctacaagctgtcttgttttatgtgtgttggtgcgtctcgtaggagaaaacacatatctttccatttcctggcaactaattcgaggccacctccaactccttttttaatgaatattacgttgtttgtttacaaacaaactgcatgtatgacctgtcaaaccactctaagtttgcattacaatatatgctacaacatttatctactgtataactaagggggtgtttagtttctagggactaatgtttagtccctagattttatttcattttagttccaaaattgccaaatatagaaactaaaactttattttagtttctatatttagcaatttatacactaaaaaggaatgaaatgaagggactaaacattagtccctataaaccaaacaccccttaagttttctatttaattaccatcatccaccacgacatcacgctatacacacagatcactctgctccacgcgcgcatgggcgcgcacaatacactagtgatgatatgaacgagaaaaaagaatgcgagggagtagaatccctgggccgcagcctactagacagcccaatttgttggggcgcgttatggcgtgtgagctttttggcttcgtcggttcaggtactcttcctctacacgaaaggtcgccgatacgcgccccttgcattgcagacgctggtatgcaaatgcaatgcgagactcgagctcgctcttgttcgccgcgcgcattgacggccaatcggcgttgctgcactcggctctctttttttccctttatactttttctgcccgttaagcacgtacgtagatacacatagtttggtgtacagcactaggcacgcacgattgctcttgctcgcaacacagctgccgctccagctcgctcttcttcagtcacccaatatccccaggcctactaccaaccagcccccgcgtccaagatctctccctcccacggcccgctcggactccccggcgcaatggcgaccgacgcgatcctggagacgatcaagccgcggcggagcgaggagcagctcccggtgaccacggcggccgccgccggcaccaggctgcggcggcgcgtgtcctcgttctcggcgcacgtgaggccgccgccggggctgtcgtcctcggcggcagcggcgttccggcgcgcgaggtcgatgccgaccgccaaggcgctggcggcggcgggcgcgctgcggcggtggtgggagtgggtgacggcgccgttcgcgccccgcggcgacgacgacgacgaggcaaggccgctgggcggttgccgctgcgcctgcgccggcggaccgggcgggtggcgccacgtcctggtcaggctccgcgccggcgcgcgccgactgctgggccgcgacggccgcccgctcaaggccgccgcgccgccggacttcggctacgactccgtcagctacgcgcgcaacttcgacgacggcgaggcgtgatgcgggtggtggcgggacggccgtggcggtggcggccgggcgtggatcacaggatcagcagtggtccagctgtcgcaataaagcaattgaattttgtttttcggtggtgtatatggcaatatggcatggcttttacatatgtactagaatatggtggtcgtgtgtatggtggtatcgctcgatctcggaaggaaagacgatcgatcgagcgttgccgcgagctggaggcctggaccatgaatggtccggtccgtgaacgaacatgtaactagtgttcttccgtcgtcgttgttttcttgcatgctccttgaatgaacacgccatggtccatggatccgcttcgagaatcagagcagagcagagcagagaaggttcaaagcaacggaagcgcagcctttcagctagataagagcagagcggagaaggttcttcctcctcacccgccctctcgtcagattcaagagcaggttcagattcagatctgcttcggcttcggtgtccctttcgctgcagcggcgggagcgcgacatggcagctacagggctactacaactaccactgctggctgcccccccgtctcggtccggccagatcggtgccgagacagcaaccagacccctgcacgcccgactgcaaatgcaagatggcacgcgacctcgccgacgtggccacgcatgtggagaggacattatttttttatataaaaaaaagctctattgtttttaggacaactgtaattatatcttggctggtcttgtaattatgattttaccttccgtttttaactctttgattttaccctccatttt

SEQ ID NO: 45403 - DNA, 931 bp, Zea Mays
gtgggagacttcagttcagcacgcggacgtggcatcaaagattatgtcattttcccagcatggaacacacggagtttgtgttctttcagcaaatggctccatatcaaatgtaacgcttcgtcagactgctacatcaggcagaactgtaacatacgagggtcaattcgagatactgtcgctgtcggggtcattcttcctggctgaggatggtgtccagcgcagccgaaacggaagcctcagcgtgtcgctggctggtcctgatggccgtctgttgggtggtggggtcgcaggacttctagtagcggcttcaccggttcagtactgggaagcttcaattctggaggcggaaaggagccacaaaagcaggctccttcagaacccacatcggctccaccgagggttgctccgacagccgggatgggaggacccagcagcccttcttcaagaggcacattgagcgagtcatccggtggcgctggaagcccaccgccactgcatcgagccatggctgctagtgctagcaatagtaaccagccaccgttcttgtccagcatgccttggagatgagtttgcagcttgcattctcttggccaattccaggcaggatgtagcaatctgcgctttcagtagcgcccgttgtgtgagtagctgtgtgtagtacaagccagaagcttgggtgggaatagaattgcgtctggtaaatctgtagctctgttgtaggttccaccctgaattcctgtgctaggtgtgttgagctgtgtaagcaatgtaatcctttcagcgttatcaaatgctatttagttaaatgtttctaccaaggcatgtcgatttgaatcataagatatcaatttgctgtttgcgtctcgggcaacttctgttctagagaacgttctactcactgaaatttgagcctgttgccaagtttgaaaac

SEQ ID NO: 45404 - DNA, 1961 bp, Zea Mays
tctcgaagtaaaatagcacaattgctggggccaaatgaggtagaccgtcgcatccatgacccatctacttccctccccttcttatctgctactgcaataatcacccgaggcaattttggcgtgctttacttccgcttccaatatacctttttttccgcgacaaaaatcatttttgttaattgcgaaaaggaaagagcccgtgtgaacaggaggggtgaggagaagagggggaaaagagagagaaatcggagggcattagcaagaaaccatgagttctaggttagctgaaatctcctttgatctttaatctgttcatctccttgcgtgagtctgtggcgttagcgtgatgccttctccaagttcatgaacttccgttcgcaatccctagtcgtcttgtcctgatcttacttgagtgctcgtgagctctttccagtggctaatgactgcagatttgagttctggcccaagaaccgcgtgctagcccgccatggaggtgaggtccgagcaagggctgatggcggggagggatctattcggcttgacgaagagcccgccggcgcccgcgccgccgtcgtccgccgccatgcagagcgtgcgcatggcgtacaccgcggacggcaccgccgtgttcgctccggtgagctcttcgcctgcgacgccgtcttaccagccgcagggcgcagcccacggcgctagcatgtccgcggcgacggtcgttggaggcaatggcgctccagctgcgccgagcatgggtgagccgctggccaagaagaagcgcggacgaccaaggaagtacgggcccgacgggtccatggcgctggcaatggtgcctgcttcggcggcttcagggtcgccggcgacagggcagggtttttctgggccgttctcaccgcctgcgttaaatccggcgagctctctggtggtggcgtcgccagacggattcaagaagcggggccggcctaagggttctaccaacaagccacgcgtggacgctgctgggtcatcaggagctggatttacacctcatgttatcacagttcaagctggggaggacgtggcatcaaagattatgtcattttcccagcatggaacacacggagtttgtgttctttcagcaaatggctccatatcaaatgtaacgcttcgtcagactgctacatcaggcagaactgtaacatacgagggtcaattcgagatactgtcgctgtcggggtcattcttcctggctgaggatggtgtccagcgcagccgaaacggaagcctcagcgtgtcgctggctggtcctgatggccgtctgttgggtggtggggtcgcaggacttctagtagcggcttcaccggttcagatagtactgggaagcttcaattctggaggcggaaaggagccacaaaagcaggctccttcagaacccacatcggctccaccgagggttgctccgacagccgggatgggaggacccagcagcccttcttcaagaggcacattgagcgagtcatccggtggcgctggaagcccaccgccactgcatcgagccatggctgctagtgctagcaatagtaaccagccaccgttcttgtccagcatgccttggagatgagtttgcagcttgcattctcttggccaattccaggcaggatgtagcaatctgcgctttcagtagcgcccgttgtgtgagtagctgtgtgtagtacaagccagaagcttgggtgggaatagaattgcgtctggtaaatctgtagctctgttgtaggttccaccctgaattcctgtgctaggtgtgttgagctgtgtaagcaatgtaatcctttcagcgttatcaaatgctatttagttaaatgtttctaccaaggcatgtcgatttgaatcataagatatcaatttgctgtttgcgtctcgggcaacttctgttctagagaacgttctactcactgaaatttgagcctgttgccaagtttgaaaac

SEQ ID NO: 45405 - DNA, 3228 bp, Zea Mays
atgccaagcaatgtttcaaccactccaactctacacttccgctcccctatacaggctagggctcaggcacatgcctatgctcctgatcccagcctcggctctctacctcgtcaaaagaacaagctaccgagatcgggcgtccttctcttggcaatcttgaatgaagtaaccaaaatcgcaaacagtactgcagcaagccaagacaaacgcaactgtattctgacacttacctgcttccagagaatgatcaggaagatcacacgtaggttcagcatttccacagatcgagccggctttcagttcagacctgagggggacgatggtagcaccagtgagggaatcgtggatatcacgaggtggtttgaggaaatccatacagatcaaactgccgcgcagctcaggccagaggacgaggatggtgacatcagcaaggtgcgaattggggagatcatacgccgattcgaggagatcactggagatcgagcagccctgcacctcggacaggaggatggcgaaagaaacacttggagtgggagggactccacgtgggaatcaagagtgactagccatcttctggatgaatcctgtgtttttggtaggaccaaggaaaaagagcatgttgtaaagttggtgaaatcatacagtaagtgcccaggaattcatgttttgccaattgttggaatggggggcattggcaagacaacggtggcacagatggtttaccgcgaggtccaagaaagttatgaccttctgagttgggttcatgtccccgaaacatttgatttacgcaagctggcgatagcaatcacagagtctctgtccagacaaccatgtacatacaacaattttagcgtcgttcatgatgttctgcaacaaacagtactaaacaagagagtgttccttgttctggatgatctatggaatgaacggcaaatttgctggcaagattttctttgttcactcaagtttgctgatactatgacaatcctggtgactactaggagcaaagaggtagcacaacttctgcagaccattcctcacttcgagcttggcttgttacctgaagatcactgctggcagttgttccaatgctatgcttttggccatagaaacatccatgaagagtccgctttggttcaggtaggtaggaaaattatggagaaatgtagttgcttaccattggcaattaaatccataggttgcctgttgcggtccaagatggatatgcagacttggatggaaatatccgatagtgagttttgggaatattcagataataatgaagagatcttgtcggctcttagactgagctttcatcggctgccaggaaggctgaagccttgttttctgctgtgtgctttatatcccaaaggcgagccttttaccaaggacgacatgattcacttatggactgctcatggttatgtacagccttcaggatgcaaaacactagagaaggtcgctggtgagtactttgatgagttgaatgaaagatcactgatcgaaatggatacatactatttggtcagtcgtgagggtcacaattacttgaaaaagtcacgtgtaagatcaccagttgaaatctctagtggggagatcttcgacactgatgttagcttttatgagctgcacataagatcattggttgaaaattttcacaaaggaacgacagagtcttccttgccatttcaattgtttaggctgcatgacatgatttgggaccttgcaaaatctctgtccagctgcttgttttctgctgtagctgttgatgaaggtaacctttacatgcaaaatgaagttcagcacttatttctctggttaggcaggggcagatcgaaacaaaatacacagagggggcactctgaacttatccccatttctaagtctcgtgatctattcatctcttggataaacaattctcttgggcttgaatctgagccatttagatggaggcataggtccacacccaggcccagccatcgaccccaggtgtctgattttgagctcctagggctaagctcaactgcgttgctaggcattgccttggaggccatgatccaagcacgacctgatcctgtgcaagatcccatgagttcagcaagacttctagcatatttgcccgaaaacaaacatgaatacatactttctacacaaagtcgacgttctcagttgttcaaaatagattatttacgcaccttaattttaaaacaatgtacattttacaatattggcatatacacatatctgagagctcttatactatattcatgtaaagatagtggctgcatagctgcaatccaatatctgaagctcttgcgctatctcaatataaggaattgtgattcattgactggcaaaaatctgaatcacttgacacaatcaatatgtcatctttacagccttgagaaactgatcgtatccacttgttggaaagagttctccattcagtcgtgccatcttttcagtttaagatatctccaactctccgttcaattcaatgactggtcccagcatccactttgccacttccataacttggacacactgtgcttgcagaactgccatagcattgcggagctccctacaggcataggaaatctgatgaacctgagatgccttaagcttattggaatttcagagatcaagaagttgaatcatgattctttactatgtcagtgtaataacaacaagtgccagttaatgaaggcaatattccctgccctaatggagttagaacttgatagtctgtgcgaactacaggactggtgtaaattccaggattcagattgcccaaagatgcagagcatcactgtaagaaactgcaacaaacttagacgaatcccttactttggttctgtcagaagtctaatgataataaactcagctctaattggtctccagctttcagcatctaacgaaccttctcagctgcagactcttgatatcagttactgtgagaacctggaatccttgttgggactggaaaatctttgttctctcgggagcttatatattgcccattgtcctaaactatttgtcttgcgtcaagagaagcttttgtttaggcctcaaaatatattaattgatgactgccctggactgatcgaatggtgtgatgagcaagagctctactatcatctacctctcattgttaagatcattaggtgactcttcttggtaaccactgtacttactgtatcagtctctagatcattaggtgatacaaac

SEQ ID NO: 45406 - DNA, 2446 bp, Zea Mays
atgccaagcaatgtttcaaccactccaactctacacttccgctcccctatacaggctagggctcaggcacatgcctatgctcctgatcccagcctcggctctctacctcgtcaaaagaacaagctaccgagatcgggcgtccttctcttggcaatcttgaatgaagtaaccaaaatcgcaaacagtactgcagcaagccaagacaaacgcaactgtattctgacacttacctgcttccagagaatgatcaggaagatcacacgtaggttcagcatttccacagatcgagccggctttcagttcagacctgagggggacgatggtagcaccagtgagggaatcgtggatatcacgaggtggtttgaggaaatccatacagatcaaactgccgcgcagctcaggccagaggacgaggatggtgacatcagcaaggtgcgaattggggagatcatacgccgattcgaggagatcactggagatcgagcagccctgcacctcggacaggaggatggcgaaagaaacacttggagtgggagggactccacgtgggaatcaagagtgactagccatcttctggatgaatcctgtgtttttggtaggaccaaggaaaaagagcatgttgtaaagttggtgaaatcatacagtaagtgcccaggaattcatgttttgccaattgttggaatggggggcattggcaagacaacggtggcacagatggtttaccgcgaggtccaagaaagttatgaccttctgagttgggttcatgtccccgaaacatttgatttacgcaagctggcgatagcaatcacagagtctctgtccagacaaccatgtacatacaacaattttagcgtcgttcatgatgttctgcaacaaacagtactaaacaagagagtgttccttgttctggatgatctatggaatgaacggcaaatttgctggcaagattttctttgttcactcaagtttgctgatactatgacaatcctggtgactactaggagcaaagaggtagcacaacttctgcagaccattcctcacttcgagcttggcttgttacctgaagatcactgctggcagttgttccaatgctatgcttttggccatagaaacatccatgaagagtccgctttggttcaggtaggtaggaaaattatggagaaatgtagttgcttaccattggcaattaaatccataggttgcctgttgcggtccaagatggatatgcagacttggatggaaatatccgatagtgagttttgggaatattcagataataatgaagagatcttgtcggctcttagactgagctttcatcggctgccaggaaggctgaagccttgttttctgctgtgtgctttatatcccaaaggcgagccttttaccaaggacgacatgattcacttatggactgctcatggttatgtacagccttcaggatgcaaaacactagagaaggtcgctggtgagtactttgatgagttgaatgaaagatcactgatcgaaatggatacatactatttggtcagtcgtgagggtcacaattacttgaaaaagtcacgtgtaagatcaccagttgaaatctctagtggggagatcttcgacactgatgttagcttttatgagctgcacataagatcattggttgaaaattttcacaaaggaacgacagagtcttccttgccatttcaattgtttaggctgcatgacatgatttgggaccttgcaaaatctctgtccagctgcttgttttctgctgtagctgttgatgaagaactgccatagcattgcggagctccctacaggcataggaaatctgatgaacctgagatgccttaagcttattggaatttcagagatcaagaagttgaatcatgattctttactatgtcagtgtaataacaacaagtgccagttaatgaaggcaatattccctgccctaatggagttagaacttgatagtctgtgcgaactacaggactggtgtaaattccaggattcagattgcccaaagatgcagagcatcactgtaagaaactgcaacaaacttagacgaatcccttactttggttctgtcagaagtctaatgataataaactcagctctaattggtctccagctttcagcatctaacgaaccttctcagctgcagactcttgatatcagttactgtgagaacctggaatccttgttgggactggaaaatctttgttctctcgggagcttatatattgcccattgtcctaaactatttgtcttgcgtcaagagaagcttttgtttaggcctcaaaatatattaattgatgactgccctggactgatcgaatggtgtgatgagcaagagctctactatcatctacctctcattgttaagatcattaggtgactcttcttggtaaccactgtacttactgtatcagtctctagatcattaggtgatacaaac

SEQ ID NO: 45407 - DNA, 1754 bp, Zea Mays
gtttggttcccggagaattcgggtccttgtgggctgtgatacagttgcaatggcatctgtaactgatgagacagctaagattgagggtttgacatctgctgcagcctttgtggagggtggcattcaggacgcatgtgatgatgcatgcagcatttgccttgaggctttctgtgagagtgacccttctgcattgactggctgcaaacatgagttccatctccaatgcattcttgaatggtgccagagaagttcacagtgcccaatgtgttggcagcctattactatgaaggatcctaccagtcaggagctgcttgaggcagtagagcgtgagaggaatataagaactaatcaaactcggaacacaactatatttcatcatcctgctcttggggattttgagctgcagcatctgcctgttggtaatgatgctgagcttgaagagcgtatactgcagcatctagctgctgctgctgcaatgggaagggcacaccatcttggaagaagggaggggcacaggggacgatctggctctcatggtcgtccacatttcctagttttctctacacaaccaaattcaccttctgctggcacaatctcttcatcttctgctcatatggagggagaaaatgattcaaatcctgccacacctagagctagcgagtcatctccacgagctattcgcattggagaagtgggaaaccaaagtcctgggatgcttacctacgatgctgaacaggatgctgtcgtttcttccggaaatagcactcctgtatcgagtcctaggttttttaacaggagacactccactggacagtcaactccagacagggctgggccatcggatattcagtctttctcagactccctgaagtcccgcttaaatgccgtctctatgaagtacaaagaatctattacaaagagtactcgagggtggaaggagagattgttttcacgtaattcatccgtggcggatcttggttctgaagtgagaagagaagttaatgctggaattgcgtccgtatcacggatgatggagcgtctggaaactagaggaaatagcagaacaagtgatagcccggcagcatccacttctgaagttccctctgctacagaatcaagcaatgaaagggttacagagagcaactctgctgctgctgctgctggtggtggtactaccactacgggtaccagcgctagcaacgcctccgccccttgtgttgcgacatccggttcaaattaggacatgtaagggtctcagaaagaaggcttacacctgcaattcttcatcttcaaaggtttgtgagcctggcggcagagcagaagtgcagtaacatgatgccgtcatttttttctcaaccactgcataaacggctgcaaggggaaaaaaaccaaacggtgatttgatgtattggctcgataaaatggtggtgcgtgtggcctaggagaagtcggatttcatcttctgttttcgtctctttgtaaaaaaaatcgtctgagggcagatgtttaccggtataaataacggatatgtcatcttcatagtacgtggatcagttataaatatgattggaacagcaaagcttgctgctgttataaagttgtaccgtggcacgatttcctgttctgttctgtgtgggtgaattgatggattttgctgtacacaagatatgcatctttccaggtctcatgcctatgtatacatatacatattacacgaacctaccttgaatccatatctctgaaacttgtttgtg

SEQ ID NO: 45408 - DNA, 1750 bp, Zea Mays
cgtttcgattgcagttgggtttgttccgggaagcgggtcgtctggggtttggttcccggagaattcgggtccttgtgggctgtgatacagttgcaatggcatctgtaactgatgagacagctaagattgagggtttgacatctgctgcagcctttgtggagggtggcattcaggacgcatgtgatgatgcatgcagcatttgccttgaggctttctgtgagagtgacccttctgcattgactggctgcaaacatgagttccatctccaatgcattcttgaatggtgccagagaagttcacagtgcccaatgtgttggcagcctattactatgaaggatcctaccagtcaggagctgcttgaggcagtagagcgtgagaggaatataagaactaatcaaactcggaacacaactatatttcatcatcctgctcttggggattttgagctgcagcatctgcctgttggtaatgatgctgagcttgaagagcgtatactgcagcatctagctgctgctgctgcaatgggaagggcacaccatcttggaagaagggaggggcacaggggacgatctggctctcatggtcgtccacatttcctagttttctctacacaaccaaattcaccttctgctggcacaatctcttcatcttctgctcatatggagggagaaaatgattcaaatcctgccacacctagagctagcgagtcatctccacgagctattcgcattggagaagtgggaaaccaaagtcctgggatgcttacctacgatgctgaacaggatgctgtcgtttcttccggaaatagcactcctgtatcgagtcctaggttttttaacaggagacactccactggacagtcaactccagacagggctgggccatcggatattcagtctttctcagactccctgaagtcccgcttaaatgccgtctctatgaagtacaaagaatctattacaaagagtactcgagggtggaaggagagattgttttcacgtaattcatccgtggcggatcttggttctgaagtgagaagagaagttaatgctggaattgcgtccgtatcacggatgatggagcgtctggaaactagaggaaatagcagaacaagtgatagcccggcagcatccacttctgaagttccctctgctacagaatcaagcaatgaaagggttacagagagcaactctgctgctgctgctgctggtggtggtactaccactacgggtaccagcgctagcaacgcctccgccccttgtgttgcgacatccggttcaaattaggacatgtttgtgagcctggcggcagagcagaagtgcagtaacatgatgccgtcatttttttctcaaccactgcataaacggctgcaaggggaaaaaaaccaaacggtgatttgatgtattggctcgataaaatggtggtgcgtgtggcctaggagaagtcggatttcatcttctgttttcgtctctttgtaaaaaaaatcgtctgagggcagatgtttaccggtataaataacggatatgtcatcttcatagtacgtggatcagttataaatatgattggaacagcaaagcttgctgctgttataaagttgtaccgtggcacgatttcctgttctgttctgtgtgggtgaattgatggattttgctgtacacaagatatgcatctttccaggtctcatgcctatgtatacatatacatattacacgaacctaccttgaatccatatctctgaaacttgtttgtg

SEQ ID NO: 45409 - DNA, 1255 bp, Zea Mays
acaacatcttggtggccaagacggcatcacagcctacaacatcgaagacaatgagctgtggacaaggcatgtcgtcctaacagcagtctctcaggtcactgttgctgtgtatgtgttttgcaaatcctggtccggagatggcttcatattgcaagcagcgatttcgctgttccattttggatctggcaaatgcttactgaagccatgggacttgaagaaggttagcttcagtagtcttgcgggctcttctggttcagtagagagcggcgaaataagttccttcgaccaatacattcagagccgctaagtttgttttctggttgccgccatggcccgcaataggaagcactggatcctgaggaagctgcctacgttcgtcaaggacttgatcgaccagctctggtgtatggagccgtacaagtcgtccagtggcatcacccaactcgtggccaaccacgtcacggctgggtggtggcagatacatggcatcgcctcctaccacaggttcaacgacagccggggccagtggactctcgaccgtgagggtttgctcgacgcccttggctggagcctaaacaggccattcgatgagagtcttctcctatggcacctcgccaccgacttgttttgcttccacctcgccacgccttcttctactcagcaacgtcaagctgcctgccggagcatggccatgtccaactacatggcgtacctactgttcgtcaacccagagatgttgatcgccggtgctaggcgcagcctgttcaaagacgcctacgaggaactggagggcatcattccaccgaacgagcctgctagtagtagtagtataatccgtaggctaagggagacggggaattcaggatcaggtgtggctcatgacgcttgggctgtcacccaggtgctcattggtttacaggttggggaagacatggaaaaggtttggagggtggtccagggcgtgtgggtggagatgctttgcttctctgccggcagggtgcaggggctacctgcacgccaagagcatggggagcggcgggcagtacctgtcctacgtgtggctcctcttgtcttacatgggcatggagacattggcggagaagatgcagaggacggacatgaaaaatacaagaaggtggcgatcaagaaggtgcagcggaagagggcgcaggtgggcgtgccaggcaggagagtgacggcagagggcgccggcgatcaagaaggtgcagcggaagagacgatcccggtgtcgtga

SEQ ID NO: 45410 - DNA, 1912 bp, Zea Mays
acgacggcacgagcagacggcgagacccgctgggaaggctttcccatcctagttgtcggcgcctcctccacatcgagtgcgctagggttttctctgcccctcgcccgccgccgcagccgccgatggccgagcgctggcgctcgagggcgcggcgggacccagacctggacgaagatgcttccccgccgtcccggcagccgcgccacagcgggggcgacgaggaggacgatgagctggggaacgaggatctcagcctggagatcgtcgcgcgcgcgcagcggaagcggcgcggggaatcagccggcggagtgcccgtgttcgccgaccttctttcggtgtcctccgccgacgaggagggcgccgtggtggagctcgatgaggcggatgagccccggaggaagcagaagaagaagcagcgccggaagcaaaggaagaagcatcggaaggagactacagaggctgcggcgggggccgccgtagaggtggatgagaatgcggtttgtagcaccgaggaggggcccattgggacagcagaatcggtgttaactgaaaatggggctgatgcccctgcatctgataatatggttctgcggaagctccttcgcataccgagatactttgatcctggggaaacactgttggagacttgttttaattgtagcgaggaagggcatgtagctgcaaactgtccattggaaaagcgaaagaagccttgctttgtttgtgggttgtttgggcacaatgcaaagcagtgcacgcagggtcaagactgttttatctgtaaaaaaggaggccatatggcaaaggactgccctgataagcacaggaggaatgatcatcaatccacattatgtttaaaatgtggagaaataggtcatgatatgtttggatgtaccaatgattacccaccagatgatatcgagaagggccatctatgttgttccgacttctctgacgattgtccgaaacaaattagctgttataattgtgcccaatctggtcattctggtctgggatgtgccaaacgcagggaaaccagtgctgtcacaactccaaccttatgcttcaaatgtggcgaggaaggtcactttgcacgtggctgcacaaagaacgctaagattcagaggaaggagaaatggaaaaaggcttccagtagtgctagatcagctccttatgacgcccgaaaaacaagcaaaaggaaaagcccccatctcgaggaaagagtgggcacacctcgtcataaacccaaatcgaggggtggctggactggtggagatgatctaccattgaagaagtacaaatccaatgggtggggctctccatctactcccaagaagtcttacgcaaaccaccagttcttgtctggttgcgactacctcactccccagccttcacgaaggcacaactaccatggtaccatgtcttcaccgaatcaccaattcttgtctggctgtgactacttcactcccgagtcttcacgagggcacagccatggtaccatgtcaccgaactggaattattcacccagcgccaggaagcatgggttctcgtcatcaagattcgccgcggctgccgccagcaacacccatgtccggttcgggagaaattagctggatgcacgcgcctgatattgttgttcgttttagccatagatagataccaattatctcctggggatgaactctacctgtcgtcggttcatgccctttcgatagttgtttgttctgagattattatatatgtaatcgtggttcaaactatttattatttttttttactgtcttccatggcatggcgttgatgccttttgcaaaaacggcaactgaaagtctgtaactgtgctttgagcctttccctgatgtttgagtgggcagtgcatcactgatgcggcattacatgcaaatgggtaact

SEQ ID NO: 45411 - DNA, 1939 bp, Zea Mays
acgacggcacgagcagacggcgagacccgctgggaaggctttcccatcctagttgtcggcgcctcctccacatcgagtgcgctagggttttctctgcccctcgcccgccgccgcagccgccgatggccgagcgctggcgctcgagggcgcggcgggacccagacctggacgaagatgcttccccgccgtcccggcagccgcgccacagcgggggcgacgaggaggacgatgagctggggaacgaggatctcagcctggagatcgtcgcgcgcgcgcagcggaagcggcgcggggaatcagccggcggagtgcccgtgttcgccgaccttctttcggtgtcctccgccgacgaggagggcgccgtggtggagctcgatgaggcggatgagccccggaggaagcagaagaagaagcagcgccggaagcaaaggaagaagcatcggaaggagactacagaggctgcggcgggggccgccgtagaggtggatgagaatgcggtttgtagcaccgaggaggggcccattgggacagcagaatcggtgttaactgaaaatggggctgatgcccctgcatctgataatatggttctgcggaagctccttcgcataccgagatactttgatcctggggaaacactgttggagacttgttttaattgtagcgaggaagggcatgtagctgcaaactgtccattggaaaagcgaaagaagccttgctttgtttgtgggttgtttgggcacaatgcaaagcagtgcacgcagggtcaagactgttttatctgtaaaaaaggaggccatatggcaaaggactgccctgataagcacaggaggaatgatcatcaatccacattatgtttaaaatgtggagaaataggtcatgatatgtttggatgtaccaatgattacccaccagatgatatcgagaaaataagatgctacgtgtgtaaccagaagggccatctatgttgttccgacttctctgacgattgtccgaaacaaattagctgttataattgtgcccaatctggtcattctggtctgggatgtgccaaacgcagggaaaccagtgctgtcacaactccaaccttatgcttcaaatgtggcgaggaaggtcactttgcacgtggctgcacaaagaacgctaagattcagaggaaggagaaatggaaaaaggcttccagtagtgctagatcagctccttatgacgcccgaaaaacaagcaaaaggaaaagcccccatctcgaggaaagagtgggcacacctcgtcataaacccaaatcgaggggtggctggactggtggagatgatctaccattgaagaagtacaaatccaatgggtggggctctccatctactcccaagaagtcttacgcaaaccaccagttcttgtctggttgcgactacctcactccccagccttcacgaaggcacaactaccatggtaccatgtcttcaccgaatcaccaattcttgtctggctgtgactacttcactcccgagtcttcacgagggcacagccatggtaccatgtcaccgaactggaattattcacccagcgccaggaagcatgggttctcgtcatcaagattcgccgcggctgccgccagcaacacccatgtccggttcgggagaaattagctggatgcacgcgcctgatattgttgttcgttttagccatagatagataccaattatctcctggggatgaactctacctgtcgtcggttcatgccctttcgatagttgtttgttctgagattattatatatgtaatcgtggttcaaactatttattatttttttttactgtcttccatggcatggcgttgatgccttttgcaaaaacggcaactgaaagtctgtaactgtgctttgagcctttccctgatgtttgagtgggcagtgcatcactgatgcggcattacatgcaaatgggtaact

SEQ ID NO: 45412 - DNA, 1945 bp, Zea Mays
acgacggcacgagcagacggcgagacccgctgggaaggctttcccatcctagttgtcggcgcctcctccacatcgagtgcgctagggttttctctgcccctcgcccgccgccgcagccgccgatggccgagcgctggcgctcgagggcgcggcgggacccagacctggacgaagatgcttccccgccgtcccggcagccgcgccacagcgggggcgacgaggaggacgatgagctggggaacgaggatctcagcctggagatcgtcgcgcgcgcgcagcggaagcggcgcggggaatcagccggcggagtgcccgtgttcgccgaccttctttcggtgtcctccgccgacgaggagggcgccgtggtggagctcgatgaggcggatgagccccggaggaagcagaagaagaagcagcgccggaagcaaaggaagaagcatcggaaggagactacagaggctgcggcgggggccgccgtagaggtggatgagaatgcggtttgtagcaccgaggaggggcccattgggacagcagaatcggtgttaactgaaaatggggctgatgcccctgcatctgataatatggttctgcggaagctccttcgcataccgagatactttgatcctggggaaacactgttggagacttgttttaattgtagcgaggaagggcatgtagctgcaaactgtccattggaaaagcgaaagaagccttgctttgtttgtgggttgtttgggcacaatgcaaagcagtgcacgcagggtcaagactgttttatctgtaaaaaaggaggccatatggcaaaggactgccctgataagcacaggaggaatgatcatcaatccacattatgtttaaaatgtggagaaataggtcatgatatgtttggatgtaccaatgattacccaccagatgatatcgagaagggccatctatgttgttccgacttctctgacgattgtccgaaacaaattagctgttataattgtgcccaatctggtcattctggtctgggatgtgccaaacgcagggaaaccagtgctgtcacaactccaaccttatgcttcaaatgtggcgaggaaggtcactttgcacgtggctgcacaaagaacgctaagtccgatcggtcgaaaggcaagtcatcgtcgcatattcagaggaaggagaaatggaaaaaggcttccagtagtgctagatcagctccttatgacgcccgaaaaacaagcaaaaggaaaagcccccatctcgaggaaagagtgggcacacctcgtcataaacccaaatcgaggggtggctggactggtggagatgatctaccattgaagaagtacaaatccaatgggtggggctctccatctactcccaagaagtcttacgcaaaccaccagttcttgtctggttgcgactacctcactccccagccttcacgaaggcacaactaccatggtaccatgtcttcaccgaatcaccaattcttgtctggctgtgactacttcactcccgagtcttcacgagggcacagccatggtaccatgtcaccgaactggaattattcacccagcgccaggaagcatgggttctcgtcatcaagattcgccgcggctgccgccagcaacacccatgtccggttcgggagaaattagctggatgcacgcgcctgatattgttgttcgttttagccatagatagataccaattatctcctggggatgaactctacctgtcgtcggttcatgccctttcgatagttgtttgttctgagattattatatatgtaatcgtggttcaaactatttattatttttttttactgtcttccatggcatggcgttgatgccttttgcaaaaacggcaactgaaagtctgtaactgtgctttgagcctttccctgatgtttgagtgggcagtgcatcactgatgcggcattacatgcaaatgggtaact

SEQ ID NO: 45413 - DNA, 2015 bp, Zea Mays
acgacggcacgagcagacggcgagacccgctgggaaggctttcccatcctagttgtcggcgcctcctccacatcgagtgcgctagggttttctctgcccctcgcccgccgccgcagccgccgatggccgagcgctggcgctcgagggcgcggcgggacccagacctggacgaagatgcttccccgccgtcccggcagccgcgccacagcgggggcgacgaggaggacgatgagctggggaacgaggatctcagcctggagatcgtcgcgcgcgcgcagcggaagcggcgcggggaatcagccggcggagtgcccgtgttcgccgaccttctttcggtgtcctccgccgacgaggagggcgccgtggtggagctcgatgaggcggatgagccccggaggaagcagaagaagaagcagcgccggaagcaaaggaagaagcatcggaaggagactacagaggctgcggcgggggccgccgtagaggtggatgagaatgcggtttgtagcaccgaggaggggcccattgggacagcagaatcggtgttaactgaaaatggggctgatgcccctgcatctgataatatggttctgcggaagctccttcgcataccgagatactttgatcctggggaaacactgttggagacttgttttaattgtagcgaggaagggcatgtagctgcaaactgtccattggaaaagcgaaagaagccttgctttgtttgtgggttgtttgggcacaatgcaaagcagtgcacgcaggttggtccccttatctccgagggattatcactcggtgacttggggtcaagactgttttatctgtaaaaaaggaggccatatggcaaaggactgccctgataagcacaggaggaatgatcatcaatccacattatgtttaaaatgtggagaaataggtcatgatatgtttggatgtaccaatgattacccaccagatgatatcgagaaaataagatgctacgtgtgtaaccagaagggccatctatgttgttccgacttctctgacgattgtccgaaacaaattagctgttataattgtgcccaatctggtcattctggtctgggatgtgccaaacgcagggaaaccagtgctgtcacaactccaaccttatgcttcaaatgtggcgaggaaggtcactttgcacgtggctgcacaaagaacgctaagtccgatcggtcgaaaggcaagtcatcgtcgcatattcagaggaaggagaaatggaaaaaggcttccagtagtgctagatcagctccttatgacgcccgaaaaacaagcaaaaggaaaagcccccatctcgaggaaagagtgggcacacctcgtcataaacccaaatcgaggggtggctggactggtggagatgatctaccattgaagaagtacaaatccaatgggtggggctctccatctactcccaagaagtcttacgcaaaccaccagttcttgtctggttgcgactacctcactccccagccttcacgaaggcacaactaccatggtaccatgtcttcaccgaatcaccaattcttgtctggctgtgactacttcactcccgagtcttcacgagggcacagccatggtaccatgtcaccgaactggaattattcacccagcgccaggaagcatgggttctcgtcatcaagattcgccgcggctgccgccagcaacacccatgtccggttcgggagaaattagctggatgcacgcgcctgatattgttgttcgttttagccatagatagataccaattatctcctggggatgaactctacctgtcgtcggttcatgccctttcgatagttgtttgttctgagattattatatatgtaatcgtggttcaaactatttattatttttttttactgtcttccatggcatggcgttgatgccttttgcaaaaacggcaactgaaagtctgtaactgtgctttgagcctttccctgatgtttgagtgggcagtgcatcactgatgcggcattacatgcaaatgggtaact

SEQ ID NO: 45414 - DNA, 1857 bp, Zea Mays
acgacggcacgagcagacggcgagacccgctgggaaggctttcccatcctagttgtcggcgcctcctccacatcgagtgcgctagggttttctctgcccctcgcccgccgccgcagccgccgatggccgagcgctggcgctcgagggcgcggcgggacccagacctggacgaagatgcttccccgccgtcccggcagccgcgccacagcgggggcgacgaggaggacgatgagctggggaacgaggatctcagcctggagatcgtcgcgcgcgcgcagcggaagcggcgcggggaatcagccggcggagtgcccgtgttcgccgaccttctttcggtgtcctccgccgacgaggagggcgccgtggtggagctcgatgaggcggatgagccccggaggaagcagaagaagaagcagcgccggaagcaaaggaagaagcatcggaaggagactacagaggctgcggcgggggccgccgtagaggtggatgagaatgcggtttgtagcaccgaggaggggcccattgggacagcagaatcggtgttaactgaaaatggggctgatgcccctgcatctgataatatggttctgcggaagctccttcgcataccgagatactttgatcctggggaaacactgttggagacttgttttaattgtagcgaggaagggcatgtagctgcaaactgtccattggaaaagcgaaagaagccttgctttgtttgtgggttgtttgggcacaatgcaaagcagtgcacgcagggtcaagactgttttatctgtaaaaaaggaggccatatggcaaaggactgccctgataagcacaggaggaatgatcatcaatccacattatgtttaaaatgtggagaaataggtcatgatatgtttggatgtaccaatgattacccaccagatgatatcgagaaaataagatgctacgtgtgtaaccagaagggccatctatgttgttccgacttctctgacgattgtccgaaacaaattagctgttataattgtgcccaatctggtcattctggtctgggatgtgccaaacgcagggaaaccagtgctgtcacaactccaaccttatgcttcaaatgtggcgaggaaggtcactttgcacgtggctgcacaaagaacgctaagtccgatcggtcgaaaggcaagtcatcgtcgcatattcagaggaaggagaaatggaaaaaggcttccagtagtgctagatcagctccttatgacgcccgaaaaacaagcaaaaggaaaagcccccatctcgaggaaagagtgggcacacctcgtcataaacccaaatcgaggggtggctggactggtggagatgatctaccattgaagaagtacaaatccaatgggtggggctctccatctactcccaagaagtcttacgcaaaccaccagttcttgtctggttgcgactacctcactccccagccttcacgaaggcacaactaccatgcgccaggaagcatgggttctcgtcatcaagattcgccgcggctgccgccagcaacacccatgtccggttcgggagaaattagctggatgcacgcgcctgatattgttgttcgttttagccatagatagataccaattatctcctggggatgaactctacctgtcgtcggttcatgccctttcgatagttgtttgttctgagattattatatatgtaatcgtggttcaaactatttattatttttttttactgtcttccatggcatggcgttgatgccttttgcaaaaacggcaactgaaagtctgtaactgtgctttgagcctttccctgatgtttgagtgggcagtgcatcactgatgcggcattacatgcaaatgggtaact

SEQ ID NO: 45415 - DNA, 176 bp, Zea Mays
acctcgacagtgggaggagtcaccatagtgttgaaggcgactgggtcgccttcggttgtggcggcgccgcggcgcaggaagcggtggcgaagagatatccggggacagagccggaaacgatggccgcgcgacgaaggcggagcggcggagggagcagcctcctagccggagcggag

SEQ ID NO: 45416 - DNA, 69 bp, Zea Mays
gtttctgtatacggaaattatggaccttttcatggtccaccaaatcaaaatatataccctttccaattt

SEQ ID NO: 45417 - DNA, 126 bp, Zea Mays
tacagattgtgtttcctcatgaacggtcaatggacgattagggcggtatgtatggttttgcctctttgcccacaaccagaagcgctgaaactgaacagggatgccatattccttggctacttcctc

SEQ ID NO: 45418 - DNA, 89 bp, Zea Mays
tgtaccagagttcttccttttctgggttgtagaatttgaagaaaagaagaatatcttccttgcccttctcaggaggagggagaggccgc

SEQ ID NO: 45419 - DNA, 112 bp, Zea Mays
gcctcaaaaagctcaatttcttgatcagggggaaatccagccatttcgtttagttttgccaggatttctgaaggttttcccaaggccttcacaaagagcctccccatgaaac

SEQ ID NO: 45420 - DNA, 101 bp, Zea Mays
cctgcctattatggacatactccaaaaatgaaggaacatccggatatcgcacgggtgcatcatattctgctcctggtgatttttggaaacaaataatgtcc

SEQ ID NO: 45421 - DNA, 2673 bp, Zea Mays
aaacgaggttgcgcgcatgcgggaaacaggagggcgcggcaagcgctcacgcttttggagcgtgtacacctctcgcacgcgcacaccctttcctgcagcacgccaaatcgagagagtgggagggaaagagagggaagagaggaagagaagacaaaagagggcggcgctagcagctacagtccgcgcggtcgtccgcctccatccgaccgtcagcctccattcgcccctccgattggagttccacccgccgatttgcccttcgattggagcggattcgcccctccgattggatccccgcccatcgatccacaccttcggcctccctgctagcgtccttcccatcggatcaaagctactcttcttgcaccttcttcctctgttctctctgttctgaatctcttggatatactgcctgcttgcttgtgcttgcctcttggactttgacttgtgctcgtgcttgagctagttatttgtgctagtctgttaggtgttgatggtcactccagtgtgctcgtgcttgagttgatatatagtgctttgctgccctcgtgtgtcttactgctgcggtgctgcctgtctgctgctgcctgccttagtgccttactgccctggtgtgtagtcccatttttcatgctgctgctgctgcctgtctgcctgcctcatgtgatttggatcaccctgcgtccctgccttactgccttagtgcttgccttactgcctcatgtgctttggatcaccctcctattttttatgcagcagcagcactaactaaaatcaattaatggctagcccatcttctggcaacaatggcaactatgatccaaagacagaaaaaacaaggaaggctagctcaaatgattcaggttggaagtatggttattgggcaaatttgaaaaatagggatcaagtgacatgcaacctttgtgacaccacagtttctagagggataaaaaggctaaagcagcatctagaaggtggctatgaagatacaaagatatgttcaaagaccactactgcaattataaaggagatgagggattattggaaatccaatagaaggaaaagagctattttcctagatgataatgagcagcaagaggaggaggaggatgtaatggtggtggatgcaacagctgaatctgttcaagttcaacaagatgcgcctatagaatcccaaggctctaaggtacaaccaagtccagggactgcagccaatcaaagacgtgcaacatatctgtataagactccaacatcaatcaagaccaaggcaaatcaagcaagcaagcaaaactcaattgtggagatgcttcggaaatcacctaaagatgtagttgatgaaaggcgtaaagggtgttctcaacccacaattccagccaagatgaagtccaaagaggagaaggattatgtggatatgcaatgggctttgtggttttatgaatgcggtgtgccatttaatgcagcagcagcaacacaatttcatgttgctgttgaggctgaaagggaaatgtgctcttgggccatttctattatgttttggtgattagatgcccaacacatagagtttatgaccttattgagctaacagtcaaagagatgcaaatggaaaagcaaggtatgattctagccttagtaaattgtttttggtactaacattattctactaagtgctaggaatcttctcaaagaaggagaaattgaattggagaattctggctaaggaaagctagacttgcaccagcctgtggtgcaccggacagtgtccagtgcctaggctagcgccccggcgaacatgtcgctctcgggaaaatgctgaggacaccatggctacaattcaccggactatccggtgttccagccgcgcgcccagccaatggtcgaccgcgcgatcaacgggtgacgcgtggctcagccaacagtcaaaaggtcgcaccggactgttcagtgtgccaccggactgtccggtgtgctatggggccgatggctacaacggtaggctttgctagaaaagcaagggaatcatgcactgttcattgtccggtggtgcaccagactgtccagtgtgcccaatgacagaaggcaaccagagccttccaaatggaactcaaacgaatcctagctaccttagggctataaaagggacccctaggcgcatggagtagtacaccaagcactctttgaacatccaacaacaccgagacatcggattcacgcctttgctttagtagattgagatttgggcacttgtgttgagttgtaactccgttgtgctgcctttgtgctcttctctctcattttgtgtgcatgagtcactgcaagtttgcctcgtgtgtgtggttctattccctcccttactcttgtggtttaatcgtgatcaaattttgtaagggtgagagactccaaattgtggagattcctcacaaagggaaaacttgagataaggaagaaaactgtggtactcaagtttgatctttggatcacttgagagggattgagtgcaatccttgaccgaaggaggtcaccacaacgtggagtaggcattggctgaaccacgggataaaatcattgtgtcacttatgcatctttctctgtgattgttttcttccataaagttctcacttgctcacttgcactattgtttctaagttcaatacatattctaaaggaataatcaag

SEQ ID NO: 45422 - DNA, 641 bp, Zea Mays
gaagccccgtccgtccttctccttcatgcgctgcccgaggagtgccttccgggcgacatcacggagcccgggaagctggacgaggtgttcgacgagatggacgccaacggcgacggcaaggtgagcttcgaggagttcaaggcggccatgcagaaggacagcgccctccaggacgtcgtcctctcgtccctccggccgccgccgccgccatagctagacggggagagagattccaactcgttcaacttcattcccacgagaacgcaccattgattacagtaccgttcgaatcatttaatcagtctccggcatgtgccgttgtccgatccggccggctagctgttggaaactacgggtcgtgggaaagcctcgatggatcctgctagatatggctgtgctgttatgtgtttctggatcctgctagattagctggctgtgttgttatgggtggcggccacagatgttttttttacatatggctagtttagaagttacaaaatcgaaaggggttcgagaggctaaaatcacttccttattcaactttgaatggaggagattttagtccctccaattcacttcggtttttgtactcctaaactagcttttaaggtagaaaaataaacgtgtcaagagtggtgaaa

SEQ ID NO: 45423 - DNA, 4544 bp, Zea Mays
tgtgttcataggttgcgctctacttttcatagaatatgatcagttgcaacagggaacaggcgttgagggccagggaaattgctctaaagaagatagaaagcaaagatttttttggtgcccagaagactgtgcttaaagctcaaaagctttttccagagctggagaatgtgtctcagctgttaaccatctgcagtgtgcactgtgcagcagagttaagggtgaatggagagatggacttctatggagtccttcaagtggaggaaggtgctgatgaagccttgataaaaaagcagtaccgcaagctcgcagtttcacttcaccctgataaaaattgttttgtgggtgctgaggcagctttcaagttgattgctgaagcttattctgtactatgtgatcctgcaaagcgaaatgattatgacctgaaaaggagcaatgtatttagaaatgtgccaaagctagccaaacagcaaccatcaaagtggactaattcacatagacagagcatgcctggatttagagaaacattttggactgtatgcccaaattgtcggatccaataccagtactacagcagtatcctgaacatcatggtccactgtctgaactgtaaaaggagttttattgcatacaggctgaatcaacagcccatggccacttcatcaagtgtacccaacaactcccaagttcctgcaaacatgtttgtgaataaacagcgcgacactcccaatcaacaaggtcactctgtgaagccttcatgtgtcggtagaggcaccaatgtcaagccaaatggttaccaagaccttgttcacatgtttcgaaatcaacaacatcgcgttcacagtcaaaatggtcatcctgtgaagccttctgcaggaagagacacagatgcaaagctgagaatgaatgtggcccaccgtgatgaatacatgaaagggaaaggtaatgacccggagatgtcgagggggaaatttcaattttcaacgctgaatgaagataaattttctgtcccaatgggaaatggggacatgcaaggaaggtcatcaatttcagctcttgctgatccaaacattattgacacacagaaatcagttcaggaagatgcgtctgcagtgccagatgctatggatctgcttggctctgcaaggccttctgcaggttggaaaacatatggagattcaaggataaatgttgcaggtaaaaaattgatgctagatcatgttgatctaagtattattggcagaagaaacttgcaaagacaagatgcatctacagtgccttctagtgccggatcctctggtacccaacagtcagttaagaggaaaacatatgctgatggcaatatttgcctaaacacggataccaacaagagaccaatgaagaataaatgtccatctgatgttaacatgagttgtaaacaagtatgtgatgatggtgtcaccaatgctggcatacaattagatccacttcatttgtccagcaatgtagacacccaccacaagccaaaagttactgatcatcatgcaaatatcaaggaaaaagctactgaaactgatagtgataaggacaatatcatggaagaagctcctcaaactgttagtgaaaagaagccttcctactctgagtgtgtcaccttacctgatctagatttcttcaattttgagaaggttaaggatatcaatgtgtttgaagttggtcagatatgggccctctatgataaccttgatggcatgccaagatattatgctcgtataaagcattttgatgcctcgaacttcgaaatacattcaacttggctggagtatgttgcaatggatgaagatgagaagtggactgatgaagaactgcctactgcttgtggaaactttcgccttggaaaaggaaccgatatattagaaaaggaaatgttttctcacattgctacttggacgaaaggtaaaaagaggaagtcgtatgtcatatatcctaacaagggtgaggtatgggctctttacaaggggtggagcatggaatggtgctcagatgcagataatcatagatcatatgagtatgaggttgtggaagtcgtgtcaagtatgtcagccaatggtggcgcgaccgttgtcccactggtcaggattaacggatttgttagtttatttgcaacagctaaggacaaaccttcatttgtgataccatcaagtgagctgctccggttttctcacagcattcctttttataggactaaaggaaatgaaaaggttggtgttccaagaggatttctggaactggacaatgcatgtctccctgctgacctggatgcagcattcccttctcttactcttgattcttacatgtctctcggcaagaacgaaagcagcacatttgttgatgtgaccactgacaatacaagttgtaggatggatctgggagatgatcaaattgctcaaaaagagaatgaccacccaatatctacagacaatcccaaagatatgtgcccggaacaaaatacacccttaaaggaaaccactaattatgccaaagagtctggtgattgctctcttcaaagcagcctctcccccatcatatacacatatcctgattctgatttccacagatttgaagaaaatcgctcctgcgagaagtttgaacgtggacaagtatgggccctgtacaacaacattgataaactccccaagttctatgcctgggtaagaaaagtcagggaagagccgtttagagtcgaggtgatctggctcgaggcctgccccgaacaggaccaggagaaacagtggctggagcaggacatacccatcagctgcgggacattcaagatccgaaaatggagagccgagtacggcacaaacgacaccttctctcatcaagtaaatgccagagaaaccggcgcaaagtgggcgctcgaaatcctcccgcaggtcggcgacatctgggccgtctacatgaactgggcacctgactgggtcccgtgcggtgctgacgcctgcgagttcgctatctgcgaggtcgtcgagcgcaccgctgaagctagcacaaagctcgccttcctggcccaagtcggcggctaccggtccgtgttcaggcctgacgagcagaggggagtgttggaggtgcctgccacggagaggacgaggttctcccaccagataccttatttccggctggcgggagagggaggtggtgggctccgtggcttctacgagcttgaccctgcttccgtccccgacgccttcctgtatggggacacctgatgatgtggactggcagacggtgaagcaggtttcctagatggttgaaccgaaccctgagtctgggtagcattatgtctcaagtgttaggctgtcactttatgtctcactggaaccgtgcggatgtagatacggaggtgcctggggtgggtgggttatcgtcctgtacacactgtggaaaaggtctgttgtgctggttacagagcatggctaccgatcaagttaattctggattaccagggtcacgacaatgtttaacgttagcttatgatatactagtgcggaggtggagctgtaccccgcaccacttgcaccgtggaggcgtggactatgcttttaccatgcaattttggagctgaaacctggacaactcaagtttaatactgctatatgtatggagtcgtctgttacctggacagttggaaatatggcctttgaatgctgtctgtgtccctgtcgttggtagcatgcactggtgagtgactacccttgttatgttacctagcctggatggaaatttacattcgctccacaggatggtttgctgcccgtgttagcttattctggaatccagtctgtgctcgtcagaaggaatgcatataaagggttcatgatatagacaataggccttcaaagacctcatcagaaggaagaaactagggttgaaggcttccatctaaaaggttcatgatgctcaaaaggatggatgaattggtttctctaaaaattcttgatataattaataattaagtcataattgcaagtctaacttcacatgagtgtgttccgatgtgtcctttgggtctctaaagtgcatctagccactagttggagtggtgtgtattatctcttaagtcgtcttaacaattgtgtggcgtgagtgagagagaaattaaccgtttggttgcgggacagccaggacaggaacatcccctatcgttctctctcgtccctccaattttgagggaccataggggacaacactggatagttctgtcccaacccttgactcagaaccaaacaacctaatttgagggatcgttccatcccatcccgtcctatcattgtaaccaaacgcaccctaaagggcggtgagggagggaggtcgttggttcgatggactcacccgggagaccgggaggtgtatcagttcagagagaagacataatatgctatgtaggtgagctaggttccatctctctctttttatagtgtactatgatattgggatgatctagtccagagcctatttttagagtcggaccttctaaatggctcacctttataaatggccctcatctg

SEQ ID NO: 45424 - DNA, 5415 bp, Zea Mays
ctcgttgcatgataatcctgtattttggtcacataaacgagtttgctatctatttctagcttatctataactccatagtcaggctgatcaagctttacaatcactgagttgcgtgaccgagtggatcttgctgtgtgcttttagaagcttggaagtaacaatgagtattcttattcagactttatgccttgcatagtttttgtttagctgcaatggatcctgaaaatctggcattgatgtcatagtataataatcttgctgaaatcataggatcatcgcttccacaggcattgttttacgaagtaatttgcccaaactcagaacattgtttgaactgtggctctgcccttgtttgcaacatgagtaccatccttatccagccattatgacttgtagaaatgtttttccaacataagtaccattatgtacacttccgacggtgcattggctggacaataaatttatgatcattatgaattttactttctctggtcatacctgtcatactctctatgaatctcacattttcttactgaaacaacaacagcaataacatgatacactgctatgaaaattgtatagctgtaatatctatagccttacggtggaacgggtggatgcataatttacggttcaatttgtcaaagtcggtagtggccagtgggcacaaaaagaagcacacatgattattgcatgattcaatacttgcctgtttcttgatgcatgcacatggatgggtataatcatgcaatctttcatgtgcaattgtgcaggtgacaccgcataacatcaatttattttgggaaaaaagttgcagtgatgaatcataaatggttcacagggatgatccgctgttgctatgtgtgttcataggtacacccggttgcgctctacttttcatagaatatgatcagttgcaacagggaacaggcgttgagggccagggaaattgctctaaagaagatagaaagcaaagatttttttggtgcccagaagactgtgcttaaagctcaaaagctttttccagagctggagaatgtgtctcagctgttaaccatctgcagtgtgcactgtgcagcagagttaagggtgaatggagagatggacttctatggagtccttcaagtggaggaaggtgctgatgaagccttgataaaaaagcagtaccgcaagctcgcagtttcacttcaccctgataaaaattgttttgtgggtgctgaggcagctttcaagttgattgctgaagcttattctgtactatgtgatcctgcaaagcgaaatgattatgacctgaaaaggagcaatgtatttagaaatgtgccaaagctagccaaacagcaaccatcaaagtggactaattcacatagacagagcatgcctggatttagagaaacattttggactgtatgcccaaattgtcggatccaataccagtactacagcagtatcctgaacatcatggtccactgtctgaactgtaaaaggagttttattgcatacaggctgaatcaacagcccatggccacttcatcaagtgtacccaacaactcccaagttcctgcaaacatgtttgtgaataaacagcgcgacactcccaatcaacaaggtcactctgtgaagccttcatgtgtcggtagaggcaccaatgtcaagccaaatggttaccaagaccttgttcacatgtttcgaaatcaacaacatcgcgttcacagtcaaaatggtcatcctgtgaagccttctgcaggaagagacacagatgcaaagctgagaatgaatgtggcccaccgtgatgaatacatgaaagggaaaggtaatgacccggagatgtcgagggggaaatttcaattttcaacgctgaatgaagataaattttctgtcccaatgggaaatggggacatgcaaggaaggtcatcaatttcagctcttgctgatccaaacattattgacacacagaaatcagttcaggaagatgcgtctgcagtgccagatgctatggatctgcttggctctgcaaggccttctgcaggttggaaaacatatggagattcaaggataaatgttgcaggtaaaaaattgatgctagatcatgttgatctaagtattattggcagaagaaacttgcaaagacaagatgcatctacagtgccttctagtgccggatcctctggtacccaacagtcagttaagaggaaaacatatgctgatggcaatatttgcctaaacacggataccaacaagagaccaatgaagaataaatgtccatctgatgttaacatgagttgtaaacaagtatgtgatgatggtgtcaccaatgctggcatacaattagatccacttcatttgtccagcaatgtagacacccaccacaagccaaaagttactgatcatcatgcaaatatcaaggaaaaagctactgaaactgatagtgataaggacaatatcatggaagaagctcctcaaactgttagtgaaaagaagccttcctactctgagtgtgtcaccttacctgatctagatttcttcaattttgagaaggttaaggatatcaatgtgtttgaagttggtcagatatgggccctctatgataaccttgatggcatgccaagatattatgctcgtataaagcattttgatgcctcgaacttcgaaatacattcaacttggctggagtatgttgcaatggatgaagatgagaagtggactgatgaagaactgcctactgcttgtggaaactttcgccttggaaaaggaaccgatatattagaaaaggaaatgttttctcacattgctacttggacgaaaggtaaaaagaggaagtcgtatgtcatatatcctaacaagggtgaggtatgggctctttacaaggggtggagcatggaatggtgctcagatgcagataatcatagatcatatgagtatgaggttgtggaagtcgtgtcaagtatgtcagccaatggtggcgcgaccgttgtcccactggtcaggattaacggatttgttagtttatttgcaacagctaaggacaaaccttcatttgtgataccatcaagtgagctgctccggttttctcacagcattcctttttataggactaaaggaaatgaaaaggttggtgttccaagaggatttctggaactggacaatgcatgtctccctgctgacctggatgcagcattcccttctcttactcttgattcttacatgtctctcggcaagaacgaaagcagcacatttgttgatgtgaccactgacaatacaagttgtaggatggatctgggagatgatcaaattgctcaaaaagagaatgaccacccaatatctacagacaatcccaaagatatgtgcccggaacaaaatacacccttaaaggaaaccactaattatgccaaagagtctggtgattgctctcttcaaagcagcctctcccccatcatatacacatatcctgattctgatttccacagatttgaagaaaatcgctcctgcgagaagtttgaacgtggacaagtatgggccctgtacaacaacattgataaactccccaagttctatgcctgggtaagaaaagtcagggaagagccgtttagagtcgaggtgatctggctcgaggcctgccccgaacaggaccaggagaaacagtggctggagcaggacatacccatcagctgcgggacattcaagatccgaaaatggagagccgagtacggcacaaacgacaccttctctcatcaagtaaatgccagagaaaccggcgcaaagtgggcgctcgaaatcctcccgcaggtcggcgacatctgggccgtctacatgaactgggcacctgactgggtcccgtgcggtgctgacgcctgcgagttcgctatctgcgaggtcgtcgagcgcaccgctgaagctagcacaaagctcgccttcctggcccaagtcggcggctaccggtccgtgttcaggcctgacgagcagaggggagtgttggaggtgcctgccacggagaggacgaggttctcccaccagataccttatttccggctggcgggagagggaggtggtgggctccgtggcttctacgagcttgaccctgcttccgtccccgacgccttcctgtatggggacacctgatgatgtggactggcagacggtgaagcaggtttcctagatggttgaaccgaaccctgagtctgggtagcattatgtctcaagtgttaggctgtcactttatgtctcactggaaccgtgcggatgtagatacggaggtgcctggggtgggtgggttatcgtcctgtacacactgtggaaaaggtctgttgtgctggttacagagcatggctaccgatcaagttaattctggattaccagggtcacgacaatgtttaacgttagcttatgatatactagtgcggaggtggagctgtaccccgcaccacttgcaccgtggaggcgtggactatgcttttaccatgcaattttggagctgaaacctggacaactcaagtttaatactgctatatgtatggagtcgtctgttacctggacagttggaaatatggcctttgaatgctgtctgtgtccctgtcgttggtagcatgcactggtgagtgactacccttgttatgttacctagcctggatggaaatttacattcgctccacaggatggtttgctgcccgtgttagcttattctggaatccagtctgtgctcgtcagaaggaatgcatataaagggttcatgatatagacaataggccttcaaagacctcatcagaaggaagaaactagggttgaaggcttccatctaaaaggttcatgatgctcaaaaggatggatgaattggtttctctaaaaattcttgatataattaataattaagtcataattgcaagtctaacttcacatgagtgtgttccgatgtgtcctttgggtctctaaagtgcatctagccactagttggagtggtgtgtattatctcttaagtcgtcttaacaattgtgtggcgtgagtgagagagaaattaaccgtttggttgcgggacagccaggacaggaacatcccctatcgttctctctcgtccctccaattttgagggaccataggggacaacactggatagttctgtcccaacccttgactcagaaccaaacaacctaatttgagggatcgttccatcccatcccgtcctatcattgtaaccaaacgcaccctaaagggcggtgagggagggaggtcgttggttcgatggactcacccgggagaccgggaggtgtatcagttcagagagaagacataatatgctatgtaggtgagctaggttccatctctctctttttatagtgtactatgatattgggatgatctagtccagagcctatttttagagtcggaccttctaaatggctcacctttataaatggccctcatctg

SEQ ID NO: 45425 - DNA, 4757 bp, Zea Mays
atttataattacaagtgtatacatgtattattcctactaacctacagtctctcttgcaaacattattgaatgtatatgtgtacacccatgccctttaccaggtccgcctctggctgtgacaccgcataacatcaatttattttgggaaaaaagttgcagtgatgaatcataaatggttcacagggatgatccgctgttgctatgtgtgttcataggtacacccggttgcgctctacttttcatagaatatgatcagttgcaacagggaacaggcgttgagggccagggaaattgctctaaagaagatagaaagcaaagatttttttggtgcccagaagactgtgcttaaagctcaaaagctttttccagagctggagaatgtgtctcagctgttaaccatctgcagtgtgcactgtgcagcagagttaagggtgaatggagagatggacttctatggagtccttcaagtggaggaaggtgctgatgaagccttgataaaaaagcagtaccgcaagctcgcagtttcacttcaccctgataaaaattgttttgtgggtgctgaggcagctttcaagttgattgctgaagcttattctgtactatgtgatcctgcaaagcgaaatgattatgacctgaaaaggagcaatgtatttagaaatgtgccaaagctagccaaacagcaaccatcaaagtggactaattcacatagacagagcatgcctggatttagagaaacattttggactgtatgcccaaattgtcggatccaataccagtactacagcagtatcctgaacatcatggtccactgtctgaactgtaaaaggagttttattgcatacaggctgaatcaacagcccatggccacttcatcaagtgtacccaacaactcccaagttcctgcaaacatgtttgtgaataaacagcgcgacactcccaatcaacaaggtcactctgtgaagccttcatgtgtcggtagaggcaccaatgtcaagccaaatggttaccaagaccttgttcacatgtttcgaaatcaacaacatcgcgttcacagtcaaaatggtcatcctgtgaagccttctgcaggaagagacacagatgcaaagctgagaatgaatgtggcccaccgtgatgaatacatgaaagggaaaggtaatgacccggagatgtcgagggggaaatttcaattttcaacgctgaatgaagataaattttctgtcccaatgggaaatggggacatgcaaggaaggtcatcaatttcagctcttgctgatccaaacattattgacacacagaaatcagttcaggaagatgcgtctgcagtgccagatgctatggatctgcttggctctgcaaggccttctgcaggttggaaaacatatggagattcaaggataaatgttgcaggtaaaaaattgatgctagatcatgttgatctaagtattattggcagaagaaacttgcaaagacaagatgcatctacagtgccttctagtgccggatcctctggtacccaacagtcagttaagaggaaaacatatgctgatggcaatatttgcctaaacacggataccaacaagagaccaatgaagaataaatgtccatctgatgttaacatgagttgtaaacaagtatgtgatgatggtgtcaccaatgctggcatacaattagatccacttcatttgtccagcaatgtagacacccaccacaagccaaaagttactgatcatcatgcaaatatcaaggaaaaagctactgaaactgatagtgataaggacaatatcatggaagaagctcctcaaactgttagtgaaaagaagccttcctactctgagtgtgtcaccttacctgatctagatttcttcaattttgagaaggttaaggatatcaatgtgtttgaagttggtcagatatgggccctctatgataaccttgatggcatgccaagatattatgctcgtataaagcattttgatgcctcgaacttcgaaatacattcaacttggctggagtatgttgcaatggatgaagatgagaagtggactgatgaagaactgcctactgcttgtggaaactttcgccttggaaaaggaaccgatatattagaaaaggaaatgttttctcacattgctacttggacgaaaggtaaaaagaggaagtcgtatgtcatatatcctaacaagggtgaggtatgggctctttacaaggggtggagcatggaatggtgctcagatgcagataatcatagatcatatgagtatgaggttgtggaagtcgtgtcaagtatgtcagccaatggtggcgcgaccgttgtcccactggtcaggattaacggatttgttagtttatttgcaacagctaaggacaaaccttcatttgtgataccatcaagtgagctgctccggttttctcacagcattcctttttataggactaaaggaaatgaaaaggttggtgttccaagaggatttctggaactggacaatgcatgtctccctgctgacctggatgcagcattcccttctcttactcttgattcttacatgtctctcggcaagaacgaaagcagcacatttgttgatgtgaccactgacaatacaagttgtaggatggatctgggagatgatcaaattgctcaaaaagagaatgaccacccaatatctacagacaatcccaaagatatgtgcccggaacaaaatacacccttaaaggaaaccactaattatgccaaagagtctggtgattgctctcttcaaagcagcctctcccccatcatatacacatatcctgattctgatttccacagatttgaagaaaatcgctcctgcgagaagtttgaacgtggacaagtatgggccctgtacaacaacattgataaactccccaagttctatgcctgggtaagaaaagtcagggaagagccgtttagagtcgaggtgatctggctcgaggcctgccccgaacaggaccaggagaaacagtggctggagcaggacatacccatcagctgcgggacattcaagatccgaaaatggagagccgagtacggcacaaacgacaccttctctcatcaagtaaatgccagagaaaccggcgcaaagtgggcgctcgaaatcctcccgcaggtcggcgacatctgggccgtctacatgaactgggcacctgactgggtcccgtgcggtgctgacgcctgcgagttcgctatctgcgaggtcgtcgagcgcaccgctgaagctagcacaaagctcgccttcctggcccaagtcggcggctaccggtccgtgttcaggcctgacgagcagaggggagtgttggaggtgcctgccacggagaggacgaggttctcccaccagataccttatttccggctggcgggagagggaggtggtgggctccgtggcttctacgagcttgaccctgcttccgtccccgacgccttcctgtatggggacacctgatgatgtggactggcagacggtgaagcaggtttcctagatggttgaaccgaaccctgagtctgggtagcattatgtctcaagtgttaggctgtcactttatgtctcactggaaccgtgcggatgtagatacggaggtgcctggggtgggtgggttatcgtcctgtacacactgtggaaaaggtctgttgtgctggttacagagcatggctaccgatcaagttaattctggattaccagggtcacgacaatgtttaacgttagcttatgatatactagtgcggaggtggagctgtaccccgcaccacttgcaccgtggaggcgtggactatgcttttaccatgcaattttggagctgaaacctggacaactcaagtttaatactgctatatgtatggagtcgtctgttacctggacagttggaaatatggcctttgaatgctgtctgtgtccctgtcgttggtagcatgcactggtgagtgactacccttgttatgttacctagcctggatggaaatttacattcgctccacaggatggtttgctgcccgtgttagcttattctggaatccagtctgtgctcgtcagaaggaatgcatataaagggttcatgatatagacaataggccttcaaagacctcatcagaaggaagaaactagggttgaaggcttccatctaaaaggttcatgatgctcaaaaggatggatgaattggtttctctaaaaattcttgatataattaataattaagtcataattgcaagtctaacttcacatgagtgtgttccgatgtgtcctttgggtctctaaagtgcatctagccactagttggagtggtgtgtattatctcttaagtcgtcttaacaattgtgtggcgtgagtgagagagaaattaaccgtttggttgcgggacagccaggacaggaacatcccctatcgttctctctcgtccctccaattttgagggaccataggggacaacactggatagttctgtcccaacccttgactcagaaccaaacaacctaatttgagggatcgttccatcccatcccgtcctatcattgtaaccaaacgcaccctaaagggcggtgagggagggaggtcgttggttcgatggactcacccgggagaccgggaggtgtatcagttcagagagaagacataatatgctatgtaggtgagctaggttccatctctctctttttatagtgtactatgatattgggatgatctagtccagagcctatttttagagtcggaccttctaaatggctcacctttataaatggccctcatctg

SEQ ID NO: 45426 - DNA, 4859 bp, Zea Mays
ggaactctgggactggaagcttccgcagtaccgccccactcaaatctctcgacacctgtcctctcggcgtgatctcgctcactcgtgggctcgtggcgacaactgggcgaccgacgccgatgccaattgccaagtgccctggtcttgatcggtctcttcgccaggtcttcgcctccaggccttagtcgggcccttcgccggcgacgagcaccgccaggtgacaccgcataacatcaatttattttgggaaaaaagttgcagtgatgaatcataaatggttcacagggatgatccgctgttgctatgtgtgttcataggtacacccggttgcgctctacttttcatagaatatgatcagttgcaacagggaacaggcgttgagggccagggaaattgctctaaagaagatagaaagcaaagatttttttggtgcccagaagactgtgcttaaagctcaaaagctttttccagagctggagaatgtgtctcagctgttaaccatctgcagtgtgcactgtgcagcagagttaagggtgaatggagagatggacttctatggagtccttcaagtggaggaaggtgctgatgaagccttgataaaaaagcagtaccgcaagctcgcagtttcacttcaccctgataaaaattgttttgtgggtgctgaggcagctttcaagttgattgctgaagcttattctgtactatgtgatcctgcaaagcgaaatgattatgacctgaaaaggagcaatgtatttagaaatgtgccaaagctagccaaacagcaaccatcaaagtggactaattcacatagacagagcatgcctggatttagagaaacattttggactgtatgcccaaattgtcggatccaataccagtactacagcagtatcctgaacatcatggtccactgtctgaactgtaaaaggagttttattgcatacaggctgaatcaacagcccatggccacttcatcaagtgtacccaacaactcccaagttcctgcaaacatgtttgtgaataaacagcgcgacactcccaatcaacaaggtcactctgtgaagccttcatgtgtcggtagaggcaccaatgtcaagccaaatggttaccaagaccttgttcacatgtttcgaaatcaacaacatcgcgttcacagtcaaaatggtcatcctgtgaagccttctgcaggaagagacacagatgcaaagctgagaatgaatgtggcccaccgtgatgaatacatgaaagggaaaggtaatgacccggagatgtcgagggggaaatttcaattttcaacgctgaatgaagataaattttctgtcccaatgggaaatggggacatgcaaggaaggtcatcaatttcagctcttgctgatccaaacattattgacacacagaaatcagttcaggaagatgcgtctgcagtgccagatgctatggatctgcttggctctgcaaggccttctgcaggttggaaaacatatggagattcaaggataaatgttgcaggtaaaaaattgatgctagatcatgttgatctaagtattattggcagaagaaacttgcaaagacaagatgcatctacagtgccttctagtgccggatcctctggtacccaacagtcagttaagaggaaaacatatgctgatggcaatatttgcctaaacacggataccaacaagagaccaatgaagaataaatgtccatctgatgttaacatgagttgtaaacaagtatgtgatgatggtgtcaccaatgctggcatacaattagatccacttcatttgtccagcaatgtagacacccaccacaagccaaaagttactgatcatcatgcaaatatcaaggaaaaagctactgaaactgatagtgataaggacaatatcatggaagaagctcctcaaactgttagtgaaaagaagccttcctactctgagtgtgtcaccttacctgatctagatttcttcaattttgagaaggttaaggatatcaatgtgtttgaagttggtcagatatgggccctctatgataaccttgatggcatgccaagatattatgctcgtataaagcattttgatgcctcgaacttcgaaatacattcaacttggctggagtatgttgcaatggatgaagatgagaagtggactgatgaagaactgcctactgcttgtggaaactttcgccttggaaaaggaaccgatatattagaaaaggaaatgttttctcacattgctacttggacgaaaggtaaaaagaggaagtcgtatgtcatatatcctaacaagggtgaggtatgggctctttacaaggggtggagcatggaatggtgctcagatgcagataatcatagatcatatgagtatgaggttgtggaagtcgtgtcaagtatgtcagccaatggtggcgcgaccgttgtcccactggtcaggattaacggatttgttagtttatttgcaacagctaaggacaaaccttcatttgtgataccatcaagtgagctgctccggttttctcacagcattcctttttataggactaaaggaaatgaaaaggttggtgttccaagaggatttctggaactggacaatgcatgtctccctgctgacctggatgcagcattcccttctcttactcttgattcttacatgtctctcggcaagaacgaaagcagcacatttgttgatgtgaccactgacaatacaagttgtaggatggatctgggagatgatcaaattgctcaaaaagagaatgaccacccaatatctacagacaatcccaaagatatgtgcccggaacaaaatacacccttaaaggaaaccactaattatgccaaagagtctggtgattgctctcttcaaagcagcctctcccccatcatatacacatatcctgattctgatttccacagatttgaagaaaatcgctcctgcgagaagtttgaacgtggacaagtatgggccctgtacaacaacattgataaactccccaagttctatgcctgggtaagaaaagtcagggaagagccgtttagagtcgaggtgatctggctcgaggcctgccccgaacaggaccaggagaaacagtggctggagcaggacatacccatcagctgcgggacattcaagatccgaaaatggagagccgagtacggcacaaacgacaccttctctcatcaagtaaatgccagagaaaccggcgcaaagtgggcgctcgaaatcctcccgcaggtcggcgacatctgggccgtctacatgaactgggcacctgactgggtcccgtgcggtgctgacgcctgcgagttcgctatctgcgaggtcgtcgagcgcaccgctgaagctagcacaaagctcgccttcctggcccaagtcggcggctaccggtccgtgttcaggcctgacgagcagaggggagtgttggaggtgcctgccacggagaggacgaggttctcccaccagataccttatttccggctggcgggagagggaggtggtgggctccgtggcttctacgagcttgaccctgcttccgtccccgacgccttcctgtatggggacacctgatgatgtggactggcagacggtgaagcaggtttcctagatggttgaaccgaaccctgagtctgggtagcattatgtctcaagtgttaggctgtcactttatgtctcactggaaccgtgcggatgtagatacggaggtgcctggggtgggtgggttatcgtcctgtacacactgtggaaaaggtctgttgtgctggttacagagcatggctaccgatcaagttaattctggattaccagggtcacgacaatgtttaacgttagcttatgatatactagtgcggaggtggagctgtaccccgcaccacttgcaccgtggaggcgtggactatgcttttaccatgcaattttggagctgaaacctggacaactcaagtttaatactgctatatgtatggagtcgtctgttacctggacagttggaaatatggcctttgaatgctgtctgtgtccctgtcgttggtagcatgcactggtgagtgactacccttgttatgttacctagcctggatggaaatttacattcgctccacaggatggtttgctgcccgtgttagcttattctggaatccagtctgtgctcgtcagaaggaatgcatataaagggttcatgatatagacaataggccttcaaagacctcatcagaaggaagaaactagggttgaaggcttccatctaaaaggttcatgatgctcaaaaggatggatgaattggtttctctaaaaattcttgatataattaataattaagtcataattgcaagtctaacttcacatgagtgtgttccgatgtgtcctttgggtctctaaagtgcatctagccactagttggagtggtgtgtattatctcttaagtcgtcttaacaattgtgtggcgtgagtgagagagaaattaaccgtttggttgcgggacagccaggacaggaacatcccctatcgttctctctcgtccctccaattttgagggaccataggggacaacactggatagttctgtcccaacccttgactcagaaccaaacaacctaatttgagggatcgttccatcccatcccgtcctatcattgtaaccaaacgcaccctaaagggcggtgagggagggaggtcgttggttcgatggactcacccgggagaccgggaggtgtatcagttcagagagaagacataatatgctatgtaggtgagctaggttccatctctctctttttatagtgtactatgatattgggatgatctagtccagagcctatttttagagtcggaccttctaaatggctcacctttataaatggccctcatctg

SEQ ID NO: 45427 - DNA, 1503 bp, Zea Mays
gccatggatggagctctagatattattttcacaagattgtcgtatttgctggtggtgtcgacacctcggcaactgaaacaaagggaaccgtgttgatccattccgctgagcagctagaaaattatgctaagactgaggaagctaaggtggaggagcttatcaaagctgtcgctgactctggtgccaaggttattgtcagtggagctgcagtgggtgacatggcacttcatttctgtgaacgttataagctgatggttctgaaaatcagctcgaagtttgaactaagaaggttctgccgtactactggggctgttgcaattttgaaacttagccaacccaatgcggacgaactaggatacgcagattctgtttctgtagaagaaattggtggtactcgggttactgtcgtcaagaacgaagatggtggaaattcagtggctactgttgtcctgagaggcagtactgacagtatactagatgatcttgaaagagctgttgatgatggcgtcaatacatacaggtcaatgtgcagggacagtaggataattcctggtgctgctgcaacagaagttgagctggcaaagagattgaaggagttctctttgaaggaaacagggttggaccagtatgccattgcgaaatttgctgaaagctttgaaatggttccaagaaccctggcagaaaatgctggacttagcgcaatggagataatatcctctctttatgctgagcatgctagtggcaatgcgaaagttggcattgatctggaggaaggcgcctgcaaggacatctcgactttaaaaatatgggacctctatgtcacaaagttttttgccctaaaatactctgccgatgctgcttgcacggtgctgcgggttgaccagatcattatggcaaagccggcaggaggtccaagaagagatgcccagcctggtggcgggatggacgaggattagtttgattatagttgttttctttgtatcacgtatgtgaggtttcagagcagagatcatactttatcttggcttttggttctgtagaaggtttgggtgcctggagttcacttttggaaggtctgcacggttgcgcggatatcacataggcaatttgtatgttttttcctggtgtattgcggtgcggatgtatcaaatgattcattacaggggccgttccgtcagttcatcacaccaactgagctcttgtaatgtctcgtttggttgggttgagtactaaagattagtcatttcattttagtccttaaattgccttaaattgccaagcggagagactaaaataaggactaaactgtttgtcttagtctggagtaactaaaagagactaaacaatattaattccaccttttgtcatcttttcttttatgtcagttatattgatggcaagagaatgctaagggtattttagttctgttatgatttatttaatgagttttaaatacgtaggcactaaactttagttttttaattaaattttagtccctgtatt

SEQ ID NO: 45428 - DNA, 2408 bp, Zea Mays
ggctttccttccctttctctcccaactcccaacgattctagaacaccttggtggcctccgcgtctcgccgcctccccggactccgcatccagccccggcactcgcactcccaaagcagcggacactagtagggtttaaactttccccccgatccgcctcgcctccggcgctgtcgcctgccgccagaccaacgcccccacacccagccggagacgacgatggtggggctcggctcgatggcgggctatgggatccagtcgatgctcaaggaaggccaccgccacctctccgggctcgaggaggccgtgctcaagaacatcgacgcctgccgcgagctctccgccatcacgcgcacatccctgggccccaacggaatgaacaagatggttatcaatcacttggacaagctgtttgtcacaaacgatgctgccaccatcgtgaatgagcttgaggttcagcacccggctgctaaaatcctggtactggctgccaaggctcaacaggaggagattggggatggagccaatctcaccatatcgtttgctggtgaactgcttgagaaggctgaggagctcatcaggatgggcttgcatccgagtgagatcatcattggctacaccaaagccatcaacaagacaattgaaattttagaggatcttgttgagaaaggctcagagaacatggacgtaagaaacaaggaggatgttgtgttgaggatgagatctgctgtcgcaagcaagcagtttggccaggaggatatgctgtgccctcttgtggctgatgcctgcattcaagtttgccccaaaaatcctgcaaactttaatgttgacaatgttagagtggctaagctacttggaggtggtttgcacaattcttctgtggtccgtgggatggttctgaaaaatgatgctgttggtagcatcaaaagggcggagaaggcaaagattgtcgtatttgctggtggtgtcgacacctcggcaactgaaacaaagggaaccgtgttgatccattccgctgagcagaaaattatgctaagactgaggaagctaaggtggaggagcttatcaaagctgtcgctgactctggtgccaaggttattgtcagtggagctgcagtgggtgacatggcacttcatttctgtgaacgttataagctgatggttctgaaaatcagctcgaagtttgaactaagaaggttctgccgtactactggggctgttgcaattttgaaacttagccaacccaatgcggacgaactaggatacgcagattctgtttctgtagaagaaattggtggtactcgggttactgtcgtcaagaacgaagatggtggaaattcagtggctactgttgtcctgagaggcagtactgacagtatactagatgatcttgaaagagctgttgatgatggcgtcaatacatacaggtcaatgtgcagggacagtaggataattcctggtgctgctgcaacagaagttgagctggcaaagagattgaaggagttctctttgaaggaaacagggttggaccagtatgccattgcgaaatttgctgaaagctttgaaatggttccaagaaccctggcagaaaatgctggacttagcgcaatggagataatatcctctctttatgctgagcatgctagtggcaatgcgaaagttggcattgatctggaggaaggcgcctgcaaggacatctcgactttaaaaatatgggacctctatgtcacaaagttttttgccctaaaatactctgccgatgctgcttgcacggtgctgcgggttgaccagatcattatggcaaagccggcaggaggtccaagaagagatgcccagcctggtggcgggatggacgaggattagtttgattatagttgttttctttgtatcacgtatgtgaggtttcagagcagagatcatactttatcttggcttttggttctgtagaaggtttgggtgcctggagttcacttttggaaggtctgcacggttgcgcggatatcacataggcaatttgtatgttttttcctggtgtattgcggtgcggatgtatcaaatgattcattacaggggccgttccgtcagttcatcacaccaactgagctcttgtaatgtctcgtttggttgggttgagtactaaagattagtcatttcattttagtccttaaattgccttaaattgccaagcggagagactaaaataaggactaaactgtttgtcttagtctggagtaactaaaagagactaaacaatattaattccaccttttgtcatcttttcttttatgtcagttatattgatggcaagagaatgctaagggtattttagttctgttatgatttatttaatgagttttaaatacgtaggcactaaactttagttttttaattaaattttagtccctgtatt

SEQ ID NO: 45429 - DNA, 2383 bp, Zea Mays
cggccacctagggctttccttccctttctctcccaactcccaacgattctagaacaccttggtggcctccgcgtctcgccgcctccccggactccgcatccagccccggcactcgcactcccaaagcagcggacactagtagggtttaaactttccccccgatccgcctcgcctccggcgctgtcgcctgccgccagaccaacgcccccacacccagccggagacgacgatggtggggctcggctcgatggcgggctatgggatccagtcgatgctcaaggaaggccgtgctcaagaacatcgacgcctgccgcgagctctccgccatcacgcgcacatccctgggccccaacggaatgaacaagatggttatcaatcacttggacaagctgtttgtcacaaacgatgctgccaccatcgtgaatgagcttgaggttcagcacccggctgctaaaatcctggtactggctgccaaggctcaacaggaggagattggggatggagccaatctcaccatatcgtttgctggtgaactgcttgagaaggctgaggagctcatcaggatgggcttgcatccgagtgagatcatcattggctacaccaaagccatcaacaagacaattgaaattttagaggatcttgttgagaaaggctcagagaacatggacgtaagaaacaaggaggatgttgtgttgaggatgagatctgctgtcgcaagcaagcagtttggccaggaggatatgctgtgccctcttgtggctgatgcctgcattcaagtttgccccaaaaatcctgcaaactttaatgttgacaatgttagagtggctaagctacttggaggtggtttgcacaattcttctgtggtccgtgggatggttctgaaaaatgatgctgttggtagcatcaaaagggcggagaaggcaaagattgtcgtatttgctggtggtgtcgacacctcggcaactgaaacaaagggaaccgtgttgatccattccgctgagcagctagaaaattatgctaagactgaggaagctaaggtggaggagcttatcaaagctgtcgctgactctggtgccaaggttattgtcagtggagctgcagtgggtgacatggcacttcatttctgtgaacgttataagctgatggttctgaaaatcagctcgaagtttgaactaagaaggttctgccgtactactggggctgttgcaattttgaaacttagccaacccaatgcggacgaactaggatacgcagattctgtttctgtagaagaaattggtggtactcgggttactgtcgtcaagaacgaagatggtggaaattcagtggctactgttgtcctgagaggcagtactgacagtatactagatgatcttgaaagagctgttgatgatggcgtcaatacatacaggggacagtaggataattcctggtgctgctgcaacagaagttgagctggcaaagagattgaaggagttctctttgaaggaaacagggttggaccagtatgccattgcgaaatttgctgaaagctttgaaatggttccaagaaccctggcagaaaatgctggacttagcgcaatggagataatatcctctctttatgctgagcatgctagtggcaatgcgaaagttggcattgatctggaggaaggcgcctgcaaggacatctcgactttaaaaatatgggacctctatgtcacaaagttttttgccctaaaatactctgccgatgctgcttgcacggtgctgcgggttgaccagatcattatggcaaagccggcaggaggtccaagaagagatgcccagcctggtggcgggatggacgaggattagtttgattatagttgttttctttgtatcacgtatgtgaggtttcagagcagagatcatactttatcttggcttttggttctgtagaaggtttgggtgcctggagttcacttttggaaggtctgcacggttgcgcggatatcacataggcaatttgtatgttttttcctggtgtattgcggtgcggatgtatcaaatgattcattacaggggccgttccgtcagttcatcacaccaactgagctcttgtaatgtctcgtttggttgggttgagtactaaagattagtcatttcattttagtccttaaattgccttaaattgccaagcggagagactaaaataaggactaaactgtttgtcttagtctggagtaactaaaagagactaaacaatattaattccaccttttgtcatcttttcttttatgtcagttatattgatggcaagagaatgctaagggtattttagttctgttatgatttatttaatgagttttaaatacgtaggcactaaactttagttttttaattaaattttagtccctgtatt

SEQ ID NO: 45430 - DNA, 2368 bp, Zea Mays
caggcttcgacggccacctagggctttccttccctttctctcccaactcccaacgattctagaacaccttggtggcctccgcgtctcgccgcctccccggactccgcatccagccccggcactcgcactcccaaagcagcggacactagtagggtttaaactttccccccgatccgcctcgcctccggcgctgtcgcctgccgccagaccaacgcccccacacccagccggagacgacgatggtggggctcggctcgatggcgggctatgggatccagtcgatgctcaaggaaggccaccgccacctctccgggctcgaggaggccgtgctcaagaacatcgacgcctgccgcgagctctccgccatcacgcgcacatccctgggccccaacggaatgaacaagatggttatcaatcacttggacaagctgtttgtcacaaacgatgctgccaccatcgtgaatgagcttgaggttcagcacccggctgctaaaatcctggtactggctgccaaggctcaacaggaggagattggggatggagccaatctcaccatatcgtttgctggtgaactgcttgagaaggctgaggagctcatcaggatgggcttgcatccgagtgagatcatcattggctacaccaaagccatcaacaagacaattgaaattttagaggatcttgttgagaaaggctcagagaacatggacgtaagaaacaaggaggatgttgtgttgaggatgagatctgctgtcgcaagcaagcagtttggccaggaggatatgctgtgccctcttgtggctgatgcctgcattcaagtttgccccaaaaatcctgcaaactttaatgttgacaatgttagagtggctaagctacttggaggtggtttgcacaattcttctgtggtccgtgggatggttctgaaaaatgatgctgttggtagcatcaaaagggcggagaaggcaaagattgtcgtatttgctggtggtgtcgacacctcggcaactgaaacaaagggaaccgtgttgatccattccgctgagcagctagaaaattatgctaagactgaggaagctaaggtggaggagcttatcaaagctgtcgctgactctggtgccaaggttattgtcagtggagctgcagtgggtgacatggcacttcatttctgtgaacgttataagctgatggttctgaaaatcagctcgaagtttgaactaagaaggttctgccgtactactggggctgttgcaattttgaaacttagccaacccaatgcggacgaactaggatacgcagattctgtttctgtagaagaaattggtggtactcgggttactgtcgtcaagaacgaagatggtggaaattcagtggctactgttgtcctgagaggcagtactgacagtatactagatgatcttgaaagagctgttgatgatggcgtcaatacatacaggggacagtaggataattcctggtgctgctgcaacagaagttgagctggcaaagagattgaaggagttctctttgaaggaaacaggaaccctggcagaaaatgctggacttagcgcaatggagataatatcctctctttatgctgagcatgctagtggcaatgcgaaagttggcattgatctggaggaaggcgcctgcaaggacatctcgactttaaaaatatgggacctctatgtcacaaagttttttgccctaaaatactctgccgatgctgcttgcacggtgctgcgggttgaccagatcattatggcaaagccggcaggaggtccaagaagagatgcccagcctggtggcgggatggacgaggattagtttgattatagttgttttctttgtatcacgtatgtgaggtttcagagcagagatcatactttatcttggcttttggttctgtagaaggtttgggtgcctggagttcacttttggaaggtctgcacggttgcgcggatatcacataggcaatttgtatgttttttcctggtgtattgcggtgcggatgtatcaaatgattcattacaggggccgttccgtcagttcatcacaccaactgagctcttgtaatgtctcgtttggttgggttgagtactaaagattagtcatttcattttagtccttaaattgccttaaattgccaagcggagagactaaaataaggactaaactgtttgtcttagtctggagtaactaaaagagactaaacaatattaattccaccttttgtcatcttttcttttatgtcagttatattgatggcaagagaatgctaagggtattttagttctgttatgatttatttaatgagttttaaatacgtaggcactaaactttagttttttaattaaattttagtccctgtatt

SEQ ID NO: 45431 - DNA, 2623 bp, Zea Mays
catagccttcctaaaacaaccgtgccccttgttgagcaacacaatatagctattttatatttgtgaaacattgtaaggacaaaacataacgaacttaaactttttgaataacatggaaatttatcaattacccatctagactaaaattcattagcaacttggcagaaatgagtaaactgaacagattcttctcaaatgaacacatgcaatacagatagggtccttaaacatcgatgttaccttcacgtagatagtcacgtacttcatccattatatgaccagatcttattgtcctcttttgtataggttgtctctagcacttgggatgttattcaatatagaccaactcaaacctattttccaattcatcctattgctaaaacatatcatacacgcaattaataattctaacctatttggatatacaaatatatgcaaagtattactctttctcatttacaaaaatggttcacaaatcaattcaatgtaatatgggtttatgaacctctatggtgcactcagcataaatcttgttgttctacttttgatcaacacacttttggatcctagcataaaccaaaaaggaattagataaaaaaaataatctgcatgttttccaatataggaagcagagcaaagaggactcgatttggctctctaatgcttaggaaatgttcattggctactccttcatctttgaatcatgatttacagaagttagcctagcatatcccatacgtaaaataactttttggtataaaaaaccatcatgtatcaatcaaactgagtttgtgtcaaccaaatctaatctttgttgccatcaaattaagctttgcatcacccaaagtaaggacttctagcattagattgaatcgatctatcaaagccaatgtacaacaatacctaatttgatgatagtgtagattgaagttaatccacaactcctagatcaattccaaattccctaaataatagcttccactctacaacacgtgcgagaatctagaatcctcgttagagatctaacttatttacatgtgacatcattgtttgggagatgtgctaaagggtagggtgaaaacggaaatggtaattttcggatatcggatatcgttttcgaaactttaccgaaatttagggctaaacaaaatggaaatggttaccaaaaatacgaaaataaaatcgacagaaaaaaaataaaaaatggaaacaatttgggtctcttccgaccgtttccggaaattatcatttttattcggtattttaccgttggtaatgaattcggtatcttccagagaaaatgttaaatctgaactgaactttatagaaaaatatgaaactagttttattatttttctaaaatcaagatctatctaacggtatatagtttagaattgtttgaaacttttatggatcttatttatgttttcttaccaattattactattgatacatatattcataatttacatgagaacctaaggaccaggaagacgctaattatgttgactatgccaagtagtagaagtacaattagaatgcaaatgtcatgtcattatgcacattttgattctatagtcatatcctactagacttattgttgctttatttaaatacatgcaataatttattattgtattacatttttcttatattaattgtgacctcctacgtaccgatcgtattttttagatttcaactttaaccggtgtatttgccctaccaaactttcgtttccgatattttcgaattaccgatatcgttttcgtttccaaagttatcgttttcaatttcgtttctgaggaaaaaatatgaaaacggaaatggttttagtgtttacctaccgttttcacccctaccaaagggtggaaatgaaaggaatacaagacaagataagaacagagtgaataaaaccaaacaacaaagaaaatgttatatttcattaccacaagagttgaatgaatcaatcatgtatatgtacatgtgtctggatctcaccattctacttttgacgaacatgtagtttcaagatcaactaaaaggaaactatatattaaaaatcatagatctttacctattgattacaatataaagaacatagaggggcatggaaaatgtagaattcgaatagaataattttgcctaatgtcgatcctcactacaaatttctagtgggaaaaatttgtatatatgttttatcatacaaaaagttaaaaccaaatacatcaaaataggaagtatttaggtgtaacttacatacttgcaagtcgtcatggtgtacaacattgttacttgcctttgggggcattttccccctaccgataatgtggtgttgccatagatgccagccacagggagcccacaatctcgcatccaagcattcaatgttgcggtaacacccatgaattgatttaaagcaactacaatttgatccatcaaacacacaaatcgaaccatcgaaccaccagatccatcaactccaatggttaccacactgttgcgaccaccactgaccatcaacccaaggaaggagaagcatggatgggcataggtggatgccttgaagatggagttggtgtacggaggcaagaggaggggaggaggaagaaaacggcggcttaac

SEQ ID NO: 45432 - DNA, 2825 bp, Zea Mays
cttgattccgctgcattcgtcggcgttttggtgtactccgggagattgaaggaacctgcattgtgtgattgactgctgcctagcgttcggctgatcatcctgcttctgccatgggggaatcacagagtagcgaggacgcttccaggttcagagctttgggcaacggtgtctccggtgctgggcaggggagtgctggtgacaatgagctccacgatgggagcattgcatcgcaggctgtcagggcttatccgaatggtgggagatccttggtttctgacgttgggttgtttgacacgttgagggttggaagcaaccagtattttggtttctctcacagtgccagtggtaatccctatgatgagcagtccttgtcgtttgcttttgagggcatgggctttgattcacgcaaaactaattcacctaccagtcatcacaatgtaccactgacaaatggacactatccatctgaacgtgtggatggtactctgagccagcagcatgcacctgcaacacgccaatgtgattctttgggtctacagtttagtgtgcaacatgccatgcagaacaatgatgttgaacaccaggaacaatctcccaggtttccaccacagttggggactttctcaagaaaccctgagctgcacagctttgatcgcaattttggtgttccttgccatccatcaattgcatcagcttcatccttaaaaatgtggcaatctcaaatgtacacaccccatgatcagaatgttggctcaaacttcatgtggcagcaaaatactggtgtacaaccatactctattatgcaaccgaattatgcatgtccacaaatgcagcaagtttctgggtttggtatttctcgacataggagcaatgagcaggctgcagtctaccctcctgcaaagggcccatcctcatcatatattggaacaccaaattttcattggctggaaaatgggtattcttacctaaacggtgctgcttctcagaaaagaagaaatagtggcggtctgaataatacatttgcagacagcttcccaagtacatcttacaccggcagttcatgtggcagtggtgattttcaccattttcaatgggcagaaaaggttttcaattcatatggaccgcatcaccagcaaggtgataacctcagtcatccatatggcttaggtttatcacatcatcaaagatctgatatcgctcatccatatggcttaggtttctcacatcatcaaagatctgataaactcaacacagcaagttacgtggagaggatccgaatgagacctgacgttggaaattcagtaaatttttttgatttatcttcctatgctcgcttgctgaactccccattcttgtcctcacaatctgatacatataaatccattgatgaagtgatgggaagagtatgcatgctgtcaaaggatcaagatgcatgtcgctttctacaaaaattattatcagaaggcactcaagaggacattgataaaatctttggtgaaataattgacaatgttggtgatcttatggtggatccaactgctcactatttggtgcagaagatccttgaagagtgcaccaatgaccaaaggacacacatgattcgtgaaatcactaaagcacccataaagcttcataaagcttcttgcaatgtgcatgggacccgcgttgtgcagaaggttatagacaccatgaatacccctgaccaagtgtcaatgttagtgtccgccttaaatactggaatgatgtgtttaatgactgattcttatgggaatcatgttgtggaccactgcctgcagaaattgttacctgagcacaaggcattcattcttgaggctgctgcatcatgctatcttcaactagcaagagatcgtcatggttgctgtgtcctccagaaatgtattggtcattcaagtgatgaacagagaaacaacttgttgtgcaagataacatcaagtgcccttacactctcagaagatccgtatgggaactatgttattcagtttattctggacctcaatatcgaatggataacagtcagagtagtggatgagctggcaggtcactttggaaatctatccatgcagaagtgtggttcccatgttgtggagcattgcctgaagctagcgccacggctgatctgtgataggatcatcaacgaactcatgcatgatcctaaactgttggatatcatccttgatcagtatgggaactttgtgattcagacagcgcttaaacagtgtcagggtgaacatcatgctgcttttgttgaaactattaagccgcacactgctgtaatgcaaagtaacatgtatgggaagaaggttctttcaaggatatgcttgaagaacaagcactgccgatttgacctccattaacctagcattttttttttggcgaacgtgtcttcagagacagcagacgggacggaacccttgtacaattctgtgataacttgcagatcttacagatagtgtgtcttggcgaaaagggaaaaagatcttttctttcaagggaaattttggttggttaggggaagcattttgtcgctgccagtttagtgtaatttcgaatgtagaattagtatagtttcatctgcgtgtgatgatggtggtttacattgccggcgttgttatcagtactgtagtttaatgtacctgtcgaactgtgatatcagtaacatcgtgtaatgtgttagttgtacgataaaagctaaagtggcacactagcctggtcattttttcttttggaaaaaaatgaattgaatcggttgtttgaacacttattggaaccacgaaccggaggtgtagcaatttgcaaggttcttt

SEQ ID NO: 45433 - DNA, 3078 bp, Zea Mays
atcatcgatcggatcgattagttcgtcgtctcagtcggtgtcgtttggctggttcgtcggaagggagattgaaggaacctgcattgtgtgattgactgctgcctagcgttcggctgatcatcctgcttctgccatgggggaatcacagagtagcgaggacgcttccaggttcagagctttgggcaacggtgtctccggtgctgggcaggggagtgctggtgacaatgagctccacgatgggagcattgcatcgcaggctgtcagggcttatccgaatggtgggagatccttggtttctgacgttgggttgtttgacacgttgagggttggaagcaaccagtattttggtttctctcacagtgccagtggtaatccctatgatgagcagtccttgtcgtttgcttttgagggcatgggctttgattcacgcaaaactaattcacctaccagtcatcacaatgtaccactgacaaatggacactatccatctgaacgtgtggatggtactctgagccagcagcatgcacctgcaacacgccaatgtgattctttgggtctacagtttagtgtgcaacatgccatgcagaacaatgatgttgaacaccaggaacaatctcccaggtttccaccacagttggggactttctcaagaaaccctgagctgcacagctttgatcgcaattttggtgttccttgccatccatcaattgcatcagcttcatccttaaaaatgtggcaatctcaaatgtacacaccccatgatcagaatgttggctcaaacttcatgtggcagcaaaatactggtgtacaaccatactctattatgcaaccgaattatgcatgtccacaaatgcagcaagtttctgggtttggtatttctcgacataggagcaatgagcaggctgcagtctaccctcctgcaaagggcccatcctcatcatatattggaacaccaaattttcattggctggaaaatgggtattcttacctaaacggtgctgcttctcagaaaagaagaaatagtggcggtctgaataatacatttgcagacagcttcccaagtacatcttacaccggcagttcatgtggcagtggtgattttcaccattttcaatgggcagaaaaggttttcaattcatatggaccgcatcaccagcaaggtgataacctcagtcatccatatggcttaggtttatcacatcatcaaagatctgatatcgctcatccatatggcttaggtttctcacatcatcaaagatctgataaactcaacacagcaagttacgtggagaggatccgaatgagacctgacgttggaaattcagtaaatttttttgatttatcttcctatgctcgcttgctgaactccccattcttgtcctcacaatctgatacatataaatccattgatgaagtgatgggaagagtatgcatgctgtcaaaggatcaagatgcatgtcgctttctacaaaaattattatcagaaggcactcaagaggacattgataaaatctttggtgaaataattgacaatgttggtgatcttatggtggatccaactgctcactatttggtgcagaagatccttgaagagtgcaccaatgaccaaaggacacacatgattcgtgaaatcactaaagcacccataaagcttcataaagcttcttgcaatgtgcatgggtatgaacacaataacctttactattttatcatccctatttgttgggttttttttaagaaaggcaggcgtgatgcagtgttgagagctgtcttactgagtgaccaggtcgtgggttcaaagcatttatctcttctctagaccccactcatgtgggaatctccgatactaggtctgctttttttttatttgttggattttttttctttgatcttgtcgtgaaaaatttcaggacccgcgttgtgcagaaggttatagacaccatgaatacccctgaccaagtgtcaatgttagtgtccgccttaaatactggaatgatgtgtttaatgactgattcttatgggaatcatgttgtggaccactgcctgcagaaattgttacctgagcacaaggcattcattcttgaggctgctgcatcatgctatcttcaactagcaagagatcgtcatggttgctgtgtcctccagaaatgtattggtcattcaagtgatgaacagagaaacaacttgttgtgcaagataacatcaagtgcccttacactctcagaagatccgtatgggaactatgttattcagtttattctggacctcaatatcgaatggataacagtcagagtagtggatgagctggcaggtcactttggaaatctatccatgcagaagtgtggttcccatgttgtggagcattgcctgaagctagcgccacggctgatctgtgataggatcatcaacgaactcatgcatgatcctaaactgttggatatcatccttgatcagtatgggaactttgtgattcagacagcgcttaaacagtgtcagggtgaacatcatgctgcttttgttgaaactattaagccgcacactgctgtaatgcaaagtaacatgtatgggaagaaggttctttcaaggatatgcttgaagaacaagcactgccgatttgacctccattaacctagcattttttttttggcgaacgtgtcttcagagacagcagacgggacggaacccttgtacaattctgtgataacttgcagatcttacagatagtgtgtcttggcgaaaagggaaaaagatcttttctttcaagggaaattttggttggttaggggaagcattttgtcgctgccagtttagtgtaatttcgaatgtagaattagtatagtttcatctgcgtgtgatgatggtggtttacattgccggcgttgttatcagtactgtagtttaatgtacctgtcgaactgtgatatcagtaacatcgtgtaatgtgttagttgtacgataaaagctaaagtggcacactagcctggtcattttttcttttggaaaaaaatgaattgaatcggttgtttgaacacttattggaaccacgaaccggaggtgtagcaatttgcaaggttcttt

SEQ ID NO: 45434 - DNA, 2777 bp, Zea Mays
cgccttctggccttcctcaatctcgtcctgcgatttctccaacttccatctgattgtccgcgaccgcttcctcaccgcctccaccaaactccatcaagattccgcaactcgccgtcgcgatcttaagggagattgaaggaacctgcattgtgtgattgactgctgcctagcgttcggctgatcatcctgcttctgccatgggggaatcacagagtagcgaggacgcttccaggttcagagctttgggcaacggtgtctccggtgctgggcaggggagtgctggtgacaatgagctccacgatgggagcattgcatcgcaggctgtcagggcttatccgaatggtgggagatccttggtttctgacgttgggttgtttgacacgttgagggttggaagcaaccagtattttggtttctctcacagtgccagtggtaatccctatgatgagcagtccttgtcgtttgcttttgagggcatgggctttgattcacgcaaaactaattcacctaccagtcatcacaatgtaccactgacaaatggacactatccatctgaacgtgtggatggtactctgagccagcagcatgcacctgcaacacgccaatgtgattctttgggtctacagtttagtgtgcaacatgccatgcagaacaatgatgttgaacaccaggaacaatctcccaggtttccaccacagttggggactttctcaagaaaccctgagctgcacagctttgatcgcaattttggtgttccttgccatccatcaattgcatcagcttcatccttaaaaatgtggcaatctcaaatgtacacaccccatgatcagaatgttggctcaaacttcatgtggcagcaaaatactggtgtacaaccatactctattatgcaaccgaattatgcatgtccacaaatgcagcaagtttctgggtttggtatttctcgacataggagcaatgagcaggctgcagtctaccctcctgcaaagggcccatcctcatcatatattggaacaccaaattttcattggctggaaaatgggtattcttacctaaacggtgctgcttctcagaaaagaagaaatagtggcggtctgaataatacatttgcagacagcttcccaagtacatcttacaccggcagttcatgtggcagtggtgattttcaccattttcaatgggcagaaaaggttttcaattcatatggaccgcatcaccagcaaggtgataacctcagtcatccatatggcttaggtttatcacatcatcaaagatctgatatcgctcatccatatggcttaggtttctcacatcatcaaagatctgataaactcaacacagcaatgatgggaagagtatgcatgctgtcaaaggatcaagatgcatgtcgctttctacaaaaattattatcagaaggcactcaagaggacattgataaaatctttggtgaaataattgacaatgttggtgatcttatggtggatccaactgctcactatttggtgcagaagatccttgaagagtgcaccaatgaccaaaggacacacatgattcgtgaaatcactaaagcacccataaagcttcataaagcttcttgcaatgtgcatgggacccgcgttgtgcagaaggttatagacaccatgaatacccctgaccaagtgtcaatgttagtgtccgccttaaatactggaatgatgtgtttaatgactgattcttatgggaatcatgttgtggaccactgcctgcagaaattgttacctgagcacaaggcattcattcttgaggctgctgcatcatgctatcttcaactagcaagagatcgtcatggttgctgtgtcctccagaaatgtattggtcattcaagtgatgaacagagaaacaacttgttgtgcaagataacatcaagtgcccttacactctcagaagatccgtatgggaactatgttattcagtttattctggacctcaatatcgaatggataacagtcagagtagtggatgagctggcaggtcactttggaaatctatccatgcagaagtgtggttcccatgttgtggagcattgcctgaagctagcgccacggctgatctgtgataggatcatcaacgaactcatgcatgatcctaaactgttggatatcatccttgatcagtatgggaactttgtgattcagacagcgcttaaacagtgtcagggtgaacatcatgctgcttttgttgaaactattaagccgcacactgctgtaatgcaaagtaacatgtatgggaagaaggttctttcaaggatatgcttgaagaacaagcactgccgatttgacctccattaacctagcattttttttttggcgaacgtgtcttcagagacagcagacgggacggaacccttgtacaattctgtgataacttgcagatcttacagatagtgtgtcttggcgaaaagggaaaaagatcttttctttcaagggaaattttggttggttaggggaagcattttgtcgctgccagtttagtgtaatttcgaatgtagaattagtatagtttcatctgcgtgtgatgatggtggtttacattgccggcgttgttatcagtactgtagtttaatgtacctgtcgaactgtgatatcagtaacatcgtgtaatgtgttagttgtacgataaaagctaaagtggcacactagcctggtcattttttcttttggaaaaaaatgaattgaatcggttgtttgaacacttattggaaccacgaaccggaggtgtagcaatttgcaaggttcttt

SEQ ID NO: 45435 - DNA, 2971 bp, Zea Mays
tgcaccacaccaccacctccttgcggaaacgcacgcccaccatctccttcccgtccaagccgccgccttctggccttcctcaatctcgtcctgcgatttctccaacttccatctgattgtccgcgaccgcttcctcaccgcctccaccaaactccatcaagattccgcaactcgccgtcgcgatcttaagattgaaggaacctgcattgtgtgattgactgctgcctagcgttcggctgatcatcctgcttctgccatgggggaatcacagagtagcgaggacgcttccaggttcagagctttgggcaacggtgtctccggtgctgggcaggggagtgctggtgacaatgagctccacgatgggagcattgcatcgcaggctgtcagggcttatccgaatggtgggagatccttggtttctgacgttgggttgtttgacacgttgagggttggaagcaaccagtattttggtttctctcacagtgccagtggtaatccctatgatgagcagtccttgtcgtttgcttttgagggcatgggctttgattcacgcaaaactaattcacctaccagtcatcacaatgtaccactgacaaatggacactatccatctgaacgtgtggatggtactctgagccagcagcatgcacctgcaacacgccaatgtgattctttgggtctacagtttagtgtgcaacatgccatgcagaacaatgatgttgaacaccaggaacaatctcccaggtttccaccacagttggggactttctcaagaaaccctgagctgcacagctttgatcgcaattttggtgttccttgccatccatcaattgcatcagcttcatccttaaaaatgtggcaatctcaaatgtacacaccccatgatcagaatgttggctcaaacttcatgtggcagcaaaatactggtgtacaaccatactctattatgcaaccgaattatgcatgtccacaaatgcagcaagtttctgggtttggtatttctcgacataggagcaatgagcaggctgcagtctaccctcctgcaaagggcccatcctcatcatatattggaacaccaaattttcattggctggaaaatgggtattcttacctaaacggtgctgcttctcagaaaagaagaaatagtggcggtctgaataatacatttgcagacagcttcccaagtacatcttacaccggcagttcatgtggcagtggtgattttcaccattttcaatgggcagaaaaggttttcaattcatatggaccgcatcaccagcaaggtgataacctcagtcatccatatggcttaggtttatcacatcatcaaagatctgatatcgctcatccatatggcttaggtttctcacatcatcaaagatctgataaactcaacacagcaagttacgtggagaggatccgaatgagacctgacgttggaaattcagtaaatttttttgatttatcttcctatgctcgcttgctgaactccccattcttgtcctcacaatctgatacatataaatccattgatgaagtgatgggaagagtatgcatgctgtcaaaggatcaagatgcatgtcgctttctacaaaaattattatcagaaggcactcaagaggacattgataaaatctttggtgaaataattgacaatgttggtgatcttatggtggatccaactgctcactatttggtgcagaagatccttgaagagtgcaccaatgaccaaaggacacacatgattcgtgaaatcactaaagcacccataaagcttcataaagcttcttgcaatgtgcatgggacccgcgttgtgcagaaggttatagacaccatgaatacccctgaccaagtgtcaatgttagtgtccgccttaaatactggaatgatgtgtttaatgactgattcttatgggaatcatgttgtggaccactgcctgcagaaattgttacctgagcacaaggcattcattcttgaggctgctgcatcatgctatcttcaactagcaagagatcgtcatggttgctgtgtcctccagaaatgtattggtcattcaagtgatgaacagagaaacaacttgttgtgcaagataacatcaagtgcccttacactctcagaagatccgtatgggaactatgttattcagtttattctggacctcaatatcgaatggataacagtcagagtagtggatgagctggcaggtcactttggaaatctatccatgcagaagtgtggttcccatgttgtggagcattgcctgaagctagcgccacggctgatctgtgataggatcatcaacgaactcatgcatgatcctaaactgttggatatcatccttgatcagtatgggaactttgtgattcagacagcgcttaaacagtgtcagggtgaacatcatgctgcttttgttgaaactattaagccgcacactgctgtaatgcaaagtaacatgtatgggaagaaggttctttcaaggatatgcttgaagaacaagcactgccgatttgacctccattaacctagcattttttttttggcgaacgtgtcttcagagacagcagacgggacggaacccttgtacaattctgtgataacttgcagatcttacagatagtgtgtcttggcgaaaagggaaaaagatcttttctttcaagggaaattttggttggttaggggaagcattttgtcgctgccagtttagtgtaatttcgaatgtagaattagtatagtttcatctgcgtgtgatgatggtggtttacattgccggcgttgttatcagtactgtagtttaatgtacctgtcgaactgtgatatcagtaacatcgtgtaatgtgttagttgtacgataaaagctaaagtggcacactagcctggtcattttttcttttggaaaaaaatgaattgaatcggttgtttgaacacttattggaaccacgaaccggaggtgtagcaatttgcaaggttcttt

SEQ ID NO: 45436 - DNA, 3209 bp, Zea Mays
cacagattgcgtaggagagagaagacagagaagagagagagagggcagcagggagcaagggaaagagtccaagggaggtaatgcaccacaccaccacctccttgcggaaacgcacgcccaccatctccttcccgtccaagccgccgccttctggccttcctcaatctcgtcctgcgatttctccaacttccatctgattgtccgcgaccgcttcctcaccgcctccaccaaactccatcaagattccgcaactcgccgtcgcgatcttaagggagattgaaggaacctgcattgtgtgattgactgctgcctagcgttcggctgatcatcctgcttctgccatgggggaatcacagagtagcgaggacgcttccaggttcagagctttgggcaacggtgtctccggtgctgggcaggggagtgctggtgacaatgagctccacgatgggagcattgcatcgcaggctgtcagggcttatccgaatggtgggagatccttggtttctgacgttgggttgtttgacacgttgagggttggaagcaaccagtattttggtttctctcacagtgccagtggtaatccctatgatgagcagtccttgtcgtttgcttttgagggcatgggctttgattcacgcaaaactaattcacctaccagtcatcacaatgtaccactgacaaatggacactatccatctgaacgtgtggatggtactctgagccagcagcatgcacctgcaacacgccaatgtgattctttgggtctacagtttagtgtgcaacatgccatgcagaacaatgatgttgaacaccaggaacaatctcccaggtttccaccacagttggggactttctcaagaaaccctgagctgcacagctttgatcgcaattttggtgttccttgccatccatcaattgcatcagcttcatccttaaaaatgtggcaatctcaaatgtacacaccccatgatcagaatgttggctcaaacttcatgtggcagcaaaatactggtgtacaaccatactctattatgcaaccgaattatgcatgtccacaaatgcagcaagtttctgggtttggtatttctcgacataggagcaatgagcaggctgcagtctaccctcctgcaaagggcccatcctcatcatatattggaacaccaaattttcattggctggaaaatgggtattcttacctaaacggtgctgcttctcagaaaagaagaaatagtggcggtctgaataatacatttgcagacagcttcccaagtacatcttacaccggcagttcatgtggcagtggtgattttcaccattttcaatgggcagaaaaggttttcaattcatatggaccgcatcaccagcaaggtgataacctcagtcatccatatggcttaggtttatcacatcatcaaagatctgatatcgctcatccatatggcttaggtttctcacatcatcaaagatctgataaactcaacacagcaagttacgtggagaggatccgaatgagacctgacgttggaaattcagtaaatttttttgatttatcttcctatgctcgcttgctgaactccccattcttgtcctcacaatctgatacatataaatccattgatgaagtgatgggaagagtatgcatgctgtcaaaggatcaagatgcatgtcgctttctacaaaaattattatcagaaggcactcaagaggacattgataaaatctttggtgaaataattgacaatgttggtgatcttatggtggatccaactgctcactatttggtgcagaagatccttgaagagtgcaccaatgaccaaaggacacacatgattcgtgaaatcactaaagcacccataaagcttcataaagcttcttgcaatgtgcatggtgttgagagctgtcttactgagtgaccaggtcgtgggttcaaagcatttatctcttctctagaccccactcatgtgggaatctccgatactaggtctgctttttttttatttgttggattttttttctttgatcttgtcgtgaaaaatttcaggacccgcgttgtgcagaaggttatagacaccatgaatacccctgaccaagtgtcaatgttagtgtccgccttaaatactggaatgatgtgtttaatgactgattcttatgggaatcatgttgtggaccactgcctgcagaaattgttacctgagcacaaggcattcattcttgaggctgctgcatcatgctatcttcaactagcaagagatcgtcatggttgctgtgtcctccagaaatgtattggtcattcaagtgatgaacagagaaacaacttgttgtgcaagataacatcaagtgcccttacactctcagaagatccgtatgggaactatgttattcagtttattctggacctcaatatcgaatggataacagtcagagtagtggatgagctggcaggtcactttggaaatctatccatgcagaagtgtggttcccatgttgtggagcattgcctgaagctagcgccacggctgatctgtgataggatcatcaacgaactcatgcatgatcctaaactgttggatatcatccttgatcagtatgggaactttgtgattcagacagcgcttaaacagtgtcagggtgaacatcatgctgcttttgttgaaactattaagccgcacactgctgtaatgcaaagtaacatgtatgggaagaaggttctttcaaggatatgcttgaagaacaagcactgccgatttgacctccattaacctagcattttttttttggcgaacgtgtcttcagagacagcagacgggacggaacccttgtacaattctgtgataacttgcagatcttacagatagtgtgtcttggcgaaaagggaaaaagatcttttctttcaagggaaattttggttggttaggggaagcattttgtcgctgccagtttagtgtaatttcgaatgtagaattagtatagtttcatctgcgtgtgatgatggtggtttacattgccggcgttgttatcagtactgtagtttaatgtacctgtcgaactgtgatatcagtaacatcgtgtaatgtgttagttgtacgataaaagctaaagtggcacactagcctggtcattttttcttttggaaaaaaatgaattgaatcggttgtttgaacacttattggaaccacgaaccggaggtgtagcaatttgcaaggttcttt

SEQ ID NO: 45437 - DNA, 2819 bp, Zea Mays
cacagattgcgtaggagagagaagacagagaagagagagagagggcagcagggagcaagggaaagagtccaagggaggtaatgcaccacaccaccacctccttgcggaaacgcacgcccaccatctccttcccgtccaagccgccgccttctggccttcctcaatctcgtcctgcgatttctccaacttccatctgattgtccgcgaccgcttcctcaccgcctccaccaaactccatcaagattccgcaactcgccgtcgcgatcttaagggagattgaaggaacctgcattgtgtgattgactgctgcctagcgttcggctgatcatcctgcttctgccatgggggaatcacagagtagcgaggacgcttccaggttcagagctttgggcaacggtgtctccggtgctgggcaggggagtgctggtgacaatgagctccacgatgggagcattgcatcgcaggctgtcagggcttatccgaatggtgggagatccttggtttctgacgttgggttgtttgacacgttgagggttggaagcaaccagtattttggtttctctcacagtgccagtggtaatccctatgatgagcagtccttgtcgtttgcttttgagggcatgggctttgattcacgcaaaactaattcacctaccagtcatcacaatgtaccactgacaaatggacactatccatctgaacgtgtggatggtactctgagccagcagcatgcacctgcaacacgccaatgtgattctttgggtctacagtttagtgtgcaacatgccatgcagaacaatgatgttgaacaccaggaacaatctcccaggtttccaccacagttggggactttctcaagaaaccctgagctgcacagctttgatcgcaattttggtgttccttgccatccatcaattgcatcagcttcatccttaaaaatgtggcaatctcaaatgtacacaccccatgatcagaatgttggctcaaacttcatgtggcagcaaaatactggtgtacaaccatactctattatgcaaccgaattatgcatgtccacaaatgcagcaagtttctgggtttggtatttctcgacataggagcaatgagcaggctgcagtctaccctcctgcaaagggcccatcctcatcatatattggaacaccaaattttcattggctggaaaatgggtattcttacctaaacggtgctgcttctcagaaaagaagaaatagtggcggtctgaataatacatttgcagacagcttcccaagtacatcttacaccggcagttcatgtggcagtggtgattttcaccattttcaatgggcagaaaaggttttcaattcatatggaccgcatcaccagcaaggtgataacctcagtcatccatatggcttaggtttatcacatcatcaaagatctgatatcgctcatccatatggcttaggtttctcacatcatcaaagatctgataaactcaacacagcaagttacgtggagaggatccgaatgagacctgacgttggaaattcagtaaatttttttgatttatcttcctatgctcgcttgctgaactccccattcttgtcctcacaatctgatacatataaatccattgatgaagtgatgggaagagtatgcatgctgtcaaaggatcaagatgcatgtcgctttctacaaaaattattatcagaaggcactcaagaggacattgataaaatctttggtgaaataattgacaatgttggtgatcttatggtggatccaactgctcactatttggtgcagaagatccttgaagagtgcaccaatgaccaaaggacacacatgattcgtgaaatcactaaagcacccataaagcttcataaagcttcttgcaatgtgcatggttcattcttgaggctgctgcatcatgctatcttcaactagcaagagatcgtcatggttgctgtgtcctccagaaatgtattggtcattcaagtgatgaacagagaaacaacttgttgtgcaagataacatcaagtgcccttacactctcagaagatccgtatgggtcactttggaaatctatccatgcagaagtgtggttcccatgttgtggagcattgcctgaagctagcgccacggctgatctgtgataggatcatcaacgaactcatgcatgatcctaaactgttggatatcatccttgatcagtatgggaactttgtgattcagacagcgcttaaacagtgtcagggtgaacatcatgctgcttttgttgaaactattaagccgcacactgctgtaatgcaaagtaacatgtatgggaagaaggttctttcaaggatatgcttgaagaacaagcactgccgatttgacctccattaacctagcattttttttttggcgaacgtgtcttcagagacagcagacgggacggaacccttgtacaattctgtgataacttgcagatcttacagatagtgtgtcttggcgaaaagggaaaaagatcttttctttcaagggaaattttggttggttaggggaagcattttgtcgctgccagtttagtgtaatttcgaatgtagaattagtatagtttcatctgcgtgtgatgatggtggtttacattgccggcgttgttatcagtactgtagtttaatgtacctgtcgaactgtgatatcagtaacatcgtgtaatgtgttagttgtacgataaaagctaaagtggcacactagcctggtcattttttcttttggaaaaaaatgaattgaatcggttgtttgaacacttattggaaccacgaaccggaggtgtagcaatttgcaaggttcttt

SEQ ID NO: 45438 - DNA, 2893 bp, Zea Mays
cacagattgcgtaggagagagaagacagagaagagagagagagggcagcagggagcaagggaaagagtccaagggaggtaatgcaccacaccaccacctccttgcggaaacgcacgcccaccatctccttcccgtccaagccgccgccttctggccttcctcaatctcgtcctgcgatttctccaacttccatctgattgtccgcgaccgcttcctcaccgcctccaccaaactccatcaagattccgcaactcgccgtcgcgatcttaagggagattgaaggaacctgcattgtgtgattgactgctgcctagcgttcggctgatcatcctgcttctgccatgggggaatcacagagtagcgaggacgcttccaggttcagagctttgggcaacggtgtctccggtgctgggcaggggagtgctggtgacaatgagctccacgatgggagcattgcatcgcaggctgtcagggcttatccgaatggtgggagatccttggtttctgacgttgggttgtttgacacgttgagggttggaagcaaccagtattttggtttctctcacagtgccagtggtaatccctatgatgagcagtccttgtcgtttgcttttgagggcatgggctttgattcacgcaaaactaattcacctaccagtcatcacaatgtaccactgacaaatggacactatccatctgaacgtgtggatggtactctgagccagcagcatgcacctgcaacacgccaatgtgattctttgggtctacagtttagtgtgcaacatgccatgcagaacaatgatgttgaacaccaggaacaatctcccaggtttccaccacagttggggactttctcaagaaaccctgagctgcacagctttgatcgcaattttggtgttccttgccatccatcaattgcatcagcttcatccttaaaaatgtggcaatctcaaatgtacacaccccatgatcagaatgttggctcaaacttcatgtggcagcaaaatactggtgtacaaccatactctattatgcaaccgaattatgcatgtccacaaatgcagcaagtttctgggtttggtatttctcgacataggagcaatgagcaggctgcagtctaccctcctgcaaagggcccatcctcatcatatattggaacaccaaattttcattggctggaaaatgggtattcttacctaaacggtgctgcttctcagaaaagaagaaatagtggcggtctgaataatacatttgcagacagcttcccaagtacatcttacaccggcagttcatgtggcagtggtgattttcaccattttcaatgggcagaaaaggttttcaattcatatggaccgcatcaccagcaaggtgataacctcagtcatccatatggcttaggtttatcacatcatcaaagatctgatatcgctcatccatatggcttaggtttctcacatcatcaaagatctgataaactcaacacagcaagttacgtggagaggatccgaatgagacctgacgttggaaattcagtaaatttttttgatttatcttcctatgctcgcttgctgaactccccattcttgtcctcacaatctgatacatataaatccattgatgaagtgatgggaagagtatgcatgctgtcaaaggatcaagatgcatgtcgctttctacaaaaattattatcagaaggcactcaagaggacattgataaaatctttggtgaaataattgacaatgttggtgatcttatggtggatccaactgctcactatttggtgcagaagatccttgaagagtgcaccaatgaccaaaggacacacatgattcgtgaaatcactaaagcacccataaagcttcataaagcttcttgcaatgtgcatggttcattcttgaggctgctgcatcatgctatcttcaactagcaagagatcgtcatggttgctgtgtcctccagaaatgtattggtcattcaagtgatgaacagagaaacaacttgttgtgcaagataacatcaagtgcccttacactctcagaagatccgtatgggaactatgttattcagtttattctggacctcaatatcgaatggataacagtcagagtagtggatgagctggcaggtcactttggaaatctatccatgcagaagtgtggttcccatgttgtggagcattgcctgaagctagcgccacggctgatctgtgataggatcatcaacgaactcatgcatgatcctaaactgttggatatcatccttgatcagtatgggaactttgtgattcagacagcgcttaaacagtgtcagggtgaacatcatgctgcttttgttgaaactattaagccgcacactgctgtaatgcaaagtaacatgtatgggaagaaggttctttcaaggatatgcttgaagaacaagcactgccgatttgacctccattaacctagcattttttttttggcgaacgtgtcttcagagacagcagacgggacggaacccttgtacaattctgtgataacttgcagatcttacagatagtgtgtcttggcgaaaagggaaaaagatcttttctttcaagggaaattttggttggttaggggaagcattttgtcgctgccagtttagtgtaatttcgaatgtagaattagtatagtttcatctgcgtgtgatgatggtggtttacattgccggcgttgttatcagtactgtagtttaatgtacctgtcgaactgtgatatcagtaacatcgtgtaatgtgttagttgtacgataaaagctaaagtggcacactagcctggtcattttttcttttggaaaaaaatgaattgaatcggttgtttgaacacttattggaaccacgaaccggaggtgtagcaatttgcaaggttcttt

SEQ ID NO: 45439 - DNA, 3042 bp, Zea Mays
aacacagattgcgtaggagagagaagacagagaagagagagagagggcagcagggagcaagggaaagagtccaagggaggtaatgcaccacaccaccacctccttgcggaaacgcacgcccaccatctccttcccgtccaagccgccgccttctggccttcctcaatctcgtcctgcgatttctccaacttccatctgattgtccgcgaccgcttcctcaccgcctccaccaaactccatcaagattccgcaactcgccgtcgcgatcttaagggagattgaaggaacctgcattgtgtgattgactgctgcctagcgttcggctgatcatcctgcttctgccatgggggaatcacagagtagcgaggacgcttccaggttcagagctttgggcaacggtgtctccggtgctgggcaggggagtgctggtgacaatgagctccacgatgggagcattgcatcgcaggctgtcagggcttatccgaatggtgggagatccttggtttctgacgttgggttgtttgacacgttgagggttggaagcaaccagtattttggtttctctcacagtgccagtggtaatccctatgatgagcagtccttgtcgtttgcttttgagggcatgggctttgattcacgcaaaactaattcacctaccagtcatcacaatgtaccactgacaaatggacactatccatctgaacgtgtggatggtactctgagccagcagcatgcacctgcaacacgccaatgtgattctttgggtctacagtttagtgtgcaacatgccatgcagaacaatgatgttgaacaccaggaacaatctcccaggtttccaccacagttggggactttctcaagaaaccctgagctgcacagctttgatcgcaattttggtgttccttgccatccatcaattgcatcagcttcatccttaaaaatgtggcaatctcaaatgtacacaccccatgatcagaatgttggctcaaacttcatgtggcagcaaaatactggtgtacaaccatactctattatgcaaccgaattatgcatgtccacaaatgcagcaagtttctgggtttggtatttctcgacataggagcaatgagcaggctgcagtctaccctcctgcaaagggcccatcctcatcatatattggaacaccaaattttcattggctggaaaatgggtattcttacctaaacggtgctgcttctcagaaaagaagaaatagtggcggtctgaataatacatttgcagacagcttcccaagtacatcttacaccggcagttcatgtggcagtggtgattttcaccattttcaatgggcagaaaaggttttcaattcatatggaccgcatcaccagcaaggtgataacctcagtcatccatatggcttaggtttatcacatcatcaaagatctgatatcgctcatccatatggcttaggtttctcacatcatcaaagatctgataaactcaacacagcaagttacgtggagaggatccgaatgagacctgacgttggaaattcagtaaatttttttgatttatcttcctatgctcgcttgctgaactccccattcttgtcctcacaatctgatacatataaatccattgatgaagtgatgggaagagtatgcatgctgtcaaaggatcaagatgcatgtcgctttctacaaaaattattatcagaaggcactcaagaggacattgataaaatctttggtgaaataattgacaatgttggtgatcttatggtggatccaactgctcactatttggtgcagaagatccttgaagagtgcaccaatgaccaaaggacacacatgattcgtgaaatcactaaagcacccataaagcttcataaagcttcttgcaatgtgcatggaaggttatagacaccatgaatacccctgaccaagtgtcaatgttagtgtccgccttaaatactggaatgatgtgtttaatgactgattcttatgggaatcatgttgtggaccactgcctgcagaaattgttacctgagcacaaggcattcattcttgaggctgctgcatcatgctatcttcaactagcaagagatcgtcatggttgctgtgtcctccagaaatgtattggtcattcaagtgatgaacagagaaacaacttgttgtgcaagataacatcaagtgcccttacactctcagaagatccgtatgggaactatgttattcagtttattctggacctcaatatcgaatggataacagtcagagtagtggatgagctggcaggtcactttggaaatctatccatgcagaagtgtggttcccatgttgtggagcattgcctgaagctagcgccacggctgatctgtgataggatcatcaacgaactcatgcatgatcctaaactgttggatatcatccttgatcagtatgggaactttgtgattcagacagcgcttaaacagtgtcagggtgaacatcatgctgcttttgttgaaactattaagccgcacactgctgtaatgcaaagtaacatgtatgggaagaaggttctttcaaggatatgcttgaagaacaagcactgccgatttgacctccattaacctagcattttttttttggcgaacgtgtcttcagagacagcagacgggacggaacccttgtacaattctgtgataacttgcagatcttacagatagtgtgtcttggcgaaaagggaaaaagatcttttctttcaagggaaattttggttggttaggggaagcattttgtcgctgccagtttagtgtaatttcgaatgtagaattagtatagtttcatctgcgtgtgatgatggtggtttacattgccggcgttgttatcagtactgtagtttaatgtacctgtcgaactgtgatatcagtaacatcgtgtaatgtgttagttgtacgataaaagctaaagtggcacactagcctggtcattttttcttttggaaaaaaatgaattgaatcggttgtttgaacacttattggaaccacgaaccggaggtgtagcaatttgcaaggttcttt

SEQ ID NO: 45440 - DNA, 992 bp, Zea Mays
agacatgacattttccagataatcagtatcacgacacttttagctttaagacttatgtctgtaatggcagctattcggttagatgataatccagacaaaatagaacgagctctgactactgctcttttagatgggggccccctttctcacaagaggagtatagaatttgcttctgatcctcttgcttcaagcacgtgggaagaggtttcaccaaaggatacactgattacgccagtgcagtgtaaatccatctggaggcaattcaaagcagagacagagtattctgttgcgcaagcaatgtctatgcaggaagcacaaaggcgtagcaagaactggttgccacctgcatggactattctgcttctggcaatactaggctacaacgaatttatgtttcttcttaggaatccattgtaccttctggggctctttgttgcctttgtgttatcatatgccatatggatgcaatatgacatcactgcttattttcgtcatggcacgctatctgctcttcttacgattttatcaagactgctcccaacaatcatagacattatgatgcaaataattaatatgaagcacaagcacaagtccccacatccatctcgtcatccccaacatatccatgctcagagcttcatgaaccagacgtggggacgggcccaagtgcggtaccagtctcctgactcgccatcctcatcttcctccgtgggctcgaacagtggtgatgactcttgaagctgtgcatagaacatagaacttccatgtggatgtcccagtacttagataggtagccttcaggttccggggtttcttggtaactaggaaccattgtcgtgtcatcgtgtgcttcaaactttgatgtgtaaatgtataatgtaagattaaaaccataacttttacgtaccccagttacgaatttgaagcaggacgaccccgaaatcgtaagcctagccgccgccatttctccctacccctcgccatcgctggag

SEQ ID NO: 45441 - DNA, 1433 bp, Zea Mays
acagcagttaaacatgtgcagtgggatgcttcaaaagttaggaataaactgcaagagcatatacaagctcatgtagaatgtattaggaacgcaaaattggctgaactgagagctaactttgagaagaagctgtcagacgcaatttctgggcctgtacaatccatactggaaactggcgagagagactcctgggcatgcattaggagactatataggcgtgagattgaaaatgctgctctttcattctcagcttccctttctgagtttgacctagaccaaacaatttccaataagatggtctcagatttgagggaatatgcaagaagtgtagtagaaactaaagctagagaagaagctggaaatgttctgatgcgcatgaaagaaaggtttttcactgtgttgagccatgataaggactcgatgccaaggtcatggatgcgagatgaggatatccgtacaatcactagagaagcacgcttaggggctttaagacttatgtctgtaatggcagctattcggttagatgataatccagacaaaatagaacgagctctgactactgctcttttagatgggggccccctttctcacaagaggagtatagaatttgcttctgatcctcttgcttcaagcacgtgggaagaggtttcaccaaaggatacactgattacgccagtgcagtgtaaatccatctggaggcaattcaaagcagagacagagtattctgttgcgcaagcaatgtctatgcaggaagcacaaaggcgtagcaagaactggttgccacctgcatggactattctgcttctggcaatactaggctacaacgaatttatgtttcttcttaggaatccattgtaccttctggggctctttgttgcctttgtgttatcatatgccatatggatgcaatatgacatcactgcttattttcgtcatggcacgctatctgctcttcttacgattttatcaagactgctcccaacaatcatagacattatgatgcaaataattaatatgaagcacaagcacaagtccccacatccatctcgtcatccccaacatatccatgctcagagcttcatgaaccagacgtggggacgggcccaagtgcggtaccagtctcctgactcgccatcctcatcttcctccgtgggctcgaacagtggtgatgactcttgaagctgtgcatagaacatagaacttccatgtggatgtcccagtacttagataggtagccttcaggttccggggtttcttggtaactaggaaccattgtcgtgtcatcgtgtgcttcaaactttgatgtgtaaatgtataatgtaagattaaaaccataacttttacgtaccccagttacgaatttgaagcaggacgaccccgaaatcgtaagcctagccgccgccatttctccctacccctcgccatcgctggag

SEQ ID NO: 45442 - DNA, 1493 bp, Zea Mays
cagagtttgagggtgtaaggacaatgtcatccacatacagatccacatacaaaagcagatacagcagttaaacatgtgcagtgggatgcttcaaaagttaggaataaactgcaagagcatatacaagctcatgtagaatgtattaggaacgcaaaattggctgaactgagagctaactttgagaagaagctgtcagacgcaatttctgggcctgtacaatccatactggaaactggcgagagagactcctgggcatgcattaggagactatataggcgtgagattgaaaatgctgctctttcattctcagcttccctttctgagtttgacctagaccaaacaatttccaataagatggtctcagatttgagggaatatgcaagaagtgtagtagaaactaaagctagagaagaagctggaaatgttctgatgcgcatgaaagaaaggtttttcactgtgttgagccatgataaggactcgatgccaaggtcatggatgcgagatgaggatatccgtacaatcactagagaagcacgcttaggggctttaagacttatgtctgtaatggcagctattcggttagatgataatccagacaaaatagaacgagctctgactactgctcttttagatgggggccccctttctcacaagaggagtatagaatttgcttctgatcctcttgcttcaagcacgtgggaagaggtttcaccaaaggatacactgattacgccagtgcagtgtaaatccatctggaggcaattcaaagcagagacagagtattctgttgcgcaagcaatgtctatgcaggaagcacaaaggcgtagcaagaactggttgccacctgcatggactattctgcttctggcaatactaggctacaacgaatttatgtttcttcttaggaatccattgtaccttctggggctctttgttgcctttgtgttatcatatgccatatggatgcaatatgacatcactgcttattttcgtcatggcacgctatctgctcttcttacgattttatcaagactgctcccaacaatcatagacattatgatgcaaataattaatatgaagcacaagcacaagtccccacatccatctcgtcatccccaacatatccatgctcagagcttcatgaaccagacgtggggacgggcccaagtgcggtaccagtctcctgactcgccatcctcatcttcctccgtgggctcgaacagtggtgatgactcttgaagctgtgcatagaacatagaacttccatgtggatgtcccagtacttagataggtagccttcaggttccggggtttcttggtaactaggaaccattgtcgtgtcatcgtgtgcttcaaactttgatgtgtaaatgtataatgtaagattaaaaccataacttttacgtaccccagttacgaatttgaagcaggacgaccccgaaatcgtaagcctagccgccgccatttctccctacccctcgccatcgctggag

SEQ ID NO: 45443 - DNA, 1518 bp, Zea Mays
gcggaaccaaaaaatctttgttaatattcaacagccctccaagtatccacacgaatcaaggagaacctcgacctacataaaagatacagcagttaaacatgtgcagtgggatgcttcaaaagttaggaataaactgcaagagcatatacaagctcatgtagaatgtattaggaacgcaaaattggctgaactgagagctaactttgagaagaagctgtcagacgcaatttctgggcctgtacaatccatactggaaactggcgagagagactcctgggcatgcattaggagactatataggcgtgagattgaaaatgctgctctttcattctcagcttccctttctgagtttgacctagaccaaacaatttccaataagatggtctcagatttgagggaatatgcaagaagtgtagtagaaactaaagctagagaagaagctggaaatgttctgatgcgcatgaaagaaaggtttttcactgtgttgagccatgataaggactcgatgccaaggtcatggatgcgagatgaggatatccgtacaatcactagagaagcacgcttaggggctttaagacttatgtctgtaatggcagctattcggttagatgataatccagacaaaatagaacgagctctgactactgctcttttagatgggggccccctttctcacaagaggagtatagaatttgcttctgatcctcttgcttcaagcacgtgggaagaggtttcaccaaaggatacactgattacgccagtgcagtgtaaatccatctggaggcaattcaaagcagagacagagtattctgttgcgcaagcaatgtctatgcaggaagcacaaaggcgtagcaagaactggttgccacctgcatggactattctgcttctggcaatactaggctacaacgaatttatgtttcttcttaggaatccattgtaccttctggggctctttgttgcctttgtgttatcatatgccatatggatgcaatatgacatcactgcttattttcgtcatggcacgctatctgctcttcttacgattttatcaagactgctcccaacaatcatagacattatgatgcaaataattaatatgaagcacaagcacaagtccccacatccatctcgtcatccccaacatatccatgctcagagcttcatgaaccagacgtggggacgggcccaagtgcggtaccagtctcctgactcgccatcctcatcttcctccgtgggctcgaacagtggtgatgactcttgaagctgtgcatagaacatagaacttccatgtggatgtcccagtacttagataggtagccttcaggttccggggtttcttggtaactaggaaccattgtcgtgtcatcgtgtgcttcaaactttgatgtgtaaatgtataatgtaagattaaaaccataacttttacgtaccccagttacgaatttgaagcaggacgaccccgaaatcgtaagcctagccgccgccatttctccctacccctcgccatcgctggag

SEQ ID NO: 45444 - DNA, 1753 bp, Zea Mays
caatttcaactatacttgagtcatgcaaattctcaatcactgggaatagagtgtttgatatctgagatgactggtatgacatggaaaccatgtattttgatgaaggtgtacgagctgctaagcggcaacaattggaatcttcaatgctagatcacgcatatcctgttatcgagagagtaatggagcacctgcatcttgtggctctcgacaaattcaaaggtgacctcgaacaatcattaaggcatacagaaggatttgcagaatcagttcgtcggtgttctcaaacttcaatggcagagtttgatgctggaatgacagatacagcagttaaacatgtgcagtgggatgcttcaaaagttaggaataaactgcaagagcatatacaagctcatgtagaatgtattaggaacgcaaaattggctgaactgagagctaactttgagaagaagctgtcagacgcaatttctgggcctgtacaatccatactggaaactggcgagagagactcctgggcatgcattaggagactatataggcgtgagattgaaaatgctgctctttcattctcagcttccctttctgagtttgacctagaccaaacaatttccaataagatggtctcagatttgagggaatatgcaagaagtgtagtagaaactaaagctagagaagaagctggaaatgttctgatgcgcatgaaagaaaggtttttcactgtgttgagccatgataaggactcgatgccaaggtcatggatgcgagatgaggatatccgtacaatcactagagaagcacgcttaggggctttaagacttatgtctgtaatggcagctattcggttagatgataatccagacaaaatagaacgagctctgactactgctcttttagatgggggccccctttctcacaagaggagtatagaatttgcttctgatcctcttgcttcaagcacgtgggaagaggtttcaccaaaggatacactgattacgccagtgcagtgtaaatccatctggaggcaattcaaagcagagacagagtattctgttgcgcaagcaatgtctatgcaggaagcacaaaggcgtagcaagaactggttgccacctgcatggactattctgcttctggcaatactaggctacaacgaatttatgtttcttcttaggaatccattgtaccttctggggctctttgttgcctttgtgttatcatatgccatatggatgcaatatgacatcactgcttattttcgtcatggcacgctatctgctcttcttacgattttatcaagactgctcccaacaatcatagacattatgatgcaaataattaatatgaagcacaagcacaagtccccacatccatctcgtcatccccaacatatccatgctcagagcttcatgaaccagacgtggggacgggcccaagtgcggtaccagtctcctgactcgccatcctcatcttcctccgtgggctcgaacagtggtgatgactcttgaagctgtgcatagaacatagaacttccatgtggatgtcccagtacttagataggtagccttcaggttccggggtttcttggtaactaggaaccattgtcgtgtcatcgtgtgcttcaaactttgatgtgtaaatgtataatgtaagattaaaaccataacttttacgtaccccagttacgaatttgaagcaggacgaccccgaaatcgtaagcctagccgccgccatttctccctacccctcgccatcgctggag

SEQ ID NO: 45445 - DNA, 1980 bp, Zea Mays
tgcatcagttttttgaaattaaggtggtcttgcagccgatagaagaggtgtgatacctgcttcaggcttttctctcagtgcactgcagatttgggaagtaatacgtgaaaataaggacctcaaccttcctgctcacgaggtcatggttgctactgttcgatgtgaagagattgcaaatgaaaacctcaaacagtttttgtctgataagggttggttggatctaaatgcagctgtagaatctggtctgccaccaagcttcggaatgaggctcagtgctattctcgactcttatctatccgagtatgacatggaaaccatgtattttgatgaaggtgtacgagctgctaagcggcaacaattggaatcttcaatgctagatcacgcatatcctgttatcgagagagtaatggagcacctgcatcttgtggctctcgacaaattcaaaggtgacctcgaacaatcattaaggcatacagaaggatttgcagaatcagttcgtcggtgttctcaaacttcaatggcagagtttgatgctggaatgacagatacagcagttaaacatgtgcagtgggatgcttcaaaagttaggaataaactgcaagagcatatacaagctcatgtagaatgtattaggaacgcaaaattggctgaactgagagctaactttgagaagaagctgtcagacgcaatttctgggcctgtacaatccatactggaaactggcgagagagactcctgggcatgcattaggagactatataggcgtgagattgaaaatgctgctctttcattctcagcttccctttctgagtttgacctagaccaaacaatttccaataagatggtctcagatttgagggaatatgcaagaagtgtagtagaaactaaagctagagaagaagctggaaatgttctgatgcgcatgaaagaaaggtttttcactgtgttgagccatgataaggactcgatgccaaggtcatggatgcgagatgaggatatccgtacaatcactagagaagcacgcttaggggctttaagacttatgtctgtaatggcagctattcggttagatgataatccagacaaaatagaacgagctctgactactgctcttttagatgggggccccctttctcacaagaggagtatagaatttgcttctgatcctcttgcttcaagcacgtgggaagaggtttcaccaaaggatacactgattacgccagtgcagtgtaaatccatctggaggcaattcaaagcagagacagagtattctgttgcgcaagcaatgtctatgcaggaagcacaaaggcgtagcaagaactggttgccacctgcatggactattctgcttctggcaatactaggctacaacgaatttatgtttcttcttaggaatccattgtaccttctggggctctttgttgcctttgtgttatcatatgccatatggatgcaatatgacatcactgcttattttcgtcatggcacgctatctgctcttcttacgattttatcaagactgctcccaacaatcatagacattatgatgcaaataattaatatgaagcacaagcacaagtccccacatccatctcgtcatccccaacatatccatgctcagagcttcatgaaccagacgtggggacgggcccaagtgcggtaccagtctcctgactcgccatcctcatcttcctccgtgggctcgaacagtggtgatgactcttgaagctgtgcatagaacatagaacttccatgtggatgtcccagtacttagataggtagccttcaggttccggggtttcttggtaactaggaaccattgtcgtgtcatcgtgtgcttcaaactttgatgtgtaaatgtataatgtaagattaaaaccataacttttacgtaccccagttacgaatttgaagcaggacgaccccgaaatcgtaagcctagccgccgccatttctccctacccctcgccatcgctggag

SEQ ID NO: 45446 - DNA, 2853 bp, Zea Mays
cggcgcctcccattctctctctgactctctcactcgccgtcgcgtcgcttccgggttccggttccggccctgctcgtgggttgctttgcttcggttctccggcgagcgagaggggatcgatggacgccacgggggccgtcggagtcggcggccgggacggcgagtgccacgcggcgcaggtggtgggcgcggacggagagatggacgcggccgcgatcgagcggttcgccgccgccgcggggctccaggggcggggcctctcctacgccgtcgtctcaatcctcggaccccagggcagcgggaaaagtaccttgctcaaccatctcttcgggacaagcttcagggaaatggatgccttgaaaggaaggcaccagaccaccaagggcatttggatcgccaaggctgctgggatcgagccgttcactgttgtgctggacctggaggggacggacgggagggagcgagggcaggatgatacagctttcgagaagcagagtgctctgtttgctcttgcagtttcagacattgttatgataaatttgtggtgccatgacattgggcgagaacatgctgctaacaggcctcttttgagaacagtattccaggtcttgatgcgtttatttagccctcgcaagacgacactactacttgttatccgtgataaaacaaagactccactagagtacctaacacaagctctcaaggaggatattcagaagatatgggactctgttcagaaaccagaagcttacaaggaagcagcgctcagtgatttcttcgatgtggaggccactgctctatcgagttatgaagagaaagaagaactatttaaggagcaggttggacaactgaggcagaggttttatcattcaattgcaccaggtggtcttgcagccgatagaagaggtgtgatacctgcttcaggcttttctctcagtgcactgcagatttgggaagtaatacgtgaaaataaggacctcaaccttcctgctcacgaggtcatggttgctactgttcgatgtgaagagattgcaaatgaaaacctcaaacagtttttgtctgataagggttggttggatctaaatgcagctgtagaatctggtctgccaccaagcttcggaatgaggctcagtgctattctcgactcttatctatccgagtatgacatggaaaccatgtattttgatgaaggtgtacgagctgctaagcggcaacaattggaatcttcaatgctagatcacgcatatcctgttatcgagagagtaatggagcacctgcatcttgtggctctcgacaaattcaaaggtgacctcgaacaatcattaaggcatacagaaggatttgcagaatcagttcgtcggtgttctcaaacttcaatggcagagtttgatgctggaatgacagctttttttatgcagatacagcagttaaacatgtgcagtgggatgcttcaaaagttaggaataaactgcaagagcatatacaagctcatgtagaatgtattaggaacgcaaaattggctgaactgagagctaactttgagaagaagctgtcagacgcaatttctgggcctgtacaatccatactggaaactggcgagagagactcctgggcatgcattaggagactatataggcgtgagattgaaaatgctgctctttcattctcagcttccctttctgagtttgacctagaccaaacaatttccaataagatggtctcagatttgagggaatatgcaagaagtgtagtagaaactaaagctagagaagaagctggaaatgttctgatgcgcatgaaagaaaggtttttcactgtgttgagccatgataaggactcgatgccaaggtcatggatgcgagatgaggatatccgtacaatcactagagaagcacgcttaggggctttaagacttatgtctgtaatggcagctattcggttagatgataatccagacaaaatagaacgagctctgactactgctcttttagatgggggccccctttctcacaagaggagtatagaatttgcttctgatcctcttgcttcaagcacgtgggaagaggtttcaccaaaggatacactgattacgccagtgcagtgtaaatccatctggaggcaattcaaagcagagacagagtattctgttgcgcaagcaatgtctatgcaggaagcacaaaggcgtagcaagaactggttgccacctgcatggactattctgcttctggcaatactaggctacaacgaatttatgtttcttcttaggaatccattgtaccttctggggctctttgttgcctttgtgttatcatatgccatatggatgcaatatgacatcactgcttattttcgtcatggcacgctatctgctcttcttacgattttatcaagactgctcccaacaatcatagacattatgatgcaaataattaatatgaagcacaagcacaagtccccacatccatctcgtcatccccaacatatccatgctcagagcttcatgaaccagacgtggggacgggcccaagtgcggtaccagtctcctgactcgccatcctcatcttcctccgtgggctcgaacagtggtgatgactcttgaagctgtgcatagaacatagaacttccatgtggatgtcccagtacttagataggtagccttcaggttccggggtttcttggtaactaggaaccattgtcgtgtcatcgtgtgcttcaaactttgatgtgtaaatgtataatgtaagattaaaaccataacttttacgtaccccagttacgaatttgaagcaggacgaccccgaaatcgtaagcctagccgccgccatttctccctacccctcgccatcgctggag

SEQ ID NO: 45447 - DNA, 2754 bp, Zea Mays
gccttcgcggcgcctcccattctctctctgactctctcactcgccgtcgcgtcgcttccgggttccggttccggccctgctcgtgggttgctttgcttcggttctccggcgagcgagaggggatcgatggacgccacgggggccgtcggagtcggcggccgggacggcgagtgccacgcggcgcaggtggtgggcgcggacggagagatggacgcggccgcgatcgagcggttcgccgccgccgcggggctccaggggcggggcctctcctacgccgtcgtctcaatcctcggaccccagggcagcgggaaaagtaccttgctcaaccatctcttcgggacaagcttcagggaaatggatgccttgaaaggaaggcaccagaccaccaagggcatttggatcgccaaggctgctgggatcgagccgttcactgttgtgctggacctggaggggacggacgggagggagcgagggcaggatgatacagctttcgagaagcagagtgctctgtttgctcttgcagtttcagacattgttatgataaatttgtggtgccatgacattgggcgagaacatgctgctaacaggcctcttttgagaacagtattccaggtcttgatgcgtttatttagccctcgcaagacgacactactacttgttatccgtgataaaacaaagactccactagagtacctaacacaagctctcaaggaggatattcagaagatatgggactctgttcagaaaccagaagcttacaaggaagcagcgctcagtgatttcttcgatgtggaggccactgctctatcgagttatgaagagaaagaagaactatttaaggagcaggttggacaactgaggcagaggttttatcattcaattgcaccaggtggtcttgcagccgatagaagaggtcatggttgctactgttcgatgtgaagagattgcaaatgaaaacctcaaacagtttttgtctgataagggttggttggatctaaatgcagctgtagaatctggtctgccaccaagcttcggaatgaggctcagtgctattctcgactcttatctatccgagtatgacatggaaaccatgtattttgatgaaggtgtacgagctgctaagcggcaacaattggaatcttcaatgctagatcacgcatatcctgttatcgagagagtaatggagcacctgcatcttgtggctctcgacaaattcaaaggtgacctcgaacaatcattaaggcatacagaaggatttgcagaatcagttcgtcggtgttctcaaacttcaatggcagagtttgatgctggaatgacagatacagcagttaaacatgtgcagtgggatgcttcaaaagttaggaataaactgcaagagcatatacaagctcatgtagaatgtattaggaacgcaaaattggctgaactgagagctaactttgagaagaagctgtcagacgcaatttctgggcctgtacaatccatactggaaactggcgagagagactcctgggcatgcattaggagactatataggcgtgagattgaaaatgctgctctttcattctcagcttccctttctgagtttgacctagaccaaacaatttccaataagatggtctcagatttgagggaatatgcaagaagtgtagtagaaactaaagctagagaagaagctggaaatgttctgatgcgcatgaaagaaaggtttttcactgtgttgagccatgataaggactcgatgccaaggtcatggatgcgagatgaggatatccgtacaatcactagagaagcacgcttaggggctttaagacttatgtctgtaatggcagctattcggttagatgataatccagacaaaatagaacgagctctgactactgctcttttagatgggggccccctttctcacaagaggagtatagaatttgcttctgatcctcttgcttcaagcacgtgggaagaggtttcaccaaaggatacactgattacgccagtgcagtgtaaatccatctggaggcaattcaaagcagagacagagtattctgttgcgcaagcaatgtctatgcaggaagcacaaaggcgtagcaagaactggttgccacctgcatggactattctgcttctggcaatactaggctacaacgaatttatgtttcttcttaggaatccattgtaccttctggggctctttgttgcctttgtgttatcatatgccatatggatgcaatatgacatcactgcttattttcgtcatggcacgctatctgctcttcttacgattttatcaagactgctcccaacaatcatagacattatgatgcaaataattaatatgaagcacaagcacaagtccccacatccatctcgtcatccccaacatatccatgctcagagcttcatgaaccagacgtggggacgggcccaagtgcggtaccagtctcctgactcgccatcctcatcttcctccgtgggctcgaacagtggtgatgactcttgaagctgtgcatagaacatagaacttccatgtggatgtcccagtacttagataggtagccttcaggttccggggtttcttggtaactaggaaccattgtcgtgtcatcgtgtgcttcaaactttgatgtgtaaatgtataatgtaagattaaaaccataacttttacgtaccccagttacgaatttgaagcaggacgaccccgaaatcgtaagcctagccgccgccatttctccctacccctcgccatcgctggag

SEQ ID NO: 45448 - DNA, 1344 bp, Zea Mays
actggcttcctctgccgctcgcagtctcgctccacaaccacaactatccatccactaccggctccctccctcctcctgaaaaccccgaccgcgggcgaaccaaaccctagcgagcgaggcgatcagcgtccggcgaccggcgacagagcgcaatggagacgcgcccggcgccttgcgacctcgaggcggccgtgcccgcgggctccggggctgcaacggcggcggcggcgcagcaggaggcacccgcggcgaagaaagtggcggaggaggaggatccgcgcctgcgctgggccttcgtgcggaaggtgtacgccattctctccctccagttcgcgctcaccgcggccgtcgcggccaccgcgtgcctcgtccgcccgatcccgcgcttcttcgcctccggcccccccgccgcctcatgttccccatgctcaagtacagggagaagcaccccaggaacctcgtcctgctcgccgtattcactctctgctgcagtctcagcatcgccgtctccgcctccaccaccctcggcacagtggtcctgcaagctaccatcctcacagctgctgctgtcctggggctcaccctcttcaccttctggggcgtcaagaggggctacgacttcaccttcacgttccccttcctgttcgcctgcctcgtcgtgctgctggtgtacatcatcatccaggtctgcttcccgctgggaagggtagccatgaccatctacggcgtcctggccaccgtggtgttctcgggcttcatcgtctatgacaccaacaagctgctgaagcgccacgcctacaaccagtacgtggtggcagccatctccctctacctggacgtcatcaacctcttcatggcccagatggccatctccttccagtgatggattgcgggtctcacctgtacggctgtaccccatgcatgacggcgcctcgcccgtctggtacatggtggatcacacatccacatagcttcgcaagtcgagctgtctttcattatccttatcctaatactggtagtaccaatagcattacagtcctacagatctgtaattggctggccacccttcagctgagacagtatatatatcgtatatggcacctcaccataaatgacgttggagaccatgagatggttggtcgtgcttcggcaccgtatagttgtgacggtgacatgctgatttgaggtcaaagtaggatgacgttttctcgattttttaggatcatgccgccaacaaatattgtccaacgaatattgttctggtgtcgtgagatgggagatgcttactatgttggataacactagtagcggtaattttttactctgctatagcggttgatggac

SEQ ID NO: 45449 - DNA, 1324 bp, Zea Mays
atcagctagctgcccacagtcagtgttgttggcgaggctagcttttactacctagctagcttgcacttgcacaagttgtgtgctttatttaggatgcgcatgccatatggaagactattatataggggtcgatcgtcgagcgtcggcgaggttaccttaacaaaatttattattatctatatatgagccagtgtagtagaacattatatattttactaccggtcatatatgaatcacgatcgaaatatgcctgagctctagccgcattcgtaatttccatacatgaatcacgtacaattgaaataactgcaggaccctatttcaacgttttgccaccctttttctgcacgggaggggacgggtggagcgaggaagtgtagtttattagtcatcaaacgtttaaatatcaattatgtgtattgtatataggtttaattaggtttaataaatttgtctcgttttttagtctctatctgtattattagttttacaattaattatattcaatacacgttgttaccattcaaatatttgatgtatatatatatttgagctagccttatgagctagtgggcattattttgctcaataatatccgtgttccaggcttttagtttttattgttatccggtaggttagctggttagagaaatgtcttgtatattggctggatcagatggcacgagtttctgtgattgttgctatgatatcatatatatactctcaccattttttcgtgtcactcatcagtcccatcacaagtctctgtccgtatggaaataattggacgcccctaaattcaacttttgccacgcctttttttagcacggaacggggcaggtggagccgtggaggcgtggagccagtgtggtgcagatcttctacgatggtgttggcgtcgatttgaatgtcaatcactggagatgaaccgtctggcgatgctatctacgggagcgaggacggtccgcggctctgtgtcgaacggtccacggcctcaacgcaggagcgactccttccttgtgtgcttccgaacggtccgcgcctgggagggaccatgtcggggaggagagttttagggattgtctgagggtcggcaggctgcccaagacgtctctagttgacgcagagtcgaacaacaatgaagaaataggtcgagggagacaaatactagggctaggctaaggctagattactctcactcctaatgaatggaaagaaaagtgcaaataaggtaaattgataagtagatttgattggatcgattgtgcaagcttcaattggtcgtaccccttcatctatataaaggtggaagtccggacccgtt

SEQ ID NO: 45450 - DNA, 1469 bp, Zea Mays
cctctccgcgcccacagcccctgcttccatcctagcccccgccgccgcgacgacgctggtggcgtcctccccgcgcccgtgaccccgccctcgtcctcgtcaatccgctccaccagcaagtaaaaaaagcggcgtcccaatcccacagtgcttccacctcgaccgcctatcgggctcccacgcccatccccactacctcgtgatccccggcgacgctgcggcgcctcgcgcggccatacccccgctccaccccgatcccgcgaccagccagcgcaagctcaaccacgcccctgcccagccccgcgcatgcccgccgcgacaagcgcacttcctcaggtgagacgctcgctggttcctcggtggcaatggaaagcacgccgcattccagacatcgtcaccagttcctcgatggaaagcacgcatcccgtcattctcggggccccgatcggcctccacaatcctgacatcctcgccccgccatcctcgtccccgagccaggcatctttcttaccatccgagatcttcaatcagcccaaattgatgggtccttaaattatgttgcttcaatcaccttccatcccaatgccgatacctaccatcgatgaggatgccggtccttaaagatgaccagtgcgacctcgatgccaccagcccacaacccccatcctccccggtgctctcacaggaagacggtacaggccagctttaactatctgcatcttctccgacgcactcaacaccgctctactgttcatttgtatgaggatctggatcgtgaagagatggttttcctaatcatgttcaatacagcatgcatccgatcaaacatcttgatgcttaactgtgatcacatagacatgttatggaatggaaaataccaattccctaaagattttcggtttgagtcccatcacaagtctctgtccgtatggaaataattggacgcccctaaattcaacttttgccacgcctttttttagcacggaacggggcaggtggagccgtggaggcgtggagccagatcttctacgatggtgttggcgtcgatttgaatgtcaatcactggagatgaaccgtctggcgatgctatctacgggagcgaggacggtccgcggctctgtgtcgaacggtccacggcctcaacgcaggagcgactccttccttgtgtgcttccgaacggtccgcgcctgggagggaccatgtcggggaggagagttttagggattgtctgagggtcggcaggctgcccaagacgtctctagttgacgcagagtcgaacaacaatgaagaaataggtcgagggagacaaatactagggctaggctaaggctagattactctcactcctaatgaatggaaagaaaagtgcaaataaggtaaattgataagtagatttgattggatcgattgtgcaagcttcaattggtcgtaccccttcatctatataaaggtggaagtccggacccgtt

SEQ ID NO: 45451 - DNA, 1502 bp, Zea Mays
ctcctgcccccgtcccgtgcgtccctctccgcgcccacagcccctgcttccatcctagcccccgccgccgcgacgacgctggtggcgtcctccccgcgcccgtgaccccgccctcgtcctcgtcaatccgctccaccagcaagtaaaaaaagcggcgtcccaatcccacagtgcttccacctcgaccgcctatcgggctcccacgcccatccccactacctcgtgatccccggcgacgctgcggcgcctcgcgcggccatacccccgctccaccccgatcccgcgaccagccagcgcaagctcaaccacgcccctgcccagccccgcgcatgcccgccgcgacaagcgcacttcctcaggtgagacgctcgctggttcctcggtggcaatggaaagcacgccgcattccagacatcgtcaccagttcctcgatggaaagcacgcatcccgtcattctcggggccccgatcggcctccacaatcctgacatcctcgccccgccatcctcgtccccgagccaggcatctttcttaccatccgagatcttcaatcagcccaaattgatgggtccttaaattatgttgcttcaatcaccttccatcccaatgccgatacctaccatcgatgaggatgccggtccttaaagatgaccagtgcgacctcgatgccaccagcccacaacccccatcctccccggtgctctcacaggaagacggtacaggccagctttaactatctgcatcttctccgacgcactcaacaccgctctactgttcatttgtatgaggatctggatcgtgaagagatggttttcctaatcatgttcaatacagcatgcatccgatcaaacatcttgatgcttaactgtgatcacatagacatgttatggaatggaaaataccaattccctaaagattttcggtttgagtcccatcacaagtctctgtccgtatggaaataattggacgcccctaaattcaacttttgccacgcctttttttagcacggaacggggcaggtggagccgtggaggcgtggagccagtgtggtgcagatcttctacgatggtgttggcgtcgatttgaatgtcaatcactggagatgaaccgtctggcgatgctatctacgggagcgaggacggtccgcggctctgtgtcgaacggtccacggcctcaacgcaggagcgactccttccttgtgtgcttccgaacggtccgcgcctgggagggaccatgtcggggaggagagttttagggattgtctgagggtcggcaggctgcccaagacgtctctagttgacgcagagtcgaacaacaatgaagaaataggtcgagggagacaaatactagggctaggctaaggctagattactctcactcctaatgaatggaaagaaaagtgcaaataaggtaaattgataagtagatttgattggatcgattgtgcaagcttcaattggtcgtaccccttcatctatataaaggtggaagtccggacccgtt

SEQ ID NO: 45452 - DNA, 2096 bp, Zea Mays
ttcttgcattcctcgagtgaactctgataaaaaatattcttaatgcacaaatctgaaaagaaaacagactgttaggaaaattaatgtaacaatgttttattcccaaaagacacatacaaaaatgaagcattccatattccataaactagcagagctaatgacttaatgtgcttccaatcaactggttgtgagcgcaaaaaacatccctatacatgtctagcagaaagatttcccattttccaataactatttaagcatctgccattatacttggggatcataaattcaaatccatcaaaccaattactgacaaaagcacagaattccaatggatatagtgcagttgcgcggatttccaatggtataacagttggatgcataaatggtgccatggctagttataacagttgcaaaaggggtgcatatatagtgcgatgatatgtacatctaaaaagcataatcagacttagaacaatatattataataaaaccacaacaagtgtaataatcacatgtgcctaggtcgatgaaaattgcagcaacctaaagggttgtctttattttctcatagaccaacaatggtgttatgaaaaatgtcttgagttgtaccgagacaatcatcaactaatatgaagtctactagcaaacaatgtcttgagctggtagataccagcttatcttttgtgtagttagcacatataaaaaggtctattgaaatatcataactggaaagaaagcaaaatcatcagcataaactactaaaacatttagagcatatggaaaatgatgtcttgtcaatatatctaccaatcaagatttatgcatgcatctgagggctaaaaaggtgtaaacgtaggaacaaatctaatgtaaattgctgacatgctaaacgtaggacaaaatctaagtacaatagttcctttatcaaaccttttgcataagtgaaaatagtttcatgtcactctgtggaacaccataagcgaggtaagcctttcaatgaatgaataaaatgccagtctgtggaacaccataaccatgtgttctcctacacatcagggaaaaagagagaaatattaccacacattcaactaccctaaatccagtaggggctaatcattaaataacaaggctaacttttagtttttatcaagcaaaatgactgcaactatgtagtttacacatgtttaggggtggtcgtgctcctttcgtcctatgagaagctccgccactgctagtacttttgcatcttgttatgacacttcaagtttttagagagatacaacaggagtgcaggaccaccaaaaaaacgcatgcatctaataaaagaatgattttatttatgccattatggataagactgtgacaccttttgtcccccttttgatgtagtagtatctactaatattctaaggcctggcacctggttcattttcaagctttaagttatgaggtccacaatcctttcatacagagaggttgaagttgggaggtataagattgtcctcattgcttataatcttatctaggtttatgagcagagcatgcataaagtactttatttatcaaataaagtaattaaggattttaagttactagaattataatatggtccacattgggtgttgtttagccaaatatgctgatatatatttctcatccactaaaatatattctgcagatcgagttaaattctacccttatttatttttgttattctgtaaacccaatggtgtatgcattttcttaaacattgctataattttagccagttattagctgatggagagatcataccagtcagcacaaacgactgaaatgaggaatacatctctagaagaaaaattttggaggtgctaccagagaagagcttggtcattattgcttctgctgatcagcagatgatgactgatatcccttttagcttccagcgcccacaatagataatctatgaattgcatctatcgacccactacgtgtagaaaacaaaaaaataatcaatgtaccttaacagcggatgggaccgaaggtgcctgcactccttgtggaagtcagtggagatcatacgggtcagcaatgattggagtagtagcgcgaac

SEQ ID NO: 45453 - DNA, 1134 bp, Zea Mays
gatctcctccgtccccaccgccgtcgccgacgcacgactccaggtcaggtcttgctggtgccacagcagatgtccattgctacgatgtgtcattgaacaagtggagcaggcttaccccacttggcgagcctccttcaccaagagctgcacatgtggcaactgcggttggaaccatggtggttattcagccgttggatcgcgccttaagggccacgaaacatccaacctttctaccgcgcccgcgaaaccttctaggaggttcctgtcgtctccgtgggcgccgtcatgggtcaaggaggcccccgaccccctcttcaacgctgccctccaggagctccggctagacgtcgccgcgcccccccctaatctgtctcccctcagtgacaccgacgtgcgtggaagcgttgcggcgaattgcaggctatgggacgacctttatgtggctgcgctgttgctgggtggcggcaaccgcgcaggatggcgcgcaccgcggcgcagtccgcaaacgtgcgccgcaccccgcgcaacgacgtcgtgtacagcaccaccgcctgtggccggggcgcacgcggctcgtccgcgagctgatgctgctggtgctgccgtcgcccacctggacgcggccgccggccggtgccccgggtggtggtggtacgtcagcgaccgcgccagctggaacggcctcttgccgccgccgcctcaatcatccatctcacgcgccgacgcagcagcagcggccggccgcgccgccgcgggagaaggcgaatcgaggctgtggcggttaaccggaggcgaggagaagggggagaaggaagacgaagaggaagcgagctgggcaagcaatcgacgcaagaagatcagaagcgaagtttggaaattactactaatccttacaaatttctcaaaggaggtttggtttaattcagctcttttcgttcaagctcgtgcaacaggatgtttgatccatatacaatttgttggcgagtccattctgtggccatattacctgtttagtacagatgatggaagcagcagaatggtcagcaaggccatgccagcatcaaccttaattacctagtttggttccaacaagaactacaggaacaataggtgaaaatcggcgaagctctggca

SEQ ID NO: 45454 - DNA, 1628 bp, Zea Mays
ctgggtgcacgtgagattgtttctaatcagaaagtgcaagactccggtggctcatctcctcacaaccagtcaagttccaagcttggtactccaggtccagatttctggtcatggttacctccagtacaagatagcagtaaacaaaaggaaagcaatactggtttgaagccatccaaaaaattagataccttttccagtcagcctgatctgttgatggaaaaggaacgcttggcggattctttaccactccctttcgagacagctttcttcaagaaggaagatcgatctcttcctcccttccaatcatttgctgagcctgagaatgtggattcctcggccgatctggccgctgacaaagaggacacgttcgaagaacagttctcgaaaaatgcagccgaggtggctcgcgcgctcagtgagagcgtcgggaaaccatcacacggaatacatctagatggctcaatgtggtggaaggaagtaggtgtagaacgaagacctgatggtgttgtttgcaagtggaccgtgatcaggggagttagtgctgatggcgctgttgaatgggaagacaaatactgggaggcctcagaccggttcgatcataaagagttaggctcggagaagtctgggcgtgatgctgcgggcaacgtttggcgggaatactggaaggagtcaatgtggcaggattacacatgtggggttatgcatatggagaagaatgcagacaagtggggacagaacggtaaaggggagcagtggcaagagcaatggtttgagcactatgactcgaccggcaaaaccgaaaaatgggctgataaatggtgcagcttggatccaaacacaccgctggatgtcggccatgcccatgtctggcatgaaagatggggcgagaagtacgacggccttggtggcagcgaaaagtacaccgacaagtgggccgagcgttcggagggcgacgggtggtctaaatggggcgacaagtgggacgagcacttcgacctgaatgggcatggcgtcaagcagggggagacatggtgggcgggcaagcatggggaccggtggaaccgcacctggggtgagcggcacaacgggtctgggtgggtgcacaagtacgggcgcagcagcagtggcgagcactgggacacgcacgccccgcaggacacgtggtacgagcggttcccacactttgggttctaccactgctttgagaactcgccgcaactccggtccgtgaagaggcagccgccgccaccacgaaaatgaagcctgaagagatcatgctggcatcagcagcatgtgctgttgtgaactgaatgttcagactgatatgaatagaaaggcctgtagaagttttgccgtatattctgaaacaccttttttcttttagcctagaaagattatgctggtaagcttttgcccaaagtctaatgcacgcagttactgcgacttcttctgtgatgttttttttttggtgtcagttacctcctgatttcccaaacactcagactagcactgctgggattgggaatgtatctggccagtcatgagactgagatttcccaaagtttgtatgccacagtgctattctatggtctagcagcaggttggagttctgcttaaatgaagcagca

SEQ ID NO: 45455 - DNA, 1139 bp, Zea Mays
ggcttccactccactccattgaatcactcatccttcgccgtcgctccgcgtcactctccgtctttggtggttcgattcgataacgttttctgctgctgccatccgcaagcgaggatgctgaggccgcccgcgctagcgtgctgcaaactctacatctccgaggcccgcaactcgggggcgttgcgtgccatcgagcacgcagcggcggcgctccgcccgttggccgtgctcgtcaacaccttcgccgacgacgcctacaaccgggtcgggtacacgctcgtgtcccccctcgcgggcggcggcgcctcgccgccgctgcgctgcgcatcgttccgcgtggtcgcggccgcgatcgaggccgtcgacctggacgcccacgccggcgcgcacccgcgcctcggcgtcgtcgaccacgtcgccttccaccctctggccagcgcccacctcgaggacgtcaccgcgctcgccagggccgtggcggcggacatcggagacaggcttcaagcagtgccgacgtacctgtacggcgcagctcacagagacggtaggacgctggcgtccatcaggaggcagctgggctacttcacgccgacctcccccggcggagagcagtggcacggcgcgccggactcgctgctgccagtggccccggacgccgggccccggacgtcgtccgcgtccaatggcgtggtggtggtgggcgccacgccgtgggtggacaactacaacgtgcccctgaccacggccgacgtcagcgtcgcgaggcgcatcgcgcgcgcggtcagcgagcgcggcggcgggctcgcgtgcgtgcaggccatggggctcgcgcacggcgacggcgccaccgaggtcgcctgcaacctacttcacccggacgcggtgggcgccgaccaggtgcaggagagggtgagccggctcgccgccggcctcggggtcggcgtcggccaggggtacttcaccgacttgtcgcgggagaaggtcgtcgagctgtacttgcaggccgctcaagctgcctgaggcttctcggcagtgatagattgtttattgttcagaaagcagggtaatggaataatctactattgtatctgttaggaattatgggctagtcccagttaaaaaattcaaataaatctcag

SEQ ID NO: 45456 - DNA, 1131 bp, Zea Mays
gggcctctgttctcatctggacgcaagcaacaacagcaaattggtgtgatgccaatgtgaggcatttcattgatgtatgcaaaggagagatagatgctgggaatcggccgatgggaatgttcaccaaaactggttggaaaaatcttagaactaagcatgaagaaaaaacaggccagaagctaaccaaaaaacaattaaagaataagttggacaatatgaaaaaggaatatacatggttcatggagttcaagaattatgccactgggcttggatgggatgaggcaaagcaaacagttgactgttctaaggaatggtgggatgaacaccttgctagatgtaataatcctggaaaaggtattaaatgcaaccatgtgaggttcagaaaacaaggacccaagcaccttgatgatctacatatattgttcgataaggtacacgttagcggggctactgcatcctgtcctggagatatatcctcggatgagtcaagtgatgatgatgtggttgaggtacaaaaaactattgataatgttgatgtgaagctggctgcgttgaagaaatcaaaactaggaaaaaggaagcgtaaggactgctctactgctactgaagagaaggatgagaagagcccattctttcgactgtacaagaacacatgtttgaagatagaaactgcagcagagaagatctccacaagtgttgaagcatcatcgactcctccaaccaacccagtccctagtattgcagaggccatgaagatggtgaaagattgtggggtgcaagaaaaaactgcactaatgcacacagctaccttcctaattgtgaagcctgaatttagggaggtcttcagcttactagaaacaaatgaaggaaggctagatttgcttgaaagggagcatgaaaaggagtcgattaagcggatgtagaacactttcagtgcctttattttcagagttgtattgtgaaccaatatttttttatttcccaatgttaagaactatattttttcgtgagttgtgttgtgcttgtaatgtactatattatttgcttctatcattggtattgtgtcattggtcccagttgtgtgattgctgaaatctattgttattgttgccatatagtcttgtgtgattg

SEQ ID NO: 45457 - DNA, 463 bp, Zea Mays
gctattacgcccaattactagatcgcgcgtatgctccgctttgtaaacacgtagaccaccaaattgtacatttttatgttcttccttttatgcttttatactgagttgaattggtcctcacatgatcatgcatcagtacccaatgatataacatattgtaatggtttgcattatcatgatattagatattttcttttatcttctgtctgaaatgctagcaacataatggtttactatatacttgagcagctactatgcactttcatttcctctatgtatttcctggtgtggcatttggtactttgcaatttatagcagaaatggaattgagggtatccatggagatgcatgtagctgaactcagtcaagtttctatccattgtgtgtgtgtgcgcttatttgggcatcgtgtccttccttttcatggggaatcataaaagcatatggaggaactatgtatagg

SEQ ID NO: 45458 - DNA, 425 bp, Zea Mays
cggcccaattctcacgcgctcatcgcctaggagcattcacgttggcggcgggcggcggctcgcttcctctcctccaccgcacctccaagaatccacccctgcctgacgcctccacctccacgactgagctgacggctcggcggcgccatggcggttctccggctccaaccttccccctccggcctacaatgctccaccgcccggtcgccagtgctcctccatgggccacggctgacgggtgcacgcaccgtttcgccttttccagagaaatcctgagccatgcgcaaaccttctgtaagacctggtaacttattttaggggctagaaacaggcgacgacagtttaggtcttgttttttacaccaatccagccctagattagcaatgatttttatgcagctcttgtttgttacgactactcatggc

SEQ ID NO: 45459 - DNA, 3699 bp, Zea Mays
caccgcagttactgtggccggctaatctgatttcatacaattctttcccctatcttgtgcctctctttataccttgcgtaccctgtaatttggtggaactaacacttcggtcgattaatgaaaatgttcagatggccctcccgttgattcctaatttttttattaaaataaccttttgcgtcatctctccatcttcaatcttgatgtctgtctcgagtgcattttcatccgctcttatccaatactgcagggtttctttttgctgagctgagcaagcacctgggcggcggccccggcagcaagtatccagcagcagaaatggcagaagcaataatccttgctctgagaaagattggtagcgctttagcagatgaaactgccaagaaaatgctggccaaattgtctgaaaaggttaacaatctgagggatctgaatgacaagatcgagtcaataagaatgcaactgacagccatgaacaatgttatacgtaagattggcacagtatacctcactgatgaagtcgtcaggggatggattggggaagtgcgcaaggtggcctaccatgttgaggatgtaatggacatgtactcctatcacacacttcaaatggaggaagaatggttcctgaagaagtacttcattaaagcgtcacattatgtcttggtttttagtcaaatagcagaagaagttatcaaggttgagaaggagatcaagaaagttgtagaactcaaaaatctgtggttcgagccttcgcaccttgttgctgatcagctaattgagatggaaagacagcgttcgcacgataactacccactactttttaaagatgaagatcttgtggggattgaagataacaggagaaggctcaccgaatggctatattctgatgagcttgacagcacagtgataacagtatcaggcatgggtggacttggaaaaactacccttgtaacaaatgtttacgagcgtgaaaaaaccaatttttctgctacagcatggatggtcgtgtcccagacctacactatagaagctctgcttaggaagttactcatgaaggttggtcgtgaagagcaggtgtcacctaacattgacaaattggatgtccatgatttgaaagaaaacataaagcaaaagctcgataatcgcaaatgtttgattgtattggacgatgtatgggaccaggaagtgtaccttcaaatgtctgatgcattccaaaatcttcaatctagtagcatcatcatcacaacacggaagaatcatgtggctgctcttgctcagccaactcgtcgccttgttgtccatcctctgagaaacactcaggcatttgatctcttctgcagaaggattttttataacaaggaagaccatgcgtgccccagtgaccttgtggaggttgctactaacatagtagacaggtgccagggattgccactagcaattgtatcaatagcttgcttattgtcttcgaggacgcaaacatattacatctggaaacaagtttacaatcagcttcggagtgagctatcaaaaaatgatcatatccgggcagttttgaatctgagctaccatgatctaccaggagacctaagaaattgcttcttgtactgcagcctcttccctgaagattaccctataccacatgagagcctcgtcaggctttgggttgcagaaggctttgcattgagcaaagaaaacaacacagcagaggaggtggctgagggaaacctcatggaacttatccaccgcaatatgcttgtagtagtggaaaatgatgagcaggggagggtgagtacatgtacaatgcatgatgttgtgcgagatcttgcccttgttgttgcaaaagaggagaggtttggcactgcaaacaactatagagcaatgatacaggtggacaaggataaagatgttcgacgcctatcatcttatggatggaaagacagtacatctctagatgttagacttccacgtcttcgaactctagtatcacttggaacaatttcatcctccccaaacatgctattgtcaattttgtctgaatccagctaccttactgttctcgagctacaagattctgaaattaccgaagtgccagggtctatagggaatctgtttaacctgcgttacattggcttgcgccgtacaaaggtcagatcactacctgattctatcgagaagctcctgaacctccagactctggatatcaagcaaacaaaaatagagaaacttccacgaggaatctctaaggttaagaagctacggcaccttctagctgacagatatgctgatgagaagcagtcacagtttcggtacttcgttgggatgcaagcgcctaaagatctgtcgagcttggtagaacttcagactcttgagactgtggaagccagcaaggacttggctgaacagctgaagaaactgatgcagctaaggactctgtggattgacaatattactaatgctgattgtgcaaatatttttgccagcctatcaagactccacaggttgattatcagagggcaatgggcgcagcgaacattgcagtgcccaatatttcaaggccatgggagacacctcaagtatttagctctaagctggtgccacctttcagaagatccactggagatgctcgctccacatttgccaaacctcacaaatctgagactcaacaacatgcgtagtgcaagtatattggttcttcctccaggatcatttcacaacctgaagttgcttgtcctgatgcacatgcctaatgtcaagcagctggtgattggagaaggtgcgctccaatgcatcgaaggtctgtacattgtgtcactggtggagctggataaggtccctcaaggcattgaatcgcttcgctccctgaagaagctctctcttgtcaagctgcacagggacttcctgactgagtggaacaacagcggaatgcatcagaagatgcaacatgtccaagagattcgtgtttagacgtggcagatgggtaccttctgcagcactattcacaccgtcgacaactccacatttcaatttcatctatactttttctttttcttttttttcatctatacttgtggtgactagtgcaatctaatcatttcccaacctgaagttgcttgtcctgatgcacatgcctaatgtcaagcacaagcagctggtgattggagaaggtgcgctccaatgcatcgaagtctgtacattgtgtcactggtggagctggataaggtccctcaaggcattgaatcgcttcgctccctgaagaagctctctcttgtcaagctgcacagggacttcctgactgagtggaacaacaacggaatgcatcataagatgcaacatgtccaagagattcgtgtttagacgtggcagatggttccttctgcagtactattcaatttcaaccctccccaataagtactgtcattcacaccgtcgacagctccacatttcaatttcatctatactttttttttctttttttcatctatacttgtggtgactagtgcaatctaatcgtggttgtcttggggtagctggcctcagtttgtgctgccttttcagtttccctctcttcttgattttattgtaagaacaagttccattttaattcaacttctatattttgttaataatgcattcagtgtatcccaagtgttggtgcctttttggcgccaatcactgcgtgagaaccggtggcggtgctcc

SEQ ID NO: 45460 - DNA, 3480 bp, Zea Mays
ggcaggcttcacgccgcccgcgagcggatagagatgcgctgcgcagccttcagtcctgcacactgcactcgtctacagcgagggccaccgcagttactgtggccggctaatctgatttcatacaattctttcccctatcttgtgcctctctttataccttgcgtaccctgtaatttggtggaactaacacttcggtcgattaatgaaaatgttcagatggccctcccgttgattcctaatttttttattaaaataaccttttgcgtcatctctccatcttcaatcttgatgtctgtctcgagtgcattttcatccgctcttatccaatactgcagggtttctttttgctgagctgagcaagcacctgggcggcggccccggcagcaagtatccagcagcagaaatggcagaagcaataatccttgctctgagaaagattggtagcgctttagcagatgaaactgccaagaaaatgctggccaaattgtctgaaaaggttaacaatctgagggatctgaatgacaagatcgagtcaataagaatgcaactgacagccatgaacaatgttatacgtaagattggcacagtatacctcactgatgaagtcgtcaggggatggattggggaagtgcgcaaggtggcctaccatgttgaggatgtaatggacatgtactcctatcacacacttcaaatggaggaagaatggttcctgaagaagtacttcattaaagcgtcacattatgtcttggtttttagtcaaatagcagaagaagttatcaaggttgagaaggagatcaagaaagttgtagaactcaaaaatctgtggttcgagccttcgcaccttgttgctgatcagctaattgagatggaaagacagcgttcgcacgataactacccactactttttaaagatgaagatcttgtggggattgaagataacaggagaaggctcaccgaatggctatattctgatgagcttgacagcacagtgataacagtatcaggcatgggtggacttggaaaaactacccttgtaacaaatgtttacgagcgtgaaaaaaccaatttttctgctacagcatggatggtcgtgtcccagacctacactatagaagctctgcttaggaagttactcatgaaggttggtcgtgaagagcaggtgtcacctaacattgacaaattggatgtccatgatttgaaagaaaacataaagcaaaagctcgataatcgcaaatgtttgattgtattggacgatgtatgggaccaggaagtgtaccttcaaatgtctgatgcattccaaaatcttcaatctagtagcatcatcatcacaacacggaagaatcatgtggctgctcttgctcagccaactcgtcgccttgttgtccatcctctgagaaacactcaggcatttgatctcttctgcagaaggattttttataacaaggaagaccatgcgtgccccagtgaccttgtggaggttgctactaacatagtagacaggtgccagggattgccactagcaattgtatcaatagcttgcttattgtcttcgaggacgcaaacatattacatctggaaacaagtttacaatcagcttcggagtgagctatcaaaaaatgatcatatccgggcagttttgaatctgagctaccatgatctaccaggagacctaagaaattgcttcttgtactgcagcctcttccctgaagattaccctataccacatgagagcctcgtcaggctttgggttgcagaaggctttgcattgagcaaagaaaacaacacagcagaggaggtggctgagggaaacctcatggaacttatccaccgcaatatgcttgtagtagtggaaaatgatgagcaggggagggtgagtacatgtacaatgcatgatgttgtgcgagatcttgcccttgttgttgcaaaagaggagaggtttggcactgcaaacaactatagagcaatgatacaggtggacaaggataaagatgttcgacgcctatcatcttatggatggaaagacagtacatctctagatgttagacttccacgtcttcgaactctagtatcacttggaacaatttcatcctccccaaacatgctattgtcaattttgtctgaatccagctaccttactgttctcgagctacaagattctgaaattaccgaagtgccagggtctatagggaatctgtttaacctgcgttacattggcttgcgccgtacaaaggtcagatcactacctgattctatcgagaagctcctgaacctccagactctggatatcaagcaaacaaaaatagagaaacttccacgaggaatctctaaggttaagaagctacggcaccttctagctgacagatatgctgatgagaagcagtcacagtttcggtacttcgttgggatgcaagcgcctaaagatctgtcgagcttggtagaacttcagactcttgagactgtggaagccagcaaggacttggctgaacagctgaagaaactgatgcagctaaggactctgtggattgacaatattactaatgctgattgtgcaaatatttttgccagcctatcaagtatgccactcctttccaacttgcttctttctgcaaaggatgaaaatgagccacttcgcattgaggctctcaagcctgggtccacaggactccacaggttgattatcagagggcaatgggcgcagcgaacattgcagtgcccaatatttcaaggccatgggagacacctcaagtatttagctctaagctggtgccacctttcagaagatccactggagatgctcgctccacatttgccaaacctcacaaatctgagactcaacaacatgcgtagtgcaagtatattggttcttcctccaggatcatttcacaacctgaagttgcttgtcctgatgcacatgcctaatgtcaagcagctggtgattggagaaggtgcgctccaatgcatcgaaggtctgtacattgtgtcactggtggagctggataaggtccctcaaggcattgaatcgcttcgctccctgaagaagctctctcttgtcaagctgcacagggacttcctgactgagtggaacaacagcggaatgcatcagaagatgcaacatgtccaagagattcgtgtttaacgtggcagatggttccttctgcagtactattcaatttcaaccctccccaataagtactgtcattcacaccgtcgacagctccacatttcaatttcatctatactttttttttctttttttcatctatacttgtggtgactagtgcaatctaatcgtggttgtcttggggtagctggcctcagtttgtgctgccttttcagtttccctctcttcttgattttattgtaagaacaagttccattttaattcaacttctatattttgttaataatgcattcagtgtatcccaagtgttggtgcctttttggcgccaatcactgcgtgagaaccggtggcggtgctcc

SEQ ID NO: 45461 - DNA, 3236 bp, Zea Mays
gagcccaagataagtgaaggcgtagctgggctgcctggaaggaaccactaaccatcatcgcgttggcatctcgtcccaagatccagtcaaggtcgtctccctgctgtcatcctctccgaccagcgcaagctccgttcctggaagaactagaaagcagaaatggcagaagcaataatccttgctctgagaaagattggtagcgctttagcagatgaaactgccaagaaaatgctggccaaattgtctgaaaaggttaacaatctgagggatctgaatgacaagatcgagtcaataagaatgcaactgacagccatgaacaatgttatacgtaagattggcacagtatacctcactgatgaagtcgtcaggggatggattggggaagtgcgcaaggtggcctaccatgttgaggatgtaatggacatgtactcctatcacacacttcaaatggaggaagaatggttcctgaagaagtacttcattaaagcgtcacattatgtcttggtttttagtcaaatagcagaagaagttatcaaggttgagaaggagatcaagaaagttgtagaactcaaaaatctgtggttcgagccttcgcaccttgttgctgatcagctaattgagatggaaagacagcgttcgcacgataactacccactactttttaaagatgaagatcttgtggggattgaagataacaggagaaggctcaccgaatggctatattctgatgagcttgacagcacagtgataacagtatcaggcatgggtggacttggaaaaactacccttgtaacaaatgtttacgagcgtgaaaaaaccaatttttctgctacagcatggatggtcgtgtcccagacctacactatagaagctctgcttaggaagttactcatgaaggttggtcgtgaagagcaggtgtcacctaacattgacaaattggatgtccatgatttgaaagaaaacataaagcaaaagctcgataatcgcaaatgtttgattgtattggacgatgtatgggaccaggaagtgtaccttcaaatgtctgatgcattccaaaatcttcaatctagtagcatcatcatcacaacacggaagaatcatgtggctgctcttgctcagccaactcgtcgccttgttgtccatcctctgagaaacactcaggcatttgatctcttctgcagaaggattttttataacaaggaagaccatgcgtgccccagtgaccttgtggaggttgctactaacatagtagacaggtgccagggattgccactagcaattgtatcaatagcttgcttattgtcttcgaggacgcaaacatattacatctggaaacaagtttacaatcagcttcggagtgagctatcaaaaaatgatcatatccgggcagttttgaatctgagctaccatgatctaccaggagacctaagaaattgcttcttgtactgcagcctcttccctgaagattaccctataccacatgagagcctcgtcaggctttgggttgcagaaggctttgcattgagcaaagaaaacaacacagcagaggaggtggctgagggaaacctcatggaacttatccaccgcaatatgcttgtagtagtggaaaatgatgagcaggggagggtgagtacatgtacaatgcatgatgttgtgcgagatcttgcccttgttgttgcaaaagaggagaggtttggcactgcaaacaactatagagcaatgatacaggtggacaaggataaagatgttcgacgcctatcatcttatggatggaaagacagtacatctctagatgttagacttccacgtcttcgaactctagtatcacttggaacaatttcatcctccccaaacatgctattgtcaattttgtctgaatccagctaccttactgttctcgagctacaagattctgaaattaccgaagtgccagggtctatagggaatctgtttaacctgcgttacattggcttgcgccgtacaaaggtcagatcactacctgattctatcgagaagctcctgaacctccagactctggatatcaagcaaacaaaaatagagaaacttccacgaggaatctctaaggttaagaagctacggcaccttctagctgacagatatgctgatgagaagcagtcacagtttcggtacttcgttgggatgcaagcgcctaaagatctgtcgagcttggtagaacttcagactcttgagactgtggaagccagcaaggacttggctgaacagctgaagaaactgatgcagctaaggactctgtggattgacaatattactaatgctgattgtgcaaatatttttgccagcctatcaagtatgccactcctttccaacttgcttctttctgcaaaggatgaaaatgagccacttcgcattgaggctctcaagcctgggtccacaggactccacaggttgattatcagagggcaatgggcgcagcgaacattgcagtgcccaatatttcaaggccatgggagacacctcaagtatttagctctaagctggtgccacctttcagaagatccactggagatgctcgctccacatttgccaaacctcacaaatctgagactcaacaacatgcgtagtgcaagtatattggttcttcctccaggatcatttcacaacctgaagttgcttgtcctgatgcacatgcctaatgtcaagcagctggtgattggagaaggtgcgctccaatgcatcgaaggtctgtacattgtgtcactggtggagctggataaggtccctcaaggcattgaatcgcttcgctccctgaagaagctctctcttgtcaagctgcacagggacttcctgactgagtggaacaacagcggaatgcatcagaagatgcaacatgtccaagagattcgtgtttaacgtggcagatggttccttctgcagtactattcaatttcaaccctccccaataagtactgtcattcacaccgtcgacagctccacatttcaatttcatctatactttttttttctttttttcatctatacttgtggtgactagtgcaatctaatcgtggttgtcttggggtagctggcctcagtttgtgctgccttttcagtttccctctcttcttgattttattgtaagaacaagttccattttaattcaacttctatattttgttaataatgcattcagtgtatcccaagtgttggtgcctttttggcgccaatcactgcgtgagaaccggtggcggtgctcc

SEQ ID NO: 45462 - DNA, 3624 bp, Zea Mays
gagcccaagataagtgaaggcgtagctgggctgcctggaaggaaccactaaccatcatcgcgttggcatctcgtcccaagatccagtcaaggtcgtctccctgctgtcatcctctccgaccagcgcaagctccgttcctggaagaactagaaagaaatggcagaagcaataatccttgctctgagaaagattggtagcgctttagcagatgaaactgccaagaaaatgctggccaaattgtctgaaaaggttaacaatctgagggatctgaatgacaagatcgagtcaataagaatgcaactgacagccatgaacaatgttatacgtaagattggcacagtatacctcactgatgaagtcgtcaggggatggattggggaagtgcgcaaggtggcctaccatgttgaggatgtaatggacatgtactcctatcacacacttcaaatggaggaagaatggttcctgaagaagtacttcattaaagcgtcacattatgtcttggtttttagtcaaatagcagaagaagttatcaaggttgagaaggagatcaagaaagttgtagaactcaaaaatctgtggttcgagccttcgcaccttgttgctgatcagctaattgagatggaaagacagcgttcgcacgataactacccactactttttaaagatgaagatcttgtggggattgaagataacaggagaaggctcaccgaatggctatattctgatgagcttgacagcacagtgataacagtatcaggcatgggtggacttggaaaaactacccttgtaacaaatgtttacgagcgtgaaaaaaccaatttttctgctacagcatggatggtcgtgtcccagacctacactatagaagctctgcttaggaagttactcatgaaggttggtcgtgaagagcaggtgtcacctaacattgacaaattggatgtccatgatttgaaagaaaacataaagcaaaagctcgataatcgcaaatgtttgattgtattggacgatgtatgggaccaggaagtgtaccttcaaatgtctgatgcattccaaaatcttcaatctagtagcatcatcatcacaacacggaagaatcatgtggctgctcttgctcagccaactcgtcgccttgttgtccatcctctgagaaacactcaggcatttgatctcttctgcagaaggattttttataacaaggaagaccatgcgtgccccagtgaccttgtggaggttgctactaacatagtagacaggtgccagggattgccactagcaattgtatcaatagcttgcttattgtcttcgaggacgcaaacatattacatctggaaacaagtttacaatcagcttcggagtgagctatcaaaaaatgatcatatccgggcagttttgaatctgagctaccatgatctaccaggagacctaagaaattgcttcttgtactgcagcctcttccctgaagattaccctataccacatgagagcctcgtcaggctttgggttgcagaaggctttgcattgagcaaagaaaacaacacagcagaggaggtggctgagggaaacctcatggaacttatccaccgcaatatgcttgtagtagtggaaaatgatgagcaggggagggtgagtacatgtacaatgcatgatgttgtgcgagatcttgcccttgttgttgcaaaagaggagaggtttggcactgcaaacaactatagagcaatgatacaggtggacaaggataaagatgttcgacgcctatcatcttatggatggaaagacagtacatctctagatgttagacttccacgtcttcgaactctagtatcacttggaacaatttcatcctccccaaacatgctattgtcaattttgtctgaatccagctaccttactgttctcgagctacaagattctgaaattaccgaagtgccagggtctatagggaatctgtttaacctgcgttacattggcttgcgccgtacaaaggtcagatcactacctgattctatcgagaagctcctgaacctccagactctggatatcaagcaaacaaaaatagagaaacttccacgaggaatctctaaggttaagaagctacggcaccttctagctgacagatatgctgatgagaagcagtcacagtttcggtacttcgttgggatgcaagcgcctaaagatctgtcgagcttggtagaacttcagactcttgagactgtggaagccagcaaggacttggctgaacagctgaagaaactgatgcagctaaggactctgtggattgacaatattactaatgctgattgtgcaaatatttttgccagcctatcaagtatgccactcctttccaacttgcttctttctgcaaaggatgaaaatgagccacttcgcattgaggctctcaagcctgggtccacaggactccacaggttgattatcagagggcaatgggcgcagcgaacattgcagtgcccaatatttcaaggccatgggagacacctcaagtatttagctctaagctggtgccacctttcagaagatccactggagatgctcgctccacatttgccaaacctcacaaatctgagactcaacaacatgcgtagtgcaagtatattggttcttcctccaggatcatttcacaacctgaagttgcttgtcctgatgcacatgcctaatgtcaagcagctggtgattggagaaggtgcgctccaatgcatcgaaggtctgtacattgtgtcactggtggagctggataaggtccctcaaggcattgaatcgcttcgctccctgaagaagctctctcttgtcaagctgcacagggacttcctgactgagtggaacaacagcggaatgcatcagaagatgcaacatgtccaagagattcgtgtttagacgtggcagatgggtaccttctgcagcactattcacaccgtcgacaactccacatttcaatttcatctatactttttctttttcttttttttcatctatacttgtggtgactagtgcaatctaatcatttcccaacctgaagttgcttgtcctgatgcacatgcctaatgtcaagcacaagcagctggtgattggagaaggtgcgctccaatgcatcgaagtctgtacattgtgtcactggtggagctggataaggtccctcaaggcattgaatcgcttcgctccctgaagaagctctctcttgtcaagctgcacagggacttcctgactgagtggaacaacaacggaatgcatcataagatgcaacatgtccaagagattcgtgtttagacgtggcagatggttccttctgcagtactattcaatttcaaccctccccaataagtactgtcattcacaccgtcgacagctccacatttcaatttcatctatactttttttttctttttttcatctatacttgtggtgactagtgcaatctaatcgtggttgtcttggggtagctggcctcagtttgtgctgccttttcagtttccctctcttcttgattttattgtaagaacaagttccattttaattcaacttctatattttgttaataatgcattcagtgtatcccaagtgttggtgcctttttggcgccaatcactgcgtgagaaccggtggcggtgctcc

SEQ ID NO: 45463 - DNA, 3181 bp, Zea Mays
gagcccaagataagtgaaggcgtagctgggctgcctggaaggaaccactaaccatcatcgcgttggcatctcgtcccaagatccagtcaaggtcgtctccctgctgtcatcctctccgaccagcgcaagctccgttcctggaagaactagaaagggtttctttttgctgagctgagcaagcacctgggcggcggccccggcagcaagtatccagcagcagaaatggcagaagcaataatccttgctctgagaaagattggtagcgctttagcagatgaaactgccaagaaaatgctggccaaattgtctgaaaaggttaacaatctgagggatctgaatgacaagatcgagtcaataagaatgcaactgacagccatgaacaatgttatacgtaagattggcacagtatacctcactgatgaagtcgtcaggggatggattggggaagtgcgcaaggtggcctaccatgttgaggatgtaatggacatgtactcctatcacacacttcaaatggaggaagaatggttcctgaagaagtacttcattaaagcgtcacattatgtcttggtttttagtcaaatagcagaagaagttatcaaggttgagaaggagatcaagaaagttgtagaactcaaaaatctgtggttcgagccttcgcaccttgttgctgatcagctaattgagatggaaagacagcgttcgcacgataactacccactactttttaaagatgaagatcttgtggggattgaagataacaggagaaggctcaccgaatggctatattctgatgagcttgacagcacagtgataacagtatcaggcatgggtggacttggaaaaactacccttgtaacaaatgtttacgagcgtgaaaaaaccaatttttctgctacagcatggatggtcgtgtcccagacctacactatagaagctctgcttaggaagttactcatgaaggttggtcgtgaagagcaggtgtcacctaacattgacaaattggatgtccatgatttgaaagaaaacataaagcaaaagctcgataatcgcaaatgtttgattgtattggacgatgtatgggaccaggaagtgtaccttcaaatgtctgatgcattccaaaatcttcaatctagtagcatcatcatcacaacacggaagaatcatgtggctgctcttgctcagccaactcgtcgccttgttgtccatcctctgagaaacactcaggcatttgatctcttctgcagaaggattttttataacaaggaagaccatgcgtgccccagtgaccttgtggaggttgctactaacatagtagacaggtgccagggattgccactagcaattgtatcaatagcttgcttattgtcttcgaggacgcaaacatattacatctggaaacaagtttacaatcagcttcggagtgagctatcaaaaaatgatcatatccgggcagttttgaatctgagctaccatgatctaccaggagacctaagaaattgcttcttgtactgcagcctcttccctgaagattaccctataccacatgagagcctcgtcaggctttgggttgcagaaggctttgcattgagcaaagaaaacaacacagcagaggaggtggctgagggaaacctcatggaacttatccaccgcaatatgcttgtagtagtggaaaatgatgagcaggggagggtgagtacatgtacaatgcatgatgttgtgcgagatcttgcccttgttgttgcaaaagaggagaggtttggcactgcaaacaactatagagcaatgatacaggtggacaaggataaagatgttcgacgcctatcatcttatggatggaaagacagtacatctctagatgttagacttccacgtcttcgaactctagtatcacttggaacaatttcatcctccccaaacatgctattgtcaattttgtctgaatccagctaccttactgttctcgagctacaagattctgaaattaccgaagtgccagggtctatagggaatctgtttaacctgcgttacattggcttgcgccgtacaaaggtcagatcactacctgattctatcgagaagctcctgaacctccagactctggatatcaagcaaacaaaaatagagaaacttccacgaggaatctctaaggttaagaagctacggcaccttctagctgacagatatgctgatgagaagcagtcacagtttcggtacttcgttgggatgcaagcgcctaaagatctgtcgagcttggtagaacttcagactcttgagactgtggaagccagcaaggacttggctgaacagctgaagaaactgatgcagctaaggactctgtggattgacaatattactaatgctgattgtgcaaatatttttgccagcctatcaagtatgccactcctttccaacttgcttctttctgcaaaggatgaaaatgagccacttcgcattgaggctctcaagcctgggtccacaggactccacaggttgattatcagagggcaatgggcgcagcgaacattgcagtgcccaatatttcaaggccatgggagacacctcaagtatttagctctaagctggtgccacctttcagaagatccactggagatgctcgctccacatttgccaaacctcacaaatctgagactcaacaacatgcgtagtgcaagtatattggttcttcctccaggatcatttcacaacctgaagttgcttgtcctgatgcacatgcctaatgtcaagcagctggtgattggagaagggacttcctgactgagtggaacaacagcggaatgcatcagaagatgcaacatgtccaagagattcgtgtttaacgtggcagatggttccttctgcagtactattcaatttcaaccctccccaataagtactgtcattcacaccgtcgacagctccacatttcaatttcatctatactttttttttctttttttcatctatacttgtggtgactagtgcaatctaatcgtggttgtcttggggtagctggcctcagtttgtgctgccttttcagtttccctctcttcttgattttattgtaagaacaagttccattttaattcaacttctatattttgttaataatgcattcagtgtatcccaagtgttggtgcctttttggcgccaatcactgcgtgagaaccggtggcggtgctcc

SEQ ID NO: 45464 - DNA, 3690 bp, Zea Mays
gagcccaagataagtgaaggcgtagctgggctgcctggaaggaaccactaaccatcatcgcgttggcatctcgtcccaagatccagtcaaggtcgtctccctgctgtcatcctctccgaccagcgcaagctccgttcctggaagaactagaaagggtttctttttgctgagctgagcaagcacctgggcggcggccccggcagcaagtatccagcagcagaaatggcagaagcaataatccttgctctgagaaagattggtagcgctttagcagatgaaactgccaagaaaatgctggccaaattgtctgaaaaggttaacaatctgagggatctgaatgacaagatcgagtcaataagaatgcaactgacagccatgaacaatgttatacgtaagattggcacagtatacctcactgatgaagtcgtcaggggatggattggggaagtgcgcaaggtggcctaccatgttgaggatgtaatggacatgtactcctatcacacacttcaaatggaggaagaatggttcctgaagaagtacttcattaaagcgtcacattatgtcttggtttttagtcaaatagcagaagaagttatcaaggttgagaaggagatcaagaaagttgtagaactcaaaaatctgtggttcgagccttcgcaccttgttgctgatcagctaattgagatggaaagacagcgttcgcacgataactacccactactttttaaagatgaagatcttgtggggattgaagataacaggagaaggctcaccgaatggctatattctgatgagcttgacagcacagtgataacagtatcaggcatgggtggacttggaaaaactacccttgtaacaaatgtttacgagcgtgaaaaaaccaatttttctgctacagcatggatggtcgtgtcccagacctacactatagaagctctgcttaggaagttactcatgaaggttggtcgtgaagagcaggtgtcacctaacattgacaaattggatgtccatgatttgaaagaaaacataaagcaaaagctcgataatcgcaaatgtttgattgtattggacgatgtatgggaccaggaagtgtaccttcaaatgtctgatgcattccaaaatcttcaatctagtagcatcatcatcacaacacggaagaatcatgtggctgctcttgctcagccaactcgtcgccttgttgtccatcctctgagaaacactcaggcatttgatctcttctgcagaaggattttttataacaaggaagaccatgcgtgccccagtgaccttgtggaggttgctactaacatagtagacaggtgccagggattgccactagcaattgtatcaatagcttgcttattgtcttcgaggacgcaaacatattacatctggaaacaagtttacaatcagcttcggagtgagctatcaaaaaatgatcatatccgggcagttttgaatctgagctaccatgatctaccaggagacctaagaaattgcttcttgtactgcagcctcttccctgaagattaccctataccacatgagagcctcgtcaggctttgggttgcagaaggctttgcattgagcaaagaaaacaacacagcagaggaggtggctgagggaaacctcatggaacttatccaccgcaatatgcttgtagtagtggaaaatgatgagcaggggagggtgagtacatgtacaatgcatgatgttgtgcgagatcttgcccttgttgttgcaaaagaggagaggtttggcactgcaaacaactatagagcaatgatacaggtggacaaggataaagatgttcgacgcctatcatcttatggatggaaagacagtacatctctagatgttagacttccacgtcttcgaactctagtatcacttggaacaatttcatcctccccaaacatgctattgtcaattttgtctgaatccagctaccttactgttctcgagctacaagattctgaaattaccgaagtgccagggtctatagggaatctgtttaacctgcgttacattggcttgcgccgtacaaaggtcagatcactacctgattctatcgagaagctcctgaacctccagactctggatatcaagcaaacaaaaatagagaaacttccacgaggaatctctaaggttaagaagctacggcaccttctagctgacagatatgctgatgagaagcagtcacagtttcggtacttcgttgggatgcaagcgcctaaagatctgtcgagcttggtagaacttcagactcttgagactgtggaagccagcaaggacttggctgaacagctgaagaaactgatgcagctaaggactctgtggattgacaatattactaatgctgattgtgcaaatatttttgccagcctatcaagtatgccactcctttccaacttgcttctttctgcaaaggatgaaaatgagccacttcgcattgaggctctcaagcctgggtccacaggactccacaggttgattatcagagggcaatgggcgcagcgaacattgcagtgcccaatatttcaaggccatgggagacacctcaagtatttagctctaagctggtgccacctttcagaagatccactggagatgctcgctccacatttgccaaacctcacaaatctgagactcaacaacatgcgtagtgcaagtatattggttcttcctccaggatcatttcacaacctgaagttgcttgtcctgatgcacatgcctaatgtcaagcagctggtgattggagaaggtgcgctccaatgcatcgaaggtctgtacattgtgtcactggtggagctggataaggtccctcaaggcattgaatcgcttcgctccctgaagaagctctctcttgtcaagctgcacagggacttcctgactgagtggaacaacagcggaatgcatcagaagatgcaacatgtccaagagattcgtgtttagacgtggcagatgggtaccttctgcagcactattcacaccgtcgacaactccacatttcaatttcatctatactttttctttttcttttttttcatctatacttgtggtgactagtgcaatctaatcatttcccaacctgaagttgcttgtcctgatgcacatgcctaatgtcaagcacaagcagctggtgattggagaaggtgcgctccaatgcatcgaagtctgtacattgtgtcactggtggagctggataaggtccctcaaggcattgaatcgcttcgctccctgaagaagctctctcttgtcaagctgcacagggacttcctgactgagtggaacaacaacggaatgcatcataagatgcaacatgtccaagagattcgtgtttagacgtggcagatggttccttctgcagtactattcaatttcaaccctccccaataagtactgtcattcacaccgtcgacagctccacatttcaatttcatctatactttttttttctttttttcatctatacttgtggtgactagtgcaatctaatcgtggttgtcttggggtagctggcctcagtttgtgctgccttttcagtttccctctcttcttgattttattgtaagaacaagttccattttaattcaacttctatattttgttaataatgcattcagtgtatcccaagtgttggtgcctttttggcgccaatcactgcgtgagaaccggtggcggtgctcc

SEQ ID NO: 45465 - DNA, 1510 bp, Zea Mays
agatgcagatactatgctaccacggtttacacgaacagtggtgacagtgacagcttgcacaaggggtgaagggcatattttattcggcctccacgaagctgctgagacaatgcttcgaaaattgtgtcatcccacaccgtgttcacctcctcacacggtctagagtcaagtcaactcactctcctagtcttcgatccagatcccatcgggttggactgtgtacactcttaaaacttcatcagctcccgagcaatctcagcccgtacatcaggttcttggatctctcccgagctgggatccgtcaagttttctgctccagcggcgacaattcgtcaggaatggccaacaagccgagtcttctgagcactctgccgactaacccaccagcacagtttctgaaagatatcacggacggcttctctgaaactcaaatgcttggtgaaggtgcatttggaactgtttacaaggtaccattctcaacagtagaatattatgcaataagcacacaccgattagagtgtctgagaggtcaagttgacagggcattctgcaagatgggcagccaattgcggtgaagaagcttgcagagaatgcgccggtggcacctgagaagcagttcaagattggggttgggaaccttatggccatgcagcatccgaatatagtcaggatactcggctactgccgtgaaccgcaaaggaaagtgattgagcagagtggaagatacattattgtagacgtggttgagagcttactgtactatgaatacgttcctaatggaaaccttgaaaagtatatttccgatgcatcagcttctagacctgattggaagacatgcttcgagataatcaagggcatctgccagggcttacgttacctacataaggaaatggataggccaattgttcatttggatcttcatcctaccaacatattgttggatgagaacatggtgccgaaaatcacggatttcggcctgtccagactctttggtgaagaacaaaccagaataaacacaattaatgttgtgggaaagaagtgcgtgagacgtggacagatgagcacatagcatccaagcactcagcactagatgcagtcagcctccaggaagtaagaacatgcattgaaattgggctaaaatgtgtggatattgatcagaacaagagaccttctatagttgaaattgttgacaagctcaatggaaggcatgctcactgaatgatgaactcctgcatactatacatgcaagtgaaaattatgttgcggacccatggagatttgctctagatggaatcatggacaaaataattgtatgtgttaccgattatgtacttttgaataatgtgttcctcgtgttgtgtcactttttcaggagttccttgatttgtcattgtgtttttctttcttttgacacaaatctgcatgcataacctgttgaaaaattgtgtgcatactagttatttgttttttctcatgttatgtgaatactatttttttttaccaaacaaga

SEQ ID NO: 45466 - DNA, 1565 bp, Zea Mays
gaccctggggcctgggccctgggccctggcacaatacaacgcgcccgttgactgactttgctgtgctccgtgctcagctgtgttcggttcggagttcggacaatctcctggaaattctgatcgaacctcctgcttggagcttcgcagcaacaccgtcctcacccgcgctgaaaaagcacccatcttcctattgcgcctttcttgtagagtcaagtcagctcacttttctcgtttcgatccagatcccgtattcccgttggattcgtttatcccgcgtcccgcaagcaatatcagatccttagcttctgtggttctgcacttattcagcgtctctccagcttggaccccttaaagtgttctccaggtacagctacttgaatcgtcagaaatggccactgacgccagcggaggtgaaaactgggtcaaggtggatttggaactgtttacaagggattcctgcaagacgggcaagccattgctgtgaagaagctctcagataattccccagtggcaaccgaaaaacagttcaagaatgaggttgggaaccttatggccatccagcatgagaacatagtgaggttgtatggctactgtcatgaactgcagaagaaagtgatagaacacaatggaagatacattcttgtggatgtggttcagagcatgctctgctacgaatacgcccccaaggggagccttgacaagtgtatttttgatatatcttctaggcctaattgggccacatgcttcaaaataattaagggcatttgccagggtttatatttcctacataaggggatggataggcctattgttcatctggatcttcagcctgccaacatactattggatgacaacatggtaccaaaaattgcggattttggcctgtcaaggctctttggtgaagaacaaacccgaataaacacaataaatgttgtgggagccaaagggtatatggctccagaatatctgtacagaggggagatctcaacccggtctgacatatacagcttaggcgtactaatcatggagatcacaactgggcagaagaactctccgaatgacaaagacatgtttgccaaacatggacagacgaacacatggcatccaagtactcatcactagatgcagacagcctccagcaagtaaaagcatgcattgaaactgggctaaaatgtgtggatatcgatcagaagaagaggccctctatagttgaaattgttgacaagctcgatggaaggcttgctctctgaatggtagtgtatgctgcgcaaggtaaaactgtgatgcagagttaattctgcctatggtgatatgctctagatgcaatcacggaaacaataattgtatcacttactaatttatgtacttatgaaaaatatgttgcttgtgtaatgcatgtgttttggttagcatctagtacaccttccagccagttttttgtgtaacttcagctgtgaacaaaagatgtcataatgtgacatacctgtgatctcaatgttcatgttatgattttactctaaactatgtctataatcttgtatcatttgcatgttcatatattttta

SEQ ID NO: 45467 - DNA, 1587 bp, Zea Mays
gaccctggggcctgggccctgggccctggcacaatacaacgcgcccgttgactgactttgctgtgctccgtgctcagctgtgttcggttcggagttcggacaatctcctggaaattctgatcgaacctcctgcttggagcttcgcagcaacaccgtcctcacccgcgctgaaaaagcacccatcttcctattgcgcctttcttgtagagtcaagtcagctcacttttctcgtttcgatccagatcccgtattcccgttggattcgtttatcccgcgtcccgcaagcaatatcagatccttagcttctgtggttctgcacttattcagcgtctctccagcttggaccccttaaagtgttctccaggtacagctacttgaatcgtcagaaatggccactgacgccagcggagaaaactgggtcaaggtggatttggaactgtttacaagggattcctgcaagacgggcaagccattgctgtgaagaagctctcagataattccccagtggcaaccgaaaaacagttcaagaatgaggttgggaaccttatggccatccagcatgagaacatagtgaggttgtatggctactgtcatgaactgcagaagaaagtgatagaacacaatggaagatacattcttgtggatgtggttcagagcatgctctgctacgaatacgcccccaaggggagccttgacaagtgtatttttgatatatcttctaggcctaattgggccacatgcttcaaaataattaagggcatttgccagggtttatatttcctacataaggggatggataggcctattgttcatctggatcttcagcctgccaacatactattggatgacaacatggtaccaaaaattgcggattttggcctgtcaaggctctttggtgaagaacaaacccgaataaacacaataaatgttgtgggagccaaagggtatatggctccagaatatctgtacagaggggagatctcaacccggtctgacatatacagcttaggcgtactaatcatggagatcacaactgggcagaagaactctccgaatgacaaagacatgtgtgcaaggaactttataaatcaggtttgccaaacatggacagacgaacacatggcatccaagtactcatcactagatgcagacagcctccagcaagtaaaagcatgcattgaaactgggctaaaatgtgtggatatcgatcagaagaagaggccctctatagttgaaattgttgacaagctcgatggaaggcttgctctctgaatggtagtgtatgctgcgcaaggtaaaactgtgatgcagagttaattctgcctatggtgatatgctctagatgcaatcacggaaacaataattgtatcacttactaatttatgtacttatgaaaaatatgttgcttgtgtaatgcatgtgttttggttagcatctagtacaccttccagccagttttttgtgtaacttcagctgtgaacaaaagatgtcataatgtgacatacctgtgatctcaatgttcatgttatgattttactctaaactatgtctataatcttgtatcatttgcatgttcatatattttta

SEQ ID NO: 45468 - DNA, 1559 bp, Zea Mays
gaccctggggcctgggccctgggccctggcacaatacaacgcgcccgttgactgactttgctgtgctccgtgctcagctgtgttcggttcggagttcggacaatctcctggaaattctgatcgaacctcctgcttggagcttcgcagcaacaccgtcctcacccgcgctgaaaaagcacccatcttcctattgcgcctttcttgtagagtcaagtcagctcacttttctcgtttcgatccagatcccgtattcccgttggattcgtttatcccgcgtcccgcaagcaatatcagatccttagcttctgtggttctgcacttattcagcgtctctccagcttggaccccttaaagtgttctccagctacttgaatcgtcagaaatggccactgacgccagcggaggtgaaaactgggtcaaggtggatttggaactgtttacaagggattcctgcaagacgggcaagccattgctgtgaagaagctctcagataattccccagtggcaaccgaaaaacagttcaagaatgaggttgggaaccttatggccatccagcatgagaacatagtgaggttgtatggctactgtcatgaactgcagaagaaagtgatagaacacaatggaagatacattcttgtggatgtggttcagagcatgctctgctacgaatacgcccccaaggggagccttgacaagtgtatttttgatatatcttctaggcctaattgggccacatgcttcaaaataattaagggcatttgccagggtttatatttcctacataaggggatggataggcctattgttcatctggatcttcagcctgccaacatactattggatgacaacatggtaccaaaaattgcggattttggcctgtcaaggctctttggtgaagaacaaacccgaataaacacaataaatgttgtgggagccaaagggtatatggctccagaatatctgtacagaggggagatctcaacccggtctgacatatacagcttaggcgtactaatcatggagatcacaactgggcagaagaactctccgaatgacaaagacatgtttgccaaacatggacagacgaacacatggcatccaagtactcatcactagatgcagacagcctccagcaagtaaaagcatgcattgaaactgggctaaaatgtgtggatatcgatcagaagaagaggccctctatagttgaaattgttgacaagctcgatggaaggcttgctctctgaatggtagtgtatgctgcgcaaggtaaaactgtgatgcagagttaattctgcctatggtgatatgctctagatgcaatcacggaaacaataattgtatcacttactaatttatgtacttatgaaaaatatgttgcttgtgtaatgcatgtgttttggttagcatctagtacaccttccagccagttttttgtgtaacttcagctgtgaacaaaagatgtcataatgtgacatacctgtgatctcaatgttcatgttatgattttactctaaactatgtctataatcttgtatcatttgcatgttcatatattttta

SEQ ID NO: 45469 - DNA, 1590 bp, Zea Mays
tcgaggtatgaccctggggcctgggccctgggccctggcacaatacaacgcgcccgttgactgactttgctgtgctccgtgctcagctgtgttcggttcggagttcggacaatctcctggaaattctgatcgaacctcctgcttggagcttcgcagcaacaccgtcctcacccgcgctgaaaaagcacccatcttcctattgcgcctttcttgtagagtcaagtcagctcacttttctcgtttcgatccagatcccgtattcccgttggattcgtttatcccgcgtcccgcaagcaatatcagatccttagcttctgtggttctgcacttattcagcgtctctccagcttggaccccttaaagtgttctccagctacttgaatcgtcagaaatggccactgacgccagcggagaaaactgggtcaaggtggatttggaactgtttacaagggattcctgcaagacgggcaagccattgctgtgaagaagctctcagataattccccagtggcaaccgaaaaacagttcaagaatgaggttgggaaccttatggccatccagcatgagaacatagtgaggttgtatggctactgtcatgaactgcagaagaaagtgatagaacacaatggaagatacattcttgtggatgtggttcagagcatgctctgctacgaatacgcccccaaggggagccttgacaagtgtatttttgatatatcttctaggcctaattgggccacatgcttcaaaataattaagggcatttgccagggtttatatttcctacataaggggatggataggcctattgttcatctggatcttcagcctgccaacatactattggatgacaacatggtaccaaaaattgcggattttggcctgtcaaggctctttggtgaagaacaaacccgaataaacacaataaatgttgtgggagccaaagggtatatggctccagaatatctgtacagaggggagatctcaacccggtctgacatatacagcttaggcgtactaatcatggagatcacaactgggcagaagaactctccgaatgacaaagacatgtgtgcaaggaactttataaatcaggtttgccaaacatggacagacgaacacatggcatccaagtactcatcactagatgcagacagcctccagcaagtaaaagcatgcattgaaactgggctaaaatgtgtggatatcgatcagaagaagaggccctctatagttgaaattgttgacaagctcgatggaaggcttgctctctgaatggtagtgtatgctgcgcaaggtaaaactgtgatgcagagttaattctgcctatggtgatatgctctagatgcaatcacggaaacaataattgtatcacttactaatttatgtacttatgaaaaatatgttgcttgtgtaatgcatgtgttttggttagcatctagtacaccttccagccagttttttgtgtaacttcagctgtgaacaaaagatgtcataatgtgacatacctgtgatctcaatgttcatgttatgattttactctaaactatgtctataatcttgtatcatttgcatgttcatatattttta

SEQ ID NO: 45470 - DNA, 3949 bp, Zea Mays
gtgctcaggcaattcctagctagctattaccactaaggagagaatcagagactgaaaaagcaatggccgatcttgttgttggcttggccaagacagtggtggagggggccctgaccaaggctcagtcagcgattgaggaggagacaaaactgcagcaaagcgtgcagcacaaccttgtgttcatcgctggcgagtttgagatgatgcactccttcctcaatgttgccaatgaggagcgtgtcaagaacaacgttgtgaggacatgggtgaggcaggtccgtgatctggcatatgatgtggaggactgcatagagtttgtcacccacctggacaaaaagtcaagctggtagcgccaaatgctgccaccttgcttggcagcatcagcattgcccataaaagaggcagtcactgagatagagcagctcaaggttagggttgaggacgtgagccgaaggaactcacgctacagcctcatcagcgactctggatccaagcccatcatgcagcaacagacggcacccaaaactatttttggcacaatggtgcttgacatgatggttgaggcgagggacaccgcaaaaaggcagcaaggtttaggagatctcacccagctactaacaaaggaacaagctgacctgggggtaatctcagtgtggggaacaggcagtgaactcggtacaacatccatcatcagaaaggcctaccaggacccagaactctgtcaaaaatttgaatgtcgtggctgggtgaagcttacacaacctttcaatcctcatgagtttctccgcagtatggtcgcccagttctacgcaaacagttgcctgcaaaatggaatggttataaatgtcgatgaactgaagaggattgaggaaatggcgacaacgggaggcggactcattggggcatttatggataaagtaaatgagaacagatacctaatcgtcctggaaaatctgtccacaattggagattgggacaccatcggaacttacctgccagacaggaagaatggcagtcgggtcattgtatccacacagcagtgtgaaattgcaagcttgtgcattgggcattcataccaagtagcagaggtgaagcagtactcagcagagcactctgtatgtgtcttcttcgaggagggattgcaaggtaatggtgataaaagcatggaatctgatagagtagtagacaacaacaatgaaatgtcaatgcaggatgaaataacccacggtactggctttctgtccgacagaattccaacatctaaacggaaggatgcctctgattgggtgaagaattttcaacttgttgaacgcaagtcagaaatgaaccaactcgtccattgaagaatgggacttaatacaagctgccttggtgtctagaccttctagaagtattatcattgtcattacaactgaagcaagtatcgccacatattgtgcagataatgaaggggtcgtatttaatgtcaaaggtctagaagacaaagcagccctcaagcttttcaaaaagcagccatggggcatatttggcattggaatccacaactcgtacaagaagagtggctggctctcaccatttctccaatttaccggaaatctcaaatttataactaagttgcatggtaaattatgcatggtacataggcaaaaaccatcatctcctataaaggactccatagatgaagagctacaagaacttattttgaagtgtggtggtcttccaaaagttatagttgccgtagctaactttttggcacctaaaacagtctcatggatggacagtgcaagttctatgaatctcaaatttatgcaagagctggagagcagcccagagtttgcttgcctgcagccactctttggttggctgcactcctactttcgaacatgcccggattttctcaagccatgtatcttctatctgtcaatttttcctcgagatcacagtatccggagaaggcgattggtgagacggtggattgcagagggctatgccagggacacggacaaaatttctgcagaggaaagaggggagcagttcttctgcaggctcctcgatctgagcataataatgcagaaaccatattcagtcaccaccggattcagagacagcagaatgactttgtgtcaagtcaacagttttgtccgagagtatatcatctctcgtcaaatggaagagaaccttgtatttgaactgggaggcagttgcaccctaacctctcagcgcatggggcgtcacctcatcatactgaaaagctgggacagagacagaattgtgtttgagagcattgacttctcaaggctacgatctttgacagtgtttggagaatggaagccattcttcatatctgataggatgaggttgcttcgggttctggatcttgaggatgcatctgatttaaaagatgaagacctcaaacaaatgatgaagctgctttgtcgcctcaagtatctttccctacgaggatgcactgggatctatagcctgccgaattcattaggttgcttgaggcagcttgagactctggatgtcagacatacagccatagcaaccatgccaaggactatcaccaagctaaagaagttgcagtacctccgcgctagtaccaccaaaccaactaaggaacaaccaacacccgatactgctgttacacccaaaccaacaaagaaacaaccaaatccacacacctcggtatcatggacgtcatccttgttccacagacatcgacaactagagggtgttgtggttcctactgggctagagaaattgactgcattgctcaccatcggtgttgttaatgtcaattctgctcgggggaggtccatcttgaaagaggtcaggaagctcacccaattgcgcaagcttggagtgtctggaataagtaggaacaacagcaaagatttctgtttggccatctcaagtcgtgcgcatttagactccttatcagttaagctcaagaaggacaatcaggactgcttgtgtgtcaccccagatggctaccttccccccaagaacctacagagctttaaattgtatggccttgcagacagttttccaaaatggatcaatcaacttgaaaatctcaggaagttagttttggagatgactatattaacgcaagatactatcaagggactcaaggatcttaaagtatgtattctgcgtctaattaccaagcagcttcctgatggtaagctcaatttttgtgtcatgttgcatgggcagcaattacgttgctatgaaacagtgaagatactcgagatctcttgcagctccagcttagatgtggcttttggatcacaatcactgcaaaatcttgagctgctgaaagtttcctgctgtagtggttcagggtcggtaatgaagctctctgggctagaaaaactgtctgaatctgaactcaaggaagtccagattaagggttccgatgatttcatagtaaaaacagatgtggaggaacaacttgccaggcacccaaagaaacctgttttgaaggttgaaaaggtactgtcgtccactggggattttgagctctagagtgtcagtttcctatcgttacgatatcaaggattagtgactggtgctgtttgcttcctcttatttcttcagtgctattcgatccaatctaaccgattagaaagatcagttatgcagccatcgtgccaataataaactgtgaaacctgaaagcttccttcttggccacatattgatcagtctatttttcttgtgcctgtggtttatttattcctactgcatagtcccagtctggatttgttctaaaagatatggatggtgtgcaaatgtgtttatgtatatagagaatgttggaccagtgaattgctattgtacttttctgttgctctcatgtattgtagtttcgtggtgtatcttgctacatccatgttctcttgtggttgtttgtgtgtacatttgttttgaatggtttttgc

SEQ ID NO: 45471 - DNA, 4212 bp, Zea Mays
cctcgttctccttgatttcccttcctcatatcagtgtgcagtggacaaattaatcaatacggcccacctaaataacaaggtgtagatgataaagttatgagcatcagggccgatccatttatctatgaggggcatactttacatgagctacaggtgctcaggcaattcctagctagctattaccactaaggagagaatcagagactgaaaaagcaatggccgatcttgttgttggcttggccaagacagtggtggagggggccctgaccaaggctcagtcagcgattgaggaggagacaaaactgcagcaaagcgtgcagcacaaccttgtgttcatcgctggcgagtttgagatgatgcactccttcctcaatgttgccaatgaggagcgtgtcaagaacaacgttgtgaggacatgggtgaggcagcgccaaatgctgccaccttgcttggcagcatcagcattgcccataaaagaggcagtcactgagatagagcagctcaaggttagggttgaggacgtgagccgaaggaactcacgctacagcctcatcagcgactctggatccaagcccatcatgcagcaacagacggcacccaaaactatttttggcacaatggtgcttgacatgatggttgaggcgagggacaccgcaaaaaggcagcaaggtttaggagatctcacccagctactaacaaaggaacaagctgacctgggggtaatctcagtgtggggaacaggcagtgaactcggtacaacatccatcatcagaaaggcctaccaggacccagaactctgtcaaaaatttgaatgtcgtggctgggtgaagcttacacaacctttcaatcctcatgagtttctccgcagtatggtcgcccagttctacgcaaacagttgcctgcaaaatggaatggttataaatgtcgatgaactgaagaggattgaggaaatggcgacaacgggaggcggactcattggggcatttatggataaagtaaatgagaacagatacctaatcgtcctggaaaatctgtccacaattggagattgggacaccatcggaacttacctgccagacaggaagaatggcagtcgggtcattgtatccacacagcagtgtgaaattgcaagcttgtgcattgggcattcataccaagtagcagaggtgaagcagtactcagcagagcactctgtatgtgtcttcttcgaggagggattgcaaggtaatggtgataaaagcatggaatctgatagagtagtagacaacaacaatgaaatgtcaatgcaggatgaaataacccacggtactggctttctgtccgacagaattccaacatctaaacggaaggatgcctctgattgggtgaagaattttcaacttgttgaacgcaagtcagaaatgaaccaactcggtaactatattgctaaggcacgtgtctatggtttgcaaatactgtctgtgtgggggatagctggtgttgggaaatcagccctcgttaggaacatgtactttgacagaattcatcgaaatgaccaattatttgagaagtacggttgggttgatgtaacccacccattcaatttaagggacttctcccggagtttgcttttggatttccattcagaacctgttcaagccatgggaatcaaagaccctactcaagagtgtcataagattctagaagataaccggtgccttgttgttattgatgatttgcagtccattgaagaatgggacttaatacaagctgccttggtgtctagaccttctagaagtattatcattgtcattacaactgaagcaagtatcgccacatattgtgcagataatgaaggggtcgtatttaatgtcaaaggtctagaagacaaagcagccctcaagcttttcaaaaagcaggtacataggcaaaaaccatcatctcctataaaggactccatagatgaagagctacaagaacttattttgaagtgtggtggtcttccaaaagttatagttgccgtagctaactttttggcacctaaaacagtctcatggatggacagtgcaagttctatgaatctcaaatttatgcaagagctggagagcagcccagagtttgcttgcctgcagccactctttggttggctgcactcctactttcgaacatgcccggattttctcaagccatgtatcttctatctgtcaatttttcctcgagatcacagtatccggagaaggcgattggtgagacggtggattgcagagggctatgccagggacacggacaaaatttctgcagaggaaagaggggagcagttcttctgcaggctcctcgatctgagcataataatgcagaaaccatattcagtcaccaccggattcagagacagcagaatgactttgtgtcaagtcaacagttttgtccgagagtatatcatctctcgtcaaatggaagagaaccttgtatttgaactgggaggcagttgcaccctaacctctcagcgcatggggcgtcacctcatcatactgaaaagctgggacagagacagaattgtgtttgagagcattgacttctcaaggctacgatctttgacagtgtttggagaatggaagccattcttcatatctgataggatgaggttgcttcgggttctggatcttgaggatgcatctgatttaaaagatgaagacctcaaacaaatgatgaagctgctttgtcgcctcaagtatctttccctacgaggatgcactgggatctatagcctgccgaattcattaggttgcttgaggcagcttgagactctggatgtcagacatacagccatagcaaccatgccaaggactatcaccaagctaaagaagttgcagtacctccgcgctagtaccaccaaaccaactaaggaacaaccaacacccgatactgctgttacacccaaaccaacaaagaaacaaccaaatccacacacctcggtatcatggacgtcatccttgttccacagacatcgacaactagagggtgttgtggttcctactgggctagagaaattgactgcattgctcaccatcggtgttgttaatgtcaattctgctcgggggaggtccatcttgaaagaggtcaggaagctcacccaattgcgcaagcttggagtgtctggaataagtaggaacaacagcaaagatttctgtttggccatctcaagtcgtgcgcatttagactccttatcagttaagctcaagaaggacaatcaggactgcttgtgtgtcaccccagatggctaccttccccccaagaacctacagagctttaaattgtatggccttgcagacagttttccaaaatggatcaatcaacttgaaaatctcaggaagttagttttggagatgactatattaacgcaagatactatcaagggactcaaggatcttaaagtatgtattctgcgtctaattaccaagcagcttcctgatggtaagctcaatttttgtgtcatgttgcatgggcagcaattacgttgctatgaaacagtgaagatactcgagatctcttgcagctccagcttagatgtggcttttggatcacaatcactgcaaaatcttgagctgctgaaagtttcctgctgtagtggttcagggtcggtaatgaagctctctgggctagaaaaactgtctgaatctgaactcaaggaagtccagattaagggttccgatgatttcatagtaaaaacagatgtggaggaacaacttgccaggcacccaaagaaacctgttttgaaggttgaaaaggtactgtcgtccactggggattttgagctctagagtgtcagtttcctatcgttacgatatcaaggattagtgactggtgctgtttgcttcctcttatttcttcagtgctattcgatccaatctaaccgattagaaagatcagttatgcagccatcgtgccaataataaactgtgaaacctgaaagcttccttcttggccacatattgatcagtctatttttcttgtgcctgtggtttatttattcctactgcatagtcccagtctggatttgttctaaaagatatggatggtgtgcaaatgtgtttatgtatatagagaatgttggaccagtgaattgctattgtacttttctgttgctctcatgtattgtagtttcgtggtgtatcttgctacatccatgttctcttgtggttgtttgtgtgtacatttgttttgaatggtttttgc

SEQ ID NO: 45472 - DNA, 3921 bp, Zea Mays
ggcaaaatcacctccgaggcacggcgttgcgtccacctgccgtgtacgcattcccggcgcggctccgttgcgttccagtcagtgcggcgacgccgccaacgtctcacatggcttgtcggatctcaaggtgtagatgataaagttatgagcatcagggccgatccatttatctatgaggggcatactttacatgagctacaggtgctcaggcaattcctagctagctattaccactaaggagagaatcagagactgaaaaagcaatggccgatcttgttgttggcttggccaagacagtggtggagggggccctgaccaaggctcagtcagcgattgaggaggagacaaaactgcagcaaagcgtgcagcacaaccttgtgttcatcgctggcgagtttgagatgatgcactccttcctcaatgttgccaatgaggagcgtgtcaagaacaacgttgtgaggacatgggtgaggcaggtccgtgatctggcatatgatgtggaggactgcatagagtttgtcacccacctggacaaaaagtcaagctggtagcgccaaatgctgccaccttgcttggcagcatcagcattgcccataaaagaggcagtcactgagatagagcagctcaaggttagggttgaggacgtgagccgaaggaactcacgctacagcctcatcagcgactctggatccaagcccatcatgcagcaacagacggcacccaaaactatttttggcacaatggtgcttgacatgatggttgaggcgagggacaccgcaaaaaggcagcaaggtttaggagatctcacccagctactaacaaaggaacaagctgacctgggggtaatctcagtgtggggaacaggcagtgaactcggtacaacatccatcatcagaaaggcctaccaggacccagaactctgtcaaaaatttgaatgtcgtggctgggtgaagcttacacaacctttcaatcctcatgagtttctccgcagtatggtcgcccagttctacgcaaacagttgcctgcaaaatggaatggttataaatgtcgatgaactgaagaggattgaggaaatggcgacaacgggaggcggactcattggggcatttatggataaagtaaatgagaacagatacctaatcgtcctggaaaatctgtccacaattggagattgggacaccatcggaacttacctgccagacaggaagaatggcagtcgggtcattgtatccacacagcagtgtgaaattgcaagcttgtgcattgggcattcataccaagtagcagaggtgaagcagtactcagcagagcactctgtatgtgtcttcttcgaggagggattgcaaggtaatggtgataaaagcatggaatctgatagagtagtagacaacaacaatgaaatgtcaatgcaggatgaaataacccacggtactggctttctgtccgacagaattccaacatctaaacggaaggatgcctctgattgggtgaagaattttcaacttgttgaacgcaagtcagaaatgaaccaactcgataatgaaggggtcgtatttaatgtcaaaggtctagaagacaaagcagccctcaagcttttcaaaaagcaggtacataggcaaaaaccatcatctcctataaaggactccatagatgaagagctacaagaacttattttgaagtgtggtggtcttccaaaagttatagttgccgtagctaactttttggcacctaaaacagtctcatggatggacagtgcaagttctatgaatctcaaatttatgcaagagctggagagcagcccagagtttgcttgcctgcagccactctttggttggctgcactcctactttcgaacatgcccggattttctcaagccatgtatcttctatctgtcaatttttcctcgagatcacagtatccggagaaggcgattggtgagacggtggattgcagagggctatgccagggacacggacaaaatttctgcagaggaaagaggggagcagttcttctgcaggctcctcgatctgagcataataatgcagaaaccatattcagtcaccaccggattcagagacagcagaatgactttgtgtcaagtcaacagttttgtccgagagtatatcatctctcgtcaaatggaagagaaccttgtatttgaactgggaggcagttgcaccctaacctctcagcgcatggggcgtcacctcatcatactgaaaagctgggacagagacagaattgtgtttgagagcattgacttctcaaggctacgatctttgacagtgtttggagaatggaagccattcttcatatctgataggatgaggttgcttcgggttctggatcttgaggatgcatctgatttaaaagatgaagacctcaaacaaatgatgaagctgctttgtcgcctcaagtatctttccctacgaggatgcactgggatctatagcctgccgaattcattaggttgcttgaggcagcttgagactctggatgtcagacatacagccatagcaaccatgccaaggactatcaccaagctaaagaagttgcagtacctccgcgctagtaccaccaaaccaactaaggaacaaccaacacccgatactgctgttacacccaaaccaacaaagaaacaaccaaatccacacacctcggtatcatggacgtcatccttgttccacagacatcgacaactagagggtgttgtggttcctactgggctagagaaattgactgcattgctcaccatcggtgttgttaatgtcaattctgctcgggggaggtccatcttgaaagaggtcaggaagctcacccaattgcgcaagcttggagtgtctggaataagtaggaacaacagcaaagatttctgtttggccatctcaagtcgtgcgcatttagactccttatcagttaagctcaagaaggacaatcaggactgcttgtgtgtcaccccagatggctaccttccccccaagaacctacagagctttaaattgtatggccttgcagacagttttccaaaatggatcaatcaacttgaaaatctcaggaagttagttttggagatgactatattaacgcaagatactatcaagggactcaaggatcttaaagtatgtattctgcgtctaattaccaagcagcttcctgatggtaagctcaatttttgtgtcatgttgcatgggcagcaattacgttgctatgaaacagtgaagatactcgagatctcttgcagctccagcttagatgtggcttttggatcacaatcactgcaaaatcttgagctgctgaaagtttcctgctgtagtggttcagggtcggtaatgaagctctctgggctagaaaaactgtctgaatctgaactcaaggaagtccagattaagggttccgatgatttcatagtaaaaacagatgtggaggaacaacttgccaggcacccaaagaaacctgttttgaaggttgaaaaggtactgtcgtccactggggattttgagctctagagtgtcagtttcctatcgttacgatatcaaggattagtgactggtgctgtttgcttcctcttatttcttcagtgctattcgatccaatctaaccgattagaaagatcagttatgcagccatcgtgccaataataaactgtgaaacctgaaagcttccttcttggccacatattgatcagtctatttttcttgtgcctgtggtttatttattcctactgcatagtcccagtctggatttgttctaaaagatatggatggtgtgcaaatgtgtttatgtatatagagaatgttggaccagtgaattgctattgtacttttctgttgctctcatgtattgtagtttcgtggtgtatcttgctacatccatgttctcttgtggttgtttgtgtgtacatttgttttgaatggtttttgc

SEQ ID NO: 45473 - DNA, 4278 bp, Zea Mays
cttgtccactgtgcggcatccttcctggcaaaatcacctccgaggcacggcgttgcgtccacctgccgtgtacgcattcccggcgcggctccgttgcgttccagtcagtgcggcgacgccgccaacgtctcacatggcttgtcggatctcaaggtgtagatgataaagttatgagcatcagggccgatccatttatctatgaggggcatactttacatgagctacaggcaattcctagctagctattaccactaaggagagaatcagagactgaaaaagcaatggccgatcttgttgttggcttggccaagacagtggtggagggggccctgaccaaggctcagtcagcgattgaggaggagacaaaactgcagcaaagcgtgcagcacaaccttgtgttcatcgctggcgagtttgagatgatgcactccttcctcaatgttgccaatgaggagcgtgtcaagaacaacgttgtgaggacatgggtgaggcagcgccaaatgctgccaccttgcttggcagcatcagcattgcccataaaagaggcagtcactgagatagagcagctcaaggttagggttgaggacgtgagccgaaggaactcacgctacagcctcatcagcgactctggatccaagcccatcatgcagcaacagacggcacccaaaactatttttggcacaatggtgcttgacatgatggttgaggcgagggacaccgcaaaaaggcagcaaggtttaggagatctcacccagctactaacaaaggaacaagctgacctgggggtaatctcagtgtggggaacaggcagtgaactcggtacaacatccatcatcagaaaggcctaccaggacccagaactctgtcaaaaatttgaatgtcgtggctgggtgaagcttacacaacctttcaatcctcatgagtttctccgcagtatggtcgcccagttctacgcaaacagttgcctgcaaaatggaatggttataaatgtcgatgaactgaagaggattgaggaaatggcgacaacgggaggcggactcattggggcatttatggataaagtaaatgagaacagatacctaatcgtcctggaaaatctgtccacaattggagattgggacaccatcggaacttacctgccagacaggaagaatggcagtcgggtcattgtatccacacagcagtgtgaaattgcaagcttgtgcattgggcattcataccaagtagcagaggtgaagcagtactcagcagagcactctgtatgtgtcttcttcgaggagggattgcaaggtaatggtgataaaagcatggaatctgatagagtagtagacaacaacaatgaaatgtcaatgcaggatgaaataacccacggtactggctttctgtccgacagaattccaacatctaaacggaaggatgcctctgattgggtgaagaattttcaacttgttgaacgcaagtcagaaatgaaccaactcggtaactatattgctaaggcacgtgtctatggtttgcaaatactgtctgtgtgggggatagctggtgttgggaaatcagccctcgttaggaacatgtactttgacagaattcatcgaaatgaccaattatttgagaagtacggttgggttgatgtaacccacccattcaatttaagggacttctcccggagtttgcttttggatttccattcagaacctgttcaagccatgggaatcaaagaccctactcaagagtgtcataagattctagaagataaccggtgccttgttgttattgatgatttgcagtccattgaagaatgggacttaatacaagctgccttggtgtctagaccttctagaagtattatcattgtcattacaactgaagcaagtatcgccacatattgtgcagataatgaaggggtcgtatttaatgtcaaaggtctagaagacaaagcagccctcaagcttttcaaaaagcaggtacataggcaaaaaccatcatctcctataaaggactccatagatgaagagctacaagaacttattttgaagtgtggtggtcttccaaaagttatagttgccgtagctaactttttggcacctaaaacagtctcatggatggacagtgcaagttctatgaatctcaaatttatgcaagagctggagagcagcccagagtttgcttgcctgcagccactctttggttggctgcactcctactttcgaacatgcccggattttctcaagccatgtatcttctatctgtcaatttttcctcgagatcacagtatccggagaaggcgattggtgagacggtggattgcagagggctatgccagggacacggacaaaatttctgcagaggaaagaggggagcagttcttctgcaggctcctcgatctgagcataataatgcagaaaccatattcagtcaccaccggattcagagacagcagaatgactttgtgtcaagtcaacagttttgtccgagagtatatcatctctcgtcaaatggaagagaaccttgtatttgaactgggaggcagttgcaccctaacctctcagcgcatggggcgtcacctcatcatactgaaaagctgggacagagacagaattgtgtttgagagcattgacttctcaaggctacgatctttgacagtgtttggagaatggaagccattcttcatatctgataggatgaggttgcttcgggttctggatcttgaggatgcatctgatttaaaagatgaagacctcaaacaaatgatgaagctgctttgtcgcctcaagtatctttccctacgaggatgcactgggatctatagcctgccgaattcattaggttgcttgaggcagcttgagactctggatgtcagacatacagccatagcaaccatgccaaggactatcaccaagctaaagaagttgcagtacctccgcgctagtaccaccaaaccaactaaggaacaaccaacacccgatactgctgttacacccaaaccaacaaagaaacaaccaaatccacacacctcggtatcatggacgtcatccttgttccacagacatcgacaactagagggtgttgtggttcctactgggctagagaaattgactgcattgctcaccatcggtgttgttaatgtcaattctgctcgggggaggtccatcttgaaagaggtcaggaagctcacccaattgcgcaagcttggagtgtctggaataagtaggaacaacagcaaagatttctgtttggccatctcaagtcgtgcgcatttagactccttatcagttaagctcaagaaggacaatcaggactgcttgtgtgtcaccccagatggctaccttccccccaagaacctacagagctttaaattgtatggccttgcagacagttttccaaaatggatcaatcaacttgaaaatctcaggaagttagttttggagatgactatattaacgcaagatactatcaagggactcaaggatcttaaagtatgtattctgcgtctaattaccaagcagcttcctgatggtaagctcaatttttgtgtcatgttgcatgggcagcaattacgttgctatgaaacagtgaagatactcgagatctcttgcagctccagcttagatgtggcttttggatcacaatcactgcaaaatcttgagctgctgaaagtttcctgctgtagtggttcagggtcggtaatgaagctctctgggctagaaaaactgtctgaatctgaactcaaggaagtccagattaagggttccgatgatttcatagtaaaaacagatgtggaggaacaacttgccaggcacccaaagaaacctgttttgaaggttgaaaaggtactgtcgtccactggggattttgagctctagagtgtcagtttcctatcgttacgatatcaaggattagtgactggtgctgtttgcttcctcttatttcttcagtgctattcgatccaatctaaccgattagaaagatcagttatgcagccatcgtgccaataataaactgtgaaacctgaaagcttccttcttggccacatattgatcagtctatttttcttgtgcctgtggtttatttattcctactgcatagtcccagtctggatttgttctaaaagatatggatggtgtgcaaatgtgtttatgtatatagagaatgttggaccagtgaattgctattgtacttttctgttgctctcatgtattgtagtttcgtggtgtatcttgctacatccatgttctcttgtggttgtttgtgtgtacatttgttttgaatggtttttgc

SEQ ID NO: 45474 - DNA, 3292 bp, Zea Mays
gtcgtctccctcccgtgtcttgtccactgtgcggcatccttcctggcaaaatcacctccgaggcacggcgttgcgtccacctgccgtgtacgcattcccggcgcggctccgttgcgttccagtcagtgcggcgacgccgccaacgtctcacatggcttgtcggatctcaagggattgcaaggtaatggtgataaaagcatggaatctgatagagtagtagacaacaacaatgaaatgtcaatgcaggatgaaataacccacggtactggctttctgtccgacagaattccaacatctaaacggaaggatgcctctgattgggtgaagaattttcaacttgttgaacgcaagtcagaaatgaaccaactcggtaactatattgctaaggcacgtgtctatggtttgcaaatactgtctgtgtgggggatagctggtgttgggaaatcagccctcgttaggaacatgtactttgacagaattcatcgaaatgaccaattatttgagaagtacggttgggttgatgtaacccacccattcaatttaagggacttctcccggagtttgcttttggatttccattcagaacctgttcaagccatgggaatcaaagaccctactcaagagtgtcataagattctagaagataaccggtgccttgttgttattgatgatttgcagtccattgaagaatgggacttaatacaagctgccttggtgtctagaccttctagaagtattatcattgtcattacaactgaagcaagtatcgccacatattgtgcagataatgaaggggtcgtatttaatgtcaaaggtctagaagacaaagcagccctcaagcttttcaaaaagcagccatggggcatatttggcattggaatccacaactcgtacaagaagagtggctggctctcaccatttctccaatttaccggaaatctcaaatttataactaagttgcatggtaaattatgcatggtacataggcaaaaaccatcatctcctataaaggactccatagatgaagagctacaagaacttattttgaagtgtggtggtcttccaaaagttatagttgccgtagctaactttttggcacctaaaacagtctcatggatggacagtgcaagttctatgaatctcaaatttatgcaagagctggagagcagcccagagtttgcttgcctgcagccactctttggttggctgcactcctactttcgaacatgcccggattttctcaagccatgtatcttctatctgtcaatttttcctcgagatcacagtatccggagaaggcgattggtgagacggtggattgcagagggctatgccagggacacggacaaaatttctgcagaggaaagaggggagcagttcttctgcaggctcctcgatctgagcataataatgcagaaaccatattcagtcaccaccggattcagagacagcagaatgactttgtgtcaagtcaacagttttgtccgagagtatatcatctctcgtcaaatggaagagaaccttgtatttgaactgggaggcagttgcaccctaacctctcagcgcatggggcgtcacctcatcatactgaaaagctgggacagagacagaattgtgtttgagagcattgacttctcaaggctacgatctttgacagtgtttggagaatggaagccattcttcatatctgataggatgaggttgcttcgggttctggatcttgaggatgcatctgatttaaaagatgaagacctcaaacaaatgatgaagctgctttgtcgcctcaagtatctttccctacgaggatgcactgggatctatagcctgccgaattcattaggttgcttgaggcagcttgagactctggatgtcagacatacagccatagcaaccatgccaaggactatcaccaagctaaagaagttgcagtacctccgcgctagtaccaccaaaccaactaaggaacaaccaacacccgatactgctgttacacccaaaccaacaaagaaacaaccaaatccacacacctcggtatcatggacgtcatccttgttccacagacatcgacaactagagggtgttgtggttcctactgggctagagaaattgactgcattgctcaccatcggtgttgttaatgtcaattctgctcgggggaggtccatcttgaaagaggtcaggaagctcacccaattgcgcaagcttggagtgtctggaataagtaggaacaacagcaaagatttctgtttggccatctcaagtcgtgcgcatttagactccttatcagttaagctcaagaaggacaatcaggactgcttgtgtgtcaccccagatggctaccttccccccaagaacctacagagctttaaattgtatggccttgcagacagttttccaaaatggatcaatcaacttgaaaatctcaggaagttagttttggagatgactatattaacgcaagatactatcaagggactcaaggatcttaaagtatgtattctgcgtctaattaccaagcagcttcctgatggtaagctcaatttttgtgtcatgttgcatgggcagcaattacgttgctatgaaacagtgaagatactcgagatctcttgcagctccagcttagatgtggcttttggatcacaatcactgcaaaatcttgagctgctgaaagtttcctgctgtagtggttcagggtcggtaatgaagctctctgggctagaaaaactgtctgaatctgaactcaaggaagtccagattaagggttccgatgatttcatagtaaaaacagatgtggaggaacaacttgccaggcacccaaagaaacctgttttgaaggttgaaaaggtactgtcgtccactggggattttgagctctagagtgtcagtttcctatcgttacgatatcaaggattagtgactggtgctgtttgcttcctcttatttcttcagtgctattcgatccaatctaaccgattagaaagatcagttatgcagccatcgtgccaataataaactgtgaaacctgaaagcttccttcttggccacatattgatcagtctatttttcttgtgcctgtggtttatttattcctactgcatagtcccagtctggatttgttctaaaagatatggatggtgtgcaaatgtgtttatgtatatagagaatgttggaccagtgaattgctattgtacttttctgttgctctcatgtattgtagtttcgtggtgtatcttgctacatccatgttctcttgtggttgtttgtgtgtacatttgttttgaatggtttttgc

SEQ ID NO: 45475 - DNA, 4093 bp, Zea Mays
gtcaagtcgtctccctcccgtgtcttgtccactgtgcggcatccttcctggcaaaatcacctccgaggcacggcgttgcgtccacctgccgtgtacgcattcccggcgcggctccgttgcgttccagtcagtgcggcgacgccgccaacgtctcacatggcttgtcggatctcaaggtgtagatgataaagttatgagcatcagggccgatccatttatctatgaggggcatactttacatgagctacaggtgctcaggcaattcctagctagctattaccactaaggagagaatcagagactgaaaaagcaatggccgatcttgttgttggcttggccaagacagtggtggagggggccctgaccaaggctcagtcagcgattgaggaggagacaaaactgcagcaaagcgtgcagcacaaccttgtgttcatcgctggcgagtttgagatgatgcactccttcctcaatgttgccaatgaggagcgtgtcaagaacaacgttgtgaggacatgggtgaggcaggtccgtgatctggcatatgatgtggaggactgcatagagtttgtcacccacctggacaaaaagtcaagctggtagcgccaaatgctgccaccttgcttggcagcatcagcattgcccataaaagaggcagtcactgagatagagcagctcaaggttagggttgaggacgtgagccgaaggaactcacgctacagcctcatcagcgactctggatccaagcccatcatgcagcaacagacggcacccaaaactatttttggcacaatggtgcttgacatgatggttgaggcgagggacaccgcaaaaaggcagcaaggtttaggagatctcacccagctactaacaaaggaacaagctgacctgggggtaatctcagtgtggggaacaggcagtgaactcggtacaacatccatcatcagaaaggcctaccaggacccagaactctgtcaaaaatttgaatgtcgtggctgggtgaagcttacacaacctttcaatcctcatgagtttctccgcagtatggtcgcccagttctacgcaaacagttgcctgcaaaatggaatggttataaatgtcgatgaactgaagaggattgaggaaatggcgacaacgggaggcggactcattggggcatttatggataaagtaaatgagaacagatacctaatcgtcctggaaaatctgtccacaattggagattgggacaccatcggaacttacctgccagacaggaagaatggcagtcgggtcattgtatccacacagcagtgtgaaattgcaagcttgtgcattgggcattcataccaagtagcagaggtgaagcagtactcagcagagcactctgtatgtgtcttcttcgaggagggattgcaaggtaatggtgataaaagcatggaatctgatagagtagtagacaacaacaatgaaatgtcaatgcaggatgaaataacccacggtactggctttctgtccgacagaattccaacatctaaacggaaggatgcctctgattgggtgaagaattttcaacttgttgaacgcaagtcagaaatgaaccaactcggtaactatattgctaagtccattgaagaatgggacttaatacaagctgccttggtgtctagaccttctagaagtattatcattgtcattacaactgaagcaagtatcgccacatattgtgcagataatgaaggggtcgtatttaatgtcaaaggtctagaagacaaagcagccctcaagcttttcaaaaagcaggtacataggcaaaaaccatcatctcctataaaggactccatagatgaagagctacaagaacttattttgaagtgtggtggtcttccaaaagttatagttgccgtagctaactttttggcacctaaaacagtctcatggatggacagtgcaagttctatgaatctcaaatttatgcaagagctggagagcagcccagagtttgcttgcctgcagccactctttggttggctgcactcctactttcgaacatgcccggattttctcaagccatgtatcttctatctgtcaatttttcctcgagatcacagtatccggagaaggcgattggtgagacggtggattgcagagggctatgccagggacacggacaaaatttctgcagaggaaagaggggagcagttcttctgcaggctcctcgatctgagcataataatgcagaaaccatattcagtcaccaccggattcagagacagcagaatgactttgtgtcaagtcaacagttttgtccgagagtatatcatctctcgtcaaatggaagagaaccttgtatttgaactgggaggcagttgcaccctaacctctcagcgcatggggcgtcacctcatcatactgaaaagctgggacagagacagaattgtgtttgagagcattgacttctcaaggctacgatctttgacagtgtttggagaatggaagccattcttcatatctgataggatgaggttgcttcgggttctggatcttgaggatgcatctgatttaaaagatgaagacctcaaacaaatgatgaagctgctttgtcgcctcaagtatctttccctacgaggatgcactgggatctatagcctgccgaattcattaggttgcttgaggcagcttgagactctggatgtcagacatacagccatagcaaccatgccaaggactatcaccaagctaaagaagttgcagtacctccgcgctagtaccaccaaaccaactaaggaacaaccaacacccgatactgctgttacacccaaaccaacaaagaaacaaccaaatccacacacctcggtatcatggacgtcatccttgttccacagacatcgacaactagagggtgttgtggttcctactgggctagagaaattgactgcattgctcaccatcggtgttgttaatgtcaattctgctcgggggaggtccatcttgaaagaggtcaggaagctcacccaattgcgcaagcttggagtgtctggaataagtaggaacaacagcaaagatttctgtttggccatctcaagtcgtgcgcatttagactccttatcagttaagctcaagaaggacaatcaggactgcttgtgtgtcaccccagatggctaccttccccccaagaacctacagagctttaaattgtatggccttgcagacagttttccaaaatggatcaatcaacttgaaaatctcaggaagttagttttggagatgactatattaacgcaagatactatcaagggactcaaggatcttaaagtatgtattctgcgtctaattaccaagcagcttcctgatggtaagctcaatttttgtgtcatgttgcatgggcagcaattacgttgctatgaaacagtgaagatactcgagatctcttgcagctccagcttagatgtggcttttggatcacaatcactgcaaaatcttgagctgctgaaagtttcctgctgtagtggttcagggtcggtaatgaagctctctgggctagaaaaactgtctgaatctgaactcaaggaagtccagattaagggttccgatgatttcatagtaaaaacagatgtggaggaacaacttgccaggcacccaaagaaacctgttttgaaggttgaaaaggtactgtcgtccactggggattttgagctctagagtgtcagtttcctatcgttacgatatcaaggattagtgactggtgctgtttgcttcctcttatttcttcagtgctattcgatccaatctaaccgattagaaagatcagttatgcagccatcgtgccaataataaactgtgaaacctgaaagcttccttcttggccacatattgatcagtctatttttcttgtgcctgtggtttatttattcctactgcatagtcccagtctggatttgttctaaaagatatggatggtgtgcaaatgtgtttatgtatatagagaatgttggaccagtgaattgctattgtacttttctgttgctctcatgtattgtagtttcgtggtgtatcttgctacatccatgttctcttgtggttgtttgtgtgtacatttgttttgaatggtttttgc

SEQ ID NO: 45476 - DNA, 4119 bp, Zea Mays
cgtcgatcgacgcgttcatgccattgacccgtgagtcaagtcgtctccctcccgtgtcttgtccactgtgcggcatccttcctggcaaaatcacctccgaggcacggcgttgcgtccacctgccgtgtacgcattcccggcgcggctccgttgcgttccagtcagtgcggcgacgccgccaacgtctcacatggcttgtcggatctcaaggtgtagatgataaagttatgagcatcagggccgatccatttatctatgaggggcatactttacatgagctacaggcaattcctagctagctattaccactaaggagagaatcagagactgaaaaagcaatggccgatcttgttgttggcttggccaagacagtggtggagggggccctgaccaaggctcagtcagcgattgaggaggagacaaaactgcagcaaagcgtgcagcacaaccttgtgttcatcgctggcgagtttgagatgatgcactccttcctcaatgttgccaatgaggagcgtgtcaagaacaacgttgtgaggacatgggtgaggcaggtccgtgatctggcatatgatgtggaggactgcatagagtttgtcacccacctggacaaaaagtcaagctggtagcgccaaatgctgccaccttgcttggcagcatcagcattgcccataaaagaggcagtcactgagatagagcagctcaaggttagggttgaggacgtgagccgaaggaactcacgctacagcctcatcagcgactctggatccaagcccatcatgcagcaacagacggcacccaaaactatttttggcacaatggtgcttgacatgatggttgaggcgagggacaccgcaaaaaggcagcaaggtttaggagatctcacccagctactaacaaaggaacaagctgacctgggggtaatctcagtgtggggaacaggcagtgaactcggtacaacatccatcatcagaaaggcctaccaggacccagaactctgtcaaaaatttgaatgtcgtggctgggtgaagcttacacaacctttcaatcctcatgagtttctccgcagtatggtcgcccagttctacgcaaacagttgcctgcaaaatggaatggttataaatgtcgatgaactgaagaggattgaggaaatggcgacaacgggaggcggactcattggggcatttatggataaagtaaatgagaacagatacctaatcgtcctggaaaatctgtccacaattggagattgggacaccatcggaacttacctgccagacaggaagaatggcagtcgggtcattgtatccacacagcagtgtgaaattgcaagcttgtgcattgggcattcataccaagtagcagaggtgaagcagtactcagcagagcactctgtatgtgtcttcttcgaggagggattgcaaggtaatggtgataaaagcatggaatctgatagagtagtagacaacaacaatgaaatgtcaatgcaggatgaaataacccacggtactggctttctgtccgacagaattccaacatctaaacggaaggatgcctctgattgggtgaagaattttcaacttgttgaacgcaagtcagaaatgaaccaactcggtaactatattgctaagtccattgaagaatgggacttaatacaagctgccttggtgtctagaccttctagaagtattatcattgtcattacaactgaagcaagtatcgccacatattgtgcagataatgaaggggtcgtatttaatgtcaaaggtctagaagacaaagcagccctcaagcttttcaaaaagcaggtacataggcaaaaaccatcatctcctataaaggactccatagatgaagagctacaagaacttattttgaagtgtggtggtcttccaaaagttatagttgccgtagctaactttttggcacctaaaacagtctcatggatggacagtgcaagttctatgaatctcaaatttatgcaagagctggagagcagcccagagtttgcttgcctgcagccactctttggttggctgcactcctactttcgaacatgcccggattttctcaagccatgtatcttctatctgtcaatttttcctcgagatcacagtatccggagaaggcgattggtgagacggtggattgcagagggctatgccagggacacggacaaaatttctgcagaggaaagaggggagcagttcttctgcaggctcctcgatctgagcataataatgcagaaaccatattcagtcaccaccggattcagagacagcagaatgactttgtgtcaagtcaacagttttgtccgagagtatatcatctctcgtcaaatggaagagaaccttgtatttgaactgggaggcagttgcaccctaacctctcagcgcatggggcgtcacctcatcatactgaaaagctgggacagagacagaattgtgtttgagagcattgacttctcaaggctacgatctttgacagtgtttggagaatggaagccattcttcatatctgataggatgaggttgcttcgggttctggatcttgaggatgcatctgatttaaaagatgaagacctcaaacaaatgatgaagctgctttgtcgcctcaagtatctttccctacgaggatgcactgggatctatagcctgccgaattcattaggttgcttgaggcagcttgagactctggatgtcagacatacagccatagcaaccatgccaaggactatcaccaagctaaagaagttgcagtacctccgcgctagtaccaccaaaccaactaaggaacaaccaacacccgatactgctgttacacccaaaccaacaaagaaacaaccaaatccacacacctcggtatcatggacgtcatccttgttccacagacatcgacaactagagggtgttgtggttcctactgggctagagaaattgactgcattgctcaccatcggtgttgttaatgtcaattctgctcgggggaggtccatcttgaaagaggtcaggaagctcacccaattgcgcaagcttggagtgtctggaataagtaggaacaacagcaaagatttctgtttggccatctcaagtcgtgcgcatttagactccttatcagttaagctcaagaaggacaatcaggactgcttgtgtgtcaccccagatggctaccttccccccaagaacctacagagctttaaattgtatggccttgcagacagttttccaaaatggatcaatcaacttgaaaatctcaggaagttagttttggagatgactatattaacgcaagatactatcaagggactcaaggatcttaaagtatgtattctgcgtctaattaccaagcagcttcctgatggtaagctcaatttttgtgtcatgttgcatgggcagcaattacgttgctatgaaacagtgaagatactcgagatctcttgcagctccagcttagatgtggcttttggatcacaatcactgcaaaatcttgagctgctgaaagtttcctgctgtagtggttcagggtcggtaatgaagctctctgggctagaaaaactgtctgaatctgaactcaaggaagtccagattaagggttccgatgatttcatagtaaaaacagatgtggaggaacaacttgccaggcacccaaagaaacctgttttgaaggttgaaaaggtactgtcgtccactggggattttgagctctagagtgtcagtttcctatcgttacgatatcaaggattagtgactggtgctgtttgcttcctcttatttcttcagtgctattcgatccaatctaaccgattagaaagatcagttatgcagccatcgtgccaataataaactgtgaaacctgaaagcttccttcttggccacatattgatcagtctatttttcttgtgcctgtggtttatttattcctactgcatagtcccagtctggatttgttctaaaagatatggatggtgtgcaaatgtgtttatgtatatagagaatgttggaccagtgaattgctattgtacttttctgttgctctcatgtattgtagtttcgtggtgtatcttgctacatccatgttctcttgtggttgtttgtgtgtacatttgttttgaatggtttttgc

SEQ ID NO: 45477 - DNA, 3733 bp, Zea Mays
cctcactcgtcgatcgacgcgttcatgccattgacccgtgagtcaagtcgtctccctcccgtgtcttgtccactgtgcggcatccttcctggcaaaatcacctccgaggcacggcgttgcgtccacctgccgtgtacgcattcccggcgcggctccgttgcgttccagtcagtgcggcgacgccgccaacgtctcacatggcttgtcggatctcaaggtgtagatgataaagttatgagcatcagggccgatccatttatctatgaggggcatactttacatgagctacaggcaattcctagctagctattaccactaaggagagaatcagagactgaaaaagcaatggccgatcttgttgttggcttggccaagacagtggtggagggggccctgaccaaggctcagtcagcgattgaggaggagacaaaactgcagcaaagcgtgcagcacaaccttgtgttcatcgctggcgagtttgagatgatgcactccttcctcaatgttgccaatgaggagcgtgtcaagaacaacgttgtgaggacatgggtgaggcaggtccgtgatctggcatatgatgtggaggactgcatagagtttgtcacccacctggacaaaaagtcaagctggtagcgccaaatgctgccaccttgcttggcagcatcagcattgcccataaaagaggcagtcactgagatagagcagctcaaggttagggttgaggacgtgagccgaaggaactcacgctacagcctcatcagcgactctggatccaagcccatcatgcagcaacagacggcacccaaaactatttttggcacaatggtgcttgacatgatggttgaggcgagggacaccgcaaaaaggcagcaaggtttaggagatctcacccagctactaacaaaggaacaagctgacctgggggtaatctcagtgtggggaacaggcagtgaactcggtacaacatccatcatcagaaaggcctaccaggacccagaactctgtcaaaaatttgaatgtcgtggctgggtgaagcttacacaacctttcaatcctcatgagtttctccgcagtatggtcgcccagttctacgcaaacagttgcctgcaaaatggaatggttataaatgtcgatgaactgaagaggattgaggaaatggcgacaacgggaggcggactcattggggcatttatggataaagtaaatgagaacagatacctaatcgtcctggaaaatctgtccacaattggagattgggacaccatcggaacttacctgccagacaggaagaatggcagtcgggtcattgtatccacacagcagtgtgaaattgcaagcttgtgcattgggcattcataccaagtagcagaggtgaagcagtactcagcagagcactctgtatgtgtcttcttcgaggaggtacataggcaaaaaccatcatctcctataaaggactccatagatgaagagctacaagaacttattttgaagtgtggtggtcttccaaaagttatagttgccgtagctaactttttggcacctaaaacagtctcatggatggacagtgcaagttctatgaatctcaaatttatgcaagagctggagagcagcccagagtttgcttgcctgcagccactctttggttggctgcactcctactttcgaacatgcccggattttctcaagccatgtatcttctatctgtcaatttttcctcgagatcacagtatccggagaaggcgattggtgagacggtggattgcagagggctatgccagggacacggacaaaatttctgcagaggaaagaggggagcagttcttctgcaggctcctcgatctgagcataataatgcagaaaccatattcagtcaccaccggattcagagacagcagaatgactttgtgtcaagtcaacagttttgtccgagagtatatcatctctcgtcaaatggaagagaaccttgtatttgaactgggaggcagttgcaccctaacctctcagcgcatggggcgtcacctcatcatactgaaaagctgggacagagacagaattgtgtttgagagcattgacttctcaaggctacgatctttgacagtgtttggagaatggaagccattcttcatatctgataggatgaggttgcttcgggttctggatcttgaggatgcatctgatttaaaagatgaagacctcaaacaaatgatgaagctgctttgtcgcctcaagtatctttccctacgaggatgcactgggatctatagcctgccgaattcattaggttgcttgaggcagcttgagactctggatgtcagacatacagccatagcaaccatgccaaggactatcaccaagctaaagaagttgcagtacctccgcgctagtaccaccaaaccaactaaggaacaaccaacacccgatactgctgttacacccaaaccaacaaagaaacaaccaaatccacacacctcggtatcatggacgtcatccttgttccacagacatcgacaactagagggtgttgtggttcctactgggctagagaaattgactgcattgctcaccatcggtgttgttaatgtcaattctgctcgggggaggtccatcttgaaagaggtcaggaagctcacccaattgcgcaagcttggagtgtctggaataagtaggaacaacagcaaagatttctgtttggccatctcaagtcgtgcgcatttagactccttatcagttaagctcaagaaggacaatcaggactgcttgtgtgtcaccccagatggctaccttccccccaagaacctacagagctttaaattgtatggccttgcagacagttttccaaaatggatcaatcaacttgaaaatctcaggaagttagttttggagatgactatattaacgcaagatactatcaagggactcaaggatcttaaagtatgtattctgcgtctaattaccaagcagcttcctgatggtaagctcaatttttgtgtcatgttgcatgggcagcaattacgttgctatgaaacagtgaagatactcgagatctcttgcagctccagcttagatgtggcttttggatcacaatcactgcaaaatcttgagctgctgaaagtttcctgctgtagtggttcagggtcggtaatgaagctctctgggctagaaaaactgtctgaatctgaactcaaggaagtccagattaagggttccgatgatttcatagtaaaaacagatgtggaggaacaacttgccaggcacccaaagaaacctgttttgaaggttgaaaaggtactgtcgtccactggggattttgagctctagagtgtcagtttcctatcgttacgatatcaaggattagtgactggtgctgtttgcttcctcttatttcttcagtgctattcgatccaatctaaccgattagaaagatcagttatgcagccatcgtgccaataataaactgtgaaacctgaaagcttccttcttggccacatattgatcagtctatttttcttgtgcctgtggtttatttattcctactgcatagtcccagtctggatttgttctaaaagatatggatggtgtgcaaatgtgtttatgtatatagagaatgttggaccagtgaattgctattgtacttttctgttgctctcatgtattgtagtttcgtggtgtatcttgctacatccatgttctcttgtggttgtttgtgtgtacatttgttttgaatggtttttgc

SEQ ID NO: 45478 - DNA, 4350 bp, Zea Mays
cctcactcgtcgatcgacgcgttcatgccattgacccgtgagtcaagtcgtctccctcccgtgtcttgtccactgtgcggcatccttcctggcaaaatcacctccgaggcacggcgttgcgtccacctgccgtgtacgcattcccggcgcggctccgttgcgttccagtcagtgcggcgacgccgccaacgtctcacatggcttgtcggatctcaaggtgtagatgataaagttatgagcatcagggccgatccatttatctatgaggggcatactttacatgagctacaggtgctcaggcaattcctagctagctattaccactaaggagagaatcagagactgaaaaagcaatggccgatcttgttgttggcttggccaagacagtggtggagggggccctgaccaaggctcagtcagcgattgaggaggagacaaaactgcagcaaagcgtgcagcacaaccttgtgttcatcgctggcgagtttgagatgatgcactccttcctcaatgttgccaatgaggagcgtgtcaagaacaacgttgtgaggacatgggtgaggcagcgccaaatgctgccaccttgcttggcagcatcagcattgcccataaaagaggcagtcactgagatagagcagctcaaggttagggttgaggacgtgagccgaaggaactcacgctacagcctcatcagcgactctggatccaagcccatcatgcagcaacagacggcacccaaaactatttttggcacaatggtgcttgacatgatggttgaggcgagggacaccgcaaaaaggcagcaaggtttaggagatctcacccagctactaacaaaggaacaagctgacctgggggtaatctcagtgtggggaacaggcagtgaactcggtacaacatccatcatcagaaaggcctaccaggacccagaactctgtcaaaaatttgaatgtcgtggctgggtgaagcttacacaacctttcaatcctcatgagtttctccgcagtatggtcgcccagttctacgcaaacagttgcctgcaaaatggaatggttataaatgtcgatgaactgaagaggattgaggaaatggcgacaacgggaggcggactcattggggcatttatggataaagtaaatgagaacagatacctaatcgtcctggaaaatctgtccacaattggagattgggacaccatcggaacttacctgccagacaggaagaatggcagtcgggtcattgtatccacacagcagtgtgaaattgcaagcttgtgcattgggcattcataccaagtagcagaggtgaagcagtactcagcagagcactctgtatgtgtcttcttcgaggagggattgcaaggtaatggtgataaaagcatggaatctgatagagtagtagacaacaacaatgaaatgtcaatgcaggatgaaataacccacggtactggctttctgtccgacagaattccaacatctaaacggaaggatgcctctgattgggtgaagaattttcaacttgttgaacgcaagtcagaaatgaaccaactcggtaactatattgctaaggcacgtgtctatggtttgcaaatactgtctgtgtgggggatagctggtgttgggaaatcagccctcgttaggaacatgtactttgacagaattcatcgaaatgaccaattatttgagaagtacggttgggttgatgtaacccacccattcaatttaagggacttctcccggagtttgcttttggatttccattcagaacctgttcaagccatgggaatcaaagaccctactcaagagtgtcataagattctagaagataaccggtgccttgttgttattgatgatttgcagtccattgaagaatgggacttaatacaagctgccttggtgtctagaccttctagaagtattatcattgtcattacaactgaagcaagtatcgccacatattgtgcagataatgaaggggtcgtatttaatgtcaaaggtctagaagacaaagcagccctcaagcttttcaaaaagcaggtacataggcaaaaaccatcatctcctataaaggactccatagatgaagagctacaagaacttattttgaagtgtggtggtcttccaaaagttatagttgccgtagctaactttttggcacctaaaacagtctcatggatggacagtgcaagttctatgaatctcaaatttatgcaagagctggagagcagcccagagtttgcttgcctgcagccactctttggttggctgcactcctactttcgaacatgcccggattttctcaagccatgtatcttctatctgtcaatttttcctcgagatcacagtatccggagaaggcgattggtgagacggtggattgcagagggctatgccagggacacggacaaaatttctgcagaggaaagaggggagcagttcttctgcaggctcctcgatctgagcataataatgcagaaaccatattcagtcaccaccggattcagagacagcagaatgactttgtgtcaagtcaacagttttgtccgagagtatatcatctctcgtcaaatggaagagaaccttgtatttgaactgggaggcagttgcaccctaacctctcagcgcatggggcgtcacctcatcatactgaaaagctgggacagagacagaattgtgtttgagagcattgacttctcaaggctacgatctttgacagtgtttggagaatggaagccattcttcatatctgataggatgaggttgcttcgggttctggatcttgaggatgcatctgatttaaaagatgaagacctcaaacaaatgatgaagctgctttgtcgcctcaagtatctttccctacgaggatgcactgggatctatagcctgccgaattcattaggttgcttgaggcagcttgagactctggatgtcagacatacagccatagcaaccatgccaaggactatcaccaagctaaagaagttgcagtacctccgcgctagtaccaccaaaccaactaaggaacaaccaacacccgatactgctgttacacccaaaccaacaaagaaacaaccaaatccacacacctcggtatcatggacgtcatccttgttccacagacatcgacaactagagggtgttgtggttcctactgggctagagaaattgactgcattgctcaccatcggtgttgttaatgtcaattctgctcgggggaggtccatcttgaaagaggtcaggaagctcacccaattgcgcaagcttggagtgtctggaataagtaggaacaacagcaaagatttctgtttggccatctcaagtcgtgcgcatttagactccttatcagttaagctcaagaaggacaatcaggactgcttgtgtgtcaccccagatggctaccttccccccaagaacctacagagctttaaattgtatggccttgcagacagttttccaaaatggatcaatcaacttgaaaatctcaggaagttagttttggagatgactatattaacgcaagatactatcaagggactcaaggatcttaaagtatgtattctgcgtctaattaccaagcagcttcctgatggtaagctcaatttttgtgtcatgttgcatgggcagcaattacgttgctatgaaacagtgaagatactcgagatctcttgcagctccagcttagatgtggcttttggatcacaatcactgcaaaatcttgagctgctgaaagtttcctgctgtagtggttcagggtcggtaatgaagctctctgggctagaaaaactgtctgaatctgaactcaaggaagtccagattaagggttccgatgatttcatagtaaaaacagatgtggaggaacaacttgccaggcacccaaagaaacctgttttgaaggttgaaaaggtactgtcgtccactggggattttgagctctagagtgtcagtttcctatcgttacgatatcaaggattagtgactggtgctgtttgcttcctcttatttcttcagtgctattcgatccaatctaaccgattagaaagatcagttatgcagccatcgtgccaataataaactgtgaaacctgaaagcttccttcttggccacatattgatcagtctatttttcttgtgcctgtggtttatttattcctactgcatagtcccagtctggatttgttctaaaagatatggatggtgtgcaaatgtgtttatgtatatagagaatgttggaccagtgaattgctattgtacttttctgttgctctcatgtattgtagtttcgtggtgtatcttgctacatccatgttctcttgtggttgtttgtgtgtacatttgttttgaatggtttttgc

SEQ ID NO: 45479 - DNA, 2150 bp, Zea Mays
acccccggttgcccgcccttgacacccatcactcgaccccacccgaccgccctcgccgccgctccactccacaaggtgctccgccccagcaccggatccaacaagccagcctaggcactgctgctcgagccgactggccccgagacccgtggaggagaagaaagctgtggtagcagccagtgtgatgaatgatgtggcggcatgatccgaacggcttcttgttcttgtccttcccgggcgctgccactgccgctccttgtttgcatccttcctgcgcaagctggagctgtccttatcttcattagtcacatctctgggtactcaaaatatgcaattctactgcattagtagcatcacttggtagctgctacggcatcggcatagaagcacaaggagagagggaggggagagtaagagcgatgggggatcttgtcgtcggattggcaaagtcggtggtggagggggttctaacaaaggcccagtcagctattgaggaagagtcaaagctgcgtcagagtgcacagagggaccttgtgttcatcacaggtgaatttgagatgatgcactcctttctcaatgtcgccaatgaagagcgtgccaagaacaacgtggttaggacatgggtgaggcaggtccgtgacctagcctacgatgtagaggattgcattgaatttgttgttcacttggataaccggccccactggtggcgccgcttcataccatcatgtatgccagcatcggcactacccgtagatgcagtggtcgccgagatagagaagatcaaggtcagggttgaggatgtgagcaagaggaactcacgttacagcctcatcagtgactctggatccaagccagtaatgcagcaacaaccagctaccggccctgctattggcacaacaacgcttgacatgtttgttgagtcaagggacgccacgaaaaagcagcaaggcttaggggatatcacacagttgatcactaaagaaaacattgaccttggagtgatctcgttgtggggtacaggtggagatcttggtaagacatccatcataaggaaagcataccaggatcaagaaatctgcgaaaactttggatgtcgaggctggatcaagctaacatatcctttcaatccacataagttcctccagagcttggttactcagttctatacgaattcctgtctgcaacaaggaactactttagatgtagctcaactgaagaggatggtagcaaagcgaggaataattgaagaattcacgaagcaagtggatgggaagaggtacctactcgtcctggaaaacatgtgcacgatgggagagtgggacgctatcagggcatgcctgcctcacaggaataagggcaactggattatcgtgtccaccgagcaccatgaaatcgcaagtttgtgtgttggacattcataccaagtgttggagcttaaacagtattcagctgagtaccctgtatgcgtcttcttcaaggagagcaagaagactggaagagtaatatctagcagtggtgaaatattagaagatgaaatgagccacaggggaggccttacttatggtaggattcccacctctagaaaggctttagccagcagttggatggatcagtctacccttgttggacgtgagtcacaaatgaatgaacttcgtaagtatcagaccacggcccgtttcaaagattggcaagtgatgtctgtgtggggaattgctggtgttggaaaatctgatcttgtcaaaaatttgtactatgaaaggatgcttaaagaggacccaatgtttgacaagtatggttgggtccacgtgtcccatccattcaatttgagggacttctctcggaacttacttttggattttcactcagatgccgtgggaatcagagaccctattcaggagtgtcataagcttctaaaagaacatcagtgtcttgttgttattgatgatctacagtctgtggaagaatgggacttaatacgacctgcacttgtatctagacattccaagagtgttatcatcgtcattacaacagatgaaaaaattgccacgtattgtgcagacgatgaagaggtcgtgtttaatgtgaaatgtctagaagctgaagcatcctttgatctctttaaaaaagagttgactgtgaggttgacgaac

SEQ ID NO: 45480 - DNA, 4847 bp, Zea Mays
ccacctaccaccgccggccccaaaatcccaaatccgtggcaccgccggcggccgcacccccggttgcccgcccttgacacccatcactcgaccccacccgaccgccctcgccgccgctccactccacaaggtgctccgccccagcaccggatccaacaagccagcctaggcactgctgctcgagccgactggccccgagacccgtggaggagaagaaagctgtggtagcagccagtgtgatgaatgatgtggcggcatgatccgaacggcttcttgttcttgtccttcccgggcgctgccactgccgctccttgtttgcatccttcctgcgcaagctggagctgtccttatcttcattagtcacatctctgggtactcaaaatatgcaattctactgcattagtagcatcacttggtagctgctacggcatcggcatagaagcacaaggagagagggaggggagagtaagagcgatgggggatcttgtcgtcggattggcaaagtcggtggtggagggggttctaacaaaggcccagtcagctattgaggaagagtcaaagctgcgtcagagtgcacagagggaccttgtgttcatcacaggtgaatttgagatgatgcactcctttctcaatgtcgccaatgaagagcgtgccaagaacaacgtggttaggacatgggtgaggcaggtccgtgacctagcctacgatgtagaggattgcattgaatttgttgttcacttggataaccggccccactggtggcgccgcttcataccatcatgtatgccagcatcggcactacccgtagatgcagtggtcgccgagatagagaagatcaaggtcagggttgaggatgtgagcaagaggaactcacgttacagcctcatcagtgactctggatccaagccagtaatgcagcaacaaccagctaccggccctgctattggcacaacaacgcttgacatgtttgttgagtcaagggacgccacgaaaaagcagcaaggcttaggggatatcacacagttgatcactaaagaaaacattgaccttggagtgatctcgttgtggggtacaggtggagatcttggtaagacatccatcataaggaaagcataccaggatcaagaaatctgcgaaaactttggatgtcgaggctggatcaagctaacatatcctttcaatccacataagttcctccagagcttggttactcagttctatacgaattcctgtctgcaacaaggaactactttagatgtagctcaactgaagaggatggtagcaaagcgaggaataattgaagaattcacgaagcaagtggatgggaagaggtacctactcgtcctggaaaacatgtgcacgatgggagagtgggacgctatcagggcatgcctgcctcacaggaataagggcaactggattatcgtgtccaccgagcaccatgaaatcgcaagtttgtgtgttggacattcataccaagtgttggagcttaaacagtattcagctgagtaccctgtatgcgtcttcttcaaggagagcaagaagactggaagagtaatatctagcagtggtgaaatattagaagatgaaatgagccacaggggaggccttacttatggtaggattcccacctctagaaaggctttagccagcagttggatggatcagtctacccttgttggacgtgagtcacaaatgaatgaacttcgtaagtatcagaccacggcccgtttcaaagattggcaagtgatgtctgtgtggggaattgctggtgttggaaaatctgatcttgtcaaaaatttgtactatgaaaggatgcttaaagaggacccaatgtttgacaagtatggttgggtccacgtgtcccatccattcaatttgagggacttctctcggaacttacttttggattttcactcagatgccgtgggaatcagagaccctattcaggagtgtcataagcttctaaaagaacatcagtgtcttgttgttattgatgatctacagtctgtggaagaatgggacttaatacgacctgcacttgtatctagacattccaagagtgttatcatcgtcattacaacagatgaaaaaattgccacgtattgtgcagacgatgaagaggtcgtgtttaatgtgaaatgtctagaagctgaagcatcctttgatctctttaaaaaagaggtacaaaagaaaagccaaacatcccctctgatgaattcaaacaacaaggagctagaacaacttattctaaaatgtgggagacttcctaaagtgatagttgctgtagccaaatttttggcaccaaagacagttacatgtatggacagcacaaaaacactgaatcacagatttatgcaggagcttgagagcaaccctgagttcagtgttctgcaagatctgtttgcttggatgcattcttacttccgtgcttgcccggattttctaaggccgtgtatcttctatatgtcaatcttccctgggtcccaaatcattcgtcggaggcgtttagtgatgcgatgggttgcagagggctactccagggatacaaaagacatcactgcagaggagaaaggagagatgttcttctcaatgctcgtcaatctaagcatgattcagccgccaacatgcagggtcatcaccgacatgaaaatggtcctatgtcaagttagtgctttcttccatgaatacatcatttcacgtccagtggaagaaaatataatatttgcactcgaggtctttgcactgaaggggcgttgccttccaactaccggacgcacaggacggcaccttgtaatagagaggtgctgggacagggataggattgtgttcgagagcattgacttctcgcgcctgcggtctttaacagtgtttgggcagtgggaatcattcttcatctctaaaagtatgaaggtgcttcgggttcttgatctggagaatgccacaggtgtgacagataaagacctcgagcagatggtgaagcttcttcctcgcctcaagttcctatctttgcgaggaagtactggtatctgccaccttccgagttcattgggtgagctgcggcagcttgagactctggatattaggggtaccttcatagcaaaattgccagcatcgattaccaagctaaagaagctgcagtacatgcgtgctggtacaatatccctggcaaaggaatcatcaacatcttactcttcagcgtctaggttgccaaacctatgcaaatcttgtaaactagttggtgttgagatgccatcagggattgatgaactgacaccattgcacacgcttggtgttgtcaatgctggtattggagggggcaaggccactctaaaagagctgaagaagattacccaattgcgcaagcttggagtgtccggtgtcaacaagaaaaataacaaggaattctgtgctgccatctcatgtcatgtccgcctggaatccttgtcagtgtggcttagcaagggaaatcaaggtttgaatgaaatatcgtctcaggataagcctctgcaaaaccttcagagccttaagttatatggtcttggaagtgaggtgccagcttggatgaaagatcttcccaaactcacaaagttggatttgcatatgaccatatcagcagaagttgacataattaaagtccttggggaaataaaagaactatgcactctacgtctttgtgtcaagccccttcaagatggtgatggtaagcttgatttttgtgtttgggtgaatggaatacagcagcgctgttatttaaatctcaagatcctcgagattacttgcagttcaaagttaaatatatcctttggatcagaagctatgcaaaatcttgagctgctgagagctcgctgctgtagtggatcgacattgaagtttatggagataaagaatctctctaaacaaaaactcaaggaagttcagcttattggttcccatgacactgcactcaaggatgacatggagaagcaactgaaggaacatccaaggaaacctcctttgaagctggaggaaccggaaggatgctgatctcagtatttagcaatagtattattggcgctaatcctatgtgaaacatcttactctgcttcatttcttatcactaggagaagcaactgaaggaacatcttactctgcttcattcaagatgtcatgataattggcgctatcctatgtgaaacatccctaggagaagacattcagttcatttactccgtacatcaaacgccgagcttcagcttatgtaactccataaaggatgttcacttgtgtgcatgtttatggatttgacttatgcgttgatgtagtaatcgttttgtaattttgtgttagagtaatgttagggttttgaggttagccccttgtaattactgtcacacccttagagctgatttggtgaccggggatcccgagggaaagaaatcctcttgctattcaaaattgaattgcaagggaattcctcccccatggatcccctagggatccctaatcaccaaatcagtccttatgtaatggattaggcccaatatatatatatatatatatatatatcagtctcaatcctaattaggattagggttttattctacaacttggtactagagccgttacttgcgagatatccgggtgattgcatgtagaaatattccaggggtggtttctgtaatatagcagatcgaatcaaggagttgcggcggcccgtctataaagggcaaacgtccttccatcggaggtcacaagtgaatagcaaccgactcatccttttcttctcaattctctgcgtcgtcgcttctttgccctgccgtccctttgtctgccgtgcagcagatcaagggagagcggtgtctccg

SEQ ID NO: 45481 - DNA, 4873 bp, Zea Mays
gctgtccgctggcccgctgcggtttgttgctccacctaccaccgccggccccaaaatcccaaatccgtggcaccgccggcggccgcacccccggttgcccgcccttgacacccatcactcgaccccacccgaccgccctcgccgccgctccactccacaaggtgctccgccccagcaccggatccaacaagccagcctaggcactgctgctcgagccgactggccccgagacccgtggaggagaagaaagctgtggtagcagccagtgtgatgaatgatgtggcggcatgatccgaacggcttcttgttcttgtccttcccgggcgctgccactgccgctccttgtttgcatccttcctgcgcaagagcaatggatacatgggtgaggggagctgtgcttgaccaaagggtgtaaaatctggatcatgttttggacaaatgcatcgcttagatcaacaaattatactgtgttgagagtttttgtccgaagaaaatacccttgctggagagcaaatacagctgaacatatctgtaacagctggagctgtccttatcttcattagtcacatctctgggtactcaaaatatgcaattctactgcattagtagcatcacttggtagctgctacggcatcggcatagaagcacaaggagagagggaggggagagtaagagcgatgggggatcttgtcgtcggattggcaaagtcggtggtggagggggttctaacaaaggcccagtcagctattgaggaagagtcaaagctgcgtcagagtgcacagagggaccttgtgttcatcacaggtgaatttgagatgatgcactcctttctcaatgtcgccaatgaagagcgtgccaagaacaacgtggttaggacatgggtgaggcaggtccgtgacctagcctacgatgtagaggattgcattgaatttgttgttcacttggataaccggccccactggtggcgccgcttcataccatcatgtatgccagcatcggcactacccgtagatgcagtggtcgccgagatagagaagatcaaggtcagggttgaggatgtgagcaagaggaactcacgttacagcctcatcagtgactctggatccaagccagtaatgcagcaacaaccagctaccggccctgctattggcacaacaacgcttgacatgtttgttgagtcaagggacgccacgaaaaagcagcaaggcttaggggatatcacacagttgatcactaaagaaaacattgaccttggagtgatctcgttgtggggtacaggtggagatcttggtaagacatccatcataaggaaagcataccaggatcaagaaatctgcgaaaactttggatgtcgaggctggatcaagctaacatatcctttcaatccacataagttcctccagagcttggttactcagttctatacgaattcctgtctgcaacaaggaactactttagatgtagctcaactgaagaggatggtagcaaagcgaggaataattgaagaattcacgaagcaagtggatgggaagaggtacctactcgtcctggaaaacatgtgcacgatgggagagtgggacgctatcagggcatgcctgcctcacaggaataagggcaactggattatcgtgtccaccgagcaccatgaaatcgcaagtttgtgtgttggacattcataccaagtgttggagcttaaacagtattcagctgagtaccctgtatgcgtcttcttcaaggagagcaagaagactggaagagtaatatctagcagtggtgaaatattagaagatgaaatgagccacaggggaggccttacttatggtaggattcccacctctagaaaggctttagccagcagttggatggatcagtctacccttgttggacgtgagtcacaaatgaatgaacttcgtaagtatcagaccacggcccgtttcaaagattggcaagtgatgtctgtgtggggaattgctggtgttggaaaatctgatcttgtcaaaaatttgtactatgaaaggatgcttaaagaggacccaatgtttgacaagtatggttgggtccacgtgtcccatccattcaatttgagggacttctctcggaacttacttttggattttcactcagatgccgtgggaatcagagaccctattcaggagtgtcataagcttctaaaagaacatcagtgtcttgttgttattgatgatctacagtctgtggaagaatgggacttaatacgacctgcacttgtatctagacattccaagagtgttatcatcgtcattacaacagatgaaaaaattgccacgtattgtgcagacgatgaagaggtcgtgtttaatgtgaaatgtctagaagctgaagcatcctttgatctctttaaaaaagaggagcttgagagcaaccctgagttcagtgttctgcaagatctgtttgcttggatgcattcttacttccgtgcttgcccggattttctaaggccgtgtatcttctatatgtcaatcttccctgggtcccaaatcattcgtcggaggcgtttagtgatgcgatgggttgcagagggctactccagggatacaaaagacatcactgcagaggagaaaggagagatgttcttctcaatgctcgtcaatctaagcatgattcagccgccaacatgcagggtcatcaccgacatgaaaatggtcctatgtcaagttagtgctttcttccatgaatacatcatttcacgtccagtggaagaaaatataatatttgcactcgaggtctttgcactgaaggggcgttgccttccaactaccggacgcacaggacggcaccttgtaatagagaggtgctgggacagggataggattgtgttcgagagcattgacttctcgcgcctgcggtctttaacagtgtttgggcagtgggaatcattcttcatctctaaaagtatgaaggtgcttcgggttcttgatctggagaatgccacaggtgtgacagataaagacctcgagcagatggtgaagcttcttcctcgcctcaagttcctatctttgcgaggaagtactggtatctgccaccttccgagttcattgggtgagctgcggcagcttgagactctggatattaggggtaccttcatagcaaaattgccagcatcgattaccaagctaaagaagctgcagtacatgcgtgctggtacaatatccctggcaaaggaatcatcaacatcttactcttcagcgtctaggttgccaaacctatgcaaatcttgtaaactagttggtgttgagatgccatcagggattgatgaactgacaccattgcacacgcttggtgttgtcaatgctggtattggagggggcaaggccactctaaaagagctgaagaagattacccaattgcgcaagcttggagtgtccggtgtcaacaagaaaaataacaaggaattctgtgctgccatctcatgtcatgtccgcctggaatccttgtcagtgtggcttagcaagggaaatcaaggtttgaatgaaatatcgtctcaggataagcctctgcaaaaccttcagagccttaagttatatggtcttggaagtgaggtgccagcttggatgaaagatcttcccaaactcacaaagttggatttgcatatgaccatatcagcagaagttgacataattaaagtccttggggaaataaaagaactatgcactctacgtctttgtgtcaagccccttcaagatggtgatggtaagcttgatttttgtgtttgggtgaatggaatacagcagcgctgttatttaaatctcaagatcctcgagattacttgcagttcaaagttaaatatatcctttggatcagaagctatgcaaaatcttgagctgctgagagctcgctgctgtagtggatcgacattgaagtttatggagataaagaatctctctaaacaaaaactcaaggaagttcagcttattggttcccatgacactgcactcaaggatgacatggagaagcaactgaaggaacatccaaggaaacctcctttgaagctggaggaaccggaaggatgctgatctcagtatttagcaatagtattattggcgctaatcctatgtgaaacatcttactctgcttcatttcttatcactaggagaagcaactgaaggaacatcttactctgcttcattcaagatgtcatgataattggcgctatcctatgtgaaacatccctaggagaagacattcagttcatttactccgtacatcaaacgccgagcttcagcttatgtaactccataaaggatgttcacttgtgtgcatgtttatggatttgacttatgcgttgatgtagtaatcgttttgtaattttgtgttagagtaatgttagggttttgaggttagccccttgtaattactgtcacacccttagagctgatttggtgaccggggatcccgagggaaagaaatcctcttgctattcaaaattgaattgcaagggaattcctcccccatggatcccctagggatccctaatcaccaaatcagtccttatgtaatggattaggcccaatatatatatatatatatatatatatcagtctcaatcctaattaggattagggttttattctacaacttggtactagagccgttacttgcgagatatccgggtgattgcatgtagaaatattccaggggtggtttctgtaatatagcagatcgaatcaaggagttgcggcggcccgtctataaagggcaaacgtccttccatcggaggtcacaagtgaatagcaaccgactcatccttttcttctcaattctctgcgtcgtcgcttctttgccctgccgtccctttgtctgccgtgcagcagatcaagggagagcggtgtctccg

SEQ ID NO: 45482 - DNA, 2354 bp, Zea Mays
aaattatactgtgttgagagtttttgtccgaagaaaatacccttgctggagagcaaatacagctgaacatatctgtaacagatcccttgaccaaaaggctcacttgacgagacaaagtgttgtgtgtacagctagattttttaattgacctgactcatcccacagttccaaccaaccttgattaacaataatgtccaaactatctgtttcccagctggagctgtccttatcttcattagtcacatctctgggtactcaaaatatgcaattctactgcattagtagcatcacttggtagctgctacggcatcggcatagaagcacaaggagagagggaggggagagtaagagcgatgggggatcttgtcgtcggattggcaaagtcggtggtggagggggttctaacaaaggcccagtcagctattgaggaagagtcaaagctgcgtcagagtgcacagagggaccttgtgttcatcacaggtgaatttgagatgatgcactcctttctcaatgtcgccaatgaagagcgtgccaagaacaacgtggttaggacatgggtgaggcaggtccgtgacctagcctacgatgtagaggattgcattgaatttgttgttcacttggataaccggccccactggtggcgccgcttcataccatcatgtatgccagcatcggcactacccgtagatgcagtggtcgccgagatagagaagatcaaggtcagggttgaggatgtgagcaagaggaactcacgttacagcctcatcagtgactctggatccaagccagtaatgcagcaacaaccagctaccggccctgctattggcacaacaacgcttgacatgtttgttgagtcaagggacgccacgaaaaagcagcaaggcttaggggatatcacacagttgatcactaaagaaaacattgaccttggagtgatctcgttgtggggtacaggtggagatcttggtaagacatccatcataaggaaagcataccaggatcaagaaatctgcgaaaactttggatgtcgaggctggatcaagctaacatatcctttcaatccacataagttcctccagagcttggttactcagttctatacgaattcctgtctgcaacaaggaactactttagatgtagctcaactgaagaggatggtagcaaagcgaggaataattgaagaattcacgaagcaagtggatgggaagaggtacctactcgtcctggaaaacatgtgcacgatgggagagtgggacgctatcagggcatgcctgcctcacaggaataagggcaactggattatcgtgtccaccgagcaccatgaaatcgcaagtttgtgtgttggacattcataccaagtgttggagcttaaacagtattcagctgagtaccctgtatgcgtcttcttcaaggagagcaagaagactggaagagtaatatctagcagtggtgaaatattagaagatgaaatgagccacaggggaggccttacttatggtaggattcccacctctagaaaggctttagccagcagttggatggatcagtctacccttgttggacgtgagtcacaaatgaatgaacttcgtaagtatcagaccacggcccgtttcaaagattggcaagtgatgtctgtgtggggaattgctggtgttggaaaatctgatcttgtcaaaaatttgtactatgaaaggatgcttaaagaggacccaatgtttgacaagtatggttgggtccacgtgtcccatccattcaatttgagggacttctctcggaacttacttttggattttcactcagatgccgtgggaatcagagaccctattcaggagtgtcataagcttctaaaagaacatcagtgtcttgttgttattgatgatctacagtctgtggaagaatgggacttaatacgacctgcacttgtatctagacattccaagagtgttatcatcgtcattacaacagatgaaaaaattgccacgtattgtgcagacgatgaagaggtcgtgtttaatgtgaaatgtctagaagctgaagcatcctttgatctctttaaaaaagaggctatcaataggttgaattgtcatgtatctgaaatgagtgaggtattcaggaagaaactgagcaaactgagaggatgggtgatggcgttggtggggccaagagattggtgccttgggctacagagcaagggtgcagtgttttttttttgagaaagtggcaggagttctgtcttacattgtagtaagggaaataacagtgttagagtactgttaggtttcggggctagcccctatgtatttacttgcataccctcagtgtaatgggcttggcctaattactcagtatatata

SEQ ID NO: 45483 - DNA, 2451 bp, Zea Mays
caaatccgtggcaccgccggcggccgcacccccggttgcccgcccttgacacccatcactcgaccccacccgaccgccctcgccgccgctccactccacaaggtgctccgccccagcaccggatccaacaagccagcctaggcactgctgctcgagccgactggccccgagacccgtggaggagaagaaagctgtggtagcagccagtgtgatgaatgatgtggcggcatgatccgaacggcttcttgttcttgtccttcccgggcgctgccactgccgctccttgtttgcatccttcctgcgcaagctggagctgtccttatcttcattagtcacatctctgggtactcaaaatatgcaattctactgcattagtagcatcacttggtagctgctacggcatcggcatagaagcacaaggagagagggaggggagagtaagagcgatgggggatcttgtcgtcggattggcaaagtcggtggtggagggggttctaacaaaggcccagtcagctattgaggaagagtcaaagctgcgtcagagtgcacagagggaccttgtgttcatcacaggtgaatttgagatgatgcactcctttctcaatgtcgccaatgaagagcgtgccaagaacaacgtggttaggacatgggtgaggcaggtccgtgacctagcctacgatgtagaggattgcattgaatttgttgttcacttggataaccggccccactggtggcgccgcttcataccatcatgtatgccagcatcggcactacccgtagatgcagtggtcgccgagatagagaagatcaaggtcagggttgaggatgtgagcaagaggaactcacgttacagcctcatcagtgactctggatccaagccagtaatgcagcaacaaccagctaccggccctgctattggcacaacaacgcttgacatgtttgttgagtcaagggacgccacgaaaaagcagcaaggcttaggggatatcacacagttgatcactaaagaaaacattgaccttggagtgatctcgttgtggggtacaggtggagatcttggtaagacatccatcataaggaaagcataccaggatcaagaaatctgcgaaaactttggatgtcgaggctggatcaagctaacatatcctttcaatccacataagttcctccagagcttggttactcagttctatacgaattcctgtctgcaacaaggaactactttagatgtagctcaactgaagaggatggtagcaaagcgaggaataattgaagaattcacgaagcaagtggatgggaagaggtacctactcgtcctggaaaacatgtgcacgatgggagagtgggacgctatcagggcatgcctgcctcacaggaataagggcaactggattatcgtgtccaccgagcaccatgaaatcgcaagtttgtgtgttggacattcataccaagtgttggagcttaaacagtattcagctgagtaccctgtatgcgtcttcttcaaggagagcaagaagactggaagagtaatatctagcagtggtgaaatattagaagatgaaatgagccacaggggaggccttacttatggtaggattcccacctctagaaaggctttagccagcagttggatggatcagtctacccttgttggacgtgagtcacaaatgaatgaacttcgtaagtatcagaccacggcccgtttcaaagattggcaagtgatgtctgtgtggggaattgctggtgttggaaaatctgatcttgtcaaaaatttgtactatgaaaggatgcttaaagaggacccaatgtttgacaagtatggttgggtccacgtgtcccatccattcaatttgagggacttctctcggaacttacttttggattttcactcagatgccgtgggaatcagagaccctattcaggagtgtcataagcttctaaaagaacatcagtgtcttgttgttattgatgatctacagtctgtggaagaatgggacttaatacgacctgcacttgtatctagacattccaagagtgttatcatcgtcattacaacagatgaaaaaattgccacgtattgtgcagacgatgaagaggtcgtgtttaatgtgaaatgtctagaagctgaagcatcctttgatctctttaaaaaagaggtatgctatcaataggttgaattgtcatgtatctgaaatgagtgaggtattcaggaagaaactgagcaaactgagaggatgggtgatggcgttggtggggccaagagattggtgccttgggctacagagcaagggtgcagtgttttttttttgagaaagtggcaggagttctgtcttacattgtagtaagggaaataacagtgttagagtactgttaggtttcggggctagcccctatgtatttacttgcataccctcagtgtaatgggcttggcctaattactcagtatatata

SEQ ID NO: 45484 - DNA, 2501 bp, Zea Mays
ccgctggcccgctgcggtttgttgctccacctaccaccgccggccccaaaatcccaaatccgtggcaccgccggcggccgcacccccggttgcccgcccttgacacccatcactcgaccccacccgaccgccctcgccgccgctccactccacaaggtgctccgccccagcaccggatccaacaagccagcctaggcactgctgctcgagccgactggccccgagacccgtggaggagaagaaagctgtggtagcagccagtgtgatgaatgatgtggcggcatgatccgaacggcttcttgttcttgtccttcccgggcgctgccactgccgctccttgtttgcatccttcctgcgcaagctggagctgtccttatcttcattagtcacatctctgggtactcaaaatatgcaattctactgcattagtagcatcacttggtagctgctacggcatcggcatagaagcacaaggagagagggaggggagagtaagagcgatgggggatcttgtcgtcggattggcaaagtcggtggtggagggggttctaacaaaggcccagtcagctattgaggaagagtcaaagctgcgtcagagtgcacagagggaccttgtgttcatcacaggtgaatttgagatgatgcactcctttctcaatgtcgccaatgaagagcgtgccaagaacaacgtggttaggacatgggtgaggcaggtccgtgacctagcctacgatgtagaggattgcattgaatttgttgttcacttggataaccggccccactggtggcgccgcttcataccatcatgtatgccagcatcggcactacccgtagatgcagtggtcgccgagatagagaagatcaaggtcagggttgaggatgtgagcaagaggaactcacgttacagcctcatcagtgactctggatccaagccagtaatgcagcaacaaccagctaccggccctgctattggcacaacaacgcttgacatgtttgttgagtcaagggacgccacgaaaaagcagcaaggcttaggggatatcacacagttgatcactaaagaaaacattgaccttggagtgatctcgttgtggggtacaggtggagatcttggtaagacatccatcataaggaaagcataccaggatcaagaaatctgcgaaaactttggatgtcgaggctggatcaagctaacatatcctttcaatccacataagttcctccagagcttggttactcagttctatacgaattcctgtctgcaacaaggaactactttagatgtagctcaactgaagaggatggtagcaaagcgaggaataattgaagaattcacgaagcaagtggatgggaagaggtacctactcgtcctggaaaacatgtgcacgatgggagagtgggacgctatcagggcatgcctgcctcacaggaataagggcaactggattatcgtgtccaccgagcaccatgaaatcgcaagtttgtgtgttggacattcataccaagtgttggagcttaaacagtattcagctgagtaccctgtatgcgtcttcttcaaggagagcaagaagactggaagagtaatatctagcagtggtgaaatattagaagatgaaatgagccacaggggaggccttacttatggtaggattcccacctctagaaaggctttagccagcagttggatggatcagtctacccttgttggacgtgagtcacaaatgaatgaacttcgtaagtatcagaccacggcccgtttcaaagattggcaagtgatgtctgtgtggggaattgctggtgttggaaaatctgatcttgtcaaaaatttgtactatgaaaggatgcttaaagaggacccaatgtttgacaagtatggttgggtccacgtgtcccatccattcaatttgagggacttctctcggaacttacttttggattttcactcagatgccgtgggaatcagagaccctattcaggagtgtcataagcttctaaaagaacatcagtgtcttgttgttattgatgatctacagtctgtggaagaatgggacttaatacgacctgcacttgtatctagacattccaagagtgttatcatcgtcattacaacagatgaaaaaattgccacgtattgtgcagacgatgaagaggtcgtgtttaatgtgaaatgtctagaagctgaagcatcctttgatctctttaaaaaagaggctatcaataggttgaattgtcatgtatctgaaatgagtgaggtattcaggaagaaactgagcaaactgagaggatgggtgatggcgttggtggggccaagagattggtgccttgggctacagagcaagggtgcagtgttttttttttgagaaagtggcaggagttctgtcttacattgtagtaagggaaataacagtgttagagtactgttaggtttcggggctagcccctatgtatttacttgcataccctcagtgtaatgggcttggcctaattactcagtatatata

SEQ ID NO: 45485 - DNA, 2181 bp, Zea Mays
cccaaatccgtggcaccgccggcggccgcacccccggttgcccgcccttgacacccatcactcgaccccacccgaccgccctcgccgccgctccactccacaaggtgctccgccccagcaccggatccaacaagccagcctaggcactgctgctcgagccgactggccccgagacccgtggaggagaagaaagctgtggtagcagccagtgtgatgaatgatgtggcggcatgatccgaacggcttcttgttcttgtccttcccgggcgctgccactgccgctccttgtttgcatccttcctgcgcaagctggagctgtccttatcttcattagtcacatctctgggtactcaaaatatgcaattctactgcattagtagcatcacttggtagctgctacggcatcggcatagaagcacaaggagagagggaggggagagtaagagcgatgggggatcttgtcgtcggattggcaaagtcggtggtggagggggttctaacaaaggcccagtcagctattgaggaagagtcaaagctgcgtcagagtgcacagagggaccttgtgttcatcacaggtgaatttgagatgatgcactcctttctcaatgtcgccaatgaagagcgtgccaagaacaacgtggttaggacatgggtgaggcaggtccgtgacctagcctacgatgtagaggattgcattgaatttgttgttcacttggataaccggccccactggtggcgccgcttcataccatcatgtatgccagcatcggcactacccgtagatgcagtggtcgccgagatagagaagatcaaggtcagggttgaggatgtgagcaagaggaactcacgttacagcctcatcagtgactctggatccaagccagtaatgcagcaacaaccagctaccggccctgctattggcacaacaacgcttgacatgtttgttgagtcaagggacgccacgaaaaagcagcaaggcttaggggatatcacacagttgatcactaaagaaaacattgaccttggagtgatctcgttgtggggtacaggtggagatcttggtaagacatccatcataaggaaagcataccaggatcaagaaatctgcgaaaactttggatgtcgaggctggatcaagctaacatatcctttcaatccacataagttcctccagagcttggttactcagttctatacgaattcctgtctgcaacaaggaactactttagatgtagctcaactgaagaggatggtagcaaagcgaggaataattgaagaattcacgaagcaagtggatgggaagaggtacctactcgtcctggaaaacatgtgcacgatgggagagtgggacgctatcagggcatgcctgcctcacaggaataagggcaactggattatcgtgtccaccgagcaccatgaaatcgcaagtttgtgtgttggacattcataccaagtgttggagcttaaacagtattcagctgagtaccctgtatgcgtcttcttcaaggagagcaagaagactggaagagtaatatctagcagtggtgaaatattagaagatgaaatgagccacaggggaggccttacttatggtaggattcccacctctagaaaggctttagccagcagttggatggatcagtctacccttgttggacgtgagtcacaaatgaatgaacttcgtaagtatcagaccacggcccgtttcaaagattggcaagtgatgtctgtgtggggaattgctggtgttggaaaatctgatcttgtcaaaaatttgtactatgaaaggatgcttaaagaggacccaatgtttgacaagtatggttgggtccacgtgtcccatccattcaatttgagggacttctctcggaacttacttttggattttcactcagatgccgtgggaatcagagaccctattcaggagtgtcataagcttctaaaagaacatcagtgtcttgttgttattgatgatctacagtctgtggaagaatgggacttaatacgacctgcacttgtatctagacattccaagagtgttatcatcgtcattacaacagatgaaaaaattgccacgtattgtgcagacgatgaagaggtcgtgtttaatgtgaaatgtctagaagctgaagcatcctttgatctctttaaaaaagaggaccttctatgtcgcattttcac

SEQ ID NO: 45486 - DNA, 2170 bp, Zea Mays
acccccggttgcccgcccttgacacccatcactcgaccccacccgaccgccctcgccgccgctccactccacaaggtgctccgccccagcaccggatccaacaagccagcctaggcactgctgctcgagccgactggccccgagacccgtggaggagaagaaagctgtggtagcagccagtgtgatgaatgatgtggcggcatgatccgaacggcttcttgttcttgtccttcccgggcgctgccactgccgctccttgtttgcatccttcctgcgcaagctggagctgtccttatcttcattagtcacatctctgggtactcaaaatatgcaattctactgcattagtagcatcacttggtagctgctacggcatcggcatagaagcacaaggagagagggaggggagagtaagagcgatgggggatcttgtcgtcggattggcaaagtcggtggtggagggggttctaacaaaggcccagtcagctattgaggaagagtcaaagctgcgtcagagtgcacagagggaccttgtgttcatcacaggtgaatttgagatgatgcactcctttctcaatgtcgccaatgaagagcgtgccaagaacaacgtggttaggacatgggtgaggcaggtccgtgacctagcctacgatgtagaggattgcattgaatttgttgttcacttggataaccggccccactggtggcgccgcttcataccatcatgtatgccagcatcggcactacccgtagatgcagtggtcgccgagatagagaagatcaaggtcagggttgaggatgtgagcaagaggaactcacgttacagcctcatcagtgactctggatccaagccagtaatgcagcaacaaccagctaccggccctgctattggcacaacaacgcttgacatgtttgttgagtcaagggacgccacgaaaaagcagcaaggcttaggggatatcacacagttgatcactaaagaaaacattgaccttggagtgatctcgttgtggggtacaggtggagatcttggtaagacatccatcataaggaaagcataccaggatcaagaaatctgcgaaaactttggatgtcgaggctggatcaagctaacatatcctttcaatccacataagttcctccagagcttggttactcagttctatacgaattcctgtctgcaacaaggaactactttagatgtagctcaactgaagaggatggtagcaaagcgaggaataattgaagaattcacgaagcaagtggatgggaagaggtacctactcgtcctggaaaacatgtgcacgatgggagagtgggacgctatcagggcatgcctgcctcacaggaataagggcaactggattatcgtgtccaccgagcaccatgaaatcgcaagtttgtgtgttggacattcataccaagtgttggagcttaaacagtattcagctgagtaccctgtatgcgtcttcttcaaggagagcaagaagactggaagagtaatatctagcagtggtgaaatattagaagatgaaatgagccacaggggaggccttacttatggtaggattcccacctctagaaaggctttagccagcagttggatggatcagtctacccttgttggacgtgagtcacaaatgaatgaacttcgtaagtatcagaccacggcccgtttcaaagattggcaagtgatgtctgtgtggggaattgctggtgttggaaaatctgatcttgtcaaaaatttgtactatgaaaggatgcttaaagaggacccaatgtttgacaagtatggttgggtccacgtgtcccatccattcaatttgagggacttctctcggaacttacttttggattttcactcagatgccgtgggaatcagagaccctattcaggagtgtcataagcttctaaaagaacatcagtgtcttgttgttattgatgatctacagtctgtggaagaatgggacttaatacgacctgcacttgtatctagacattccaagagtgttatcatcgtcattacaacagatgaaaaaattgccacgtattgtgcagacgatgaagaggtcgtgtttaatgtgaaatgtctagaagctgaagcatcctttgatctctttaaaaaagagttcggctgcactatccgaagtattcaatgtgacaacggtcg

SEQ ID NO: 45487 - DNA, 2662 bp, Zea Mays
ccacctaccaccgccggccccaaaatcccaaatccgtggcaccgccggcggccgcacccccggttgcccgcccttgacacccatcactcgaccccacccgaccgccctcgccgccgctccactccacaaggtgctccgccccagcaccggatccaacaagccagcctaggcactgctgctcgagccgactggccccgagacccgtggaggagaagaaagctgtggtagcagccagtgtgatgaatgatgtggcggcatgatccgaacggcttcttgttcttgtccttcccgggcgctgccactgccgctccttgtttgcatccttcctgcgcaagagcaatggatacatgggtgaggggagctgtgcttgaccaaagggtgtaaaatctggatcatgttttggacaaatgcatcgcttagatcaacaaattatactgtgttgagagtttttgtccgaagaaaatacccttgctggagagcaaatacagctgaacatatctgtaacagctggagctgtccttatcttcattagtcacatctctgggtactcaaaatatgcaattctactgcattagtagcatcacttggtagctgctacggcatcggcatagaagcacaaggagagagggaggggagagtaagagcgatgggggatcttgtcgtcggattggcaaagtcggtggtggagggggttctaacaaaggcccagtcagctattgaggaagagtcaaagctgcgtcagagtgcacagagggaccttgtgttcatcacaggtgaatttgagatgatgcactcctttctcaatgtcgccaatgaagagcgtgccaagaacaacgtggttaggacatgggtgaggcaggtccgtgacctagcctacgatgtagaggattgcattgaatttgttgttcacttggataaccggccccactggtggcgccgcttcataccatcatgtatgccagcatcggcactacccgtagatgcagtggtcgccgagatagagaagatcaaggtcagggttgaggatgtgagcaagaggaactcacgttacagcctcatcagtgactctggatccaagccagtaatgcagcaacaaccagctaccggccctgctattggcacaacaacgcttgacatgtttgttgagtcaagggacgccacgaaaaagcagcaaggcttaggggatatcacacagttgatcactaaagaaaacattgaccttggagtgatctcgttgtggggtacaggtggagatcttggtaagacatccatcataaggaaagcataccaggatcaagaaatctgcgaaaactttggatgtcgaggctggatcaagctaacatatcctttcaatccacataagttcctccagagcttggttactcagttctatacgaattcctgtctgcaacaaggaactactttagatgtagctcaactgaagaggatggtagcaaagcgaggaataattgaagaattcacgaagcaagtggatgggaagaggtacctactcgtcctggaaaacatgtgcacgatgggagagtgggacgctatcagggcatgcctgcctcacaggaataagggcaactggattatcgtgtccaccgagcaccatgaaatcgcaagtttgtgtgttggacattcataccaagtgttggagcttaaacagtattcagctgagtaccctgtatgcgtcttcttcaaggagagcaagaagactggaagagtaatatctagcagtggtgaaatattagaagatgaaatgagccacaggggaggccttacttatggtaggattcccacctctagaaaggctttagccagcagttggatggatcagtctacccttgttggacgtgagtcacaaatgaatgaacttcgtaagtatcagaccacggcccgtttcaaagattggcaagtgatgtctgtgtggggaattgctggtgttggaaaatctgatcttgtcaaaaatttgtactatgaaaggatgcttaaagaggacccaatgtttgacaagtatggttgggtccacgtgtcccatccattcaatttgagggacttctctcggaacttacttttggattttcactcagatgccgtgggaatcagagaccctattcaggagtgtcataagcttctaaaagaacatcagtgtcttgttgttattgatgatctacagtctgtggaagaatgggacttaatacgacctgcacttgtatctagacattccaagagtgttatcatcgtcattacaacagatgaaaaaattgccacgtattgtgcagacgatgaagaggtcgtgtttaatgtgaaatgtctagaagctgaagcatcctttgatctctttaaaaaagagggaagctttgaccacgaatcattctaaactctataaagttatatataggaatcatgggacaaaggggcttaaataaatcatttttttttcttgaatacgcaggagatctgcgtatttttgtattaagaagagaaaaggggtgaaaccccaaaaaacacgaacaacagactaacagacacacaccaccaaatacaccactcttaaagcaactcctctagatggaaagaagagagagctttagcgccagccaaacgccagcacaacatctcttcccttgcagccgagagggcgatcacaacactcggg

SEQ ID NO: 45488 - DNA, 714 bp, Zea Mays
aaagaaaccaaactcggctcgagagagatcgcatcttgcctgcccacccaagcttccctttcgttcctcctcgccccagcgacgcggcctcccgtagaccgagcaaggcaacccaccactgagaggcacgcagaggagcaggaagccggagaccaagatgtcgtcggtgttcagcggcgatgagacggcccccttcttcggtttcctcggcgccgccgccgccctcgtcttctcatgcatgggcgcagcgtacgggaccgcgaagagcggcgtcggcgtggcgtcgatgggtgtgatgcggccggagctcgtcatgaagtccatcgtgcccgtggtcatggctggtgtgctcggtatctacgggctcatcatcgccgtcatcatcagcactgggatcaaccccaaggccaagccctactacctttttgatggctacgctcacctttcgtccgggcttgcctgtggccttgctgggcttgcagctggcatggccatcggcattgttggtgatgctggagtcagggcgaatgcacaacagccgaagctttttgtgggcatgatcctcatcctcattttcgcagaagcgcttgctctgtacggtctcattgttggaattatcctttcatcccgtgctgcaccctttgatgagagatatgagcaagaggcttcaagaaaacttgtgttttcggaattatatgaagccagtaaacaaac

SEQ ID NO: 45489 - DNA, 743 bp, Zea Mays
gggccctagtcggtctggtgtttggagattttcagatcagatcggggagtgataggggtagtcgcaacaaaaagaaaccaaactcggctcgagagagatcgcatcttgcctgcccacccaagcttccctttcgttcctcctcgccccagcgacgcggcctcccgtagaccgagcaaggcaacccaccactgagaggcacgcagaggagcaggaagccggagaccaagatgtcgtcggtgttcagcggcgatgagacggcccccttcttcggtttcctcggcgccgccgccgccctcgtcttctcatgcatgggcgcagcgtacgggaccgcgaagagcggcgtcggcgtggcgtcgatgggtgtgatgcggccggagctcgtcatgaagtccatcgtgcccgtggtcatggctggtgtgctcggtatctacgggctcatcatcgccgtcatcatcagcactgggatcaaccccaaggccaagccctactacctttttgatggctacgctcacctttcgtccgggcttgcctgtggccttgctgggcttgcagctggcatggccatcggcattgttggtgatgctggagtcagggcgaatgcacaacagccgaagctttttgtgggcatgatcctcatcctcattttcgcagaagcgcttgctctcaccctttgatgagagatatgagcaagaggcttcaagaaaacttgtgttttcggaattatatgaagccagtaaacaaac

SEQ ID NO: 45490 - DNA, 1097 bp, Zea Mays
caaaaagaaaccaaactcggctcgagagagatcgcatcttgcctgcccacccaagcttccctttcgttcctcctcgccccagcgacgcggcctcccgtagaccgagcaaggcaacccaccactgagaggcacgcagaggagcaggaagccggagaccaagatgtcgtcggtgttcagcggcgatgagacggcccccttcttcggtttcctcggcgccgccgccgccctcgtcttctcatgcatgggcgcagcgtacgggaccgcgaagagcggcgtcggcgtggcgtcgatgggtgtgatgcggccggagctcgtcatgaagtccatcgtgcccgtggtcatggctggtgtgctcggtatctacgggctcatcatcgccgtcatcatcagcactgggatcaaccccaaggccaagccctactacctttttgatggctacgctcacctttcgtccgggcttgcctgtggccttgctgggcttgcagctggcatggccatcggcattgttggtgatgctggagtcagggcgaatgcacaacagccgaagctttttgtgggcatgatcctcatcctcattttcgcagaagcgcttgctctgtacggtctcattgttggaattatcctttcatcccgtgctggtcaatcccgagcagattaagtgcactaccattctgcgattaccgtactgtttattatgctattctaagagaattgaaactctatgcccttgtctagtttattcttgttaccatgtattaatgaaacaatttgtagctgaaggaaggtgacacttccagccatgttggttttggcggtgttaagcagaggttatttattgggttaagattggatggatgctcctgggctaagtggatttaatttttatccttggtgaataatgaacacggaggtgtagccaaataataacgtgatatatatatttctttgcccctttactggatgcctggattttcattgtcatctatacttcggcatgttcacagcgatagctgatgttttgtttctgatgtttttgagccaatggttgataggtgtatgaagtacaaactcatcactgggaatgttttgaattcctc

SEQ ID NO: 45491 - DNA, 2964 bp, Zea Mays
ttcgatgatcagaataatttataatgagaatcaagaagctgaaagagcagaatcattgaatgagaagctggtgttagcaactagctcgaatgattcttctccacaacatgatcaatcgatgaagccagatatataccaatcacctctgctattcccaaatatcaggaatgatgatgttccagattctgtaaagaatttgaatgagaaggtgtccccaaagtttaaggtcgatgatgtccaggattctgtaaagagtttgaatgagaaactttctgctgcccttttgactatcaatgataaagatgacttggtaaagcagcacactagagttgcagaagaggctgttgcaggttgggaacaagctgaagctgaagttgcttctctgaagcaactacttgaaactgcatcaaagaagaatacctctctggaggatcaggtcagccacctagatgacgcccttaaagaatgtgtaaggcagcttcgccaagcacgtgaagaacaagagaataaaatccatgagacagttgctaagaagtctaaagaattggagtctgagaagtttgagctccagcaccatattgctgaactcagtaagcagttgcaagccacgaaactagaagctactacggtgcgtgtccagcgtgatctgcaggaaaagcttcagatagtggagaaagaaaacaaagacctcaaggtagaattactcgcactgtccaaggacctgaagatacttgcacgggaaagagacctgagcaaccaagcagcagaaacagcaagcaaacttcacctggaaagtgtgaaaaagataacaagagttgaggcagaatgccttaagttgcgtcatttaacgcggcgtacgtccttgaccaatgattcaaggctgataactaacagtgcttgcatggaatctcagactgacagtcagtctgacagtggggagcacatgctagttgatgagatgaaaaattctgattcatgggcaacagctctgatagctgaacttgatcagttcaagaatgccaacaacgacacaagaaatcttgtgaataattcggttgaaattgacctgatggatgatttcctcgagatggaaaagctggctgcactgcctgaagtagactgtgtaagctctagctttggagctgaaactgattctgaccaaggtgtgagtagagataaatcatcaaaagttaaaactgaaccattgcagtgtcaggtgacagatttgcacgcaaagatcgagaagattgaaggtgagaaaagggagcttgaaatggcccttgcagatgccagagttcagcttggcacatcatgtgatgctctaatggtggccaacaacaggttgattgatttgcagatgcagttggacttggcaaatgagtccaaacatgctgctttcggagaagctgagcgactgaatggtgagaggaaagatttggcattgcaactggagtccaggtcttcacaagttgatgagcttcagctgatggtggcatcgctggaaaagaatgtagacaggaaggtgttggaattgcagttagagttagtttctgtggaggctgcagatctgcgcaagacagtggcttccctggaagagaagattgatgcagagataactctctctatgcagcacaaaacaaatgcagacctggcagaggcgtccaaagaatcattagaggcgcagctgcagtctgcaaacacagagatagggaaactgaacgggattgtgcaaactttagagaatgaggtgaggaaagagacagattctcgtgaagaactactgaaacagatagaggctatgaaaattgagtcagagagatcactatctgtggtgtctaccaaagagtcattagaggtgcagctccaggtggcgaattcagaagttgcaaagttgcgtgggatggtgaatgctctggagtgtgatgcggcgaacgagaaggcatattcttcagatctccagatgcaacttgaggcagtggaaggtatcaggaaggtgttggaatctgagcttgagtcttcacaccaggaggtgatgaggctgaaggagaaagtttcgtccttggaagcaaggatcaaggaccagacctcgttgcttgtagaatatacagctaaatcagaggatgcagtgtcccggaaaaaggcaatggagggtcaactagaagcagcaaatctggaagttacaaaactgagaaacaaggtgagcctgatacaaggcaaggtggagcaggagaagcttctgtcagaagagtacgaagcaaaatgccgcaagctggaggcgcaggtgttgagggacagccgagaggcgaaactttggcgcctcacgaactcaaacggagacctgaaggtgaagcaggagaaagaactagtcagtgctgccgggaagcttgcggagtgccagaagactattgctaaccttggccgccagctgaaatcgctaacagatcttgatggcgtggtggccgatcctgaaaagctggaatcgagggacacgcacctggacttcagagatggcggagacgtggctgatggactgtatgaactgggtcttcctaagaggaacggtagctgcctctcaccccttcggtcggatccgtcgccgaggggtttgccgtcccttagtagctacctgagcaaaacaaaaaggtgaaaagtctgatgggatcattcaccattgtgcttgtgcataaattatttgacagtctatggatgatgccagttgtgacctggtggtagatcggtgtacatttacagaacttgatggttgctcacatgtgtactttctccttttgttttgctctcattttgcgagactgcagggtttgtgacaaatttactagatcttgtgagactgtagtgcgttattctcgcgttggaattcaactcgtctacaacaaaaatagaagaaaaaaaacaaattcaaccggtcggcaaagtagaagtagggcagaccaaaccaacgttcag

SEQ ID NO: 45492 - DNA, 3849 bp, Zea Mays
ggttgttccttttttttcctgaaattattttttggtggggtaccgggtgggcacagatgctgtcctgcaccctcctcctggcgattttcgttagggttttggtctgcattgtgtctccgatgtgggattttgctgagatttggtgatgggcgaaagctgaagtttttctagccccgcaatctttctccctccgggttttctgcggatttcatctttctgcatgcggagtgtgtttgactgagattttcggtggatttgaaggaagaaatctcagttttttctaaagaaaaccattaatgttgatctccggggaatttgagcctttgtctcatccctccgctacatttttgtaggattctggaggttttaggtgcagcctatttttcgatcctgtccgcgattttttttctatacgaaacgtttttctctgttttccagagcacagagtctgaaatggaagggtggattttttttgtctgacaaacttatcatttgggcattgtaaaagccttgcacaaagaatgtttggccgtacgttttctcggtctctgcagccgtactcaatcactgcctgcatcctaccgatctctgtattttttaacagcagaaaaggaaaaaaaatataatcctgtgtcgtgctgatatatgaaccccgcatttggacatttggtggtggcaaggcaacgccaaccttccctgttgctgctttgaatgttctggtggttgtcggatggatcgccgcagttggctctggaagcgcaagtcattggataagagccctggggagagcgatagctctggctctgcttcatcacactctgagccttccttcgatgatcaggaacctaaacctgtgtctagtaattcttctccaaatcatagtcattcgcctgatgtttcttctagaataatttataatgagaatcaagaagctgaaagagcagaatcattgaatgagaagctggtgttagcaactagctcgaatgattcttctccacaacatgatcaatcgatgaagccagatatataccaatcacctctgctattcccaaatatcaggaatgatgatgttccagattctgtaaagaatttgaatgagaaggtgtccccaaagtttaaggtcgatgatgtccaggattctgtaaagagtttgaatgagaaactttctgctgcccttttgactatcaatgataaagatgacttggtaaagcagcacactagagttgcagaagaggctgttgcaggttgggaacaagctgaagctgaagttgcttctctgaagcaactacttgaaactgcatcaaagaagaatacctctctggaggatcaggtcagccacctagatgacgcccttaaagaatgtgtaaggcagcttcgccaagcacgtgaagaacaagagaataaaatccatgagacagttgctaagaagtctaaagaattggagtctgagaagtttgagctccagcaccatattgctgaactcagtaagcagttgcaagccacgaaactagaagctactacggtgcgtgtccagcgtgatctgcaggaaaagcttcagatagtggagaaagaaaacaaagacctcaaggtagaattactcgcactgtccaaggacctgaagatacttgcacgggaaagagacctgagcaaccaagcagcagaaacagcaagcaaacttcacctggaaagtgtgaaaaagataacaagagttgaggcagaatgccttaagttgcgtcatttaacgcggcgtacgtccttgaccaatgattcaaggctgataactaacagtgcttgcatggaatctcagactgacagtcagtctgacagtggggagcacatgctagttgatgagatgaaaaattctgattcatgggcaacagctctgatagctgaacttgatcagttcaagaatgccaacaacgacacaagaaatcttgtgaataattcggttgaaattgacctgatggatgatttcctcgagatggaaaagctggctgcactgcctgaagtagactgtgtaagctctagctttggagctgaaactgattctgaccaaggtgtgagtagagataaatcatcaaaagttaaaactgaaccattgcagtgtcaggtgacagatttgcacgcaaagatcgagaagattgaaggtgagaaaagggagcttgaaatggcccttgcagatgccagagttcagcttggcacatcatgtgatgctctaatggtggccaacaacaggttgattgatttgcagatgcagttggacttggcaaatgagtccaaacatgctgctttcggagaagctgagcgactgaatggtgagaggaaagatttggcattgcaactggagtccaggtcttcacaagttgatgagcttcagctgatggtggcatcgctggaaaagaatgtagacaggaaggtgttggaattgcagttagagttagtttctgtggaggctgcagatctgcgcaagacagtggcttccctggaagagaagattgatgcagagataactctctctatgcagcacaaaacaaatgcagacctggcagaggcgtccaaagaatcattagaggcgcagctgcagtctgcaaacacagagatagggaaactgaacgggattgtgcaaactttagagaatgaggtgaggaaagagacagattctcgtgaagaactactgaaacagatagaggctatgaaaattgagtcagagagatcactatctgtggtgtctaccaaagagtcattagaggtgcagctccaggtggcgaattcagaagttgcaaagttgcgtgggatggtgaatgctctggagtgtgatgcggcgaacgagaaggcatattcttcagatctccagatgcaacttgaggcagtggaaggtatcaggaaggtgttggaatctgagcttgagtcttcacaccaggaggtgatgaggctgaaggagaaagtttcgtccttggaagcaaggatcaaggaccagacctcgttgcttgtagaatatacagctaaatcagaggatgcagtgtcccggaaaaaggcaatggagggtcaactagaagcagcaaatctggaagttacaaaactgagaaacaaggtgagcctgatacaaggcaaggtggagcaggagaagcttctgtcagaagagtacgaagcaaaatgccgcaagctggaggcgcaggtgttgagggacagccgagaggcgaaactttggcgcctcacgaactcaaacggagacctgaaggagaaagaactagtcagtgctgccgggaagcttgcggagtgccagaagactattgctaaccttggccgccagctgaaatcgctaacagatcttgatggcgtggtggccgatcctgaaaagctggaatcgagggacacgcacctggacttcagagatggcggagacgtggctgatggactgtatgaactgggtcttcctaagaggaacggtagctgcctctcaccccttcggtcggatccgtcgccgaggggtttgccgtcccttagtagctacctgagcaaaacaaaaaggtgaaaagtctgatgggatcattcaccattgtgcttgtgcataaattatttgacagtctatggatgatgccagttgtgacctggtggtagatcggtgtacatttacagaacttgatggttgctcacatgtgtactttctccttttgttttgctctcattttgcgagactgcagggtttgtgacaaatttactagatcttgtgagactgtagtgcgttattctcgcgttggaattcaactcgtctacaacaaaaatagaagaaaaaaaacaaattcaaccggtcggcaaagtagaagtagggcagaccaaaccaacgttcag

SEQ ID NO: 45493 - DNA, 3237 bp, Zea Mays
ctactggctgggctgtggtcgcagtgctgatatatgaaccccgcatttggacatttggtggtggcaaggcaacgccaaccttccctgttgctgctttgaatgttctggtggttgtcggatggatcgccgcagttggctctggaagcgcaagtcattggataagagccctggggagagcgatagctctggctctgcttcatcacactctgagccttccttcgatgatcaggaacctaaacctgtgtctagtaattcttctccaaatcatagtcattcgcctgatgtttcttctagaataatttataatgagaatcaagaagctgaaagagcagaatcattgaatgagaagctggtgttagcaactagctcgaatgattcttctccacaacatgatcaatcgatgaagccagatatataccaatcacctctgctattcccaaatatcaggaatgatgatgttccagattctgtaaagaatttgaatgagaaggtgtccccaaagtttaaggtcgatgatgtccaggattctgtaaagagtttgaatgagaaactttctgctgcccttttgactatcaatgataaagatgacttggtaaagcagcacactagagttgcagaagaggctgttgcaggttgggaacaagctgaagctgaagttgcttctctgaagcaactacttgaaactgcatcaaagaagaatacctctctggaggatcaggtcagccacctagatgacgcccttaaagaatgtgtaaggcagcttcgccaagcacgtgaagaacaagagaataaaatccatgagacagttgctaagaagtctaaagaattggagtctgagaagtttgagctccagcaccatattgctgaactcagtaagcagttgcaagccacgaaactagaagctactacggtgcgtgtccagcgtgatctgcaggaaaagcttcagatagtggagaaagaaaacaaagacctcaaggtagaattactcgcactgtccaaggacctgaagatacttgcacgggaaagagacctgagcaaccaagcagcagaaacagcaagcaaacttcacctggaaagtgtgaaaaagataacaagagttgaggcagaatgccttaagttgcgtcatttaacgcggcgtacgtccttgaccaatgattcaaggctgataactaacagtgcttgcatggaatctcagactgacagtcagtctgacagtggggagcacatgctagttgatgagatgaaaaattctgattcatgggcaacagctctgatagctgaacttgatcagttcaagaatgccaacaacgacacaagaaatcttgtgaataattcggttgaaattgacctgatggatgatttcctcgagatggaaaagctggctgcactgcctgaagtagactgtgtaagctctagctttggagctgaaactgattctgaccaaggtgtgagtagagataaatcatcaaaagttaaaactgaaccattgcagtgtcaggtgacagatttgcacgcaaagatcgagaagattgaaggtgagaaaagggagcttgaaatggcccttgcagatgccagagttcagcttggcacatcatgtgatgctctaatggtggccaacaacaggttgattgatttgcagatgcagttggacttggcaaatgagtccaaacatgctgctttcggagaagctgagcgactgaatggtgagaggaaagatttggcattgcaactggagtccaggtcttcacaagttgatgagcttcagctgatggtggcatcgctggaaaagaatgtagacaggaaggtgttggaattgcagttagagttagtttctgtggaggctgcagatctgcgcaagacagtggcttccctggaagagaagattgatgcagagataactctctctatgcagcacaaaacaaatgcagacctggcagaggcgtccaaagaatcattagaggcgcagctgcagtctgcaaacacagagatagggaaactgaacgggattgtgcaaactttagagaatgaggtgaggaaagagacagattctcgtgaagaactactgaaacagatagaggctatgaaaattgagtcagagagatcactatctgtggtgtctaccaaagagtcattagaggtgcagctccaggtggcgaattcagaagttgcaaagttgcgtgggatggtgaatgctctggagtgtgatgcggcgaacgagaaggcatattcttcagatctccagatgcaacttgaggcagtggaaggtatcaggaaggtgttggaatctgagcttgagtcttcacaccaggaggtgatgaggctgaaggagaaagtttcgtccttggaagcaaggatcaaggaccagacctcgttgcttgtagaatatacagctaaatcagaggatgcagtgtcccggaaaaaggcaatggagggtcaactagaagcagcaaatctggaagttacaaaactgagaaacaaggtgagcctgatacaaggcaaggtggagcaggagaagcttctgtcagaagagtacgaagcaaaatgccgcaagctggaggcgcaggtgttgagggacagccgagaggcgaaactttggcgcctcacgaactcaaacggagacctgaaggagaaagaactagtcagtgctgccgggaagcttgcggagtgccagaagactattgctaaccttggccgccagctgaaatcgctaacagatcttgatggcgtggtggccgatcctgaaaagctggaatcgagggacacgcacctggacttcagagatggcggagacgtggctgatggactgtatgaactgggtcttcctaagaggaacggtagctgcctctcaccccttcggtcggatccgtcgccgaggggtttgccgtcccttagtagctacctgagcaaaacaaaaaggtgaaaagtctgatgggatcattcaccattgtgcttgtgcataaattatttgacagtctatggatgatgccagttgtgacctggtggtagatcggtgtacatttacagaacttgatggttgctcacatgtgtactttctccttttgttttgctctcattttgcgagactgcagggtttgtgacaaatttactagatcttgtgagactgtagtgcgttattctcgcgttggaattcaactcgtctacaacaaaaatagaagaaaaaaaacaaattcaaccggtcggcaaagtagaagtagggcagaccaaaccaacgttcag

SEQ ID NO: 45494 - DNA, 3267 bp, Zea Mays
tacgcctctagctcgagtggggagagagagagtgagagacgagacggggaggcaaaggcaccacgagccactctagagacgcctcctccgtttgttcgagctgcctgggcgggaaagagaaagcgagaccgagaccgcagggattgaaaaaagagggtgcaaaagcaaggctcggattcttgcggggcgagcgactcgtttctcgtctctgcgctgcgagcgaggctcctgctcctcgcggtctcgcttccctccaagttccaatccagcaccgggcgccaccgctaatcagtgctgatatatgaaccccgcatttggacatttggtggtggcaaggcaacgccaaccttccctgttgctgctttgaatgttctggtggttgtcggatggatcgccgcagttggctctggaagcgcaagtcattggataagagccctggggagagcgatagctctggctctgcttcatcacactctgagccttccttcgatgatcagaataatttataatgagaatcaagaagctgaaagagcagaatcattgaatgagaagctggtgttagcaactagctcgaatgattcttctccacaacatgatcaatcgatgaagccagatatataccaatcacctctgctattcccaaatatcaggaatgatgatgttccagattctgtaaagaatttgaatgagaaggtgtccccaaagtttaaggtcgatgatgtccaggattctgtaaagagtttgaatgagaaactttctgctgcccttttgactatcaatgataaagatgacttggtaaagcagcacactagagttgcagaagaggctgttgcaggttgggaacaagctgaagctgaagttgcttctctgaagcaactacttgaaactgcatcaaagaagaatacctctctggaggatcaggtcagccacctagatgacgcccttaaagaatgtgtaaggcagcttcgccaagcacgtgaagaacaagagaataaaatccatgagacagttgctaagaagtctaaagaattggagtctgagaagtttgagctccagcaccatattgctgaactcagtaagcagttgcaagccacgaaactagaagctactacggtgcgtgtccagcgtgatctgcaggaaaagcttcagatagtggagaaagaaaacaaagacctcaaggtagaattactcgcactgtccaaggacctgaagatacttgcacgggaaagagacctgagcaaccaagcagcagaaacagcaagcaaacttcacctggaaagtgtgaaaaagataacaagagttgaggcagaatgccttaagttgcgtcatttaacgcggcgtacgtccttgaccaatgattcaaggctgataactaacagtgcttgcatggaatctcagactgacagtcagtctgacagtggggagcacatgctagttgatgagatgaaaaattctgattcatgggcaacagctctgatagctgaacttgatcagttcaagaatgccaacaacgacacaagaaatcttgtgaataattcggttgaaattgacctgatggatgatttcctcgagatggaaaagctggctgcactgcctgaagtagactgtgtaagctctagctttggagctgaaactgattctgaccaaggtgtgagtagagataaatcatcaaaagttaaaactgaaccattgcagtgtcaggtgacagatttgcacgcaaagatcgagaagattgaaggtgagaaaagggagcttgaaatggcccttgcagatgccagagttcagcttggcacatcatgtgatgctctaatggtggccaacaacaggttgattgatttgcagatgcagttggacttggcaaatgagtccaaacatgctgctttcggagaagctgagcgactgaatggtgagaggaaagatttggcattgcaactggagtccaggtcttcacaagttgatgagcttcagctgatggtggcatcgctggaaaagaatgtagacaggaaggtgttggaattgcagttagagttagtttctgtggaggctgcagatctgcgcaagacagtggcttccctggaagagaagattgatgcagagataactctctctatgcagcacaaaacaaatgcagacctggcagaggcgtccaaagaatcattagaggcgcagctgcagtctgcaaacacagagatagggaaactgaacgggattgtgcaaactttagagaatgaggtgaggaaagagacagattctcgtgaagaactactgaaacagatagaggctatgaaaattgagtcagagagatcactatctgtggtgtctaccaaagagtcattagaggtgcagctccaggtggcgaattcagaagttgcaaagttgcgtgggatggtgaatgctctggagtgtgatgcggcgaacgagaaggcatattcttcagatctccagatgcaacttgaggcagtggaaggtatcaggaaggtgttggaatctgagcttgagtcttcacaccaggaggtgatgaggctgaaggagaaagtttcgtccttggaagcaaggatcaaggaccagacctcgttgcttgtagaatatacagctaaatcagaggatgcagtgtcccggaaaaaggcaatggagggtcaactagaagcagcaaatctggaagttacaaaactgagaaacaaggtgagcctgatacaaggcaaggtggagcaggagaagcttctgtcagaagagtacgaagcaaaatgccgcaagctggaggcgcaggtgttgagggacagccgagaggcgaaactttggcgcctcacgaactcaaacggagacctgaaggagaaagaactagtcagtgctgccgggaagcttgcggagtgccagaagactattgctaaccttggccgccagctgaaatcgctaacagatcttgatggcgtggtggccgatcctgaaaagctggaatcgagggacacgcacctggacttcagagatggcggagacgtggctgatggactgtatgaactgggtcttcctaagaggaacggtagctgcctctcaccccttcggtcggatccgtcgccgaggggtttgccgtcccttagtagctacctgagcaaaacaaaaagggtttgtgacaaatttactagatcttgtgagactgtagtgcgttattctcgcgttggaattcaactcgtctacaacaaaaatagaagaaaaaaaacaaattcaaccggtcggcaaagtagaagtagggcagaccaaaccaacgttcag

SEQ ID NO: 45495 - DNA, 3296 bp, Zea Mays
tacgcctctagctcgagtggggagagagagagtgagagacgagacggggaggcaaaggcaccacgagccactctagagacgcctcctccgtttgttcgagctgcctgggcgggaaagagaaagcgagaccgagaccgcagggattgaaaaaagagggtgcaaaagcaaggctcggattcttgcggggcgagcgactcgtttctcgtctctgcgctgcgagcgaggctcctgctcctcgcggtctcgcttccctccaagttccaatccagcaccgggcgccaccgctaatcagtgctgatatatgaaccccgcatttggacatttggtggtggcaaggcaacgccaaccttccctgttgctgctttgaatgttctggtggttgtcggatggatcgccgcagttggctctggaagcgcaagtcattggataagagccctggggagagcgatagctctggctctgcttcatcacactctgagccttccttcgatgatcaggaatgatgatgttccagattctgtaaagaatttgaatgagaaggtgtccccaaagtttaaggtcgatgatgtccaggattctgtaaagagtttgaatgagaaactttctgctgcccttttgactatcaatgataaagatgacttggtaaagcagcacactagagttgcagaagaggctgttgcaggttgggaacaagctgaagctgaagttgcttctctgaagcaactacttgaaactgcatcaaagaagaatacctctctggaggatcaggtcagccacctagatgacgcccttaaagaatgtgtaaggcagcttcgccaagcacgtgaagaacaagagaataaaatccatgagacagttgctaagaagtctaaagaattggagtctgagaagtttgagctccagcaccatattgctgaactcagtaagcagttgcaagccacgaaactagaagctactacggtgcgtgtccagcgtgatctgcaggaaaagcttcagatagtggagaaagaaaacaaagacctcaaggtagaattactcgcactgtccaaggacctgaagatacttgcacgggaaagagacctgagcaaccaagcagcagaaacagcaagcaaacttcacctggaaagtgtgaaaaagataacaagagttgaggcagaatgccttaagttgcgtcatttaacgcggcgtacgtccttgaccaatgattcaaggctgataactaacagtgcttgcatggaatctcagactgacagtcagtctgacagtggggagcacatgctagttgatgagatgaaaaattctgattcatgggcaacagctctgatagctgaacttgatcagttcaagaatgccaacaacgacacaagaaatcttgtgaataattcggttgaaattgacctgatggatgatttcctcgagatggaaaagctggctgcactgcctgaagtagactgtgtaagctctagctttggagctgaaactgattctgaccaaggtgtgagtagagataaatcatcaaaagttaaaactgaaccattgcagtgtcaggtgacagatttgcacgcaaagatcgagaagattgaaggtgagaaaagggagcttgaaatggcccttgcagatgccagagttcagcttggcacatcatgtgatgctctaatggtggccaacaacaggttgattgatttgcagatgcagttggacttggcaaatgagtccaaacatgctgctttcggagaagctgagcgactgaatggtgagaggaaagatttggcattgcaactggagtccaggtcttcacaagttgatgagcttcagctgatggtggcatcgctggaaaagaatgtagacaggaaggtgttggaattgcagttagagttagtttctgtggaggctgcagatctgcgcaagacagtggcttccctggaagagaagattgatgcagagataactctctctatgcagcacaaaacaaatgcagacctggcagaggcgtccaaagaatcattagaggcgcagctgcagtctgcaaacacagagatagggaaactgaacgggattgtgcaaactttagagaatgaggtgaggaaagagacagattctcgtgaagaactactgaaacagatagaggctatgaaaattgagtcagagagatcactatctgtggtgtctaccaaagagtcattagaggtgcagctccaggtggcgaattcagaagttgcaaagttgcgtgggatggtgaatgctctggagtgtgatgcggcgaacgagaaggcatattcttcagatctccagatgcaacttgaggcagtggaaggtatcaggaaggtgttggaatctgagcttgagtcttcacaccaggaggtgatgaggctgaaggagaaagtttcgtccttggaagcaaggatcaaggaccagacctcgttgcttgtagaatatacagctaaatcagaggatgcagtgtcccggaaaaaggcaatggagggtcaactagaagcagcaaatctggaagttacaaaactgagaaacaaggtgagcctgatacaaggcaaggtggagcaggagaagcttctgtcagaagagtacgaagcaaaatgccgcaagctggaggcgcaggtgttgagggacagccgagaggcgaaactttggcgcctcacgaactcaaacggagacctgaaggtgaagcaggagaaagaactagtcagtgctgccgggaagcttgcggagtgccagaagactattgctaaccttggccgccagctgaaatcgctaacagatcttgatggcgtggtggccgatcctgaaaagctggaatcgagggacacgcacctggacttcagagatggcggagacgtggctgatggactgtatgaactgggtcttcctaagaggaacggtagctgcctctcaccccttcggtcggatccgtcgccgaggggtttgccgtcccttagtagctacctgagcaaaacaaaaaggtgaaaagtctgatgggatcattcaccattgtgcttgtgcataaattatttgacagtctatggatgatgccagttgtgacctggtggtagatcggtgtacatttacagaacttgatggttgctcacatgtgtactttctccttttgttttgctctcattttgcgagactgcagggtttgtgacaaatttactagatcttgtgagactgtagtgcgttattctcgcgttggaattcaactcgtctacaacaaaaatagaagaaaaaaaacaaattcaaccggtcggcaaagtagaagtagggcagaccaaaccaacgttcag

SEQ ID NO: 45496 - DNA, 3125 bp, Zea Mays
aaaaaaactcaaaaagaaaaggctacgcctctagctcgagtggggagagagagagtgagagacgagacggggaggcaaaggcaccacgagccactctagagacgcctcctccgtttgttcgagctgcctgggcgggaaagagaaagcgagaccgagaccgcagggattgaaaaaagagggtgcaaaagcaaggctcggattcttgcggggcgagcgactcgtttctcgtctctgcgctgcgagcgaggctcctgctcctcgcggtctcgcttccctccaagttccaatccagcaccgggcgccaccgctaatcagtgctgatatatgaaccccgcatttggacatttggtggtggcaaggcaacgccaaccttccctgttgctgctttgaatgttctggtggttgtcggatggatcgccgcagttggctctggaagcgcaagtcattggataagagccctggggagagcgatagctctggctctgcttcatcacactctgagccttccttcgatgatcaggttgggaacaagctgaagctgaagttgcttctctgaagcaactacttgaaactgcatcaaagaagaatacctctctggaggatcaggtcagccacctagatgacgcccttaaagaatgtgtaaggcagcttcgccaagcacgtgaagaacaagagaataaaatccatgagacagttgctaagaagtctaaagaattggagtctgagaagtttgagctccagcaccatattgctgaactcagtaagcagttgcaagccacgaaactagaagctactacggtgcgtgtccagcgtgatctgcaggaaaagcttcagatagtggagaaagaaaacaaagacctcaaggtagaattactcgcactgtccaaggacctgaagatacttgcacgggaaagagacctgagcaaccaagcagcagaaacagcaagcaaacttcacctggaaagtgtgaaaaagataacaagagttgaggcagaatgccttaagttgcgtcatttaacgcggcgtacgtccttgaccaatgattcaaggctgataactaacagtgcttgcatggaatctcagactgacagtcagtctgacagtggggagcacatgctagttgatgagatgaaaaattctgattcatgggcaacagctctgatagctgaacttgatcagttcaagaatgccaacaacgacacaagaaatcttgtgaataattcggttgaaattgacctgatggatgatttcctcgagatggaaaagctggctgcactgcctgaagtagactgtgtaagctctagctttggagctgaaactgattctgaccaaggtgtgagtagagataaatcatcaaaagttaaaactgaaccattgcagtgtcaggtgacagatttgcacgcaaagatcgagaagattgaaggtgagaaaagggagcttgaaatggcccttgcagatgccagagttcagcttggcacatcatgtgatgctctaatggtggccaacaacaggttgattgatttgcagatgcagttggacttggcaaatgagtccaaacatgctgctttcggagaagctgagcgactgaatggtgagaggaaagatttggcattgcaactggagtccaggtcttcacaagttgatgagcttcagctgatggtggcatcgctggaaaagaatgtagacaggaaggtgttggaattgcagttagagttagtttctgtggaggctgcagatctgcgcaagacagtggcttccctggaagagaagattgatgcagagataactctctctatgcagcacaaaacaaatgcagacctggcagaggcgtccaaagaatcattagaggcgcagctgcagtctgcaaacacagagatagggaaactgaacgggattgtgcaaactttagagaatgaggtgaggaaagagacagattctcgtgaagaactactgaaacagatagaggctatgaaaattgagtcagagagatcactatctgtggtgtctaccaaagagtcattagaggtgcagctccaggtggcgaattcagaagttgcaaagttgcgtgggatggtgaatgctctggagtgtgatgcggcgaacgagaaggcatattcttcagatctccagatgcaacttgaggcagtggaaggtatcaggaaggtgttggaatctgagcttgagtcttcacaccaggaggtgatgaggctgaaggagaaagtttcgtccttggaagcaaggatcaaggaccagacctcgttgcttgtagaatatacagctaaatcagaggatgcagtgtcccggaaaaaggcaatggagggtcaactagaagcagcaaatctggaagttacaaaactgagaaacaaggtgagcctgatacaaggcaaggtggagcaggagaagcttctgtcagaagagtacgaagcaaaatgccgcaagctggaggcgcaggtgttgagggacagccgagaggcgaaactttggcgcctcacgaactcaaacggagacctgaaggagaaagaactagtcagtgctgccgggaagcttgcggagtgccagaagactattgctaaccttggccgccagctgaaatcgctaacagatcttgatggcgtggtggccgatcctgaaaagctggaatcgagggacacgcacctggacttcagagatggcggagacgtggctgatggactgtatgaactgggtcttcctaagaggaacggtagctgcctctcaccccttcggtcggatccgtcgccgaggggtttgccgtcccttagtagctacctgagcaaaacaaaaaggtgaaaagtctgatgggatcattcaccattgtgcttgtgcataaattatttgacagtctatggatgatgccagttgtgacctggtggtagatcggtgtacatttacagaacttgatggttgctcacatgtgtactttctccttttgttttgctctcattttgcgagactgcagggtttgtgacaaatttactagatcttgtgagactgtagtgcgttattctcgcgttggaattcaactcgtctacaacaaaaatagaagaaaaaaaacaaattcaaccggtcggcaaagtagaagtagggcagaccaaaccaacgttcag

SEQ ID NO: 45497 - DNA, 3647 bp, Zea Mays
ctcaatctaggcaaaagcccgcaagcgcacagttaacaacacgctacacgcctacaccagcatcgcttgctgagtacacttgagcgacactgtgtgagctgtggttgaatagttgagaaaaaaaaactcaaaaagaaaaggctacgcctctagctcgagtggggagagagagagtgagagacgagacggggaggcaaaggcaccacgagccactctagagacgcctcctccgtttgttcgagctgcctgggcgggaaagagaaagcgagaccgagaccgcagggattgaaaaaagagggtgcaaaagcaaggctcggattcttgcggggcgagcgactcgtttctcgtctctgcgctgcgagcgaggctcctgctcctcgcggtctcgcttccctccaagttccaatccagcaccgggcgccaccgctaatcagtgctgatatatgaaccccgcatttggacatttggtggtggcaaggcaacgccaaccttccctgttgctgctttgaatgttctggtggttgtcggatggatcgccgcagttggctctggaagcgcaagtcattggataagagccctggggagagcgatagctctggctctgcttcatcacactctgagccttccttcgatgatcaggaacctaaacctgtgtctagtaattcttctccaaatcatagtcattcgcctgatgtttcttctagaataatttataatgagaatcaagaagctgaaagagcagaatcattgaatgagaagctggtgttagcaactagctcgaatgattcttctccacaacatgatcaatcgatgaagccagatatataccaatcacctctgctattcccaaatatcaggaatgatgatgttccagattctgtaaagaatttgaatgagaaggtgtccccaaagtttaaggtcgatgatgtccaggattctgtaaagagtttgaatgagaaactttctgctgcccttttgactatcaatgataaagatgacttggtaaagcagcacactagagttgcagaagaggctgttgcaggttgggaacaagctgaagctgaagttgcttctctgaagcaactacttgaaactgcatcaaagaagaatacctctctggaggatcaggtcagccacctagatgacgcccttaaagaatgtgtaaggcagcttcgccaagcacgtgaagaacaagagaataaaatccatgagacagttgctaagaagtctaaagaattggagtctgagaagtttgagctccagcaccatattgctgaactcagtaagcagttgcaagccacgaaactagaagctactacggtgcgtgtccagcgtgatctgcaggaaaagcttcagatagtggagaaagaaaacaaagacctcaaggtagaattactcgcactgtccaaggacctgaagatacttgcacgggaaagagacctgagcaaccaagcagcagaaacagcaagcaaacttcacctggaaagtgtgaaaaagataacaagagttgaggcagaatgccttaagttgcgtcatttaacgcggcgtacgtccttgaccaatgattcaaggctgataactaacagtgcttgcatggaatctcagactgacagtcagtctgacagtggggagcacatgctagttgatgagatgaaaaattctgattcatgggcaacagctctgatagctgaacttgatcagttcaagaatgccaacaacgacacaagaaatcttgtgaataattcggttgaaattgacctgatggatgatttcctcgagatggaaaagctggctgcactgcctgaagtagactgtgtaagctctagctttggagctgaaactgattctgaccaaggtgtgagtagagataaatcatcaaaagttaaaactgaaccattgcagtgtcaggtgacagatttgcacgcaaagatcgagaagattgaaggtgagaaaagggagcttgaaatggcccttgcagatgccagagttcagcttggcacatcatgtgatgctctaatggtggccaacaacaggttgattgatttgcagatgcagttggacttggcaaatgagtccaaacatgctgctttcggagaagctgagcgactgaatggtgagaggaaagatttggcattgcaactggagtccaggtcttcacaagttgatgagcttcagctgatggtggcatcgctggaaaagaatgtagacaggaaggtgttggaattgcagttagagttagtttctgtggaggctgcagatctgcgcaagacagtggcttccctggaagagaagattgatgcagagataactctctctatgcagcacaaaacaaatgcagacctggcagaggcgtccaaagaatcattagaggcgcagctgcagtctgcaaacacagagatagggaaactgaacgggattgtgcaaactttagagaatgaggtgaggaaagagacagattctcgtgaagaactactgaaacagatagaggctatgaaaattgagtcagagagatcactatctgtggtgtctaccaaagagtcattagaggtgcagctccaggtggcgaattcagaagttgcaaagttgcgtgggatggtgaatgctctggagtgtgatgcggcgaacgagaaggcatattcttcagatctccagatgcaacttgaggcagtggaaggtatcaggaaggtgttggaatctgagcttgagtcttcacaccaggaggtgatgaggctgaaggagaaagtttcgtccttggaagcaaggatcaaggaccagacctcgttgcttgtagaatatacagctaaatcagaggatgcagtgtcccggaaaaaggcaatggagggtcaactagaagcagcaaatctggaagttacaaaactgagaaacaaggtgagcctgatacaaggcaaggtggagcaggagaagcttctgtcagaagagtacgaagcaaaatgccgcaagctggaggcgcaggtgttgagggacagccgagaggcgaaactttggcgcctcacgaactcaaacggagacctgaaggagaaagaactagtcagtgctgccgggaagcttgcggagtgccagaagactattgctaaccttggccgccagctgaaatcgctaacagatcttgatggcgtggtggccgatcctgaaaagctggaatcgagggacacgcacctggacttcagagatggcggagacgtggctgatggactgtatgaactgggtcttcctaagaggaacggtagctgcctctcaccccttcggtcggatccgtcgccgaggggtttgccgtcccttagtagctacctgagcaaaacaaaaaggtgaaaagtctgatgggatcattcaccattgtgcttgtgcataaattatttgacagtctatggatgatgccagttgtgacctggtggtagatcggtgtacatttacagaacttgatggttgctcacatgtgtactttctccttttgttttgctctcattttgcgagactgcagggtttgtgacaaatttactagatcttgtgagactgtagtgcgttattctcgcgttggaattcaactcgtctacaacaaaaatagaagaaaaaaaacaaattcaaccggtcggcaaagtagaagtagggcagaccaaaccaacgttcag

SEQ ID NO: 45498 - DNA, 3779 bp, Zea Mays
cccaacaaaaaaaaaacaactgctatgaatccgtcccaggaaaaatagagcaacttgaccccattcatccgtcgaacacactgcacctgttagtattatagcaacagtatttcagtaccagtgctcaatctaggcaaaagcccgcaagcgcacagttaacaacacgctacacgcctacaccagcatcgcttgctgagtacacttgagcgacactgtgtgagctgtggttgaatagttgagaaaaaaaaactcaaaaagaaaaggctacgcctctagctcgagtggggagagagagagtgagagacgagacggggaggcaaaggcaccacgagccactctagagacgcctcctccgtttgttcgagctgcctgggcgggaaagagaaagcgagaccgagaccgcagggattgaaaaaagagggtgcaaaagcaaggctcggattcttgcggggcgagcgactcgtttctcgtctctgcgctgcgagcgaggctcctgctcctcgcggtctcgcttccctccaagttccaatccagcaccgggcgccaccgctaatcagtgctgatatatgaaccccgcatttggacatttggtggtggcaaggcaacgccaaccttccctgttgctgctttgaatgttctggtggttgtcggatggatcgccgcagttggctctggaagcgcaagtcattggataagagccctggggagagcgatagctctggctctgcttcatcacactctgagccttccttcgatgatcaggaacctaaacctgtgtctagtaattcttctccaaatcatagtcattcgcctgatgtttcttctagaataatttataatgagaatcaagaagctgaaagagcagaatcattgaatgagaagctggtgttagcaactagctcgaatgattcttctccacaacatgatcaatcgatgaagccagatatataccaatcacctctgctattcccaaatatcaggaatgatgatgttccagattctgtaaagaatttgaatgagaaggtgtccccaaagtttaaggtcgatgatgtccaggattctgtaaagagtttgaatgagaaactttctgctgcccttttgactatcaatgataaagatgacttggtaaagcagcacactagagttgcagaagaggctgttgcaggttgggaacaagctgaagctgaagttgcttctctgaagcaactacttgaaactgcatcaaagaagaatacctctctggaggatcaggtcagccacctagatgacgcccttaaagaatgtgtaaggcagcttcgccaagcacgtgaagaacaagagaataaaatccatgagacagttgctaagaagtctaaagaattggagtctgagaagtttgagctccagcaccatattgctgaactcagtaagcagttgcaagccacgaaactagaagctactacggtgcgtgtccagcgtgatctgcaggaaaagcttcagatagtggagaaagaaaacaaagacctcaaggtagaattactcgcactgtccaaggacctgaagatacttgcacgggaaagagacctgagcaaccaagcagcagaaacagcaagcaaacttcacctggaaagtgtgaaaaagataacaagagttgaggcagaatgccttaagttgcgtcatttaacgcggcgtacgtccttgaccaatgattcaaggctgataactaacagtgcttgcatggaatctcagactgacagtcagtctgacagtggggagcacatgctagttgatgagatgaaaaattctgattcatgggcaacagctctgatagctgaacttgatcagttcaagaatgccaacaacgacacaagaaatcttgtgaataattcggttgaaattgacctgatggatgatttcctcgagatggaaaagctggctgcactgcctgaagtagactgtgtaagctctagctttggagctgaaactgattctgaccaaggtgtgagtagagataaatcatcaaaagttaaaactgaaccattgcagtgtcaggtgacagatttgcacgcaaagatcgagaagattgaaggtgagaaaagggagcttgaaatggcccttgcagatgccagagttcagcttggcacatcatgtgatgctctaatggtggccaacaacaggttgattgatttgcagatgcagttggacttggcaaatgagtccaaacatgctgctttcggagaagctgagcgactgaatggtgagaggaaagatttggcattgcaactggagtccaggtcttcacaagttgatgagcttcagctgatggtggcatcgctggaaaagaatgtagacaggaaggtgttggaattgcagttagagttagtttctgtggaggctgcagatctgcgcaagacagtggcttccctggaagagaagattgatgcagagataactctctctatgcagcacaaaacaaatgcagacctggcagaggcgtccaaagaatcattagaggcgcagctgcagtctgcaaacacagagatagggaaactgaacgggattgtgcaaactttagagaatgaggtgaggaaagagacagattctcgtgaagaactactgaaacagatagaggctatgaaaattgagtcagagagatcactatctgtggtgtctaccaaagagtcattagaggtgcagctccaggtggcgaattcagaagttgcaaagttgcgtgggatggtgaatgctctggagtgtgatgcggcgaacgagaaggcatattcttcagatctccagatgcaacttgaggcagtggaaggtatcaggaaggtgttggaatctgagcttgagtcttcacaccaggaggtgatgaggctgaaggagaaagtttcgtccttggaagcaaggatcaaggaccagacctcgttgcttgtagaatatacagctaaatcagaggatgcagtgtcccggaaaaaggcaatggagggtcaactagaagcagcaaatctggaagttacaaaactgagaaacaaggtgagcctgatacaaggcaaggtggagcaggagaagcttctgtcagaagagtacgaagcaaaatgccgcaagctggaggcgcaggtgttgagggacagccgagaggcgaaactttggcgcctcacgaactcaaacggagacctgaaggtgaagcaggagaaagaactagtcagtgctgccgggaagcttgcggagtgccagaagactattgctaaccttggccgccagctgaaatcgctaacagatcttgatggcgtggtggccgatcctgaaaagctggaatcgagggacacgcacctggacttcagagatggcggagacgtggctgatggactgtatgaactgggtcttcctaagaggaacggtagctgcctctcaccccttcggtcggatccgtcgccgaggggtttgccgtcccttagtagctacctgagcaaaacaaaaaggtgaaaagtctgatgggatcattcaccattgtgcttgtgcataaattatttgacagtctatggatgatgccagttgtgacctggtggtagatcggtgtacatttacagaacttgatggttgctcacatgtgtactttctccttttgttttgctctcattttgcgagactgcagggtttgtgacaaatttactagatcttgtgagactgtagtgcgttattctcgcgttggaattcaactcgtctacaacaaaaatagaagaaaaaaaacaaattcaaccggtcggcaaagtagaagtagggcagaccaaaccaacgttcag

SEQ ID NO: 45499 - DNA, 2462 bp, Zea Mays
gatatcagggcccacaggcaaggaagcccaaaagagccagcgatcattcctctccaaggctccaagactcaggctccaactttcccggccgccgccgccgtcgcgaatccgccgccacctacgcggccgcggtcatgagctccactgccgctgtggcccttaatcgtcgcacgcgcagccggccgccgtcggtcgcgtcttcccgcaggtctgatgatcccacggccgccggcgctggcgcccccgccaacggcaacggcaaagtctccaccaagcccgcctcccccgaccatacctcaggggagagaacggtcaagaagctgcggctgtccaaggcgctgacgatcgcggaggggaccacggtctcggaggcgtgccgacggatggcggcgaggcgggtcgatgccgttctgctcacagacgccggtggcctgctctcaggcatcgtcaccgacaaggacatagctacaagggtcattgccgaggggctgcgggttgagcaaacaatcatctccaagattatgacaaggaacccttcatatgtcatggcggacacacctgctattgaggcactgcataaaatggtccaagggaaatttagacaccttccagttgttgaaaatggtgaggttattgcgatgctggacattgcaaaatgtctgtatgatgcaatatcaagactggaaaaggcagcagagcaaggaagtgcactagcagctgccatagaaggggttgagcgccagttaggtggcaacttctcaggtccacacaatctcttagagactctcagagaacgaatgtttaaaccttctttgtcaaccattatcacagagaacacaaaagtagcaactgtttccctttcagatcctgtttgtgtagcaacccggaaaatgcgcgacttacgtgttaattcagtaattattatggctggaaattcgcttcatgggatctttacctcaaaggatgtgctgatgcgtgttgtggcccaaaatctttctcctgagttaactctagtagaaaagtgtctactattttgatccaggtaatgactgcacaccccgactgtgctacattggacacaacaatccttgatgcactacatatcatgcatgatggcaaattcttgcatattcctgttcttgatggagatgggcaggttgctgcttgcttggacgttctgcaacttacccatgctgccatttcaatggttgaaggaggtcctggtggcgcaaatgatgtggcaaacacaataatgcagaaattctgggactctgcactagagcctccagatgaggattttgatagtcacagtgaattatctttagtggtgccatcagatgctggggatggcaggagttgtatttatcctcctgctgttggtaattcatttgtatttaagcttcaggacagaaagggacgtatgcatagatttacttgtggtaggctctgagagtttagatgagctgatgtcttctgtaatccaaaggttaggcatgggtgatgagaagagtgtgattcaactgttgtatgaggatgatgaaggcgacaaggtgctgttgacaaccaattctgatcttactggtgctgtgttgtatgcaaaatcatctggattgaaggccttgagattgcatattgacgactcagattccagcaatgaagtaacacagccattgccagagctggcgtcatcaccccacggaagtcagtcgatgcatgttcattatggattgatggcttgtgcgattgctctgactggggtagctgtgatggtttacatgagacactctaaagcttgaacttctggagaacaaagaaatttgcaaagcttatatgcacaactcatgcgcatagaaggatcacacacttcggctcatgagaagggtaatagtgaagtaatcatgggctgatgacgatatacactcgattacattgttggtccaagagaaatacgctgactgactgtcatattctccagttaactgaagtcagttcttctggtgggagggaagcctatgctatggtatttcccgtccatttttgacaagtacccgtagtttcatgatgcagtgaaatatgcaacctttagggctagtttgggaactctatttttccaatggattcctattttctcaaggaaaaataaactaatttcaaatcccgtggaaaaatagggttcgcaaactagcccttagggtatgtacaacctttgtggtgcggtttttcatgtaaaaggcagttaagatatatgtaggtacaatgtggttaagtcacatgtgggttcattgtggtgtatctaaactttgtatcttatttaataaaatttctcaagacatgatttatttatgtggtttgtattattgaagttgtctctttgacttggataacctagctagaggtgtgccttgataaaaacatgatttctttatttttttctatattgaatgaaactcgcctatgtggtg

SEQ ID NO: 45500 - DNA, 2325 bp, Zea Mays
gatatcagggcccacaggcaaggaagcccaaaagagccagcgatcattcctctccaaggctccaagactcaggctccaactttcccggccgccgccgccgtcgcgaatccgccgccacctacgcggccgcggtcatgagctccactgccgctgtggcccttaatcgtcgcacgcgcagccggccgccgtcggtcgcgtcttcccgcaggtctgatgatcccacggccgccggcgctggcgcccccgccaacggcaacggcaaagtctccaccaagcccgcctcccccgaccatacctcaggggagagaacggtcaagaagctgcggctgtccaaggcgctgacgatcgcggaggggaccacggtctcggaggcgtgccgacggatggcggcgaggcgggtcgatgccgttctgctcacagacgccggtggcctgctctcaggcatcgtcaccgacaagggaaatttagacaccttccagttgttgaaaatggtgaggttattgcgatgctggacattgcaaaatgtctgtatgatgcaatatcaagactggaaaaggcagcagagcaaggaagtgcactagcagctgccatagaaggggttgagcgccagttaggtggcaacttctcaggtccacacaatctcttagagactctcagagaacgaatgtttaaaccttctttgtcaaccattatcacagagaacacaaaagtagcaactgtttccctttcagatcctgtttgtgtagcaacccggaaaatgcgcgacttacgtgttaattcagtaattattatggctggaaattcgcttcatgggatctttacctcaaaggatgtgctgatgcgtgttgtggcccaaaatctttctcctgagttaactctagtagaaaagtgtctactattttgatccaggtaatgactgcacaccccgactgtgctacattggacacaacaatccttgatgcactacatatcatgcatgatggcaaattcttgcatattcctgttcttgatggagatgggcaggttgctgcttgcttggacgttctgcaacttacccatgctgccatttcaatggttgaaggaggtcctggtggcgcaaatgatgtggcaaacacaataatgcagaaattctgggactctgcactagagcctccagatgaggattttgatagtcacagtgaattatctttagtggtgccatcagatgctggggatggcaggagttgtatttatcctcctgctgttggtaattcatttgtatttaagcttcaggacagaaagggacgtatgcatagatttacttgtggctctgagagtttagatgagctgatgtcttctgtaatccaaaggttaggcatgggtgatgagaagagtgtgattcaactgttgtatgaggatgatgaaggcgacaaggtgctgttgacaaccaattctgatcttactggtgctgtgttgtatgcaaaatcatctggattgaaggccttgagattgcatattgacgactcagattccagcaatgaagtaacacagccattgccagagctggcgtcatcaccccacggaagtcagtcgatgcatgttcattatggattgatggcttgtgcgattgctctgactggggtagctgtgatggtttacatgagacactctaaagcttgaacttctggagaacaaagaaatttgcaaagcttatatgcacaactcatgcgcatagaaggatcacacacttcggctcatgagaagggtaatagtgaagtaatcatgggctgatgacgatatacactcgattacattgttggtccaagagaaatacgctgactgactgtcatattctccagttaactgaagtcagttcttctggtgggagggaagcctatgctatggtatttcccgtccatttttgacaagtacccgtagtttcatgatgcagtgaaatatgcaacctttagggctagtttgggaactctatttttccaatggattcctattttctcaaggaaaaataaactaatttcaaatcccgtggaaaaatagggttcgcaaactagcccttagggtatgtacaacctttgtggtgcggtttttcatgtaaaaggcagttaagatatatgtaggtacaatgtggttaagtcacatgtgggttcattgtggtgtatctaaactttgtatcttatttaataaaatttctcaagacatgatttatttatgtggtttgtattattgaagttgtctctttgacttggataacctagctagaggtgtgccttgataaaaacatgatttctttatttttttctatattgaatgaaactcgcctatgtggtg

SEQ ID NO: 45501 - DNA, 2479 bp, Zea Mays
gatatcagggcccacaggcaaggaagcccaaaagagccagcgatcattcctctccaaggctccaagactcaggctccaactttcccggccgccgccgccgtcgcgaatccgccgccacctacgcggccgcggtcatgagctccactgccgctgtggcccttaatcgtcgcacgcgcagccggccgccgtcggtcgcgtcttcccgcaggtctgatgatcccacggccgccggcgctggcgcccccgccaacggcaacggcaaagtctccaccaagcccgcctcccccgaccatacctcaggggagagaacggtcaagaagctgcggctgtccaaggcgctgacgatcgcggaggggaccacggtctcggaggcgtgccgacggatggcggcgaggcgggtcgatgccgttctgctcacagacgccggtggcctgctctcaggcatcgtcaccgacaaggacatagctacaagggtcattgccgaggggctgcgggttgagcaaacaatcatctccaagattatgacaaggaacccttcatatgtcatggcggacacacctgctattgaggcactgcataaaatggtccaagggaaatttagacaccttccagttgttgaaaatggtgaggttattgcgatgctggacattgcaaaatgtctgtatgatgcaatatcaagactggaaaaggcagcagagcaaggaagtgcactagcagctgccatagaaggggttgagcgccagttaggtggcaacttctcaggtccacacaatctcttagagactctcagagaacgaatgtttaaaccttctttgtcaaccattatcacagagaacacaaaagtagcaactgtttccctttcagatcctgtttgtgtagcaacccggaaaatgcgcgacttacgtgttaattcagtaattattatggctggaaattcgcttcatgggatctttacctcaaaggatgtgctgatgcgtgttgtggcccaaaatctttctcctgagttaactctagtagaaaaggtaatgactgcacaccccgactgtgctacattggacacaacaatccttgatgcactacatatcatgcatgatggcaaattcttgcatattcctgttcttgatggagatgggcaggttgctgcttgcttggacgttctgcaacttacccatgctgccatttcaatggttgaaggaggtcctggtggcgcaaatgatgtggcaaacacaataatgcagaaattctgggactctgcactagagcctccagatgaggattttgatagtcacaggtttagttaatatttcctttgggttccttctatgtcttccctttcaaatgcaaggttatcctgaattgttgcattgcacagtgaattatctttagtggtgccatcagatgctggggatggcaggagttgtatttatcctcctgctgttggtaattcatttgtatttaagcttcaggacagaaagggacgtatgcatagatttacttgtggctctgagagtttagatgagctgatgtcttctgtaatccaaagtatgaggatgatgaaggcgacaaggtgctgttgacaaccaattctgatcttactggtgctgtgttgtatgcaaaatcatctggattgaaggccttgagattgcatattgacgactcagattccagcaatgaagtaacacagccattgccagagctggcgtcatcaccccacggaagtcagtcgatgcatgttcattatggattgatggcttgtgcgattgctctgactggggtagctgtgatggtttacatgagacactctaaagcttgaacttctggagaacaaagaaatttgcaaagcttatatgcacaactcatgcgcatagaaggatcacacacttcggctcatgagaagggtaatagtgaagtaatcatgggctgatgacgatatacactcgattacattgttggtccaagagaaatacgctgactgactgtcatattctccagttaactgaagtcagttcttctggtgggagggaagcctatgctatggtatttcccgtccatttttgacaagtacccgtagtttcatgatgcagtgaaatatgcaacctttagggctagtttgggaactctatttttccaatggattcctattttctcaaggaaaaataaactaatttcaaatcccgtggaaaaatagggttcgcaaactagcccttagggtatgtacaacctttgtggtgcggtttttcatgtaaaaggcagttaagatatatgtaggtacaatgtggttaagtcacatgtgggttcattgtggtgtatctaaactttgtatcttatttaataaaatttctcaagacatgatttatttatgtggtttgtattattgaagttgtctctttgacttggataacctagctagaggtgtgccttgataaaaacatgatttctttatttttttctatattgaatgaaactcgcctatgtggtg

SEQ ID NO: 45502 - DNA, 2348 bp, Zea Mays
gcaggatatcagggcccacaggcaaggaagcccaaaagagccagcgatcattcctctccaaggctccaagactcaggctccaactttcccggccgccgccgccgtcgcgaatccgccgccacctacgcggccgcggtcatgagctccactgccgctgtggcccttaatcgtcgcacgcgcagccggccgccgtcggtcgcgtcttcccgcaggtctgatgatcccacggccgccggcgctggcgcccccgccaacggcaacggcaaagtctccaccaagcccgcctcccccgaccatacctcaggggagagaacggtcaagaagctgcggctgtccaaggcgctgacgatcgcggaggggaccacggtctcggaggcgtgccgacggatggcggcgaggcgggtcgatgccgttctgctcacagacgccggtggcctgctctcaggcatcgtcaccgacaaggacatagctacaagggtcattgccgaggggctgcgggttgagcaaacaatcatctccaagattatgacaaggaacccttcatatgtcatggcggacacacctgctattgaggcactgcataaaatggtccaagggaaatttagacaccttccagttgttgaaaatggtgaggttattgcgatgctggacattgcaaaatgtctgtatgatgcaatatcaagactggaaaaggcagcagagcaaggaagtgcactagcagctgccatagaaggggttgagcgccagttaggtggcaacttctcaggtccacacaatctcttagagactctcagagaacgaatgtttaaaccttctttgtcaaccattatcacagagaacacaaaagtagcaactgtttccctttcagatcctgtttgtgtagcaacccggaaaatgcgcgacttacgtgttaattcagtaattattatggctggaaattcgcttcatgggatctttacctcaaaggatgtgctgatgcgtgttgtggcccaaaatctttctcctgagttaactctagtagaaaaggtaatgactgcacaccccgactgtgctacattggacacaacaatccttgatgcactacatatcatgcatgatggcaaattcttgcatattcctgttcttgatggagatgggcaggttgctgcttgcttggacgttctgcaacttacccatgctgccatttcaatggttgaaggaggtcctggtggcgcaaatgatgtggcaaacacaataatgcagaaattctgggactctgcactagagcctccagatgaggattttgatagtcacagtgaattatctttagtggtgccatcagatgctggggatggcaggagttgtatttatcctcctgctgttggtaattcatttgtatttaagcttcaggacagaaagggacgtatgcatagatttacttgtggctctgagagtttagatgagctgatgtcttctgtaatccaaaggttaggcatgggtgatgagaagagtgtgattcaactgttgtatgaggatgatgaaggcgacaaggtgctgttgacaaccaattctgatcttactggtgctgtgttgtatgcaaaatcatctggattgaaggccttgagattgcatattgacgactcagattccagcaatgaagtaacacagccattgccagagctggcgtcatcaccccacggaagtcagtcgatgcatgttcattatggattgatggcttgtgcgattgctctgactggggtagctgtgatggtttacatgagacactctaaagcttgaacttctggagaacaaagaaatttgcaaagcttatatgcacaactcatgcgcatagaaggatcacacacttcggctcatgagaaggttaactgaagtcagttcttctggtgggagggaagcctatgctatggtatttcccgtccatttttgacaagtacccgtagtttcatgatgcagtgaaatatgcaacctttagggctagtttgggaactctatttttccaatggattcctattttctcaaggaaaaataaactaatttcaaatcccgtggaaaaatagggttcgcaaactagcccttagggtatgtacaacctttgtggtgcggtttttcatgtaaaaggcagttaagatatatgtaggtacaatgtggttaagtcacatgtgggttcattgtggtgtatctaaactttgtatcttatttaataaaatttctcaagacatgatttatttatgtggtttgtattattgaagttgtctctttgacttggataacctagctagaggtgtgccttgataaaaacatgatttctttatttttttctatattgaatgaaactcgcctatgtggtg

SEQ ID NO: 45503 - DNA, 2582 bp, Zea Mays
cttcatagaccggtttagaatacttccagctctagtaaatttgatgagttagtggagcaagtcattaggttctccaggatattagggctcacaagcaatgtcaaagtttaccacagtttcgcaggatatcagggcccacaggcaaggaagcccaaaagagccagcgatcattcctctccaaggctccaagactcaggctccaactttcccggccgccgccgccgtcgcgaatccgccgccacctacgcggccgcggtcatgagctccactgccgctgtggcccttaatcgtcgcacgcgcagccggccgccgtcggtcgcgtcttcccgcaggtctgatgatcccacggccgccggcgctggcgcccccgccaacggcaacggcaaagtctccaccaagcccgcctcccccgaccatacctcaggggagagaacggtcaagaagctgcggctgtccaaggcgctgacgatcgcggaggggaccacggtctcggaggcgtgccgacggatggcggcgaggcgggtcgatgccgttctgctcacagacgccggtggcctgctctcaggcatcgtcaccgacaaggacatagctacaagggtcattgccgaggggctgcgggttgagcaaacaatcatctccaagattatgacaaggaacccttcatatgtcatggcggacacacctgctattgaggcactgcataaaatggtccaagggaaatttagacaccttccagttgttgaaaatggtgaggttattgcgatgctggacattgcaaaatgtctgtatgatgcaatatcaagactggaaaaggcagcagagcaaggaagtgcactagcagctgccatagaaggggttgagcgccagttaggtggcaacttctcaggtccacacaatctcttagagactctcagagaacgaatgtttaaaccttctttgtcaaccattatcacagagaacacaaaagtagcaactgtttccctttcagatcctgtttgtgtagcaacccggaaaatgcgcgacttacgtgttaattcagtaattattatggctggaaattcgcttcatgggatctttacctcaaaggatgtgctgatgcgtgttgtggcccaaaatctttctcctgagttaactctagtagaaaagtgtctactattttgatccaggtaatgactgcacaccccgactgtgctacattggacacaacaatccttgatgcactacatatcatgcatgatggcaaattcttgcatattcctgttcttgatggagatgggcaggttgctgcttgcttggacgttctgcaacttacccatgctgccatttcaatggttgaaggaggtcctggtggcgcaaatgatgtggcaaacacaataatgcagaaattctgggactctgcactagagcctccagatgaggattttgatagtcacagtgaattatctttagtggtgccatcagatgctggggatggcaggagttgtatttatcctcctgctgttggtaattcatttgtatttaagcttcaggacagaaagggacgtatgcatagatttacttgtggctctgagagtttagatgagctgatgtcttctgtaatccaaaggttaggcatgggtgatgagaagagtgtgattcaactgttgtatgaggatgatgaaggcgacaaggtgctgttgacaaccaattctgatcttactggtgctgtgttgtatgcaaaatcatctggattgaaggccttgagattgcatattgacgactcagattccagcaatgaagtaacacagccattgccagagctggcgtcatcaccccacggaagtcagtcgatgcatgttcattatggattgatggcttgtgcgattgctctgactggggtagctgtgatggtttacatgagacactctaaagcttgaacttctggagaacaaagaaatttgcaaagcttatatgcacaactcatgcgcatagaaggatcacacacttcggctcatgagaagggtaatagtgaagtaatcatgggctgatgacgatatacactcgattacattgttggtccaagagaaatacgctgactgactgtcatattctccagttaactgaagtcagttcttctggtgggagggaagcctatgctatggtatttcccgtccatttttgacaagtacccgtagtttcatgatgcagtgaaatatgcaacctttagggctagtttgggaactctatttttccaatggattcctattttctcaaggaaaaataaactaatttcaaatcccgtggaaaaatagggttcgcaaactagcccttagggtatgtacaacctttgtggtgcggtttttcatgtaaaaggcagttaagatatatgtaggtacaatgtggttaagtcacatgtgggttcattgtggtgtatctaaactttgtatcttatttaataaaatttctcaagacatgatttatttatgtggtttgtattattgaagttgtctctttgacttggataacctagctagaggtgtgccttgataaaaacatgatttctttatttttttctatattgaatgaaactcgcctatgtggtg

SEQ ID NO: 45504 - DNA, 1579 bp, Zea Mays
agctcaaagaccgtgtgtgtcaaagagagaaccagcacacagcagagtagcacctgatcgatcgatctcctactactagctcgttcgctttcacaaccagggagcagcaatggcatctgctgctactactctcctcaagtcgtcattcctccccaagaaggctgaatggggatccaagcaccagctggttgccgctcatcccaggccggcgaccgtcgtcgtctccatggttgcccgcgctagcgcctacgctgacgagcttgtccagaccgcgaaaaccatcgcgtcgccgggaaggggcatcctcgccatggacgagtcgaacgcgacctgcgggaagaggctcgactccatcggcctcgagaacaccgaggccaaccgccaggcctacaggaccctcctcgtcagcgctccaggcctgggacagtacatctctggtgccatcctcttcgaggagaccctctaccagtcgaccgtcgacggcaagaagatcgtcgacgtgcttagtgagcagggaatcgtgcctggtatcaaggtcgacaagggtcttgtgccactcgctggctccaacaacgagtcatggtgccaaggtctcgatggccttgcttcacgtgaggcagcctactaccaggccggtgcccgcttcgccaaatggcgcactgttgtcagcatccccaacggtccatctcaactagccgtgaaggaagctgcctggggcctcgcccgctacgccgccatctcacaggaaaatggtctggtgccgatcgtggagcccgagatccttctggatggcgagcacggcatcgagaggaccttcgaggtggcgcagaaggtgtgggcggagaccttcttctacatggccgagaacagcgtgatgttcgagggcatcctgctgaagcccagcatggtgacccctggtgccgagtgcgaggagaaggccaccccggagcaagtagccgagtacaccctcaggctcctgcgcacaaggatccctcccgccgtgccgggcatcatgttcctgtccggcgggcagtctgaggtggaggcgacccagaacctgaacgccatgaaccagagccccaacccgtggcacgtgtccttctcctacgccagggcgctgcagaacacctgcctcaagacgtggggcggcaggcccgagaacgtcaaggcggcgcaggacgcgctgctgctgcgcgccaaggccaactccctggcgcagctcggcaagtacaccggcgatggcgaggccgcggcggcaaaggagggcatgttcgtcaagaactacagctactaattaaagacgacggcgatacaccactcctgctgctagtgacgaatcttgcttcaaaatccttcttcatattctttagacgctcatcaacttcttcgtctgtctttccctttaactcttcgttgtctttcccgattctgaaagtgtggctttcctcggatgtcagtattcggttgagatacccaatccttttaccggcactagcaccggtcttggtaccctaaagaatctcctactgatcatgttgcattctacaagtcacacgtccatgtcagacattgaaaattt

SEQ ID NO: 45505 - DNA, 1616 bp, Zea Mays
ctcagctcaaagaccgtgtgtgtcaaagagagaaccagcacacagcagagtagcacctgatcgatcgatctcctactactagctcgttcgctttcacaaccagggagcagcaatggcatctgctgctactactctcctcaagtcgtcattcctccccaagaaggctgaatggggatccaagcaccagctggttgccgctcatcccaggccggcgaccgtcgtcgtctccatggttgcccgcgctagcgcctacgctgacgagcttgtccagaccgcgaaaaccatcgcgtcgccgggaaggggcatcctcgccatggacgagtcgaacgcgacctgcgggaagaggctcgactccatcggcctcgagaacaccgaggccaaccgccaggcctacaggaccctcctcgtcagcgctccaggcctgggacagtacatctctggtgccatcctcttcgaggagaccctctaccagtcgaccgtcgacggcaagaagatcgtcgacgtgcttagtgagcagggaatcgtgcctggtatcaaggtcgacaagggtcttgtgccactcgctggctccaacaacgagtcatggtgccaaggtctcgatggccttgcttcacgtgaggcagcctactaccaggccggtgcccgcttcgccaaatggcgcactgttgtcagcatccccaacggtccatctcaactagccgtgaaggaagctgcctggggcctcgcccgctacgccgccatctcacaggaaaatggtctggtgccgatcgtggagcccgagatccttctggatggcgagcacggcatcgagaggaccttcgaggtggcgcagaaggtgtgggcggagaccttcttctacatggccgagaacagcgtgatgttcgagggcatcctgctgaagcccagcatggtgacccctggtgccgagtgcgaggagaaggccaccccggagcaagtagccgagtacaccctcaggctcctgcgcacaaggatccctcccgccgtgccgggcatcatgttcctgtccggcgggcagtctgaggtggaggcgacccagaacctgaacgccatgaaccagagccccaacccgtggcacgtgtccttctcctacgccagggcgctgcagaacacctgcctcaagacgtggggcggcaggcccgagaacgtcaaggcggcgcaggacgcgctgctgctgcgcgccaaggccaactccctggcgcagctcggcaagtacaccggcgatggcgaggccgcggcggcaaaggagggcatgttcgtcaagaactacagctactaattaaagacgacggcgatacaccactcctgctgctagtacgttcctcgatcgggggcggtgccgttacaggtgacgaatcttgcttcaaaatccttcttcatattctttagacgctcatcaacttcttcgtctgtctttccctttaactcttcgttgtctttcccgattctgaaagtgtggctttcctcggatgtcagtattcggttgagatacccaatccttttaccggcactagcaccggtcttggtaccctaaagaatctcctactgatcatgttgcattctacaagtcacacgtccatgtcagacattgaaaattt

SEQ ID NO: 45506 - DNA, 361 bp, Zea Mays
tgtccttgtgtgccatcaggtacacagccttttatacatgttcagctgccgcgccacttctcagctcaaagaccgtgtgtgtcaaagagagaaccagcacacagcagagtagcacctgatcgatcgatctcctactactagctcgttcgctttcacaaccagggagcagcaatggcatctgctgctactactctcctcaagtcgtcattcctccccaagaaggctgaatggggatccaagcaccagctggttgccgctcatcccaggccggcgaccgtcgtcgtctccatggttgcccgcgctagcgcctacgctgacgagcttgtccagaccgcgtttgcaattctcttaattatatttc

SEQ ID NO: 45507 - DNA, 856 bp, Zea Mays
attaagggcatgttttcaatatccaggttattgctgaaagcctgtctgaggaagagattggaggcctcaaggagttgttcaagatgattgatactgacaatagtgggactataacatttgatgagctgaaagatggcttaaaaagggtaggctccgaattaacagagaacgaaatccaggctctaatggaagcagctgatattgataacagcggaaccatcgactatggtgaattcatcgcagctactctgcacatgaataagctggagagggaggagaacttggtttcggcattctcattttttgacaaagacggaagtggctttataaccattgatgaactgtcacaagcatgtcatgaattcggtcttgatgacgtccacctcgaggatatgattaaagatgttgaccagaacaatgatggccaaatcgactacagcgagttcacagcgatgatgaggaagggcaatgctggtgcaacaggaaggagaaccatgaggaacagcttgcacttgaatctcggcgaactcttgaatcccagcaaaacctagcgtgcattggaaggtcttgtcgggtacattcccatggcatatgaagattttggatgcgttgtcgatcggctggcctattctgagatgttgagcggttgtcctgtggtattactaagatgctgaagaattttcctagaagtacaactgccctgcggcatatatgtataactgtcgatgtaatgtagattgaacatggtctaaacattacttccctagaagtacaacttctctgctgtcaagtgtgtgtttagttgatattgaatagcaatttctttctctaatttcattgatgactcttttttaca

SEQ ID NO: 45508 - DNA, 2682 bp, Zea Mays
gacccatttatgctttgcaaatcatactgtttccaataattatagttggtcactatacacggtttttagcagacatggactcttgcgtattttccaatttacaaaaggaaaaatattaaaaaatagtaataaaaaagggaaaaaaaacaatggagacatcgtcgtcgtctccttcctccctccttcctggtcgcccatggattattccatagatacgacctagctgcgctgctacagcccccgcatttcccttcccccaatcctctcctccacgaacacgccctcccttttgcccgttcccagcctcgaacggcaaatcaaaaggcagatatatgagctcttggtcatcgtctccacgccccattggtagccgcctctgaaattcctataaaaaaagatatatgggtggagccatcacccacgccgccaagatcctgtcttcttgcgcggccagctcgtagctccacgccggatagatagaagaggccaacctttcctccccgcttgctccccttttctttcggcaggattgcacatcttcccccacgtgacacctgagaaagtgagagcacagatttcttcttccccttgctgctgccgtttctcgtttccgttcctctctgctcgtgggtttgtcatagataaacctcgcataaagcttcgttccctcggctcttggtcccaatcggcagggctcctccgcttacccgctccaatttctccccccccccccccccccccccccctgttcttctgtctccaacccgcgggaatccttgaggagttgcaggaatttgtagcgagaggctcctttcctgctgcggaggccgtcgtacggttcttgatccggggagcacacctggggcgcgccaatgcagccggacccgagcgggaacaccaatgcgaaggcgaagctgccgttgatggctccggcgccgtcgtcggggcgcccggcgtccgtgctgccgtacaagacggcgaacgtgcgggaccactatcgcatcggcaagaagctggggcaggggcagttcggcaccacgtaccactgtgtgggcaaggccgacggcgccgagtacgcgtgcaagtccattcccaagcgcaagctgctgtgccgggaggactacgaggacgtgtaccgcgagatccagatcatgcaccacctctccgagcaccccaacgtcgtccgcatccgcggcgcctatgaggacgcgctcttcgtgcacattgtcatggagctatgcgccggcggcgagctcttcgaccgcatcgtcgccaaaggccactacagtgagcgcgcggcagcgaacctcatcaagaccattgtcggggtcgtggagggatgccactcgctcggggtcatgcaccgggacctcaagccggagaactttctctttgccagcaccgctgaggaagccccactcaaggccactgactttgggctgtccatgttctacaagcccggtgataaattctctgatgtcgttggaagcccttattatgttgcaccagaggtacttcagaaatgttatggtccagaagctgatgtgtggagcgcaggggtaattctgtacattttgctttgtggtgtccctccattttgggcaggcagattatgcgagccaaacttgattttgaatctgaaccctggcccagtatttctgatagcgctaaggatctggtccgcaatatgcttactcgggatcctaaaaagagatttagtgctcatgaggttctctgccacccatggattgttgatgatgccgtggcgcctgataagcctattgattctgctgttctctcaaggctgaagcatttttcggcaatgaacaagctcaagaagatggcattaagggttattgctgaaagcctgtctgaggaagagattggaggcctcaaggagttgttcaagatgattgatactgacaatagtgggactataacatttgatgagctgaaagatggcttaaaaagggtaggctccgaattaacagagaacgaaatccaggctctaatggaagcagctgatattgataacagcggaaccatcgactatggtgaattcatcgcagctactctgcacatgaataagctggagagggaggagaacttggtttcggcattctcattttttgacaaagacggaagtggctttataaccattgatgaactgtcacaagcatgtcatgaattcggtcttgatgacgtccacctcgaggatatgattaaagatgttgaccagaacaatgatggccaaatcgactacagcgagttcacagcgatgatgaggaagggcaatgctggtgcaacaggaaggagaaccatgaggaacagcttgcacttgaatctcggcgaactcttgaatcccagcaaaacctagcgtgcattggaaggtcttgtcgggtacattcccatggcatatgaagattttggatgcgttgtcgatcggctggcctattctgagatgttgagcggttgtcctgtggtattactaagatgctgaagaattttcctagaagtacaactgccctgcggcatatatgtataactgtcgatgtaatgtagattgaacatggtctaaacattacttccctagaagtacaacttctctgctgtcaagtgtgtgtttagttgatattgaatagcaatttctttctctaatttcattgatgactcttttttaca

SEQ ID NO: 45509 - DNA, 2438 bp, Zea Mays
gacccatttatgctttgcaaatcatactgtttccaataattatagttggtcactatacacggtttttagcagacatggactcttgcgtattttccaatttacaaaaggaaaaatattaaaaaatagtaataaaaaagggaaaaaaaacaatggagacatcgtcgtcgtctccttcctccctccttcctggtcgcccatggattattccatagatacgacctagctgcgctgctacagcccccgcatttcccttcccccaatcctctcctccacgaacacgccctcccttttgcccgttcccagcctcgaacggcaaatcaaaaggcagatatatgagctcttggtcatcgtctccacgccccattggtagccgcctctgaaattcctataaaaaaagatatatgggtggagccatcacccacgccgccaagatcctgtcttcttgcgcggccagctcgtagctccacgccggatagatagaagaggccaacctttcctccccgcttgctccccttttctttcggcaggattgcacatcttcccccacgtgacacctgagaaagctcctttcctgctgcggaggccgtcgtacggttcttgatccggggagcacacctggggcgcgccaatgcagccggacccgagcgggaacaccaatgcgaaggcgaagctgccgttgatggctccggcgccgtcgtcggggcgcccggcgtccgtgctgccgtacaagacggcgaacgtgcgggaccactatcgcatcggcaagaagctggggcaggggcagttcggcaccacgtaccactgtgtgggcaaggccgacggcgccgagtacgcgtgcaagtccattcccaagcgcaagctgctgtgccgggaggactacgaggacgtgtaccgcgagatccagatcatgcaccacctctccgagcaccccaacgtcgtccgcatccgcggcgcctatgaggacgcgctcttcgtgcacattgtcatggagctatgcgccggcggcgagctcttcgaccgcatcgtcgccaaaggccactacagtgagcgcgcggcagcgaacctcatcaagaccattgtcggggtcgtggagggatgccactcgctcggggtcatgcaccgggacctcaagccggagaactttctctttgccagcaccgctgaggaagccccactcaaggccactgactttgggctgtccatgttctacaagcccggtgataaattctctgatgtcgttggaagcccttattatgttgcaccagaggtacttcagaaatgttatggtccagaagctgatgtgtggagcgcaggggtaattctgtacattttgctttgtggtgtccctccattttgggcaggcagattatgcgagccaaacttgattttgaatctgaaccctggcccagtatttctgatagcgctaaggatctggtccgcaatatgcttactcgggatcctaaaaagagatttagtgctcatgaggttctctgccacccatggattgttgatgatgccgtggcgcctgataagcctattgattctgctgttctctcaaggctgaagcatttttcggcaatgaacaagctcaagaagatggcattaagggttattgctgaaagcctgtctgaggaagagattggaggcctcaaggagttgttcaagatgattgatactgacaatagtgggactataacatttgatgagctgaaagatggcttaaaaagggtaggctccgaattaacagagaacgaaatccaggctctaatggaagcagctgatattgataacagcggaaccatcgactatggtgaattcatcgcagctactctgcacatgaataagctggagagggaggagaacttggtttcggcattctcattttttgacaaagacggaagtggctttataaccattgatgaactgtcacaagcatgtcatgaattcggtcttgatgacgtccacctcgaggatatgattaaagatgttgaccagaacaatgatggccaaatcgactacagcgagttcacagcgatgatgaggaagggcaatgctggtgcaacaggaaggagaaccatgaggaacagcttgcacttgaatctcggcgaactcttgaatcccagcaaaacctagcgtgcattggaaggtcttgtcgggtacattcccatggcatatgaagattttggatgcgttgtcgatcggctggcctattctgagatgttgagcggttgtcctgtggtattactaagatgctgaagaattttcctagaagtacaactgccctgcggcatatatgtataactgtcgatgtaatgtagattgaacatggtctaaacattacttccctagaagtacaacttctctgctgtcaagtgtgtgtttagttgatattgaatagcaatttctttctctaatttcattgatgactcttttttaca

SEQ ID NO: 45510 - DNA, 2583 bp, Zea Mays
caatttctttccaaatttttcggaggcctgtccaccaccgaaccaccaccccgcgcgccgagctcaccccgatccagatccaccagtcgtccctccggtctgcgacgggcgccctcctcctcgtcctcacgcgcctccggaagccagtgcctgcgcagtgaagcatccatctgcctctcctctcgtcggatccggggccggccaggcggcggcagcatgaagcgggtgtcgtcgcacgtctccctcgcctccgaggcggagatcaacctcgatctgtcgcgcctcatcatcgacaagcccaggttcacgctggagcggaagcgctccttcgacgagcagtcgtggagcgagctctctcaccgccagaacgacggcttcgacagcgtgctgcagtcgccggcattcccctctggtgtctttgactcgcccttctccgtgggcacgcatttcggggggccgcacccgctggtcaatgaggcctgggaggcgctcaggaaatcggtcgtctacttccgggaacagcccgtcggtactattgctgccgtagaccatgcgtcggaggaagtgctcaactatgatcaggtttttgtgagggattttgttccgagtgcattggctttcctaatgaataatgagactgacatagtgaagaactttctcttgaaaactcttcaccttcagagctctgagaaaatggtagaccgattcaagcttggagcaggtgcgatgcctgcaagtttcaaggtggaccgtaataaaaacagaaacactgaaaccttagttgctgattttggtgagagtgcaatcggcagggtggcaccggttgactctggattttggtggatcattctccttcgggcatatacaaagtacaccggagatgttagtttgtcagaatcacctgaatgccagaagtgcatgaggctgatactgaatctctgcttatctgaaggatttgatacttttccaactctgctttgcacagatggctgttcaatgattgatcgtcgaatggtaggaccatttcaccttgatctaattcatatttagatgcatatccgtagaagtagcacatagcctcattttgttagtgtcctgatcaggtgaaagttcaggcacatcttaattttcaaataaaatttataattttcaagtttttatggtagttttacagctgcacatattatcatactactcaaccaaaatttaaaggcaatcttgcatagtcttattggtactgtggggccagaaatgcttagtttttgcagaagtacacagatagtactgaaagaaaatgccaatctgcagtacatccctacaagttctcttattgtttgtcctacttttgaattacatattaatttcaaatgaagcttcttgtcagtgcatgattgtaattactgcaattatcagggtatatatggttatcccattgaaatccaagccctattctacatggctttaagatgtgctctccaaatgctcaagccagagggtgaagggaaggatttcatagaaaagatagggcaacggctacatgcactaacttaccacatgaggaattacttctggctagattttcaccagctgaataacatatacagatacaaaacagaagagtattcccacacagctgtgaacaagtttaatgtcattccggattccattcctgattgggtgtttggtttcatgccatgtcgaggaggctactttcttggcaacgtcagccctgctatgatggacttccggtggtttgcccttggtaattgcattgccattgtatcatctctagctaccccagaacagtcagttgctataatggatctgatcgaggaaaagtgggatgagctagttggtgagatgcctttgaagatatgctatcctgctctcgagaatcatgagtggagaataatcactggatgtgaccccaagaacacccggtggagttaccacaatggaggatcgtggccagttcttctgtggctgctgacagcagcctgcatcaagactggtcggccacagatggcaaaacgtgccattgagcttgctgagtcgaggctgctcaaggacggctggcccgagtactacgatggcaagcttggaagattcgttggtaagcaggccaggaagttccaaacctggtccattgctggttacctcgtggcccgcatgatgctggaggacccatcgacactgatgatgatctccatggaggaggaccggcctgtgaagccgaccatgcggcggtcagcatcatggaatgcctgaatgcgtggacagttgtttctgaattaaggaaatttagaagcaaaggttatacgtgagtttttttgggatcataaaagtttgatgtgattttgttgggaccggaatagttcaacgttcattatagttgagctctgtcaattaggacagaaattgtataccatagaggatcataggagttacacaggattttgtcacacctttttgttttgaatactaggatcctgttcagttgaaaccttgattttggaataacaaatcactatttatgcacacttttcactgtggcattactggtatctctgataactctggaat

SEQ ID NO: 45511 - DNA, 1597 bp, Zea Mays
aacctcaggtcaccagcaccttctccccacacccccgagttcgagtgcaaccgaagagccaagaggagctgtccgcgtcgtttcgactcccgccgccgaaaggccgagcccgtgcccgtgctcgcaaccctaatcccctttccccgttgcctctcgccgggaagaagagggagccgcgtggcgtcgccagccagcacgcgccccctcccttcccggctccctccgcgccgtgggcgaggcgcatccaacccgatccgccctcaccgcgaggcggaggacctggaggggagggagacaggtctggtgcaccctctctcgtccgcgccggcgagcgccaagtgtcccccacagagaaagcaaggattgaggctcaggtgaaggctgctgaagcagctgcacaacaaaagtttgaggaagaaatgagggtgaagcgagagcaggaaagggaagcagcacggctggcagtacgcatgatgaagaagactgttgatattgacaacagtgacttcctaaaggagctggagaacttcagcaaaacgtggcagtcgaatccacctggcaaattaatcgtggattttattgatggggacttgccaccggggttagggagccctctggagaggcttggcctgttcatgaagaacgatctcgaggatgaggtggaacaggaagtcgaggacagcgcatcaccctcgatggacgttgacatgaggaaagatttagcagggcatgaaatgcaagacagcatatcacccgtgaaggtcattggcacgaaggatgacttccagggagcggacattaacacgaggaaagatttccaggaagacgcagcagggcatgaaatgcaagactgcatatcagccgtgaaggttattggcacgaaggatgacttccagggagctgtagggcatgaaatggcgaacagcctatcaccatccactttcgttgacacaaagaaatattccgaagggacagaacatgagatggtggatagcatatcgcctttgatggatcctaacaccgaggaaggggagatcagctgctgacgttagctacacttgtcatccacatcatttgttgagttcgtgaggcagacatccttgctgggttgttggattaggcgacatcataagcagagtgacgaagaaacgctattcccctctggttgtgtcgtagaacaatgtggagaacatgtgtcagccgaactgagtagtggttttggctttgttgcggttttttttcctgtcgtggtcttgtcagtcgggcactccgctgtatgctgggttacctgagctcgtcagctggatgacctgtataaaaacatgatgaaattagggaggggttaatttagtgctagtatatattgtaggtgtaggactgtaggagcttatggtggagccggctgcagcacacaagctatagcattgttctcagatttggtcagcgcgccgtagtaccttgttactgtattcattctaaaacttgaataaaatgatgccagtcgcacaagttactgtaggagtagctatgacatgttatttgaaatactgtgttcggtttattcgatgaaagtgacgcttcctgagttcatttctta

SEQ ID NO: 45512 - DNA, 2810 bp, Zea Mays
aacctcaggtcaccagcaccttctccccacacccccgagttcgagtgcaaccgaagagccaagaggagctgtccgcgtcgtttcgactcccgccgccgaaaggccgagcccgtgcccgtgctcgcaaccctaatcccctttccccgttgcctctcgccgggaagaagagggagccgcgtggcgtcgccagccagcacgcgccccctcccttcccggctccctccgcgccgtgggcgaggcgcatccaacccgatccgccctcaccgcgaggcggaggacctggaggggagggagacaggtctggtgcaccctctctcgtccgcgccggcgagcgccaagtgtcccccacaggcttggctgaggaagacccgtgctctgtgggtcttggacactgcttcaccatttaccaagtcttgagttattgctccgttgttagacaagaaatcaaactctctggccaaacacaatgatggcacaagcctgtaagaagaggagaggagtttatataagcactgaattgggaggctctgatacagattctgatgttgagggaagcaaaccctctaaaaaatctggggtgacatcaatttctacatgcgagcatcagtcatcttataatctcaaggctgcaagtatgaaaagtagcaggatgataaggctgtgtggaaatattgtaaggaagctcatcgatcacaaaggtggttggcttttcaaagatcctgttgatccagatctatataagattcctgactactttgatgttatccgcaacccaatggatttgggtactgttaagaataaactcacaaaaaagaagtatgtaagcattgaggagttcgcagcagatgtgaggctaacattttcaaatgctatgaagtataatcctccaggcaatgatgtacatgctttcgctagagaattgaatgaaatatttgactcagaatgggaatcagtagaaaggaaatttagaggccgaaaccttgttcaagagcagaagacaaaggccataaaagttcgagctatcgtggattcgaagtctacagttgctagagggcaggttgcctgctcaaatcctaaatctttggctgcaagagggccagtaccttgctcaaattcgtttgcaaagaagacactgacagatgcattatcctccaaaatatacctgttcaaacagctggtgtcaaagaggggtcattaaaccactcttttcctaccggcaacaaagaggcatatttaaattgcacttttccttttgctaaggagaatgctaaaatttcaagtacacgagaaactgagcgcagctctggttcaactggaaatgattcatggtcttgcaatgacatttctacttcgcctatcgcctcctctgtacaaggtgaggaaagttacctttgtgatgaacctttatcaccaagcagggctcttcgtgcagcaatgctcaggagtcgttttgctgggactatagtgaaggctcaacagaaggcacttctggatcatgggaagaatatagaccctgtgaaattgcaattggaaaaggagaggctggaaaagaggcagcaagaagagaaagcaaggattgaggctcaggtgaaggctgctgaagcagctgcacaacaaaagtttgaggaagaaatgagggtgaagcgagagcaggaaagggaagcagcacggctggcagtacgcatgatgaagaagactgttgatattgacaacagtgacttcctaaaggagctggagaacttcagcaaaacgtggcagtcgaatccacctggcaaattaatcgtggattttattgatggggacttgccaccggggttagggagccctctggagaggcttggcctgttcatgaagaacgatctcgaggatgaggtggaacaggaagtcgaggacagcgcatcaccctcgatggacgttgacatgaggaaagatttagcagggcatgaaatgcaagacagcatatcacccgtgaaggtcattggcacgaaggatgacttccagggagcggacattaacacgaggaaagatttccaggaagacgcagcagggcatgaaatgcaagactgcatatcagccgtgaaggttattggcacgaaggatgacttccagggagctgtagggcatgaaatggcgaacagcctatcaccatccactttcgttgacacaaagaaatattccgaagggacagaacatgagatggtggatagcatatcgcctttgatggatcctaacaccgaggaaggggagatcagctgctgacgttagctacacttgtcatccacatcatttgttgagttcgtgaggcagacatccttgctgggttgttggattaggcgacatcataagcagagtgacgaagaaacgctattcccctctggttgtgtcgtagaacaatgtggagaacatgtgtcagccgaactgagtagtggttttggctttgttgcggttttttttcctgtcgtggtcttgtcagtcgggcactccgctgtatgctgggttacctgagctcgtcagctggatgacctgtataaaaacatgatgaaattagggaggggttaatttagtgctagtatatattgtaggtgtaggactgtaggagcttatggtggagccggctgcagcacacaagctatagcattgttctcagatttggtcagcgcgccgtagtaccttgttactgtattcattctaaaacttgaataaaatgatgccagtcgcacaagttactgtaggagtagctatgacatgttatttgaaatactgtgttcggtttattcgatgaaagtgacgcttcctgagttcatttctta

SEQ ID NO: 45513 - DNA, 2869 bp, Zea Mays
atcggctttgctctgcattttcataacagcgaaactccatttcatcgaagccacccccgtcgtgtttcataatagcaaatttctcatctctctctcgcgcgccctgcgcattcctcttagtggcggcagcgccaccgagtcaccttgccgccccagcgtgcagctggggtgtctgtccacgacaaggcgtctgccttgctcgtagcgaaccagcaaacagcgaggggcctgtatgggagtcgcggtagcaagcggagcgcagccgagccccgaacagagtctcgcggaagcgaggaaaaggagggaggggaaccatggtccggtcccgggggcatctggccctgtctacgcggctgatgaacgtaggcctcgcttcgctctgccggggtggctggctcgaccgtgcggagtccgtcctcgtcgacgccatccgcctcggcctgcccccggatgtcgtcacctacaacaccctcctcgccgcgtactgccgggtcgacggactcgacgcggggctagccgtcgtgcaccggatgcgggaggccggggtgagacccgacgccgtcacctacaactccctcatcacgggcgccgatcgcagcggactcacggtccgcgcccttgacctgttcgacgaaatgctgaggtcaggggtcgcccccgattcgtggagctacaacgccctcatgcactgcctattcaggtccggccacccggagcatgcctaccgtgtgtttgctgatatggctgacaggggcgtggcaccatgtgccacgacgtacaacacacttctggatgggctgctcaaggctggccacgtgacaaatgcattcaggatgttcaggtacctgcagagggcggggcttcccgtaggcattgtgacttacaacacaatgatcaacgggctgtgcaagtcaggcaaggtgggctatgcccgcatggtccttaaggagctggggaggacagagcatgccccgaacgctgtcacgtacacaacagttatgaagtgctgctttaggtatggcaggtttgagcaagggttggagacgttcttgtccctgcttgaaggagggtacatttcggatgccttcccatacacgacagtgatcagtgcgcttgtcaaaaagggccggatgcaagaagccaatacctattgtgagctcatgatacaaagtggttctacgcttgacaatgcatgctacaacactctgattcacctgcgatgccaagaagggaagattaatgacgcgtttgagctgttgaacatgatggaagaaggtggtctagagagcgatgagtacacattctctattttggtcaatggtctttgcaagatgggacaaatcgaggctgctgagaagcagatatggtccatggagatgatgggcatgcaatcaaatgtggtagcatataattgcttgattgatgcgttatgcaaatgtcatgaggttgatgcagccataaaaattttgcacagcatgaagctaaaagatgatttttcttacacatcactagtccatggtctatgtaaggtgggtagataccatatggcatccaaattcttgcggatctgcttgcatgaaggaaacaacgttcttgcatctgcaaagcgcgctgtcatttctgggcttcgtagtgcagggtttaaaaatgatttgaggaaagtccgatcagcattatatatggctaggctgttgcggtcttaatccaaggagaaaagatctgcaatctgattgcatgatcctgtgaaatttacaagtgtggatgagtagatgaccctttatggagatgtatgatcacctaaccactcgatcagtgcatcatgctccacaggaaggaaaccagaactgtgttagctcaagaaaggagctaccctaataaatcattttcctgaggctttatagtttgtcgatgttaaagtgcacaacaagccatgtcactgtcaagcttgaaatgtttattgaacgtcaatgaacaagaaaggctgatgcccacatggtcactaggaacaggatctgcattcatgacatttagtttccagatggtaccagccccaaatgtgcaggaagtgattcctccataacttccatggtttaaaacttcacctttcattgtattagtttgaggtgttacaatgaactcttggcgaccaagtatcccaaatttccaacagaagaattgagatgccctggtcagatggacatacagtatgcggtcacaaaatgaaggtgttgcgggatactacagagcaatctgaatgttaatattttttgtttggttcatcggttctttttgagaggttgagaactgaaccttgtttttttggtcacaacatttatcactctgaagcaaattctataccaatgaaagactacacaacatctaatctcatagccatgttgatagacatgcatgatgctgtgaagttatgtatttttggtctaaaactctggcagccggccgatgagtgcaattaagtaaaaaatagacgtcaccataatggagtcaatcattgatcttttgtatttgcatttgtttcatagaagcaatctattgttcctcacaagacagaattttattttgtactgtaaggctaaccttcatttatttgttcttcagatggtggaattctggaatcaatagtatgtttttgtttcttttgtagtcctctggctggattattttcaggcgtagtgtgtggctgggttgtgtttttttttgtttagtggcacagaagtaattctgctattttggtgggtctgatcctctctttacagggaggcttctacttgggtcatttttcctttcttgtaaatacaaagatatacagctctattgcaagttaggggtcgtttgtatcccttaattttac

SEQ ID NO: 45514 - DNA, 2252 bp, Zea Mays
atgttggctttggaggatcctgtccaaagtagtgtgactgttggagtttcacattttgagagatgctcgctctgggttcaagttttgtattacccgttttatggaagtggtggatctgcagactatgaaggaaactatgcagaagaagaggattcgcagatgatgaggcagaagcgctcacttcggcctgagcttggggaaccagttgttttgcggtgccaaccctacaagttccctctcgccgagcttctgctaccattagaatgctctccagttgagtatttccggctatggcctagcctaccagccatggtggagtgcactggcacgtacacatatgaaggcagtggtttcaaggccacggccgctcaacagtatgacagctctcccttccttggtggactgaagtcaatttcttctaagcccttccatcaagtctgctcacatttcatccgaacagtagctggattccagttatgttatgcagcaaagacatggtttggtgggtttgtgggcatgatgatatttggggcaagtgaagtcagccggaatgttgatttgggtgatgagaccaccacaatgatctgcaaattcgtcatgcgtgcgtctaatgaatccatcacgagagagattgaatctgatctccagggctggctggatgatatcaccgacggtgctgtggaatacatgcctgaggatgaggtgaagagcgcggccgctgagcggctgaagatctccatggagaggatctccctgctcaaggcagccaagccaaaggtcccacctgcgaagaccgagcaagaggaggaagaggagcgaaagcagagcgaggaactagatgggtttgggaaccccaagggcccctcgaccctctccaagctcactgcggaggaagccgagcaccgagctctccaggctgccgtgctgcaggagtggcaccagctgtgcaaggagaaagctatgaaagcacagtgaggtcgatttggaccgcgtggatcttcgaaaatctctcttaggcttcgtaaaattcacttcttaaatcatcatttagttttttatatcttttcatcttccaacatttttatatatgttttacactccagagagtcattcttatttttatccttgatagcgagaaatttaaaatagaagatgcatatattttgatggctacttatatgttgtttagaatctctagagctaatacttaaacagctaataaattattaactaagttgagtcatctaatgtactaattgttagctgagaggtagctaacaattagttacggtattaactgagtgtatttggaatccaataactaattttttgtaactaactgttagttctagaggttcccaatggtgctttgtaaaagctgttaaagaagttggagaagctatttaagggtaagtgtattatttaaatatctattcctgttaattaggaatgatagttttctggagttgcgcgcctgtatgattttgtattttttttttgtcttccatcttttttgcgtaactatcctgctgatttcactcactgtataccgtcgcagatattgtgtcgcgaacaaactttttgtaacagtagcatttttaagatctggcgtgaagatcaattatgcctcggctgatgctccagaggttaagaagaaaaggaagctccagtgttcgttggacatgcagccgatgtctacccaagctaagctagacatcagcgatgatgtggtggatgctggtttggtggatgatgtggaaggtggaggcatggtgaagacagtcaggtatgttggggaggaaatggaggaagatgatgatgatgatgagggagttcttgcattagtcggctatgccgccgatccagtcctgaccctagagggcgctccagcccccgagggtgctctagccctcgagggtgtcgtgcttggttctccttctgctgcttcaatggaagttcaggttgggtcgctaatgcctccgattgacgatgctgtggcaacaagttctaccctgcccatcagatctcgtccagacgatccaaccacttttggagaggccaccccgagtcaagttcctgaagatgctacaacaacttcgaccagcgttgggatcccaatgggtgttgcacttcgtctgggggatttggagcctttggcgcttgttcctacttcctttgtggcttctacggatgttgctacttctgggctatcttggcttcaccagctttggatcttccagtgtttctattga

SEQ ID NO: 45515 - DNA, 4276 bp, Zea Mays
ctccaattaacctctggattttcttttcagcccaagccggcctattaaccggcccagagactccgaaacgttcgtaaccattcccacctcccgcatcaaggaccggtccttctcaactccgcgccggagcccctccgcctcgggggcgcgatggatctcctcatcgcgcagatcaccaccgaccttcgctcctcggacgcactccggcagtcattggcgctgctgcaggccctgcagcagtgcgccgcggggcgggatgtctccgcgctcgcccgcaccgctgccaccgagatcctgtcggcaccctcctccgcagtctgcaagcgcctggctctcgacctcctccgcgcgctcccgctgccgccagacctcctcgacccgctcctcctctcctccctccgctccgacctctcctttccggaccccgacgtcgcctcctcttccatcgcctcgtttccatccttgccctcccaccttctcccatcgctcctctcctctgcccatgctgaaatcgctaatgcgctctcctcgcccgctgagtcgctgcgcctcggcgctgtcacatctctgtcctcgttcctcccgcgcgatgacctcgtgctcatgtgctccacaaacccctccctcatggcacacgccaccacgtggtgggcccgcctggccgagcttgcgctggactctgcagacgctgtttccgccggtgcgtttgaggcccttgcacggttgttccaggagctagaggggcgccgcatgagccggctagctggtgacaagcttgttgatggagaaggtgtgcttgcagtgcgggcccagtgggcggctgatgccattgatttcatttggtcaaggcgcaatatgctgattgcgcgctccgtggtgatgcctgcggagagcttccgacttactgtgcaccctctagtgcatgcagcgaaaatggttgcttctggtgtagtaaacacgctgcagcggattgccaagccaggggacactacaattgctgatagtgtggagtctagtgcggagaaattggttggagtgtcagacattgtctcgcacttgctgccattccttagttcacttgacccaccactggtgtttgaggtggggatcaatatgctggcacttgcagatgtccctggtggcaagccagagtgggcttcagctgccattattgcaatcctgacactatgggaccggcaagagttctcatcgatgagggagacaattgtaagggctgttgtgaccaatcttcatttgctggatcttggaatgcaggtctctctgttcaaaagactgcttcagatggtgagaaatttgagagcagaatcagatcgtatgcatgctctggcatgtatttgtcggactgctctttgtgttgatctttttgcaaaggaaagtgttcgaagaggtcagaagcctgttccaggaacagacgtgatatcactctttgaggatgtgaggctgaaggaagatctaaatagtgtaaccagcaaaaacttgttcagagaagagctagtggcttccctggtcgaaagttgtttccagctatcccttccactaccagagttgaagaattctgggacagagagcagagttataggagctttagcctacggaactggttatggtgcccttaattggacagaacctgctttggatgtggtggaagtttgcaggccctgtgttctttgggattgtgatggtcgtacctatgcagttgattgctatctaaagttgtttgggaggctttgtcatatatacgacaccagaggtggtgtgaagacaattaaagctggtgcatctcaagatcagattctgaatgagatgcgacttagaaatttgcagctacagcttatcagggaccttcgcgaggttcacactccacgtatatcttcacgcttgatatgggcaatttctgaacactttgatcttgaaggtctggatccccttttagctgatgacccagaggatccactgaatattatcatatctaacatgcacaagatattattcaacattgattcgtctgctactacatcaaataggatacaagatgtgcaggctgtgctaatttgtgctcaacgtttgggagcaagaaatacaagagcaggacaacttctcactaaagaactggaagaatttagggcaagtacttcagccgattctgtcaccaagcatcaatcacgttatgtgttgcaagtaataaaatatgtaacaaaccatcccaataacaggtgggttgctgtaggtgatgctacaggggattatccatttagtcaccacaaacttacagttcaattttcagaggcatctgctgcccaagatagaaaattggaggtattagttcataaggccattcaggagctttggaggccgcatcccagtcaattaactctcctacaaacaaagggaatcagtgccttgcataaagagcttccaaaagcctgtactttgaccggcagcagtgatccgtgctatatcgaagcatatcatttggcagatccaactgatggcagaatcaccctacatctgaagggtggacattcgtgttggcctctctggagcactgtattatatggatggtttctctcggactgttcgccacctcggaaatcttgtttcccaggatcctgtccaaagtagtgtgactgttggagtttcacattttgagagatgctcgctctgggttcaagttttgtattacccgttttatggaagtggtggatctgcagactatgaaggaaactatgcagaagaagaggattcgcagatgatgaggcagaagcgctcacttcggcctgagcttggggaaccagttgttttgcggtgccaaccctacaagttccctctcgccgagcttctgctaccattagaatgctctccagttgagtatttccggctatggcctagcctaccagccatggtggagtgcactggcacgtacacatatgaaggcagtggtttcaaggccacggccgctcaacagtatgacagctctcccttccttggtggactgaagtcaatttcttctaagcccttccatcaagtctgctcacatttcatccgaacagtagctggattccagttatgttatgcagcaaagacatggtttggtgggtttgtgggcatgatgatatttggggcaagtgaagtcagccggaatgttgatttgggtgatgagaccaccacaatgatctgcaaattcgtcatgcgtgcgtctaatgaatccatcacgagagagattgaatctgatctccagggctggctggatgatatcaccgacggtgctgtggaatacatgcctgaggatgaggtgaagagcgcggccgctgagcggctgaagatctccatggagaggatctccctgctcaaggcagccaagccaaaggtcccacctgcgaagaccgagcaagaggaggaagaggagcgaaagcagagcgaggaactagatgggtttgggaaccccaagggcccctcgaccctctccaagctcactgcggaggaagccgagcaccgagctctccaggctgccgtgctgcaggagtggcaccagctgtgcaaggagaaagctatgaaagcacaatattgtgtcgcgaacaaactttttgtaacagtagcatttttaagatctggcgtgaagatcaattatgcctcggctgatgctccagaggttaagaagaaaaggaagctccagtgttcgttggacatgcagccgatgtctacccaagctaagctagacatcagcgatgatgtggtggatgctggtttggtggatgatgtggaaggtggaggcatggtgaagacagtcaggtatgttggggaggaaatggaggaagatgatgatgatgatgagggagttcttgcattagtcggctatgccgccgatccagtcctgaccctagagggcgctccagcccccgagggtgctctagccctcgagggtgtcgtgcttggttctccttctgctgcttcaatggaagttcaggttgggtcgctaatgcctccgattgacgatgctgtggcaacaagttctaccctgcccatcagatctcgtccagacgatccaaccacttttggagaggccaccccgagtcaagttcctgaagatgctacaacaacttcgaccagcgttgggatcccaatgggtgttgcacttcgtctgggggatttggagcctttggcgcttgttcctacttcctttgtggcttctacggatgttgctacttctgggctatcttggcttcaccagctttggatcttccagtgtttctattga

SEQ ID NO: 45516 - DNA, 4895 bp, Zea Mays
ctccaattaacctctggattttcttttcagcccaagccggcctattaaccggcccagagactccgaaacgttcgtaaccattcccacctcccgcatcaaggaccggtccttctcaactccgcgccggagcccctccgcctcgggggcgcgatggatctcctcatcgcgcagatcaccaccgaccttcgctcctcggacgcactccggcagtcattggcgctgctgcaggccctgcagcagtgcgccgcggggcgggatgtctccgcgctcgcccgcaccgctgccaccgagatcctgtcggcaccctcctccgcagtctgcaagcgcctggctctcgacctcctccgcgcgctcccgctgccgccagacctcctcgacccgctcctcctctcctccctccgctccgacctctcctttccggaccccgacgtcgcctcctcttccatcgcctcgtttccatccttgccctcccaccttctcccatcgctcctctcctctgcccatgctgaaatcgctaatgcgctctcctcgcccgctgagtcgctgcgcctcggcgctgtcacatctctgtcctcgttcctcccgcgcgatgacctcgtgctcatgtgctccacaaacccctccctcatggcacacgccaccacgtggtgggcccgcctggccgagcttgcgctggactctgcagacgctgtttccgccggtgcgtttgaggcccttgcacggttgttccaggagctagaggggcgccgcatgagccggctagctggtgacaagcttgttgatggagaaggtgtgcttgcagtgcgggcccagtgggcggctgatgccattgatttcatttggtcaaggcgcaatatgctgattgcgcgctccgtggtgatgcctgcggagagcttccgacttactgtgcaccctctagtgcatgcagcgaaaatggttgcttctggtgtagtaaacacgctgcagcggattgccaagccaggggacactacaattgctgatagtgtggagtctagtgcggagaaattggttggagtgtcagacattgtctcgcacttgctgccattccttagttcacttgacccaccactggtgtttgaggtggggatcaatatgctggcacttgcagatgtccctggtggcaagccagagtgggcttcagctgccattattgcaatcctgacactatgggaccggcaagagttctcatcgatgagggagacaattgtaagggctgttgtgaccaatcttcatttgctggatcttggaatgcaggtctctctgttcaaaagactgcttcagatggtgagaaatttgagagcagaatcagatcgtatgcatgctctggcatgtatttgtcggactgctctttgtgttgatctttttgcaaaggaaagtgttcgaagaggtcagaagcctgttccaggaacagacgtgatatcactctttgaggatgtgaggctgaaggaagatctaaatagtgtaaccagcaaaaacttgttcagagaagagctagtggcttccctggtcgaaagttgtttccagctatcccttccactaccagagttgaagaattctgggacagagagcagagttataggagctttagcctacggaactggttatggtgcccttaattggacagaacctgctttggatgtggtggaagtttgcaggccctgtgttctttgggattgtgatggtcgtacctatgcagttgattgctatctaaagttgtttgggaggctttgtcatatatacgacaccagaggtggtgtgaagacaattaaagctggtgcatctcaagatcagattctgaatgagatgcgacttagaaatttgcagctacagcttatcagggaccttcgcgaggttcacactccacgtatatcttcacgcttgatatgggcaatttctgaacactttgatcttgaaggtctggatccccttttagctgatgacccagaggatccactgaatattatcatatctaacatgcacaagatattattcaacattgattcgtctgctactacatcaaataggatacaagatgtgcaggctgtgctaatttgtgctcaacgtttgggagcaagaaatacaagagcaggacaacttctcactaaagaactggaagaatttagggcaagtacttcagccgattctgtcaccaagcatcaatcacgttatgtgttgcaagtaataaaatatgtaacaaaccatcccaataacaggtgggttgctgtaggtgatgctacaggggattatccatttagtcaccacaaacttacagttcaattttcagaggcatctgctgcccaagatagaaaattggaggtattagttcataaggccattcaggagctttggaggccgcatcccagtcaattaactctcctacaaacaaagggaatcagtgccttgcataaagagcttccaaaagcctgtactttgaccggcagcagtgatccgtgctatatcgaagcatatcatttggcagatccaactgatggcagaatcaccctacatctgaagattttaaatttgactgagctagaactcaacagggtggacattcgtgttggcctctctggagcactgtattatatggatggtttctctcggactgttcgccacctcggaaatcttgtttcccaggatcctgtccaaagtagtgtgactgttggagtttcacattttgagagatgctcgctctgggttcaagttttgtattacccgttttatggaagtggtggatctgcagactatgaaggaaactatgcagaagaagaggattcgcagatgatgaggcagaagcgctcacttcggcctgagcttggggaaccagttgttttgcggtgccaaccctacaagttccctctcgccgagcttctgctaccattagaatgctctccagttgagtatttccggctatggcctagcctaccagccatggtggagtgcactggcacgtacacatatgaaggcagtggtttcaaggccacggccgctcaacagtatgacagctctcccttccttggtggactgaagtcaatttcttctaagcccttccatcaagtctgctcacatttcatccgaacagtagctggattccagttatgttatgcagcaaagacatggtttggtgggtttgtgggcatgatgatatttggggcaagtgaagtcagccggaatgttgatttgggtgatgagaccaccacaatgatctgcaaattcgtcatgcgtgcgtctaatgaatccatcacgagagagattgaatctgatctccagggctggctggatgatatcaccgacggtgctgtggaatacatgcctgaggatgaggtgaagagcgcggccgctgagcggctgaagatctccatggagaggatctccctgctcaaggcagccaagccaaaggtcccacctgcgaagaccgagcaagaggaggaagaggagcgaaagcagagcgaggaactagatgggtttgggaaccccaagggcccctcgaccctctccaagctcactgcggaggaagccgagcaccgagctctccaggctgccgtgctgcaggagtggcaccagctgtgcaaggagaaagctatgaaagcacagtgaggtcgatttggaccgcgtggatcttcgaaaatctctcttaggcttcgtaaaattcacttcttaaatcatcatttagttttttatatcttttcatcttccaacatttttatatatgttttacactccagagagtcattcttatttttatccttgatagcgagaaatttaaaatagaagatgcatatattttgatggctacttatatgttgtttagaatctctagagctaatacttaaacagctaataaattattaactaagttgagtcatctaatgtactaattgttagctgagaggtagctaacaattagttacggtattaactgagtgtatttggaatccaataactaattttttgtaactaactgttagttctagaggttcccaatggtgctttgtaaaagctgttaaagaagttggagaagctatttaagggtaagtgtattatttaaatatctattcctgttaattaggaatgatagttttctggagttgcgcgcctgtatgattttgtattttttttttgtcttccatcttttttgcgtaactatcctgctgatttcactcactgtataccgtcgcagatattgtgtcgcgaacaaactttttgtaacagtagcatttttaagatctggcgtgaagatcaattatgcctcggctgatgctccagaggttaagaagaaaaggaagctccagtgttcgttggacatgcagccgatgtctacccaagctaagctagacatcagcgatgatgtggtggatgctggtttggtggatgatgtggaaggtggaggcatggtgaagacagtcaggtatgttggggaggaaatggaggaagatgatgatgatgatgagggagttcttgcattagtcggctatgccgccgatccagtcctgaccctagagggcgctccagcccccgagggtgctctagccctcgagggtgtcgtgcttggttctccttctgctgcttcaatggaagttcaggttgggtcgctaatgcctccgattgacgatgctgtggcaacaagttctaccctgcccatcagatctcgtccagacgatccaaccacttttggagaggccaccccgagtcaagttcctgaagatgctacaacaacttcgaccagcgttgggatcccaatgggtgttgcacttcgtctgggggatttggagcctttggcgcttgttcctacttcctttgtggcttctacggatgttgctacttctgggctatcttggcttcaccagctttggatcttccagtgtttctattga

SEQ ID NO: 45517 - DNA, 4830 bp, Zea Mays
ctccaattaacctctggattttcttttcagcccaagccggcctattaaccggcccagagactccgaaacgttcgtaaccattcccacctcccgcatcaaggaccggtccttctcaactccgcgccggagcccctccgcctcgggggcgcgatggatctcctcatcgcgcagatcaccaccgaccttcgctcctcggacgcactccggcagtcattggcgctgctgcaggccctgcagcagtgcgccgcggggcgggatgtctccgcgctcgcccgcaccgctgccaccgagatcctgtcggcaccctcctccgcagtctgcaagcgcctggctctcgacctcctccgcgcgctcccgctgccgccagacctcctcgacccgctcctcctctcctccctccgctccgacctctcctttccggaccccgacgtcgcctcctcttccatcgcctcgtttccatccttgccctcccaccttctcccatcgctcctctcctctgcccatgctgaaatcgctaatgcgctctcctcgcccgctgagtcgctgcgcctcggcgctgtcacatctctgtcctcgttcctcccgcgcgatgacctcgtgctcatgtgctccacaaacccctccctcatggcacacgccaccacgtggtgggcccgcctggccgagcttgcgctggactctgcagacgctgtttccgccggtgcgtttgaggcccttgcacggttgttccaggagctagaggggcgccgcatgagccggctagctggtgacaagcttgttgatggagaaggtgtgcttgcagtgcgggcccagtgggcggctgatgccattgatttcatttggtcaaggcgcaatatgctgattgcgcgctccgtggtgatgcctgcggagagcttccgacttactgtgcaccctctagtgcatgcagcgaaaatggttgcttctggtgtagtaaacacgctgcagcggattgccaagccaggggacactacaattgctgatagtgtggagtctagtgcggagaaattggttggagtgtcagacattgtctcgcacttgctgccattccttagttcacttgacccaccactggtgtttgaggtggggatcaatatgctggcacttgcagatgtccctggtggcaagccagagtgggcttcagctgccattattgcaatcctgacactatgggaccggcaagagttctcatcgatgagggagacaattgtaagggctgttgtgaccaatcttcatttgctggatcttggaatgcaggtctctctgttcaaaagactgcttcagatggtgagaaatttgagagcagaatcagatcgtatgcatgctctggcatgtatttgtcggactgctctttgtgttgatctttttgcaaaggaaagtgttcgaagaggtcagaagcctgttccaggaacagacgtgatatcactctttgaggatgtgaggctgaaggaagatctaaatagtgtaaccagcaaaaacttgttcagagaagagctagtggcttccctggtcgaaagttgtttccagctatcccttccactaccagagttgaagaattctgggacagagagcagagttataggagctttagcctacggaactggttatggtgcccttaattggacagaacctgctttggatgtggtggaagtttgcaggccctgtgttctttgggattgtgatggtcgtacctatgcagttgattgctatctaaagttgtttgggaggctttgtcatatatacgacaccagaggtggtgtgaagacaattaaagctggtgcatctcaagatcagattctgaatgagatgcgacttagaaatttgcagctacagcttatcagggaccttcgcgagttgtgatgaattcacatccatagttgttaaggtggcaagacgaggttcacactccacgtatatcttcacgcttgatatgggcaatttctgaacactttgatcttgaaggatacaagatgtgcaggctgtgctaatttgtgctcaacgtttgggagcaagaaatacaagagcaggacaacttctcactaaagaactggaagaatttagggcaagtacttcagccgattctgtcaccaagcatcaatcacgttatgtgttgcaagtaataaaatatgtaacaaaccatcccaataacaggtgggttgctgtaggtgatgctacaggggattatccatttagtcaccacaaacttacagttcaattttcagaggcatctgctgcccaagatagaaaattggaggtattagttcataaggccattcaggagctttggaggccgcatcccagtcaattaactctcctacaaacaaagggaatcagtgccttgcataaagagcttccaaaagcctgtactttgaccggcagcagtgatccgtgctatatcgaagcatatcatttggcagatccaactgatggcagaatcaccctacatctgaagattttaaatttgactgagctagaactcaacagggtggacattcgtgttggcctctctggagcactgtattatatggatggtttctctcggactgttcgccacctcggaaatcttgtttcccaggatcctgtccaaagtagtgtgactgttggagtttcacattttgagagatgctcgctctgggttcaagttttgtattacccgttttatggaagtggtggatctgcagactatgaaggaaactatgcagaagaagaggattcgcagatgatgaggcagaagcgctcacttcggcctgagcttggggaaccagttgttttgcggtgccaaccctacaagttccctctcgccgagcttctgctaccattagaatgctctccagttgagtatttccggctatggcctagcctaccagccatggtggagtgcactggcacgtacacatatgaaggcagtggtttcaaggccacggccgctcaacagtatgacagctctcccttccttggtggactgaagtcaatttcttctaagcccttccatcaagtctgctcacatttcatccgaacagtagctggattccagttatgttatgcagcaaagacatggtttggtgggtttgtgggcatgatgatatttggggcaagtgaagtcagccggaatgttgatttgggtgatgagaccaccacaatgatctgcaaattcgtcatgcgtgcgtctaatgaatccatcacgagagagattgaatctgatctccagggctggctggatgatatcaccgacggtgctgtggaatacatgcctgaggatgaggtgaagagcgcggccgctgagcggctgaagatctccatggagaggatctccctgctcaaggcagccaagccaaaggtcccacctgcgaagaccgagcaagaggaggaagaggagcgaaagcagagcgaggaactagatgggtttgggaaccccaagggcccctcgaccctctccaagctcactgcggaggaagccgagcaccgagctctccaggctgccgtgctgcaggagtggcaccagctgtgcaaggagaaagctatgaaagcacagtgaggtcgatttggaccgcgtggatcttcgaaaatctctcttaggcttcgtaaaattcacttcttaaatcatcatttagttttttatatcttttcatcttccaacatttttatatatgttttacactccagagagtcattcttatttttatccttgatagcgagaaatttaaaatagaagatgcatatattttgatggctacttatatgttgtttagaatctctagagctaatacttaaacagctaataaattattaactaagttgagtcatctaatgtactaattgttagctgagaggtagctaacaattagttacggtattaactgagtgtatttggaatccaataactaattttttgtaactaactgttagttctagaggttcccaatggtgctttgtaaaagctgttaaagaagttggagaagctatttaagggtaagtgtattatttaaatatctattcctgttaattaggaatgatagttttctggagttgcgcgcctgtatgattttgtattttttttttgtcttccatcttttttgcgtaactatcctgctgatttcactcactgtataccgtcgcagatattgtgtcgcgaacaaactttttgtaacagtagcatttttaagatctggcgtgaagatcaattatgcctcggctgatgctccagaggttaagaagaaaaggaagctccagtgttcgttggacatgcagccgatgtctacccaagctaagctagacatcagcgatgatgtggtggatgctggtttggtggatgatgtggaaggtggaggcatggtgaagacagtcaggtatgttggggaggaaatggaggaagatgatgatgatgatgagggagttcttgcattagtcggctatgccgccgatccagtcctgaccctagagggcgctccagcccccgagggtgctctagccctcgagggtgtcgtgcttggttctccttctgctgcttcaatggaagttcaggttgggtcgctaatgcctccgattgacgatgctgtggcaacaagttctaccctgcccatcagatctcgtccagacgatccaaccacttttggagaggccaccccgagtcaagttcctgaagatgctacaacaacttcgaccagcgttgggatcccaatgggtgttgcacttcgtctgggggatttggagcctttggcgcttgttcctacttcctttgtggcttctacggatgttgctacttctgggctatcttggcttcaccagctttggatcttccagtgtttctattga

SEQ ID NO: 45518 - DNA, 4243 bp, Zea Mays
ctccaattaacctctggattttcttttcagcccaagccggcctattaaccggcccagagactccgaaacgttcgtaaccattcccacctcccgcatcaaggaccggtccttctcaactccgcgccggagcccctccgcctcgggggcgcgatggatctcctcatcgcgcagatcaccaccgaccttcgctcctcggacgcactccggcagtcattggcgctgctgcaggccctgcagcagtgcgccgcggggcgggatgtctccgcgctcgcccgcaccgctgccaccgagatcctgtcggcaccctcctccgcagtctgcaagcgcctggctctcgacctcctccgcgcgctcccgctgccgccagacctcctcgacccgctcctcctctcctccctccgctccgacctctcctttccggaccccgacgtcgcctcctcttccatcgcctcgtttccatccttgccctcccaccttctcccatcgctcctctcctctgcccatgctgaaatcgctaatgcgctctcctcgcccgctgagtcgctgcgcctcggcgctgtcacatctctgtcctcgttcctcccgcgcgatgacctcgtgctcatgtgctccacaaacccctccctcatggcacacgccaccacgtggtgggcccgcctggccgagcttgcgctggactctgcagacgctgtttccgccggtgcgtttgaggcccttgcacggttgttccaggagctagaggggcgccgcatgagccggctagctggtgacaagcttgttgatggagaaggtgtgcttgcagtgcgggcccagtgggcggctgatgccattgatttcatttggtcaaggcgcaatatgctgattgcgcgctccgtggtgatgcctgcggagagcttccgacttactgtgcaccctctagtgcatgcagcgaaaatggttgcttctggtgtagtaaacacgctgcagcggattgccaagccaggggacactacaattgctgatagtgtggagtctagtgcggagaaattggttggagtgtcagacattgtctcgcacttgctgccattccttagttcacttgacccaccactggtgtttgaggtggggatcaatatgctggcacttgcagatgtccctggtggcaagccagagtgggcttcagctgccattattgcaatcctgacactatgggaccggcaagagttctcatcgatgagggagacaattgtaagggctgttgtgaccaatcttcatttgctggatcttggaatgcaggtctctctgttcaaaagactgcttcagatggtgagaaatttgagagcagaatcagatcgtatgcatgctctggcatgtatttgtcggactgctctttgtgttgatctttttgcaaaggaaagtgttcgaagaggtcagaagcctgttccaggaacagacgtgatatcactctttgaggatgtgaggctgaaggaagatctaaatagtgtaaccagcaaaaacttgttcagagaagagctagtggcttccctggtcgaaagttgtttccagctatcccttccactaccagagttgaagaattctgggacagagagcagagttataggagctttagcctacggaactggttatggtgcccttaattggacagaacctgctttggatgtggtggaagtttgcaggccctgtgttctttgggattgtgatggtcgtacctatgcagttgattgctatctaaagttgtttgggaggctttgtcatatatacgacaccagaggtggtgtgaagacaattaaagctggtgcatctcaagatcagattctgaatgagatgcgacttagaaatttgcagctacagcttatcagggaccttcgcgagttgtgatgaattcacatccatagttgttaaggtggcaagacgaggttcacactccacgtatatcttcacgcttgatatgggcaatttctgaacactttgatcttgaaggatacaagatgtgcaggctgtgctaatttgtgctcaacgtttgggagcaagaaatacaagagcaggacaacttctcactaaagaactggaagaatttagggcaagtacttcagccgattctgtcaccaagcatcaatcacgttatgtgttgcaagtaataaaatatgtaacaaaccatcccaataacaggtgggttgctgtaggtgatgctacaggggattatccatttagtcaccacaaacttacagttcaattttcagaggcatctgctgcccaagatagaaaattggaggtattagttcataaggccattcaggagctttggaggccgcatcccagtcaattaactctcctacaaacaaagggaatcagtgccttgcataaagagcttccaaaagcctgtactttgaccggcagcagtgatccgtgctatatcgaagcatatcatttggcagatccaactgatggcagaatcaccctacatctgaagattttaaatttgactgagctagaactcaacagggtggacattcgtgttggcctctctggagcactgtattatatggatggtttctctcggactgttcgccacctcggaaatcttgtttcccaggatcctgtccaaagtagtgtgactgttggagtttcacattttgagagatgctcgctctgggttcaagttttgtattacccgttttatggaagtggtggatctgcagactatgaaggaaactatgcagaagaagaggattcgcagatgatgaggcagaagcgctcacttcggcctgagcttggggaaccagttgttttgcggtgccaaccctacaagttccctctcgccgagcttctgctaccattagaatgctctccagttgagtatttccggctatggcctagcctaccagccatggtggagtgcactggcacgtacacatatgaaggcagtggtttcaaggccacggccgctcaacagtatgacagctctcccttccttggtggactgaagtcaatttcttctaagcccttccatcaagtctgctcacatttcatccgaacagtagctggattccagttatgttatgcagcaaagacatggtttggtgggtttgtgggcatgatgatatttggggcaagtgaagtcagccggaatgttgatttgggtgatgagaccaccacaatgatctgcaaattcgtcatgcgtgcgtctaatgaatccatcacgagagagattgaatctgatctccagggctggctggatgatatcaccgacggtgctgtggaatacatgcctgaggatgaggtgaagagcgcggccgctgagcggctgaagatctccatggagaggatctccctgctcaaggcagccaagccaaaggtcccacctgcgaagaccgagcaagaggaggaagaggagcgaaagcagagcgaggaactagatgggtttgggaaccccaagggcccctcgaccctctccaagctcactgcggaggaagccgagcaccgagctctccaggctgccgtgctgcaggagtggcaccagctgtgcaaggagaaagctatgaaagcacaatattgtgtcgcgaacaaactttttgtaacagtagcatttttaagatctggcgtgaagatcaattatgcctcggctgatgctccagaggttaagaagaaaaggaagctccagtgttcgttggacatgcagccgatgtctacccaagctaagctagacatcagcgatgatgtggtggatgctggtttggtggatgatgtggaaggtggaggcatggtgaagacagtcaggtatgttggggaggaaatggaggaagatgatgatgatgatgagggagttcttgcattagtcggctatgccgccgatccagtcctgaccctagagggcgctccagcccccgagggtgctctagccctcgagggtgtcgtgcttggttctccttctgctgcttcaatggaagttcaggttgggtcgctaatgcctccgattgacgatgctgtggcaacaagttctaccctgcccatcagatctcgtccagacgatccaaccacttttggagaggccaccccgagtcaagttcctgaagatgctacaacaacttcgaccagcgttgggatcccaatgggtgttgcacttcgtctgggggatttggagcctttggcgcttgttcctacttcctttgtggcttctacggatgttgctacttctgggctatcttggcttcaccagctttggatcttccagtgtttctattga

SEQ ID NO: 45519 - DNA, 4308 bp, Zea Mays
ctccaattaacctctggattttcttttcagcccaagccggcctattaaccggcccagagactccgaaacgttcgtaaccattcccacctcccgcatcaaggaccggtccttctcaactccgcgccggagcccctccgcctcgggggcgcgatggatctcctcatcgcgcagatcaccaccgaccttcgctcctcggacgcactccggcagtcattggcgctgctgcaggccctgcagcagtgcgccgcggggcgggatgtctccgcgctcgcccgcaccgctgccaccgagatcctgtcggcaccctcctccgcagtctgcaagcgcctggctctcgacctcctccgcgcgctcccgctgccgccagacctcctcgacccgctcctcctctcctccctccgctccgacctctcctttccggaccccgacgtcgcctcctcttccatcgcctcgtttccatccttgccctcccaccttctcccatcgctcctctcctctgcccatgctgaaatcgctaatgcgctctcctcgcccgctgagtcgctgcgcctcggcgctgtcacatctctgtcctcgttcctcccgcgcgatgacctcgtgctcatgtgctccacaaacccctccctcatggcacacgccaccacgtggtgggcccgcctggccgagcttgcgctggactctgcagacgctgtttccgccggtgcgtttgaggcccttgcacggttgttccaggagctagaggggcgccgcatgagccggctagctggtgacaagcttgttgatggagaaggtgtgcttgcagtgcgggcccagtgggcggctgatgccattgatttcatttggtcaaggcgcaatatgctgattgcgcgctccgtggtgatgcctgcggagagcttccgacttactgtgcaccctctagtgcatgcagcgaaaatggttgcttctggtgtagtaaacacgctgcagcggattgccaagccaggggacactacaattgctgatagtgtggagtctagtgcggagaaattggttggagtgtcagacattgtctcgcacttgctgccattccttagttcacttgacccaccactggtgtttgaggtggggatcaatatgctggcacttgcagatgtccctggtggcaagccagagtgggcttcagctgccattattgcaatcctgacactatgggaccggcaagagttctcatcgatgagggagacaattgtaagggctgttgtgaccaatcttcatttgctggatcttggaatgcaggtctctctgttcaaaagactgcttcagatggtgagaaatttgagagcagaatcagatcgtatgcatgctctggcatgtatttgtcggactgctctttgtgttgatctttttgcaaaggaaagtgttcgaagaggtcagaagcctgttccaggaacagacgtgatatcactctttgaggatgtgaggctgaaggaagatctaaatagtgtaaccagcaaaaacttgttcagagaagagctagtggcttccctggtcgaaagttgtttccagctatcccttccactaccagagttgaagaattctgggacagagagcagagttataggagctttagcctacggaactggttatggtgcccttaattggacagaacctgctttggatgtggtggaagtttgcaggccctgtgttctttgggattgtgatggtcgtacctatgcagttgattgctatctaaagttgtttgggaggctttgtcatatatacgacaccagaggtggtgtgaagacaattaaagctggtgcatctcaagatcagattctgaatgagatgcgacttagaaatttgcagctacagcttatcagggaccttcgcgaggttcacactccacgtatatcttcacgcttgatatgggcaatttctgaacactttgatcttgaaggtctggatccccttttagctgatgacccagaggatccactgaatattatcatatctaacatgcacaagatattattcaacattgattcgtctgctactacatcaaataggatacaagatgtgcaggctgtgctaatttgtgctcaacgtttgggagcaagaaatacaagagcaggacaacttctcactaaagaactggaagaatttagggcaagtacttcagccgattctgtcaccaagcatcaatcacgttatgtgttgcaagtaataaaatatgtaacaaaccatcccaataacaggtgggttgctgtaggtgatgctacaggggattatccatttagtcaccacaaacttacagttcaattttcagaggcatctgctgcccaagatagaaaattggaggtattagttcataaggccattcaggagctttggaggccgcatcccagtcaattaactctcctacaaacaaagggaatcagtgccttgcataaagagcttccaaaagcctgtactttgaccggcagcagtgatccgtgctatatcgaagcatatcatttggcagatccaactgatggcagaatcaccctacatctgaagattttaaatttgactgagctagaactcaacagggtggacattcgtgttggcctctctggagcactgtattatatggatggtttctctcggactgttcgccacctcggaaatcttgtttcccaggatcctgtccaaagtagtgtgactgttggagtttcacattttgagagatgctcgctctgggttcaagttttgtattacccgttttatggaagtggtggatctgcagactatgaaggaaactatgcagaagaagaggattcgcagatgatgaggcagaagcgctcacttcggcctgagcttggggaaccagttgttttgcggtgccaaccctacaagttccctctcgccgagcttctgctaccattagaatgctctccagttgagtatttccggctatggcctagcctaccagccatggtggagtgcactggcacgtacacatatgaaggcagtggtttcaaggccacggccgctcaacagtatgacagctctcccttccttggtggactgaagtcaatttcttctaagcccttccatcaagtctgctcacatttcatccgaacagtagctggattccagttatgttatgcagcaaagacatggtttggtgggtttgtgggcatgatgatatttggggcaagtgaagtcagccggaatgttgatttgggtgatgagaccaccacaatgatctgcaaattcgtcatgcgtgcgtctaatgaatccatcacgagagagattgaatctgatctccagggctggctggatgatatcaccgacggtgctgtggaatacatgcctgaggatgaggtgaagagcgcggccgctgagcggctgaagatctccatggagaggatctccctgctcaaggcagccaagccaaaggtcccacctgcgaagaccgagcaagaggaggaagaggagcgaaagcagagcgaggaactagatgggtttgggaaccccaagggcccctcgaccctctccaagctcactgcggaggaagccgagcaccgagctctccaggctgccgtgctgcaggagtggcaccagctgtgcaaggagaaagctatgaaagcacaatattgtgtcgcgaacaaactttttgtaacagtagcatttttaagatctggcgtgaagatcaattatgcctcggctgatgctccagaggttaagaagaaaaggaagctccagtgttcgttggacatgcagccgatgtctacccaagctaagctagacatcagcgatgatgtggtggatgctggtttggtggatgatgtggaaggtggaggcatggtgaagacagtcaggtatgttggggaggaaatggaggaagatgatgatgatgatgagggagttcttgcattagtcggctatgccgccgatccagtcctgaccctagagggcgctccagcccccgagggtgctctagccctcgagggtgtcgtgcttggttctccttctgctgcttcaatggaagttcaggttgggtcgctaatgcctccgattgacgatgctgtggcaacaagttctaccctgcccatcagatctcgtccagacgatccaaccacttttggagaggccaccccgagtcaagttcctgaagatgctacaacaacttcgaccagcgttgggatcccaatgggtgttgcacttcgtctgggggatttggagcctttggcgcttgttcctacttcctttgtggcttctacggatgttgctacttctgggctatcttggcttcaccagctttggatcttccagtgtttctattga

SEQ ID NO: 45520 - DNA, 320 bp, Zea Mays
ccgtccaccattctagaggataaaaaaccaactgaacaaaccttctgaaagagtagaagccttgtctgatgtgcgaagagatcattttctcctttatgttcaagagaatatgtccctgcgacatttttcactcgaatgtcaagtgctggaaaaataacctgcaaacatcaacagaaaaatcttataccacaaatgttctatgcatcacgacgggcttacagttggcaaataaatttccacaaatataccaatctatgggcatttcagaaattaatctatctatgataaaaacatgtaattatacaaggtccatgctttga

SEQ ID NO: 45521 - DNA, 892 bp, Zea Mays
aaacaagtatattaaaaaacaattacaatttattttttcacaattggtaatctactcatcataggcctgtttcctgcacatcatgcacatggttatgcaaaacactatagactatattgtttgtagagtgaagcatgaaatagatgatgagatagaagatagaacagagatatttcctgcattgcctaaacagacgatgaaaaagtgagggtgacgtaatgcataggaaattggataaatataagaaatgaattctgaattgctgtataacgtataaacttaagtagcgtttacagcagttagtgtgccccgacaaaaaccaaatattgcctgactgaggaaaaaatactgttctcacgcgggaatctatcggctgcccacctgactgcaccaaagaaacaaataatatcaaaccagtaagcttgtaatatttcatcttatggcaatgtctgtatatgtacaggagcaagttctgttattttctttcgccaacattgatggcaacaatgacacttctgtaactagaaacgttgccgatgaagcaggataagaaatggctaacaaaaatgctagcaaagcctcttcaatcctttactgcaagccttcccaagctactctgctccgtttaacctcaagttagtaacaaaagatagatgaatggccatggccaagcgagcatgataaaaatgctagcaaagcctcttcaatcatgtgaaaagaacagatggcggttgcttgaagctggagctgaaagcacctgctttatttgacgatgttaacatcttatccttagcagtggcactgcctataacctgttcagaagaatctggctgctggttgttttcactatggatgggtcgtgcccaaattttgattagcccctcacggcata

SEQ ID NO: 45522 - DNA, 1433 bp, Zea Mays
cacaaattctatctcgagcgcactagttcctgttcttgattcatggggttttgctcaagctgactacaacgtcgtcacggcagaaggcggcaacaacgtgaagcagtcgctcatctcgtcctacagcaaggtgctggccccacgggtgaaggcctccatcgacgacgctgcgggccacgcgcagaacggcggcggcgagccgctgctgctgccgccggtggggagcgggtgcacgagctggtgcaaccagttctcggtcctgctccggcgcagcctcaaggagcggcggcacgagacgttcacgtcgctgcgcgtggtccagatcatggcgcccgcgctggtggcgggcgccatgtggtggcggtcgtcgccgctggcggtgcaggaccggctgggcctgctcttcttcgtctccatcttctggggcgtcttcgcctccttcaacgccgtgttcgcgttcccgcaggagcggcccgtgctggcgcgggagcgcgcctcggggatgtacgcgctctcgtcctacttcatgtcgcgcatggccggggacctgcccatggagctcgccctgcccaccgcgttcaccgtcgtcgtctacctcatggcggcgctcaacccgtcccccgccgcgttcgcgctcacgctcgccgtcatcctcgcgtacgtgctcgtcgccgaggggctggggctggccgtcggcgccgccatgatggacgccaagcgcgcgtccacgctggtcacggtcgtcatgctggcgtacctgctcaccggcggcttctacgtccacaacgtgccggggttcatggtgtgggccaagtacacctccttcacctactactgctaccgcctgctcatcgccgtgcagtacggcggccacctcaagcgcctgctcccgccggaggccgtcgacggcgaggccgggcctggggcgtgcatcgccgcgctcgtcgccatgttcttcggctaccgcctgttggcgtacctcgcgctgcgacgcgtcaggaagtgatctgatgacctgaacgtgaaccccgtcgtcgatcagctgttgtagctagctagggacgtgtgacttgtccattaactaatcaggcgaatcggcttggtacgatcaaacacttcgtccggcggctgcacgcggcgaaccgaccgagatccggagggctggcgggcgtcgaaggagatgactttggcgcggttgttgttggcgtcaccggccggggatcgacgaggtcgtccgtcgtcttcttctccaacgatttgttgcttttccccctttttttctccatcgatcgagatgccttgtttgcaagtgtattatatattcatcaatcagcgagtgtaagctcaagctgtgatatatagctgatttgggcttcttgatctacgaataacggaatgtacatgcatgatggctacaaatttatgaaaccaaa

SEQ ID NO: 45523 - DNA, 1276 bp, Zea Mays
cccgcctcgccgtccccttcctcctcatcactctgctaataagctgccccggcctcccctcaagttctctctctctatcgcaagcggccaccttgcacccctggccagtcccatccacaccacccaatcctgctgcgttctatataagctgctggagcatcttgtgctttgttcgatactagcggccacgtacgtacaatgcctcctaacgccgaggacgtgcacggaagcggcggcggcggcgccctcgccacgacggcccctgcggcgtccaagatggactgcttcttgaccaccgtctgcacgccgctcgacctccagttcatcgacgtgtcgtaccgcgtcaagcagacggagcggtcggcgtccaaggcgccgccgggcggccggatatcacactcgggtcccggcgcccccgcgacggcggaggagcggacgatcctcaaggggatcaccggcgaggcgcgtccgggggaggtgctagcggtgctgggcccatcggggagcggcaagtcgacgctgctgtccatcctggggggccggctggcgggccgccacagcgggacggtcctggcgggcgggcgccctccgtgccgcgccgtgcagcgccgcacggggttcgtggcgcaggacgacgtgctgcacccgcacctgacggtgcgcgagacgctggccttctgcgccatgctgcgcctcccgcggtccgcgccggcgtccgccaaggccgccgcggccgaggccgtgatcgcggagctgggcctcgcggcgtgcgccgacaccgtcgtcgggaacgccttcgtgcgcggcgtgtccgggggggagcgcaagcgcgtcagcatcgggcacgagctgctggtgaacccgagcctgctggtcctcgacgagcccacgtcggggctggactccaccgccgcggcgcgcctcgtggcgacgctgtcggcgctggcaaggaagggacgcaccgtcgtcctgtccgtgcaccagccctcctcccgcgtctaccgcatgttcgactccgtgctgctgctcgccgagggcagctgcctctacttcggcgccggccgcgacgccatggactacttcgcctccgtcggcttcgcgccgggcttccacgtcaacccggccgacttcatgctcgacctcgcaaatgggacacctgtcactgaaggtgggaattagggcactaccactgtggctgaacatcatcatcgtccaacagaaaggtacatactatatactagctatgcttggtagatactcccagagccattctaag

SEQ ID NO: 45524 - DNA, 2012 bp, Zea Mays
ttgcttgatgcttggaagaatctgttgtttggtttatctattgtatacattcatgtgttattctgctagatgcttggaagaagccatctatggaattgtttgaaatgatttgagcatttaatcccttatctttgaatagatgacataattggagaatctgtccatatatctatgcgatgttctgtatttactacaagcaccattataggataatagtgttcttccatagtcccttgcatcggttgggctttaatttcaatagtcttgcatcggttggtatttaatagtcttgcatcggttgggctttttctgaagcgctaatagtgttcttccatagtcccttgtccttatgtcctttgtggaaggtcgaggatattttaggttcaaaccatgtataatttcatttctgccccaattaggtggctacaacttacctgcgtagacaaaatataagtatgtgcaataatatagctagcagagtcgatcttccctatgctatagagcatgtaaattacttataatttgtctaacaaaaactgacccaatcctagaaatagggatggcaaacagtaggactagaattcagctgcaaaatgccagggaccatataagtcaggatttcctcttcttggacctactgaagcaggtaaaggtgctttttctagaacaacatttcatcttcccatcagtgaggttagttgtcctctaaaaattttagtttttatccctgctatcaaaggtttaacatgccttgttattatgtcataccatgatgaaattaaacccatgataaaattaaaaaccatgtacacggatcatagaaacccactaacagaattatagaaaccacataagcagaatagaaaacggttctctgaaaatgaagaacattattgttgtgttctaaatcaggatttggtgttacaccaggtgttcgacgcgattccttgcattatttttcagttgtaacataccacaagattatgtggttttgggattatttatttctcaggaacagtttattaattagtttcattttattcttatcagcatgctctctctcatgagacattgattagtgtattatgtattctggatgatgtgtgttgtgccataccatgtatttgttctgaagaacaattaattcattagctatttgggctattatgtctagaatatggttgcttagatcttccaacttatagtgtgtttgtagcttctgtagaaatatattcaatgtgtgttcacatatttttagagatttggacaccttacaaaggataaggattacgaggatccaccagactctgcatcggcgtgcccacgcgccagatggccattgaggaacactaccgatgcaggcgccatctttggtagctgaggacaaattaaagtttgccttcctgtgaattttctaccttttccaaatttaaagtcattaagagttcaagattgtgatgatttgtagtactgaattggaggcttttatcccctgcaatttatgtggtacaagtaagggtgttgtgtgagaaggcaaaggagattctaatggaggaaagaaatgttcagtttgtgggtagatgtggatcataatcagctactctatctgtagcagtgcgagtatttccaacaccaacaccgacgatacagagcccgggggaagtagcaagattttgagctcctacagttagacagccgccagacccagtcacgacgactgatgttggaaaccagcggcgcgcctacttcagttgagtgcaaagctaccaacatctgatccatgcttttgggttctttgtatctgtatctatcaattcattaagtgcagacaatccatgtttctgccaccaaatggggcatattttccctctggtccagttttaacttgagaacaattgaacaaatgtccaatgtgatgtctgatttctcaacattgtctttcccaaatgtaaagaaaatatgtatgatagcgcactaatcatccttctgacagttggatgactgcaatgttc

SEQ ID NO: 45525 - DNA, 1447 bp, Zea Mays
ttgcttgatgcttggaagaatctgttgtttggtttatctattgtatacattcatgtgttattctgctagatgcttggaagaagccatctatggaattgtttgaaatgatttgagcatttaatcccttatctttgaatagatgacataattggagaatctgtccatatatctatgcgatgttctgtatttactacaagcaccattataggataatagtgttcttccatagtcccttgcatcggttgggctttaatttcaatagtcttgcatcggttggtatttaatagtcttgcatcggttgggctttttctgaagcgctaatagtgttcttccatagtcccttgtccttatgtcctttgtggaaggtcgaggatattttaggttcaaaccatgtataatttcatttctgccccaattaggtggctacaacttacctgcgtagacaaaatataagtatgtgcaataatatagctagcagagtcgatcttccctatgctatagagcatgtaaattacttataatttgtctaacaaaaactgacccaatcctagaaatagggatggcaaacagtaggactagaattcagctgcaaaatgccagggaccatataagtcaggatttcctcttcttggacctactgaagcaggtaaaggtgctttttctagaacaacatttcatcttcccatcagtgagagatttggacaccttacaaaggataaggattacgaggatccaccagactctgcatcggcgtgcccacgcgccagatggccattgaggaacactaccgatgcaggcgccatctttggtagctgaggacaaattaaagtttgccttcctgtgaattttctaccttttccaaatttaaagtcattaagagttcaagattgtgatgatttgtagtactgaattggaggcttttatcccctgcaatttatgtggtacaagtaagggtgttgtgtgagaaggcaaaggagattctaatggaggaaagaaatgttcagtttgtgggtagatgtggatcataatcagctactctatctgtagcagtgcgagtatttccaacaccaacaccgacgatacagagcccgggggaagtagcaagattttgagctcctacagttagacagccgccagacccagtcacgacgactgatgttggaaaccagcggcgcgcctacttcagttgagtgcaaagctaccaacatctgatccatgcttttgggttctttgtatctgtatctatcaattcattaagtgcagacaatccatgtttctgccaccaaatggggcatattttccctctggtccagttttaacttgagaacaattgaacaaatgtccaatgtgatgtctgatttctcaacattgtctttcccaaatgtaaagaaaatatgtatgatagcgcactaatcatccttctgacagttggatgactgcaatgttc

SEQ ID NO: 45526 - DNA, 791 bp, Zea Mays
tcaaatcgtagagctctgttggggtgaatccagtgatagatttggacaccttacaaaggataaggattacgaggatccaccagactctgcatcggcgtgcccacgcgccagatggccattgaggaacactaccgatgcaggcgccatctttggtagctgaggacaaattaaagtttgccttcctgtgaattttctaccttttccaaatttaaagtcattaagagttcaagattgtgatgatttgtagtactgaattggaggcttttatcccctgcaatttatgtggtacaagtaagggtgttgtgtgagaaggcaaaggagattctaatggaggaaagaaatgttcagtttgtgggtagatgtggatcataatcagctactctatctgtagcagtgcgagtatttccaacaccaacaccgacgatacagagcccgggggaagtagcaagattttgagctcctacagttagacagccgccagacccagtcacgacgactgatgttggaaaccagcggcgcgcctacttcagttgagtgcaaagctaccaacatctgatccatgcttttgggttctttgtatctgtatctatcaattcattaagtgcagacaatccatgtttctgccaccaaatggggcatattttccctctggtccagttttaacttgagaacaattgaacaaatgtccaatgtgatgtctgatttctcaacattgtctttcccaaatgtaaagaaaatatgtatgatagcgcactaatcatccttctgacagttggatgactgcaatgttc

SEQ ID NO: 45527 - DNA, 1804 bp, Zea Mays
gtcattttggggcattcaaatcgtagagctctgttggggtgaatccagtgatgtgagtaccttttaaactatcatggtatggtttatattctctatcgaaaactcacatttttgtgctattttgcttgatgcttggaagaatctgttgtttggtttatctattgtatacattcatgtgttattctgctagatgcttggaagaagccatctatggaattgtttgaaatgatttgagcatttaatcccttatctttgaatagatgacataattggagaatctgtccatatatctatgcgatgttctgtatttactacaagcaccattataggataatagtgttcttccatagtcccttgcatcggttgggctttaatttcaatagtcttgcatcggttggtatttaatagtcttgcatcggttgggctttttctgaagcgctaatagtgttcttccatagtcccttgtccttatgtcctttgtggaaggtcgaggatattttaggttcaaaccatgtataatttcatttctgccccaattaggtggctacaacttacctgcgtagacaaaatataagtatgtgcaataatatagctagcagagtcgatcttccctatgctatagagcatgtaaattacttataatttgtctaacaaaaactgacccaatcctagaaatagggatggcaaacagtaggactagaattcagctgcaaaatgccagggaccatataagtcaggtaataactaccaggaaagtgaagctatctatttctagctgcacactatatagctgaccagtgcatttctgactttgtatgctttaggatttcctcttcttggacctactgaagcaggtaaaggtgctttttctagaacaacatttcatcttcccatcagtgaggttagttgtcctctaaaaattttagtttttatccctgctatcaaaggtttaacatgccttgttattatgtcataccatgatgaaattaaacccatgataaaattaaaaaccatgtacacggatcatagaaacccactaacagaattatagaaaccacataagcagaatagaaaacggttctctgaaaatgaagaacattattgttgtgttctaaatcaggatttggtgttacaccaggtgttcgacgcgattccttgcattatttttcagttgtaacataccacaagattatgtggttttgggattatttatttctcaggaacagtttattaattagtttcattttattcttatcagcatgctctctctcatgagacattgattagtgtattatgtattctggatgatgtgtgttgtgccataccatgtatttgttctgaagaacaattaattcattagctatttgggctattatgtctagaatatggttgcttagatcttccaacttatagtgtgtttgtagcttctgtagaaatatattcaatgtgtgttcacatatttttagagatttggacaccttacaaaggataaggattacgaggatccaccagactctgcatcggcgtgcccacgcgccagatggccattgaggaacactaccgatgcaggcgccatctttggtagctgaggacaaattaaagtttgccttcctgtgaattttctaccttttccaaatttaaagtcattaagagttcaagattgtgatgatttgtagtactgaattggaggcttttatcccctgcaatttatgtggtacaagtaagggtgttgtgtgagaaggcaaaggagattctaatggaggaaagaaatgttcagctgacattccacgcggccttgcacaag

SEQ ID NO: 45528 - DNA, 740 bp, Zea Mays
ccgaccgtatcgataccattgtcccatccccgccggtgcaggtggctctttaccaacaaccactcccaccccgacccaccgttacatatctccatctcacccgcgcgcccacgcgcctccaccacgccatccatcgcaatggccgccgccgccgcgctcctcctcctcctgtgcgccgcgtctctcgcgtccgcagccgccgacgacgggttgacgaccttcaaggtgtacttccacgacgtcgtggcggggacgaacccgacggcggtgcgcatcgcgcaggcggcgtcctccaacacgtcgtccaccaacttcggcgcggtggtggccatcgacgacccgctgacgacgggtcccacgcgcgccgcgggcacggaggtgggccgcgcccagggcacctacacgttcgcggaccagcagacgttcggcctcctcatggtcatgaacttcgtgttcacggccggcgagcacaacggcagcacgctctccatccttggccgcaacgaggtgctcagcgacgtccgcgagatgagcatcgtcggcggcagcggcaagttccgcatggcgcgcgggtacgtgcaggcgcacaccatcgactccggcgccacctccgggaccaccgtcgtccagtacaccgtcaacgtcaaggcctagctacctgttacgtacccttgcttgcgactccgggccgtggcttctcaaccagcctacacgaagaagacgttgccggcaacagatgg

SEQ ID NO: 45529 - DNA, 1844 bp, Zea Mays
gtaggatcccaatgctatatgctactcgactacatactgctgagtacatcagtactcagatagcccaagtcggaccacactgcttgcacagtagaagatgataggcgatgaactggattccgatgtggttgtacgctacttcagaggcaagagcatcctgatcactggatcaaccggtttcctggggaaagtgctcgtggagaagatactgagggttcagccggacgtgaagaagctcttcctcctcgttcgagccgccgatgacgagtctgccaagcagagggtcgagaccgaggtgacaggaaaggagatctttcaggttctgaaagaaaagcacggtaacgggttcgaaggtttcgtccaagaaaaaatctgccctctgccaggagacgtcatgcacgagaacttgggcctaggcgctgccaaactgagacaagtgtgcaaggaaatagacatcgttgtaaacggagctgcaactacgaatttctacgaaagttctatgcatgcacatgcagatacgatgtggctttcgacacaaatgtcatgggagccaagcacatatgcgagttcgcgaagaggtgcagcaaactcaagatgctgctgcatgtttcaacagcttatgtagctggtgaacaggaaggggtggtgctggagaagccattccgtttgggcgaaaccctgagggaaggcacgcacctggacatcgagtccgaactaaacctgataaaagagacgaggagagaactgaaggccagccgttgttcagaaaaggctgagaggagaagcatgaaggagcttggcctcaagagggcaagggagttcgggtggcccaacacctatgtgttcaccaaggcaatgggggagatgctgctgggcgcccacctccggggagacgtgccggtcgtcatcgtccggcctagtatcataaccagcatcctcaaggagccattgcctggatggatggaagggatcaggacgattgactcgttcatcatcggctacgccaagcaggctctgtccatcttcttagttgacctcgacctgataatggacgtgattcccggggacatggtggtgaacgccatgatggtggccatggcggcgcactcggaggagcgggggcagcagactagcatctaccacctgacgtcgtcggtgcggcacccggcgccctacgccgtcctcgcggagtgcggccgccgctacttcctccacaacccactcaggtccgggggcaagaacagcgagcccgtgcggcctagcaggatgcgcttcttccgcaccctccccgggttccgcgcctacatggccatcaagttcaggcttccccttgagatccttcgcctgctcaacattgtcctgtgcggtgctctctcccggcgccacgacgagctcagccgcaagtacagatacgtcatgcatatcgcagagctgtacgcgccttactccttgttcaaaggatgcttcgatgactccaacacggagaggctgagggcggcgatggcgaacaggagcagcggatatgacttcggtttcgatcccttgtgcgtagactgggacgactatttctacagggttcacatccccggtgttgtcaagtacctgtgtggttactaggttaatacatatttaagatccggagagagccaaatgtatctcgcatgttttaatacacaaatatgtcgctgtagtttgcagattattaatttccctagcattcttgttcagtggtacaggtttctaagaatggtacttgttttcctttaatcttctgccactgaaaggtgtcttactctttacatatgtcaggagcttgcatttggatgcatatatgcaatgcgacc

SEQ ID NO: 45530 - DNA, 1122 bp, Zea Mays
aatttccttagcatcttaaggctaaagatgaaaatggcagactagatgttgcatttttggcctcttcaattggacccagagttgcagcatcatgcgcacatgcagcattatcttttttgactagagacgaggattccagggtgagttcagaaggctcacatgctggtggtctgggcaatggtgcaaattcaaattttcagaaccataatggtgcttcaccatccatttctccaggaaatgttaaatatgctgccatgcttggtctgtcagcagcagcaatgaagtctaagctctttgccgatcaagaagaacgcgaagtgcaaagactaactgctactgtaataaatcatcagttgaagagattggagttgaagctgaagcagtttgcggaagttgagaccttgctcttgaaggaatgtgagcaagtagaaagggttagacacaggatttcagctgaacgcgtcaggatgaggtcagccctattaggtcccaccggaagcggtctaccagggggcagttgtagcactatgccatcaaatccagcaggcatgagccccagaccagtcggtgtgccaggctacatgccacagaccagcatgccagccacatatgccaacaacctgcaggggcatgggaatcctcagatgccgttcttacatcagcggcctcagatgctttcgttcggccctcgcctaccactctcagccatccagactcaaccatcaccacaatcatcaaacatgttcaactctggcatgcccaattcgattgctcctaaccaccatcagttgctgagatcatcctccggaaacaattctagtgcaggataggggaattgtccataagattttttttttctcagcttaggtttgtcaggtgtagcattatgtcatttataaacacatcactgtaattcatttatgtgatgtatgtgtttgtcatataagttttttattaggtcctataaattgtccccatattgctgcgcccttgtgtacctttgttaccaggtcacctcttcccagtgcagggagattcaaatgaacagaatatgttttcatatgtatcccttgagaactcttattgaatatatatgtatgtagttaattcaataagtttgag

SEQ ID NO: 45531 - DNA, 2749 bp, Zea Mays
cccgaacgcccacccctactcgcacgtgcttcccctccttccccatcgactcgttccgacaacgcccgcgtctagtctcgtctcgtctcaccattcgtcactcgcgcgcgccgtcgtccttctccgccgtcgtccccgccgccgacgatgcctcattcgcgcctcaaatggcgcaagcggaagctcaaccccgacgcgtccccgtcgaagccctccatttctaccgcggcggccgaccactcctccgactccgactccgccgccttaaacgacgacgaggacccctccgccctcggcgcgacgggggacggggcaaccgacaacgacgcggacgccgcggcgtccgaggaccccgcggtcgagctccgcgaggcggaggttctgccctcggccgatgccatctctagcttccctgccgccaagcgccgcgtggtcaaccggccgcatgcgtccatcctcgcgctgctcgaggccgaacgatctgcttgttccggcgatgtccctaccgtggcactgccggcgctagagaacatctcgcacgggcagctgcaggtgctgtctggggtgcttccggaccacccatcccttgcgacagaccccgacaagccgtccttgtatgtgtgcacgccgcctcccctcatggagggtcacggggtgcccaagcagttccagggtcgcttccatgtggtgcccaagcactcagattggttctccccagggacagttcataggctggaaaggcaggtagtgccacacttctttacagggaagtctccagggcatactccggagaagtatgtcatgttaaggaataaagttattgctaaatacttagagaacccaagcaagaggcttgcttttgctgagtgccaggggcttgttgggagcacatctgaattgtatgatctgagtaggattgttaggttcttggacacttggggcatcatcaattaccttgcggctgggtctgtgcaccgtggtctgaggatggcaacttcgcttctaagagaggaacctacaggggaactgcaattgcttacagcaccattgaaatcaatcgatggtctaattttgtttgaccggccaaaatgtagcctcccagtggaggacatttctaggatggcagcgacttcatcgaactcggaggctgtggattttgatgctgcattttcagacttggatggaaagattagggagcgtttgtctgagagctcttgcagttattgcttacagcctttgccaagtttacattaccggtcgcaaaaggaggcagatatttttctatgttctgattgcttccatgatgcgagatatatcactggacattcttgcttagatttccaaagagttgatggggataatgatgaatcagaaaatgatagtgataaatggactgatgaagaaacattgttgctgttggaaggcattgagaagtacaatgacaactgggatgacattgcaggtcatgttggaacaaaatcaaaggcacaatgtatctaccattttattcggttgccagtggaagattgtttgctagagaatgttgagatacccaatgcacccattccatttcgaccacaaagcaatggttatcaatgtttagattccaatggcagcacatcaggagctccagttcaaaatatccaacaaggcaatgagcttccgttcataaattcttctaatccggtcatgtcactggttgcatttttggcctcttcaattggacccagagttgcagcatcatgcgcacatgcagcattatcttttttgactagagacgaggattccagggtgagttcagaaggctcacatgctggtggtctgggcaatggtgcaaattcaaattttcagaaccataatggaaatgttaaatatgctgccatgcttggtctgtcagcagcagcaatgaagtctaagctctttgccgatcaagaagaacgcgaagtgcaaagactaactgctactgtaataaatcatcagttgaagagattggagttgaagctgaagcagtttgcggaagttgagaccttgctcttgaaggaatgtgagcaagtagaaagggttagacacaggatttcagctgaacgcgtcaggatgaggtcagccctattaggtcccaccggaagcggtctaccagggggcagttgtagcactatgccatcaaatccagcaggcatgagccccagaccagtcggtgtgccaggctacatgccacagaccagcatgccagccacatatgccaacaacctgcaggggcatgggaatcctcagatgccgttcttacatcagcggcctcagatgctttcgttcggccctcgcctaccactctcagccatccagactcaaccatcaccacaatcatcaaacatgttcaactctggcatgcccaattcgattgctcctaaccaccatcagttgctgagatcatcctccggaaacaattctagtgcaggataggggaattgtccataagattttttttttctcagcttaggtttgtcaggtgtagcattatgtcatttataaacacatcactgtaattcatttatgtgatgtatgtgtttgtcatataagttttttattaggtcctataaattgtccccatattgctgcgcccttgtgtacctttgttaccaggtcacctcttcccagtgcagggagattcaaatgaacagaatatgttttcatatgtatcccttgagaactcttattgaatatatatgtatgtagttaattcaataagtttgag

SEQ ID NO: 45532 - DNA, 2466 bp, Zea Mays
catcgaggccgccccgtccatccgtcgacacgtgtcggagcacccttctataagtaaccccgggtacagctgcgcgatgttccattccaaaagctctcgagacttcctcagcaatcaatcagctttccagcgatcggcagctcctcgatcgtttcgaagctccaatccgcccggccgcctccgcctgttgccactagctaggtgatcgatcgaatggactgcggtggcgcgctgcagctcccgcctgggttccgcttccaccccaccgatgacgagctggtgatgtactatctcctccgcaagtgcggcggcctgccgctcgccgcgccggtcatcgccgaggtggatctctacaagttcgacccatggcagctcccagagaaggcgttcggtggggagaaggagtggtacttcttctcgccgcgcgaccgcaagtacccgaatggctccaggcctaaccgggcggccgggacagggtactggaaggccaccggcgccgacaagccggtagggtcgccgcgccccgtggccatcaagaaggcgctcgtcttctacgccgggaagccgcccaagggcgtcaagaccaactggatcatgcacgagtaccgcctcgcggacgtcgaccgctcggccgccgcacgcaagaagaccaacaacgcgctcagggtaattcactacaccatgacctttctcaggagaacatatttatctccccgaaatactgacacttgcagttagagggaaaaaatatagagagaagtaaaaaaaaaaagattgatgtttgattttaccaatgctgcaacaagaaacagtggatcgaatcgaaatgtgttgttaggcttgcaactatatatgcagattcttagttaagaggaattgaaaaaggataggctctagagacatgtaaagcgcgggcggcgtggcgtcacggctcacgcacgccgcgatagagacaagcgcggcaaccatggtccatggccggcgcagagccgccgcctgatcttatcgcccgcgcacaaattaccacatgcgcggcgcgcaccggatccgacgtcacgtcgacctcatctccaagcctcttccaaacactccaatgcgtactggatgactgggtgctgtgccggatctacaacaagaagggtgttatcgagcggtacgacacagtggacgacgacgacggcgacggcgccgtggccgaagacgtcaagccggtgccggcgccggcggcgtcgaagaacccgcgtgccagtgcccgcgtaggggcagcagcggcggcgccgatgaaggtggagctccccgagtacggcggcggctactacgactacgacgacctggagacgccgtcggcggggatgctgtgcttcgaccgcccgtcggccccggcgcccgcggaccgcgactcaaacaactccgtgccgtggacgacgcaccacacgcacacggacaactccagcagcggctccgagcgcgtgctctcgccgtcgccggacctgcccgaccgcgaccacgccgagagccagcccgccgccgccgccgccgccgccgggtggtggcctgtcggaggcgactggggcagcgccgccgaggacgggttcatggtcgacgtcgacgtcgacgacgggagctcgctgttcgggccgctgtccccggggctgttcgcgcgcgtcgacgccgccgcgttcggcttcggcgacatgctcgcgtcgtacctgcacaaaccgttctgatgcaacgcgacgcgacgcgagcgcggccaccccgcgcctgcgtgctcctctaggccactgaccactgacatggacattctggtcgtcgtgtagctcggttcaggacgaatcgagagccggccggtctaggtgtagtgctgcgaaaccaacaccaccgtgcaggcacactctccgcgggcggcagatcgacggacaatcctgcgcccgtaggtatataccggtcgtcgatcaggtgttcatcagttcttcattcattcaggtcgacgtgcaactggtaattgtacaagatcttgggcagctgccgtatggagatcgatgagtgccgagttagcatggaggacgactggtggtcatggttggtacagagctagctagccgtccgatcgggtatcggattaatctgattgccagttttgtttttttttggtcgcgtcaagtagctgacatcttaagaatgaagcctactggattcagaggcctgttgatggtaatggtatggtgtatgtatatcgtctagtttagtctagcctagctgtacttagaattggttcaggttggtggcaagcagagcgctgtaatttttgttgagtgtttatgcactataattgcaacgtcatgtattagagtcgctctcagcggtcgctttctcgtgatcgaaaattttgcgatgcaaattatcctaataaagttgttgtaagatgtaattacgtatgtgcctcacgctctgctttaatttgct

SEQ ID NO: 45533 - DNA, 2267 bp, Zea Mays
catcgaggccgccccgtccatccgtcgacacgtgtcggagcacccttctataagtaaccccgggtacagctgcgcgatgttccattccaaaagctctcgagacttcctcagcaatcaatcagctttccagcgatcggcagctcctcgatcgtttcgaagctccaatccgcccggccgcctccgcctgttgccactagctaggtgatcgatcgaatggactgcggtggcgcgctgcagctcccgcctgggttccgcttccaccccaccgatgacgagctggtgatgtactatctcctccgcaagtgcggcggcctgccgctcgccgcgccggtcatcgccgaggtggatctctacaagttcgacccatggcagctcccagctggcatggtgatcggtggttgcagagaaggcgttcggtggggagaaggagtggtacttcttctcgccgcgcgaccgcaagtacccgaatggctccaggcctaaccgggcggccgggacagggtactggaaggccaccggcgccgacaagccggtagggtcgccgcgccccgtggccatcaagaaggcgctcgtcttctacgccgggaagccgcccaagggcgtcaagaccaactggatcatgcacgagtaccgcctcgcggacgtcgaccgctcggccgccgcacgcaagaagaccaacaacgcgctcagggctctagagacatgtaaagcgcgggcggcgtggcgtcacggctcacgcacgccgcgatagagacaagcgcggcaaccatggtccatggccggcgcagagccgccgcctgatcttatcgcccgcgcacaaattaccacatgcgcggcgcgcaccggatccgacgtcacgtcgacctcatctccaagcctcttccaaacactccaatgcgtactggatgactgggtgctgtgccggatctacaacaagaagggtgttatcgagcggtacgacacagtggacgacgacgacggcgacggcgccgtggccgaagacgtcaagccggtgccggcgccggcggcgtcgaagaacccgcgtgccagtgcccgcgtaggggcagcagcggcggcgccgatgaaggtggagctccccgagtacggcggcggctactacgactacgacgacctggagacgccgtcggcggggatgctgtgcttcgaccgcccgtcggccccggcgcccgcggaccgcgactcaaacaactccgtgccgtggacgacgcaccacacgcacacggacaactccagcagcggctccgagcgcgtgctctcgccgtcgccggacctgcccgaccgcgaccacgccgagagccagcccgccgccgccgccgccgccgccgggtggtggcctgtcggaggcgactggggcagcgccgccgaggacgggttcatggtcgacgtcgacgtcgacgacgggagctcgctgttcgggccgctgtccccggggctgttcgcgcgcgtcgacgccgccgcgttcggcttcggcgacatgctcgcgtcgtacctgcacaaaccgttctgatgcaacgcgacgcgacgcgagcgcggccaccccgcgcctgcgtgctcctctaggccactgaccactgacatggacattctggtcgtcgtgtagctcggttcaggacgaatcgagagccggccggtctaggtgtagtgctgcgaaaccaacaccaccgtgcaggcacactctccgcgggcggcagatcgacggacaatcctgcgcccgtaggtatataccggtcgtcgatcaggtgttcatcagttcttcattcattcaggtcgacgtgcaactggtaattgtacaagatcttgggcagctgccgtatggagatcgatgagtgccgagttagcatggaggacgactggtggtcatggttggtacagagctagctagccgtccgatcgggtatcggattaatctgattgccagttttgtttttttttggtcgcgtcaagtagctgacatcttaagaatgaagcctactggattcagaggcctgttgatggtaatggtatggtgtatgtatatcgtctagtttagtctagcctagctgtacttagaattggttcaggttggtggcaagcagagcgctgtaatttttgttgagtgtttatgcactataattgcaacgtcatgtattagagtcgctctcagcggtcgctttctcgtgatcgaaaattttgcgatgcaaattatcctaataaagttgttgtaagatgtaattacgtatgtgcctcacgctctgctttaatttgct

SEQ ID NO: 45534 - DNA, 2566 bp, Zea Mays
catcgaggccgccccgtccatccgtcgacacgtgtcggagcacccttctataagtaaccccgggtacagctgcgcgatgttccattccaaaagctctcgagacttcctcagcaatcaatcagctttccagcgatcggcagctcctcgatcgtttcgaagctccaatccgcccggccgcctccgcctgttgccactagctaggtgatcgatcgaatggactgcggtggcgcgctgcagctcccgcctgggttccgcttccaccccaccgatgacgagctggtgatgtactatctcctccgcaagtgcggcggcctgccgctcgccgcgccggtcatcgccgaggtggatctctacaagttcgacccatggcagctcccagctggcatggtgatcggtggttgcagagaaggcgttcggtggggagaaggagtggtacttcttctcgccgcgcgaccgcaagtacccgaatggctccaggcctaaccgggcggccgggacagggtactggaaggccaccggcgccgacaagccggtagggtcgccgcgccccgtggccatcaagaaggcgctcgtcttctacgccgggaagccgcccaagggcgtcaagaccaactggatcatgcacgagtaccgcctcgcggacgtcgaccgctcggccgccgcacgcaagaagaccaacaacgcgctcagggtaattcactacaccatgacctttctcaggagaacatatttatctccccgaaatactgacacttgcagttagagggaaaaaatatagagagaagtaaaaaaaaaaagattgatgtttgattttaccaatgctgcaacaagaaacagtggatcgaatcgaaatgtgttgttaggcttgcaactatatatgcagattcttagttaagaggaattgaaaaaggtaggcgtgcaaattgtccatttgcagcaagctcgatcgagttgtccctttcgtgacagcgcgcggctacttgggcaggataggctctagagacatgtaaagcgcgggcggcgtggcgtcacggctcacgcacgccgcgatagagacaagcgcggcaaccatggtccatggccggcgcagagccgccgcctgatcttatcgcccgcgcacaaattaccacatgcgcggcgcgcaccggatccgacgtcacgtcgacctcatctccaagcctcttccaaacactccaatgcctggatgactgggtgctgtgccggatctacaacaagaagggtgttatcgagcggtacgacacagtggacgacgacgacggcgacggcgccgtggccgaagacgtcaagccggtgccggcgccggcggcgtcgaagaacccgcgtgccagtgcccgcgtaggggcagcagcggcggcgccgatgaaggtggagctccccgagtacggcggcggctactacgactacgacgacctggagacgccgtcggcggggatgctgtgcttcgaccgcccgtcggccccggcgcccgcggaccgcgactcaaacaactccgtgccgtggacgacgcaccacacgcacacggacaactccagcagcggctccgagcgcgtgctctcgccgtcgccggacctgcccgaccgcgaccacgccgagagccagcccgccgccgccgccgccgccgccgggtggtggcctgtcggaggcgactggggcagcgccgccgaggacgggttcatggtcgacgtcgacgtcgacgacgggagctcgctgttcgggccgctgtccccggggctgttcgcgcgcgtcgacgccgccgcgttcggcttcggcgacatgctcgcgtcgtacctgcacaaaccgttctgatgcaacgcgacgcgacgcgagcgcggccaccccgcgcctgcgtgctcctctaggccactgaccactgacatggacattctggtcgtcgtgtagctcggttcaggacgaatcgagagccggccggtctaggtgtagtgctgcgaaaccaacaccaccgtgcaggcacactctccgcgggcggcagatcgacggacaatcctgcgcccgtaggtatataccggtcgtcgatcaggtgttcatcagttcttcattcattcaggtcgacgtgcaactggtaattgtacaagatcttgggcagctgccgtatggagatcgatgagtgccgagttagcatggaggacgactggtggtcatggttggtacagagctagctagccgtccgatcgggtatcggattaatctgattgccagttttgtttttttttggtcgcgtcaagtagctgacatcttaagaatgaagcctactggattcagaggcctgttgatggtaatggtatggtgtatgtatatcgtctagtttagtctagcctagctgtacttagaattggttcaggttggtggcaagcagagcgctgtaatttttgttgagtgtttatgcactataattgcaacgtcatgtattagagtcgctctcagcggtcgctttctcgtgatcgaaaattttgcgatgcaaattatcctaataaagttgttgtaagatgtaattacgtatgtgcctcacgctctgctttaatttgct

SEQ ID NO: 45535 - DNA, 2266 bp, Zea Mays
ccaagttgcacgtgcgtcacatcgaggccgccccgtccatccgtcgacacgtgtcggagcacccttctataagtaaccccgggtacagctgcgcgatgttccattccaaaagctctcgagacttcctcagcaatcaatcagctttccagcgatcggcagctcctcgatcgtttcgaagctccaatccgcccggccgcctccgcctgttgccactagctaggtgatcgatcgaatggactgcggtggcgcgctgcagctcccgcctgggttccgcttccaccccaccgatgacgagctggtgatgtactatctcctccgcaagtgcggcggcctgccgctcgccgcgccggtcatcgccgaggtggatctctacaagttcgacccatggcagctcccagagaaggcgttcggtggggagaaggagtggtacttcttctcgccgcgcgaccgcaagtacccgaatggctccaggcctaaccgggcggccgggacagggtactggaaggccaccggcgccgacaagccggtagggtcgccgcgccccgtggccatcaagaaggcgctcgtcttctacgccgggaagccgcccaagggcgtcaagaccaactggatcatgcacgagtaccgcctcgcggacgtcgaccgctcggccgccgcacgcaagaagaccaacaacgcgctcagggataggctctagagacatgtaaagcgcgggcggcgtggcgtcacggctcacgcacgccgcgatagagacaagcgcggcaaccatggtccatggccggcgcagagccgccgcctgatcttatcgcccgcgcacaaattaccacatgcgcggcgcgcaccggatccgacgtcacgtcgacctcatctccaagcctcttccaaacactccaatgcgtactggatgactgggtgctgtgccggatctacaacaagaagggtgttatcgagcggtacgacacagtggacgacgacgacggcgacggcgccgtggccgaagacgtcaagccggtgccggcgccggcggcgtcgaagaacccgcgtgccagtgcccgcgtaggggcagcagcggcggcgccgatgaaggtggagctccccgagtacggcggcggctactacgactacgacgacctggagacgccgtcggcggggatgctgtgcttcgaccgcccgtcggccccggcgcccgcggaccgcgactcaaacaactccgtgccgtggacgacgcaccacacgcacacggacaactccagcagcggctccgagcgcgtgctctcgccgtcgccggacctgcccgaccgcgaccacgccgagagccagcccgccgccgccgccgccgccgccgggtggtggcctgtcggaggcgactggggcagcgccgccgaggacgggttcatggtcgacgtcgacgtcgacgacgggagctcgctgttcgggccgctgtccccggggctgttcgcgcgcgtcgacgccgccgcgttcggcttcggcgacatgctcgcgtcgtacctgcacaaaccgttctgatgcaacgcgacgcgacgcgagcgcggccaccccgcgcctgcgtgctcctctaggccactgaccactgacatggacattctggtcgtcgtgtagctcggttcaggacgaatcgagagccggccggtctaggtgtagtgctgcgaaaccaacaccaccgtgcaggcacactctccgcgggcggcagatcgacggacaatcctgcgcccgtaggtatataccggtcgtcgatcaggtgttcatcagttcttcattcattcaggtcgacgtgcaactggtaattgtacaagatcttgggcagctgccgtatggagatcgatgagtgccgagttagcatggaggacgactggtggtcatggttggtacagagctagctagccgtccgatcgggtatcggattaatctgattgccagttttgtttttttttggtcgcgtcaagtagctgacatcttaagaatgaagcctactggattcagaggcctgttgatggtaatggtatggtgtatgtatatcgtctagtttagtctagcctagctgtacttagaattggttcaggttggtggcaagcagagcgctgtaatttttgttgagtgtttatgcactataattgcaacgtcatgtattagagtcgctctcagcggtcgctttctcgtgatcgaaaattttgcgatgcaaattatcctaataaagttgttgtaagatgtaattacgtatgtgcctcacgctctgctttaatttgct

SEQ ID NO: 45536 - DNA, 2483 bp, Zea Mays
cccaagttgcacgtgcgtcacatcgaggccgccccgtccatccgtcgacacgtgtcggagcacccttctataagtaaccccgggtacagctgcgcgatgttccattccaaaagctctcgagacttcctcagcaatcaatcagctttccagcgatcggcagctcctcgatcgtttcgaagctccaatccgcccggccgcctccgcctgttgccactagctaggtgatcgatcgaatggactgcggtggcgcgctgcagctcccgcctgggttccgcttccaccccaccgatgacgagctggtgatgtactatctcctccgcaagtgcggcggcctgccgctcgccgcgccggtcatcgccgaggtggatctctacaagttcgacccatggcagctcccagagaaggcgttcggtggggagaaggagtggtacttcttctcgccgcgcgaccgcaagtacccgaatggctccaggcctaaccgggcggccgggacagggtactggaaggccaccggcgccgacaagccggtagggtcgccgcgccccgtggccatcaagaaggcgctcgtcttctacgccgggaagccgcccaagggcgtcaagaccaactggatcatgcacgagtaccgcctcgcggacgtcgaccgctcggccgccgcacgcaagaagaccaacaacgcgctcagggtaattcactacaccatgacctttctcaggagaacatatttatctccccgaaatactgacacttgcagttagagggaaaaaatatagagagaagtaaaaaaaaaaagattgatgtttgattttaccaatgctgcaacaagaaacagtggatcgaatcgaaatgtgttgttaggcttgcaactatatatgcagattcttagttaagaggaattgaaaaaggataggctctagagacatgtaaagcgcgggcggcgtggcgtcacggctcacgcacgccgcgatagagacaagcgcggcaaccatggtccatggccggcgcagagccgccgcctgatcttatcgcccgcgcacaaattaccacatgcgcggcgcgcaccggatccgacgtcacgtcgacctcatctccaagcctcttccaaacactccaatgcctggatgactgggtgctgtgccggatctacaacaagaagggtgttatcgagcggtacgacacagtggacgacgacgacggcgacggcgccgtggccgaagacgtcaagccggtgccggcgccggcggcgtcgaagaacccgcgtgccagtgcccgcgtaggggcagcagcggcggcgccgatgaaggtggagctccccgagtacggcggcggctactacgactacgacgacctggagacgccgtcggcggggatgctgtgcttcgaccgcccgtcggccccggcgcccgcggaccgcgactcaaacaactccgtgccgtggacgacgcaccacacgcacacggacaactccagcagcggctccgagcgcgtgctctcgccgtcgccggacctgcccgaccgcgaccacgccgagagccagcccgccgccgccgccgccgccgccgggtggtggcctgtcggaggcgactggggcagcgccgccgaggacgggttcatggtcgacgtcgacgtcgacgacgggagctcgctgttcgggccgctgtccccggggctgttcgcgcgcgtcgacgccgccgcgttcggcttcggcgacatgctcgcgtcgtacctgcacaaaccgttctgatgcaacgcgacgcgacgcgagcgcggccaccccgcgcctgcgtgctcctctaggccactgaccactgacatggacattctggtcgtcgtgtagctcggttcaggacgaatcgagagccggccggtctaggtgtagtgctgcgaaaccaacaccaccgtgcaggcacactctccgcgggcggcagatcgacggacaatcctgcgcccgtaggtatataccggtcgtcgatcaggtgttcatcagttcttcattcattcaggtcgacgtgcaactggtaattgtacaagatcttgggcagctgccgtatggagatcgatgagtgccgagttagcatggaggacgactggtggtcatggttggtacagagctagctagccgtccgatcgggtatcggattaatctgattgccagttttgtttttttttggtcgcgtcaagtagctgacatcttaagaatgaagcctactggattcagaggcctgttgatggtaatggtatggtgtatgtatatcgtctagtttagtctagcctagctgtacttagaattggttcaggttggtggcaagcagagcgctgtaatttttgttgagtgtttatgcactataattgcaacgtcatgtattagagtcgctctcagcggtcgctttctcgtgatcgaaaattttgcgatgcaaattatcctaataaagttgttgtaagatgtaattacgtatgtgcctcacgctctgctttaatttgct

SEQ ID NO: 45537 - DNA, 1870 bp, Zea Mays
cttcatccaccttctagcttgttccttatcctccatgtttgtggaaatttcttgaagctgccatctcctttatctctttccttcacccacgtattcttttctcttagttattcttccagcagcagttcgcccaaatccattgccgctcctgcccccaacggcgcatgccttcatctcctcagccatggagctcacgagcacctccctctgcgcaccccctccgcgcgtccctgctccctcgtcaccaggtgcacgtgcgcagcttcctgcgcgccgggatggccctctagccccagctcgcccctgccctcagccatggcgcctggccgccgccgcccctgctttccatggcagcacttcctgcttcctggtggtcggcgccctccccaacatctctgctggtggttgtctccatcccctccatggcgagctcgcccctgcattcctgctcgcccaagatccccttccctgttccagccacctcctatggacgccagccctcacctcatagtcgcccagccccctctctgctggtggccggccacctctgctgcttccatggtgtggcacttagggtatttaagatagagtggaatatttcagcacatcacacaccaggtgttcggtgaaaggtccaagccaaaagtcgtcgtcgtttcagaatatatcgagtcaattcgactttgtgccgctggaccacatacaattgttgatggtaaagaagttgtgaactttgcatcagcaaactacctcggtttaattggcaacgaaaagattattgaatcttgcatcagttcattggagaaattggtgttggttcttgtggtccacgtggtttttatggaacaattgatgtccatcttgattgtgagtcaaagatagctaaatttttggggaccccagactccattctttattcatatgggatttctacaatattcagtgtgatacctgccttctataagaaaggagatatcatagtcacgtaagttcaccgcattaaaaaattatgaaattcacaagtattattggaaccttgacttgtttggtgtatcgaggtctgcatgcttggccttttagacataatatggatttatccagctcagctttaggctttagcacaacattgtcatctctttcttgtgtctattgatgagttgttattcctctatcagttaattgtacatgggtagttttttctattatttttcttctcttgactgttcccttgctaaatttgtgccaatatttgatgtgattgcagtgatgagggtgttcactgggcagtgcaaaatggtctccatctatcaagaagcattgtggtgtacttcaagcacaatgatatggcttcacttgcaagcactttggaaaaacttactcgtggaaataaacgtgctgaaaagattagacgctacattgttgtagaatccatttaccagaattctggccaaattgcccccttggatgagattgtcaggttgaaggagaaatattgattccatgttattctggaggagagtcatttttttggggtgcttggcaagtctgggtgtggtcttgctgaacattatggagttcatctcccaaacgaggcctaactgtttggtgaaatgcttgggacaaactagccagtaagaatggagtcatggaacatcggcaggagggttgtggcagcggcaaccgatgtatcctatggacagtctggttttgacatgatgcaaatcaatctgctgtacactgtatttcgcacttgcatagattgtttggctaattgcaagattatctcagtgttttcgtttggatttagagtacacttatgtatgaaatattcattggtactcatctatattatattaattatattattatt

SEQ ID NO: 45538 - DNA, 1458 bp, Zea Mays
cttcatccaccttctagcttgttccttatcctccatgtttgtggaaatttcttgaagctgccatctcctttatctctttccttcacccacgtattcttttctcttagttattcttccagcagcagttcgcccaaatccattgccgctcctgcccccaacggcgcatgccttcatctcctcagccatggagctcacgagcacctccctctgcgcaccccctccgcgcgtccctgctccctcgtcaccaggtgcacgtgcgcagcttcctgcgcgccgggatggccctctagccccagctcgcccctgccctcagccatggcgcctggccgccgccgcccctgctttccatggcagcacttcctgcttcctggtggtcggcgccctccccaacatctctgctggtggttgtctccatcccctccatggcgagctcgcccctgcattcctgctcgcccaagatccccttccctgttccagccacctcctatggacgccagccctcacctcatagtcgcccagccccctctctgctggtggccggccacctctgctgcttccatggtgtggcacttagggtatttaagatagagtggaatatttcagcacatcacacaccaggtgttcggtgaaaggtccaagccaaaagtcgtcgtcgtttcagaatatatcgagtcaattcgactttgtgccgctggaccacatacaattgttgatggtaaagaagttgtgaactttgcatcagcaaactacctcggtttaattggcaacgaaaagattattgaatcttgcatcagttcattggagaaattggtgttggttcttgtggtccacgtggtttttatggaacaattgtgatgagggtgttcactgggcagtgcaaaatggtctccatctatcaagaagcattgtggtgtacttcaagcacaatgatatggcttcacttgcaagcactttggaaaaacttactcgtggaaataaacgtgctgaaaagattagacgctacattgttgtagaatccatttaccagaattctggccaaattgcccccttggatgagattgtcaggttgaaggagaaatattgattccatgttattctggaggagagtcatttttttggggtgcttggcaagtctgggtgtggtcttgctgaacattatggagttcatctcccaaacgaggcctaactgtttggtgaaatgcttgggacaaactagccagtaagaatggagtcatggaacatcggcaggagggttgtggcagcggcaaccgatgtatcctatggacagtctggttttgacatgatgcaaatcaatctgctgtacactgtatttcgcacttgcatagattgtttggctaattgcaagattatctcagtgttttcgtttggatttagagtacacttatgtatgaaatattcattggtactcatctatattatattaattatattattatt

SEQ ID NO: 45539 - DNA, 1674 bp, Zea Mays
cttcatccaccttctagcttgttccttatcctccatgtttgtggaaatttcttgaagctgccatctcctttatctctttccttcacccacgtattcttttctcttagttattcttccagcagcagttcgcccaaatccattgccgctcctgcccccaacggcgcatgccttcatctcctcagccatggagctcacgagcacctccctctgcgcaccccctccgcgcgtccctgctccctcgtcaccaggtgcacgtgcgcagcttcctgcgcgccgggatggccctctagccccagctcgcccctgccctcagccatggcgcctggccgccgccgcccctgctttccatggcagcacttcctgcttcctggtggtcggcgccctccccaacatctctgctggtggttgtctccatcccctccatggcgagctcgcccctgcattcctgctcgcccaagatccccttccctgttccagccacctcctatggacgccagccctcacctcatagtcgcccagccccctctctgctggtggccggccacctctgctgcttccatggtgtggcacttagggtatttaagatagagtggaatatttcagcacatcacacaccaggtgttcggtgaaaggtccaagccaaaagtcgtcgtcgtttcagaatatatcgagtcaattcgactttgtgccgctggaccacatacaattgttgatggtaaagaagttgtgaactttgcatcagcaaactacctcggtttaattggcaacgaaaagattattgaatcttgcatcagttcattggagaaattggtgttggttcttgtggtccacgtggtttttatggaacaattgatgtccatcttgattgtgagtcaaagatagctaaatttttggggaccccagactccattctttattcatatgggatttctacaatattcagtgtgatacctgccttctataagaaaggagatatcatagtcactgatgagggtgttcactgggcagtgcaaaatggtctccatctatcaagaagcattgtggtgtacttcaagcacaatgatatggcttcacttgcaagcactttggaaaaacttactcgtggaaataaacgtgctgaaaagattagacgctacattgttgtagaatccatttaccagaattctggccaaattgcccccttggatgagattgtcaggttgaaggagaaatattgattccatgttattctggaggagagtcatttttttggggtgcttggcaagtctgggtgtggtcttgctgaacattatggagttcatgtgagtgtttggcctcagcttttcttaatgtttcaccgtaatgctccacctgtggtgtctgaccggggtgcgctgttacctagctcccaaacgaggcctaactgtttggtgaaatgcttgggacaaactagccagtaagaatggagtcatggaacatcggcaggagggttgtggcagcggcaaccgatgtatcctatggacagtctggttttgacatgatgcaaatcaatctgctgtacactgtatttcgcacttgcatagattgtttggctaattgcaagattatctcagtgttttcgtttggatttagagtacacttatgtatgaaatattcattggtactcatctatattatattaattatattattatt

SEQ ID NO: 45540 - DNA, 3191 bp, Zea Mays
atcctggaaaggggcataacaattgaaggccttggttcaaagagttttctgacatatgaaagcaacattctttttgcccttcgtttcatgattgattgcaatattgttggtggcaactggattgagcttcctgctgggaaatacaggaaagcagcctgtatcatgtcctattgtcagctagagctagattgcttatactcagatctggtaagccatgcggctgaaggagaatattctaagatggccccgtttcgcatattaagttttgatattgaatgtgctggtcgcaaaggtcatttcccagaaccaactcatgatcctgttattcaggttgagttcattattcatgtatctgatactcgttaccatttagtttcaatacagatagctaatttggttacacatcaaggagaagaccaaccttttgtacggaatgtcatgactcttaaatcctgctctcccattgtgggagtcgaggttatgtcatttgatgcagagagagatattctacttgcatggagggatttcatacgtgaagtggatcctgatatcataattggatacaacatttgcaaatttgacatgccctatcttattgagagggctgaggttctcaagatagcggagtttccaatacttggccgaatcagaaatagtcgtgttcgtgtccgtgatacgaccttttcctcgaggcaatatggtgtgcgtgaaagtaaggatgttactattgaaggaagagtgcaatttgatctcctgcaggctatgcaacgggattacaagttgagttcttattcattaaactctgtatcagcacactttcttggggagcaaaaagaagatgttcatcattcaattatatctgatcttcaaaatggaaacccagagacacgaaggcgacttgcagtttattgcttgaaggatgcttatcttcctcaaagactgttagataaattgatgtatatctataattatgtggaaatggcgagggtcactggtgttcccatttcgtttctactttcgaggggacaaagtattaaggtcctctcgcaactactcaggaaagcaaaacagaaaaaccttgttataccaaatataaagggtcaagggtctgggcaagatacctttgaaggtgcaactgttttggaggcaagggctggattttatgagaagcccatcgcaactttggactttgcttctttgtatccatccatcatgatggcatataacctttgctactgtactttggcccgtaaactcaacttacctccagaattcgtcaataaaaccccatctggtgaaatatttgtaaaaccagaactacagaagggtatacttcctgagatccttgaagaactattagcagctcggaaaagggcaaaagcagatttaaaggaagcgaaggacccactcgaaagggctgttcttgatggtcgtcaacttgcactgaaaataagtgcaaactcagtttatggtttcactggagcaactgttggtcagttaccttgcttagagatttcttcaagtgtgaccagctatggacgacagatgattgaacatacaaaaaagcttgttgaagataaattcacaacagtaggaggttatgagcatactgcagaggtaatttatggggacactgattctgtgatggtacagtttggtgtttctacagttgaagatgcaatgaagttaggaagagaagctgcagattatattagtggaacctttaccaagcccatcaaactggagtttgagaaggtctattttccttaccttctaatcagcaagaagagatatgctggtttgtactggacgaatcctgagaaatttgacaaaatggatgcaaaaggtattgaaactgtaagaagggacaactgtttactggtaaagaacctggtaaccgagtgccttcataaaatactggtagaccgtgatgttcctggtgcagtccaatatgtcaagaacaccatatctgatctattaatgaatcgtgtggacttgtctcttcttgttataacaaagggtttgacaaaaacgggagaagattatgcggtaaaagctgctcatgtggagcttgctgagaggatgcgaaagagagatccagctactgcacctactgttggtgaccgtgttccttatgtaataattaaagcagcaaaaggggcaaaggcatatgagaaatcagaagatccgatttatgttttggacaataatatacccattgatcctcaatactaccttgagaaccaaattagcaagccacttttgaggatctttgagccaattctgaagaatgccagcaaagagttgcttcatggaagccacaccagatctgtttcaatctcaactccttccaatagcgggataatgaaatttgcaaagaaacaattaacttgccttgggtgcaaagctgttatcagtggtgccagtcagacactttgctcacattgcaagggaagagaagcagagttgtactgcaaaacagtagcaaatgtttctgacctggagatgctctttgggaggctatggacacaatgccaggagtgccaaggatctctgcaccaggacgttctctgcacaagtcgggattgccccattttctatcggcgaaggaaggcacagaaggatatgaccgaagctaggctgcagcttgatcggtgggacttctgagcttggaaattctcacatggctgcctgcgtctgcttatattgctgtggaagacaggaagctaccgtcgaccgcatcataatgcatgtgaagatgagactggacttctgcgagcatccagtcacacttgcgtccgtgtcacgtagactgacttgccagtacgattcattagcatgttttctgcttaggttttgcgtaatagtttaggtgtgagttggtacttggtagatggtaggtgtcaccttcctgtggctagtgccgagaaaaatgcttggtcctgagatgaggtgctgattatgtacagggcagaagcaatctggagcagttattatgtaacagagtgagacgagacaatttgaatggcacatgagttctctatctgtctgaattctaatgctgtccgcagcgctcgccgcctctcctagtggataggtttactttggctatgtgttttacctttctagcttagttatagactagtggatagatttagaacctaggttgcatgactgttcacgatagagat

SEQ ID NO: 45541 - DNA, 3918 bp, Zea Mays
atggcgggaactccccagtttcagtccccgcacttcccgcctccctctccccctctcggtcccaccttcgtccctccggcgatgaactcaggcggacgcggcggcaagcggcggggtcccccgcccctcgctccctccggtgcggcggcgaagagggtcaatcccagccccggcacgccgcatgtgcctcctcccgcgtcggcggcggccgccgtggaggaggacatgatggacgaggacgtgttcctggatgagtccatcctggcggaggacgaggcggcgctgctgatgctccagcgcgacgaggcactcgcgtcccgcctcgcgcggtggaagcgccccgcaatacccaccgacctcgccgccggatgctcccgcactgtcgcttttcagcagttggaaatagattatgttattggtgagagccacaaagaattactccccagctcatctggttcagcagccatactcaggatttttggtgtcaccagagaaggccacagcttatgctgtcaggtgcatggatttgagccatatttctatattggctgtccttcagggatgggtcctgatgatatatcacgctttcatcaaacactagaggggaggatgaaggagtcaaatagaagcagcaatgttccaaggttcgtgaagagagttgagcttgtgcagaagcagacaattatgcattaccaaacacaacaatctcaacctttcctcaagatagtagtcgctctgcctaccatggttgctagctgtcgtggtatcctggaaaggggcataacaattgaaggccttggttcaaagagttttctgacatatgaaagcaacattctttttgcccttcgtttcatgattgattgcaatattgttggtggcaactggattgagcttcctgctgggaaatacaggaaagcagcctgtatcatgtcctattgtcagctagagctagattgcttatactcagatctggtaagccatgcggctgaaggagaatattctaagatggccccgtttcgcatattaagttttgatattgaatgtgctggtcgcaaaggtcatttcccagaaccaactcatgatcctgttattcagatagctaatttggttacacatcaaggagaagaccaaccttttgtacggaatgtcatgactcttaaatcctgctctcccattgtgggagtcgaggttatgtcatttgatgcagagagagatattctacttgcatggagggatttcatacgtgaagtggatcctgatatcataattggatacaacatttgcaaatttgacatgccctatcttattgagagggctgaggttctcaagatagcggagtttccaatacttggccgaatcagaaatagtcgtgttcgtgtccgtgatacgaccttttcctcgaggcaatatggtgtgcgtgaaagtaaggatgttactattgaaggaagagtgcaatttgatctcctgcaggctatgcaacgggattacaagttgagttcttattcattaaactctgtatcagcacactttcttggggagcaaaaagaagatgttcatcattcaattatatctgatcttcaaaatggaaacccagagacacgaaggcgacttgcagtttattgcttgaagggatgcttatcttcctcaaagactgttagataaattgatgtatatctataattatgtggaaatggcgagggtcactggtgttcccatttcgtttctactttcgaggggacaaagtattaaggtcctctcgcaactactcaggaaagcaaaacagaaaaaccttgttataccaaatataaagggtcaagggtctgggcaagatacctttgaaggtgcaactgttttggaggcaagggctggattttatgagaagcccatcgcaactttggactttgcttctttgtatccatccatcatgatggcatataacctttgctactgtactttggtgccccctgaggaggcccgtaaactcaacttacctccagaattcgtcaataaaaccccatctggtgaaatatttgtaaaaccagaactacagaagggtatacttcctgagatccttgaagaactattagcagctcggaaaagggcaaaagcagatttaaaggaagcgaaggacccactcgaaagggctgttcttgatggtcgtcaacttgcactgaaaataagtgcaaactcagtttatggtttcactggagcaactgttggtcagttaccttgcttagagatttcttcaagtgtgaccagctatggacgacagatgattgaacatacaaaaaagcttgttgaagataaattcacaacagtaggaggttatgagcatactgcagaggtaatttatggggacactgattctgtgatggtacagtttggtgtttctacagttgaagatgcaatgaagttaggaagagaagctgcagattatattagtggaacctttaccaagcccatcaaactggagtttgagaaggtctattttccttaccttctaatcagcaagaagagatatgctggtttgtactggacgaatcctgagaaatttgacaaaatggatgcaaaaggtattgaaactgtaagaagggacaactgtttactggtaaagaacctggtaaccgagtgccttcataaaatactggtagaccgtgatgttcctggtgcagtccaatatgtcaagaacaccatatctgatctattaatgaatcgtgtggacttgtctcttcttgttataacaaagggtttgacaaaaacgggagaagattatgcggtaaaagctgctcatgtggagcttgctgagaggatgcgaaagagagatccagctactgcacctactgttggtgaccgtgttccttatgtaataattaaagcagcaaaaggggcaaaggcatatgagaaatcagaagatccgatttatgttttggacaataatatacccattgatcctcaatactaccttgagaaccaaattagcaagccacttttgaggatctttgagccaattctgaagaatgccagcaaagagttgcttcatggaagccacaccagatctgtttcaatctcaactccttccaatagcgggataatgaaatttgcaaagaaacaattaacttgccttgggtgcaaagctgttatcagtggtgccagtcagacactttgctcacattgcaagggaagagaagcagagttgtactgcaaaacagtagcaaatgtttctgacctggagatgctctttgggaggctatggacacaatgccaggagtgccaaggatctctgcaccaggacgttctctgcacaagtcgggattgccccattttctatcggcgaaggaaggcacagaaggatatgaccgaagctaggctgcagcttgatcggtgggacttctgagcttggaaattctcacatggctgcctgcgtctgcttatattgctgtggaagacaggaagctaccgtcgaccgcatcataatgcatgtgaagatgagactggacttctgcgagcatccagtcacacttgcgtccgtgtcacgtagactgacttgccagtacgattcattagcatgttttctgcttaggttttgcgtaatagtttaggtgtgagttggtacttggtagatggtaggtgtcaccttcctgtggctagtgccgagaaaaatgcttggtcctgagatgaggtgctgattatgtacagggcagaagcaatctggagcagttattatgtaacagagtgagacgagacaatttgaatggcacatgagttctctatctgtctgaattctaatgctgtccgcagcgctcgccgcctctcctagtggataggtttactttggctatgtgttttacctttctagcttagttatagactagtggatagatttagaacctaggttgcatgactgttcacgatagagat

SEQ ID NO: 45542 - DNA, 3971 bp, Zea Mays
atggcgggaactccccagtttcagtccccgcacttcccgcctccctctccccctctcggtcccaccttcgtccctccggcgatgaactcaggcggacgcggcggcaagcggcggggtcccccgcccctcgctccctccggtgcggcggcgaagagggtcaatcccagccccggcacgccgcatgtgcctcctcccgcgtcggcggcggccgccgtggaggaggacatgatggacgaggacgtgttcctggatgagtccatcctggcggaggacgaggcggcgctgctgatgctccagcgcgacgaggcactcgcgtcccgcctcgcgcggtggaagcgccccgcaatacccaccgacctcgccgccggatgctcccgcactgtcgcttttcagcagttggaaatagattatgttattggtgagagccacaaagaattactccccagctcatctggttcagcagccatactcaggatttttggtgtcaccagagaaggccacagcttatgctgtcaggtgcatggatttgagccatatttctatattggctgtccttcagggatgggtcctgatgatatatcacgctttcatcaaacactagaggggaggatgaaggagtcaaatagaagcagcaatgttccaaggttcgtgaagagagttgagcttgtgcagaagcagacaattatgcattaccaaacacaacaatctcaacctttcctcaagatagtagtcgctctgcctaccatggttgctagctgtcgtggtatcctggaaaggggcataacaattgaaggccttggttcaaagagttttctgacatatgaaagcaacattctttttgcccttcgtttcatgattgattgcaatattgttggtggcaactggattgagcttcctgctgggaaatacaggaaagcagcctgtatcatgtcctattgtcagctagagctagattgcttatactcagatctggtaagccatgcggctgaaggagaatattctaagatggccccgtttcgcatattaagttttgatattgaatgtgctggtcgcaaaggtcatttcccagaaccaactcatgatcctgttattcaggttgagttcattattcatgtatctgatactcgttaccatttagtttcaatacagatagctaatttggttacacatcaaggagaagaccaaccttttgtacggaatgtcatgactcttaaatcctgctctcccattgtgggagtcgaggttatgtcatttgatgcagagagagatattctacttgcatggagggatttcatacgtgaagtggatcctgatatcataattggatacaacatttgcaaatttgacatgccctatcttattgagagggctgaggttctcaagatagcggagtttccaatacttggccgaatcagaaatagtcgtgttcgtgtccgtgatacgaccttttcctcgaggcaatatggtgtgcgtgaaagtaaggatgttactattgaaggaagagtgcaatttgatctcctgcaggctatgcaacgggattacaagttgagttcttattcattaaactctgtatcagcacactttcttggggagcaaaaagaagatgttcatcattcaattatatctgatcttcaaaatggaaacccagagacacgaaggcgacttgcagtttattgcttgaaggatgcttatcttcctcaaagactgttagataaattgatgtatatctataattatgtggaaatggcgagggtcactggtgttcccatttcgtttctactttcgaggggacaaagtattaaggtcctctcgcaactactcaggaaagcaaaacagaaaaaccttgttataccaaatataaagggtcaagggtctgggcaagatacctttgaaggtgcaactgttttggaggcaagggctggattttatgagaagcccatcgcaactttggactttgcttctttgtatccatccatcatgatggcatataacctttgctactgtactttggtgccccctgaggaggcccgtaaactcaacttacctccagaattcgtcaataaaaccccatctggtgaaatatttgtaaaaccagaactacagaagggtatacttcctgagatccttgaagaactattagcagctcggaaaagggcaaaagcagatttaaaggaagcgaaggacccactcgaaagggctgttcttgatggtcgtcaacttgcactgaaaataagtgcaaactcagtttatggtttcactggagcaactgttggtcagttaccttgcttagagatttcttcaagtgtgaccagctatggacgacagatgattgaacatacaaaaaagcttgttgaagataaattcacaacagtaggaggttatgagcatactgcagaggtaatttatggggacactgattctgtgatggtacagtttggtgtttctacagttgaagatgcaatgaagttaggaagagaagctgcagattatattagtggaacctttaccaagcccatcaaactggagtttgagaaggtctattttccttaccttctaatcagcaagaagagatatgctggtttgtactggacgaatcctgagaaatttgacaaaatggatgcaaaaggtattgaaactgtaagaagggacaactgtttactggtaaagaacctggtaaccgagtgccttcataaaatactggtagaccgtgatgttcctggtgcagtccaatatgtcaagaacaccatatctgatctattaatgaatcgtgtggacttgtctcttcttgttataacaaagggtttgacaaaaacgggagaagattatgcggtaaaagctgctcatgtggagcttgctgagaggatgcgaaagagagatccagctactgcacctactgttggtgaccgtgttccttatgtaataattaaagcagcaaaaggggcaaaggcatatgagaaatcagaagatccgatttatgttttggacaataatatacccattgatcctcaatactaccttgagaaccaaattagcaagccacttttgaggatctttgagccaattctgaagaatgccagcaaagagttgcttcatggaagccacaccagatctgtttcaatctcaactccttccaatagcgggataatgaaatttgcaaagaaacaattaacttgccttgggtgcaaagctgttatcagtggtgccagtcagacactttgctcacattgcaagggaagagaagcagagttgtactgcaaaacagtagcaaatgtttctgacctggagatgctctttgggaggctatggacacaatgccaggagtgccaaggatctctgcaccaggacgttctctgcacaagtcgggattgccccattttctatcggcgaaggaaggcacagaaggatatgaccgaagctaggctgcagcttgatcggtgggacttctgagcttggaaattctcacatggctgcctgcgtctgcttatattgctgtggaagacaggaagctaccgtcgaccgcatcataatgcatgtgaagatgagactggacttctgcgagcatccagtcacacttgcgtccgtgtcacgtagactgacttgccagtacgattcattagcatgttttctgcttaggttttgcgtaatagtttaggtgtgagttggtacttggtagatggtaggtgtcaccttcctgtggctagtgccgagaaaaatgcttggtcctgagatgaggtgctgattatgtacagggcagaagcaatctggagcagttattatgtaacagagtgagacgagacaatttgaatggcacatgagttctctatctgtctgaattctaatgctgtccgcagcgctcgccgcctctcctagtggataggtttactttggctatgtgttttacctttctagcttagttatagactagtggatagatttagaacctaggttgcatgactgttcacgatagagat

SEQ ID NO: 45543 - DNA, 3905 bp, Zea Mays
atggcgggaactccccagtttcagtccccgcacttcccgcctccctctccccctctcggtcccaccttcgtccctccggcgatgaactcaggcggacgcggcggcaagcggcggggtcccccgcccctcgctccctccggtgcggcggcgaagagggtcaatcccagccccggcacgccgcatgtgcctcctcccgcgtcggcggcggccgccgtggaggaggacatgatggacgaggacgtgttcctggatgagtccatcctggcggaggacgaggcggcgctgctgatgctccagcgcgacgaggcactcgcgtcccgcctcgcgcggtggaagcgccccgcaatacccaccgacctcgccgccggatgctcccgcactgtcgcttttcagcagttggaaatagattatgttattggtgagagccacaaagaattactccccagctcatctggttcagcagccatactcaggatttttggtgtcaccagagaaggccacagcttatgctgtcaggtgcatggatttgagccatatttctatattggctgtccttcagggatgggtcctgatgatatatcacgctttcatcaaacactagaggggaggatgaaggagtcaaatagaagcagcaatgttccaaggttcgtgaagagagttgagcttgtgcagaagcagacaattatgcattaccaaacacaacaatctcaacctttcctcaagatagtagtcgctctgcctaccatggttgctagctgtcgtggtatcctggaaaggggcataacaattgaaggccttggttcaaagagttttctgacatatgaaagcaacattctttttgcccttcgtttcatgattgattgcaatattgttggtggcaactggattgagcttcctgctgggaaatacaggaaagcagcctgtatcatgtcctattgtcagctagagctagattgcttatactcagatctggtaagccatgcggctgaaggagaatattctaagatggccccgtttcgcatattaagttttgatattgaatgtgctggtcgcaaaggtcatttcccagaaccaactcatgatcctgttattcagatagctaatttggttacacatcaaggagaagaccaaccttttgtacggaatgtcatgactcttaaatcctgctctcccattgtgggagtcgaggttatgtcatttgatgcagagagagatattctacttgcatggagggatttcatacgtgaagtggatcctgatatcataattggatacaacatttgcaaatttgacatgccctatcttattgagagggctgaggttctcaagatagcggagtttccaatacttggccgaatcagaaatagtcgtgttcgtgtccgtgatacgaccttttcctcgaggcaatatggtgtgcgtgaaagtaaggatgttactattgaaggaagagtgcaatttgatctcctgcaggctatgcaacgggattacaagttgagttcttattcattaaactctgtatcagcacactttcttggggagcaaaaagaagatgttcatcattcaattatatctgatcttcaaaatggaaacccagagacacgaaggcgacttgcagtttattgcttgaaggatgcttatcttcctcaaagactgttagataaattgatgtatatctataattatgtggaaatggcgagggtcactggtgttcccatttcgtttctactttcgaggggacaaagtattaaggtcctctcgcaactactcaggaaagcaaaacagaaaaaccttgttataccaaatataaagggtcaagggtctgggcaagatacctttgaaggtgcaactgttttggaggcaagggctggattttatgagaagcccatcgcaactttggactttgcttctttgtatccatccatcatgatggcatataacctttgctactgtactttggaggcccgtaaactcaacttacctccagaattcgtcaataaaaccccatctggtgaaatatttgtaaaaccagaactacagaagggtatacttcctgagatccttgaagaactattagcagctcggaaaagggcaaaagcagatttaaaggaagcgaaggacccactcgaaagggctgttcttgatggtcgtcaacttgcactgaaaataagtgcaaactcagtttatggtttcactggagcaactgttggtcagttaccttgcttagagatttcttcaagtgtgaccagctatggacgacagatgattgaacatacaaaaaagcttgttgaagataaattcacaacagtaggaggttatgagcatactgcagaggtaatttatggggacactgattctgtgatggtacagtttggtgtttctacagttgaagatgcaatgaagttaggaagagaagctgcagattatattagtggaacctttaccaagcccatcaaactggagtttgagaaggtctattttccttaccttctaatcagcaagaagagatatgctggtttgtactggacgaatcctgagaaatttgacaaaatggatgcaaaaggtattgaaactgtaagaagggacaactgtttactggtaaagaacctggtaaccgagtgccttcataaaatactggtagaccgtgatgttcctggtgcagtccaatatgtcaagaacaccatatctgatctattaatgaatcgtgtggacttgtctcttcttgttataacaaagggtttgacaaaaacgggagaagattatgcggtaaaagctgctcatgtggagcttgctgagaggatgcgaaagagagatccagctactgcacctactgttggtgaccgtgttccttatgtaataattaaagcagcaaaaggggcaaaggcatatgagaaatcagaagatccgatttatgttttggacaataatatacccattgatcctcaatactaccttgagaaccaaattagcaagccacttttgaggatctttgagccaattctgaagaatgccagcaaagagttgcttcatggaagccacaccagatctgtttcaatctcaactccttccaatagcgggataatgaaatttgcaaagaaacaattaacttgccttgggtgcaaagctgttatcagtggtgccagtcagacactttgctcacattgcaagggaagagaagcagagttgtactgcaaaacagtagcaaatgtttctgacctggagatgctctttgggaggctatggacacaatgccaggagtgccaaggatctctgcaccaggacgttctctgcacaagtcgggattgccccattttctatcggcgaaggaaggcacagaaggatatgaccgaagctaggctgcagcttgatcggtgggacttctgagcttggaaattctcacatggctgcctgcgtctgcttatattgctgtggaagacaggaagctaccgtcgaccgcatcataatgcatgtgaagatgagactggacttctgcgagcatccagtcacacttgcgtccgtgtcacgtagactgacttgccagtacgattcattagcatgttttctgcttaggttttgcgtaatagtttaggtgtgagttggtacttggtagatggtaggtgtcaccttcctgtggctagtgccgagaaaaatgcttggtcctgagatgaggtgctgattatgtacagggcagaagcaatctggagcagttattatgtaacagagtgagacgagacaatttgaatggcacatgagttctctatctgtctgaattctaatgctgtccgcagcgctcgccgcctctcctagtggataggtttactttggctatgtgttttacctttctagcttagttatagactagtggatagatttagaacctaggttgcatgactgttcacgatagagat

SEQ ID NO: 45544 - DNA, 3917 bp, Zea Mays
atggcgggaactccccagtttcagtccccgcacttcccgcctccctctccccctctcggtcccaccttcgtccctccggcgatgaactcaggcggacgcggcggcaagcggcggggtcccccgcccctcgctccctccggtgcggcggcgaagagggtcaatcccagccccggcacgccgcatgtgcctcctcccgcgtcggcggcggccgccgtggaggaggacatgatggacgaggacgtgttcctggatgagtccatcctggcggaggacgaggcggcgctgctgatgctccagcgcgacgaggcactcgcgtcccgcctcgcgcggtggaagcgccccgcaatacccaccgacctcgccgccggatgctcccgcactgtcgcttttcagcagttggaaatagattatgttattggtgagagccacaaagaattactccccagctcatctggttcagcagccatactcaggatttttggtgtcaccagagaaggccacagcttatgctgtcaggtgcatggatttgagccatatttctatattggctgtccttcagggatgggtcctgatgatatatcacgctttcatcaaacactagaggggaggatgaaggagtcaaatagaagcagcaatgttccaaggttcgtgaagagagttgagcttgtgcagaagcagacaattatgcattaccaaacacaacaatctcaacctttcctcaagatagtagtcgctctgcctaccatggttgctagctgtcgtggtatcctggaaaggggcataacaattgaaggccttggttcaaagagttttctgacatatgaaagcaacattctttttgcccttcgtttcatgattgattgcaatattgttggtggcaactggattgagcttcctgctgggaaatacaggaaagcagcctgtatcatgtcctattgtcagctagagctagattgcttatactcagatctggtaagccatgcggctgaaggagaatattctaagatggccccgtttcgcatattaagttttgatattgaatgtgctggtcgcaaaggtcatttcccagaaccaactcatgatcctgttattcagatagctaatttggttacacatcaaggagaagaccaaccttttgtacggaatgtcatgactcttaaatcctgctctcccattgtgggagtcgaggttatgtcatttgatgcagagagagatattctacttgcatggagggatttcatacgtgaagtggatcctgatatcataattggatacaacatttgcaaatttgacatgccctatcttattgagagggctgaggttctcaagatagcggagtttccaatacttggccgaatcagaaatagtcgtgttcgtgtccgtgatacgaccttttcctcgaggcaatatggtgtgcgtgaaagtaaggatgttactattgaaggaagagtgcaatttgatctcctgcaggctatgcaacgggattacaagttgagttcttattcattaaactctgtatcagcacactttcttggggagcaaaaagaagatgttcatcattcaattatatctgatcttcaaaatggaaacccagagacacgaaggcgacttgcagtttattgcttgaaggatgcttatcttcctcaaagactgttagataaattgatgtatatctataattatgtggaaatggcgagggtcactggtgttcccatttcgtttctactttcgaggggacaaagtattaaggtcctctcgcaactactcaggaaagcaaaacagaaaaaccttgttataccaaatataaagggtcaagggtctgggcaagatacctttgaaggtgcaactgttttggaggcaagggctggattttatgagaagcccatcgcaactttggactttgcttctttgtatccatccatcatgatggcatataacctttgctactgtactttggtgccccctgaggaggcccgtaaactcaacttacctccagaattcgtcaataaaaccccatctggtgaaatatttgtaaaaccagaactacagaagggtatacttcctgagatccttgaagaactattagcagctcggaaaagggcaaaagcagatttaaaggaagcgaaggacccactcgaaagggctgttcttgatggtcgtcaacttgcactgaaaataagtgcaaactcagtttatggtttcactggagcaactgttggtcagttaccttgcttagagatttcttcaagtgtgaccagctatggacgacagatgattgaacatacaaaaaagcttgttgaagataaattcacaacagtaggaggttatgagcatactgcagaggtaatttatggggacactgattctgtgatggtacagtttggtgtttctacagttgaagatgcaatgaagttaggaagagaagctgcagattatattagtggaacctttaccaagcccatcaaactggagtttgagaaggtctattttccttaccttctaatcagcaagaagagatatgctggtttgtactggacgaatcctgagaaatttgacaaaatggatgcaaaaggtattgaaactgtaagaagggacaactgtttactggtaaagaacctggtaaccgagtgccttcataaaatactggtagaccgtgatgttcctggtgcagtccaatatgtcaagaacaccatatctgatctattaatgaatcgtgtggacttgtctcttcttgttataacaaagggtttgacaaaaacgggagaagattatgcggtaaaagctgctcatgtggagcttgctgagaggatgcgaaagagagatccagctactgcacctactgttggtgaccgtgttccttatgtaataattaaagcagcaaaaggggcaaaggcatatgagaaatcagaagatccgatttatgttttggacaataatatacccattgatcctcaatactaccttgagaaccaaattagcaagccacttttgaggatctttgagccaattctgaagaatgccagcaaagagttgcttcatggaagccacaccagatctgtttcaatctcaactccttccaatagcgggataatgaaatttgcaaagaaacaattaacttgccttgggtgcaaagctgttatcagtggtgccagtcagacactttgctcacattgcaagggaagagaagcagagttgtactgcaaaacagtagcaaatgtttctgacctggagatgctctttgggaggctatggacacaatgccaggagtgccaaggatctctgcaccaggacgttctctgcacaagtcgggattgccccattttctatcggcgaaggaaggcacagaaggatatgaccgaagctaggctgcagcttgatcggtgggacttctgagcttggaaattctcacatggctgcctgcgtctgcttatattgctgtggaagacaggaagctaccgtcgaccgcatcataatgcatgtgaagatgagactggacttctgcgagcatccagtcacacttgcgtccgtgtcacgtagactgacttgccagtacgattcattagcatgttttctgcttaggttttgcgtaatagtttaggtgtgagttggtacttggtagatggtaggtgtcaccttcctgtggctagtgccgagaaaaatgcttggtcctgagatgaggtgctgattatgtacagggcagaagcaatctggagcagttattatgtaacagagtgagacgagacaatttgaatggcacatgagttctctatctgtctgaattctaatgctgtccgcagcgctcgccgcctctcctagtggataggtttactttggctatgtgttttacctttctagcttagttatagactagtggatagatttagaacctaggttgcatgactgttcacgatagagat

SEQ ID NO: 45545 - DNA, 3830 bp, Zea Mays
atggcgggaactccccagtttcagtccccgcacttcccgcctccctctccccctctcggtcccaccttcgtccctccggcgatgaactcaggcggacgcggcggcaagcggcggggtcccccgcccctcgctccctccggtgcggcggcgaagagggtcaatcccagccccggcacgccgcatgtgcctcctcccgcgtcggcggcggccgccgtggaggaggacatgatggacgaggacgtgttcctggatgagtccatcctggcggaggacgaggcggcgctgctgatgctccagcgcgacgaggcactcgcgtcccgcctcgcgcggtggaagcgccccgcaatacccaccgacctcgccgccggatgctcccgcactgtcgcttttcagcagttggaaatagattatgttattggtgagagccacaaagaattactccccagctcatctggttcagcagccatactcaggatttttggtgtcaccagagaaggccacagcttatgctgtcaggtgcatggatttgagccatatttctatattggctgtccttcagggatgggtcctgatgatatatcacgctttcatcaaacactagaggggaggatgaaggagtcaaatagaagcagcaatgttccaaggttcgtgaagagagttgagcttgtgcagaagcagacaattatgcattaccaaacacaacaatctcaacctttcctcaagatagtagtcgctctgcctaccatggttgctagctgtcgtggtatcctggaaaggggcataacaattgaaggccttggttcaaagagttttctgacatatgaaagcaacattctttttgcccttcgtttcatgattgattgcaatattgttggtggcaactggattgagcttcctgctgggaaatacaggaaagcagcctgtatcatgtcctattgtcagctagagctagattgcttatactcagatctggtaagccatgcggctgaaggagaatattctaagatggccccgtttcgcatattaagttttgatattgaatgtgctggtcgcaaaggtcatttcccagaaccaactcatgatcctgttattcagatagctaatttggttacacatcaaggagaagaccaaccttttgtacggaatgtcatgactcttaaatcctgctctcccattgtgggagtcgaggttatgtcatttgatgcagagagagatattctacttgcatggagggatttcatacgtgaagtggatcctgatatcataattggatacaacatttgcaaatttgacatgccctatcttattgagagggctgaggttctcaagatagcggagtttccaatacttggccgaatcagaaatagtcgtgttcgtgtccgtgatacgaccttttcctcgaggcaatatggtgtgcgtgaaagtaaggatgttactattgaaggaagagtgcaatttgatctcctgcaggctatgcaacgggattacaagttgagttcttattcattaaactctgtatcagcacactttcttggggagcaagatgcttatcttcctcaaagactgttagataaattgatgtatatctataattatgtggaaatggcgagggtcactggtgttcccatttcgtttctactttcgaggggacaaagtattaaggtcctctcgcaactactcaggaaagcaaaacagaaaaaccttgttataccaaatataaagggtcaagggtctgggcaagatacctttgaaggtgcaactgttttggaggcaagggctggattttatgagaagcccatcgcaactttggactttgcttctttgtatccatccatcatgatggcatataacctttgctactgtactttggtgccccctgaggaggcccgtaaactcaacttacctccagaattcgtcaataaaaccccatctggtgaaatatttgtaaaaccagaactacagaagggtatacttcctgagatccttgaagaactattagcagctcggaaaagggcaaaagcagatttaaaggaagcgaaggacccactcgaaagggctgttcttgatggtcgtcaacttgcactgaaaataagtgcaaactcagtttatggtttcactggagcaactgttggtcagttaccttgcttagagatttcttcaagtgtgaccagctatggacgacagatgattgaacatacaaaaaagcttgttgaagataaattcacaacagtaggaggttatgagcatactgcagaggtaatttatggggacactgattctgtgatggtacagtttggtgtttctacagttgaagatgcaatgaagttaggaagagaagctgcagattatattagtggaacctttaccaagcccatcaaactggagtttgagaaggtctattttccttaccttctaatcagcaagaagagatatgctggtttgtactggacgaatcctgagaaatttgacaaaatggatgcaaaaggtattgaaactgtaagaagggacaactgtttactggtaaagaacctggtaaccgagtgccttcataaaatactggtagaccgtgatgttcctggtgcagtccaatatgtcaagaacaccatatctgatctattaatgaatcgtgtggacttgtctcttcttgttataacaaagggtttgacaaaaacgggagaagattatgcggtaaaagctgctcatgtggagcttgctgagaggatgcgaaagagagatccagctactgcacctactgttggtgaccgtgttccttatgtaataattaaagcagcaaaaggggcaaaggcatatgagaaatcagaagatccgatttatgttttggacaataatatacccattgatcctcaatactaccttgagaaccaaattagcaagccacttttgaggatctttgagccaattctgaagaatgccagcaaagagttgcttcatggaagccacaccagatctgtttcaatctcaactccttccaatagcgggataatgaaatttgcaaagaaacaattaacttgccttgggtgcaaagctgttatcagtggtgccagtcagacactttgctcacattgcaagggaagagaagcagagttgtactgcaaaacagtagcaaatgtttctgacctggagatgctctttgggaggctatggacacaatgccaggagtgccaaggatctctgcaccaggacgttctctgcacaagtcgggattgccccattttctatcggcgaaggaaggcacagaaggatatgaccgaagctaggctgcagcttgatcggtgggacttctgagcttggaaattctcacatggctgcctgcgtctgcttatattgctgtggaagacaggaagctaccgtcgaccgcatcataatgcatgtgaagatgagactggacttctgcgagcatccagtcacacttgcgtccgtgtcacgtagactgacttgccagtacgattcattagcatgttttctgcttaggttttgcgtaatagtttaggtgtgagttggtacttggtagatggtaggtgtcaccttcctgtggctagtgccgagaaaaatgcttggtcctgagatgaggtgctgattatgtacagggcagaagcaatctggagcagttattatgtaacagagtgagacgagacaatttgaatggcacatgagttctctatctgtctgaattctaatgctgtccgcagcgctcgccgcctctcctagtggataggtttactttggctatgtgttttacctttctagcttagttatagactagtggatagatttagaacctaggttgcatgactgttcacgatagagat

SEQ ID NO: 45546 - DNA, 3606 bp, Zea Mays
gggaggcgtatttttggacctcctctcgtttcgtattaaaccctacctcgccagtaatggcgggaactccccagtttcagtccccgcacttcccgcctccctctccccctctcggtcccaccttcgtccctccggcgatgaactcaggcggacgcggcggcaagcggcggggtcccccgcccctcgctccctccggtgcggcggcgaagagggtcaatcccagccccggcacgccgcatgtgcctcctcccgcgtcggcggcggccgccgtggaggaggacatgatggacgaggacgtgttcctggatgagtccatcctggcggaggacgaggcggcgctgctgatgctccagcgcgacgaggcactcgcgtcccgcctcgcgcggtggaagcgccccgcaatacccaccgacctcgccgccggatgctcccgcactgtcgcttttcagcagttggaaatagattatgttattggtgagagccacaaagaattactccccagctcatctggttcagcagccatactcaggatttttggtgtcaccagagaaggccacagcttatgctgtcaggtgcatggatttgagccatatttctatattggctgtccttcagggatgggtcctgatgatatatcacgctttcatcaaacactagaggggaggatgaaggagtcaaatagaagcagcaatgttccaaggttcgtgaagagagttgagcttgtgcagaagcagacaattatgcattaccaaacacaacaatctcaacctttcctcaagatagtagtcgctctgcctaccatggttgctagctgtcgtggtatcctggaaaggggcataacaattgaaggccttggttcaaagagttttctgacatatgaaagcaacattctttttgcccttcgtttcatgattgattgcaatattgttggtggcaactggattgagcttcctgctgggaaatacaggaaagcagcctgtatcatgtcctattgtcagctagagctagattgcttatactcagatctggtaagccatgcggctgaaggagaatattctaagatggccccgtttcgcatattaagttttgatattgaatgtgctggtcgcaaaggtcatttcccagaaccaactcatgatcctgttattcagatagctaatttggttacacatcaaggagaagaccaaccttttgtacggaatgtcatgactcttaaatcctgctctcccattgtgggagtcgaggttatgtcatttgatgcagagagagatattctacttgcatggagggatttcatacgtgaagtggatcctgatatcataattggatacaacatttgcaaatttgacatgccctatcttattgagagggctgaggttctcaagatagcggagtttccaatacttggccgaatcagaaatagtcgtgttcgtgtccgtgatacgaccttttcctcgaggcaatatggtgtgcgtgaaagtaaggatgttactattgaaggaagagtgcaatttgatctcctgcaggctatgcaacgggattacaagttgagttcttattcattaaactctgtatcagcacactttcttggggagcaaaaagaagatgttcatcattcaattatatctgatcttcaaaatggaaacccagagacacgaaggcgacttgcagtttattgcttgaagaattcgtcaataaaaccccatctggtgaaatatttgtaaaaccagaactacagaagggtatacttcctgagatccttgaagaactattagcagctcggaaaagggcaaaagcagatttaaaggaagcgaaggacccactcgaaagggctgttcttgatggtcgtcaacttgcactgaaaataagtgcaaactcagtttatggtttcactggagcaactgttggtcagttaccttgcttagagatttcttcaagtgtgaccagctatggacgacagatgattgaacatacaaaaaagcttgttgaagataaattcacaacagtaggaggttatgagcatactgcagaggtaatttatggggacactgattctgtgatggtacagtttggtgtttctacagttgaagatgcaatgaagttaggaagagaagctgcagattatattagtggaacctttaccaagcccatcaaactggagtttgagaaggtctattttccttaccttctaatcagcaagaagagatatgctggtttgtactggacgaatcctgagaaatttgacaaaatggatgcaaaaggtattgaaactgtaagaagggacaactgtttactggtaaagaacctggtaaccgagtgccttcataaaatactggtagaccgtgatgttcctggtgcagtccaatatgtcaagaacaccatatctgatctattaatgaatcgtgtggacttgtctcttcttgttataacaaagggtttgacaaaaacgggagaagattatgcggtaaaagctgctcatgtggagcttgctgagaggatgcgaaagagagatccagctactgcacctactgttggtgaccgtgttccttatgtaataattaaagcagcaaaaggggcaaaggcatatgagaaatcagaagatccgatttatgttttggacaataatatacccattgatcctcaatactaccttgagaaccaaattagcaagccacttttgaggatctttgagccaattctgaagaatgccagcaaagagttgcttcatggaagccacaccagatctgtttcaatctcaactccttccaatagcgggataatgaaatttgcaaagaaacaattaacttgccttgggtgcaaagctgttatcagtggtgccagtcagacactttgctcacattgcaagggaagagaagcagagttgtactgcaaaacagtagcaaatgtttctgacctggagatgctctttgggaggctatggacacaatgccaggagtgccaaggatctctgcaccaggacgttctctgcacaagtcgggattgccccattttctatcggcgaaggaaggcacagaaggatatgaccgaagctaggctgcagcttgatcggtgggacttctgagcttggaaattctcacatggctgcctgcgtctgcttatattgctgtggaagacaggaagctaccgtcgaccgcatcataatgcatgtgaagatgagactggacttctgcgagcatccagtcacacttgcgtccgtgtcacgtagactgacttgccagtacgattcattagcatgttttctgcttaggttttgcgtaatagtttaggtgtgagttggtacttggtagatggtaggtgtcaccttcctgtggctagtgccgagaaaaatgcttggtcctgagatgaggtgctgattatgtacagggcagaagcaatctggagcagttattatgtaacagagtgagacgagacaatttgaatggcacatgagttctctatctgtctgaattctaatgctgtccgcagcgctcgccgcctctcctagtggataggtttactttggctatgtgttttacctttctagcttagttatagactagtggatagatttagaacctaggttgcatgactgttcacgatagagat

SEQ ID NO: 45547 - DNA, 1639 bp, Zea Mays
atggcgggaactccccagtttcagtccccgcacttcccgcctccctctccccctctcggtcccaccttcgtccctccggcgatgaactcaggcggacgcggcggcaagcggcggggtcccccgcccctcgctccctccggtgcggcggcgaagagggtcaatcccagccccggcacgccgcatgtgcctcctcccgcgtcggcggcggccgccgtggaggaggacatgatggacgaggacgtgttcctggatgagtccatcctggcggaggacgaggcggcgctgctgatgctccagcgcgacgaggcactcgcgtcccgcctcgcgcggtggaagcgccccgcaatacccaccgacctcgccgccggatgctcccgcactgtcgcttttcagcagttggaaatagattatgttattggtgagagccacaaagaattactccccagctcatctggttcagcagccatactcaggatttttggtgtcaccagagaaggccacagcttatgctgtcaggtgcatggatttgagccatatttctatattggctgtccttcagggatgggtcctgatgatatatcacgctttcatcaaacactagaggggaggatgaaggagtcaaatagaagcagcaatgttccaaggttcgtgaagagagttgagcttgtgcagaagcagacaattatgcattaccaaacacaacaatctcaacctttcctcaagatagtagtcgctctgcctaccatggttgctagctgtcgtggtatcctggaaaggggcataacaattgaaggccttggttcaaagagttttctgacatatgaaagcaacattctttttgcccttcgtttcatgattgattgcaatattgttggtggcaactggattgagcttcctgctgggaaatacaggaaagcagcctgtatcatgtcctattttatgtctattcttaacacaactaacagatactcagatctggtaagccatgcggctgaaggagaatattctaagatggccccgtttcgcatattaagttttgatattgaatgtgctggtcgcaaaggtcatttcccagaaccaactcatgatcctgttattcagatagctaatttggttacacatcaaggagaagaccaaccttttgtacggaatgtcatgactcttaaatcctgctctcccattgtgggagtcgaggttatgtcatttgatgcagagagagatattctacttgcatggagggatttcatacgtgaagtggatcctgatatcataattggatacaacatttgcaaatttgacatgccctatcttattgagagggctgaggttctcaagatagcggagtttccaatacttggccgaatcagaaatagtcgtgttcgtgtccgtgatacgaccttttcctcgaggcaatatggtgtgcgtgaaagtaaggatgttactattgaaggaagagtgcaatttgatctcctgcaggctatgcaacgggattacaagttgagttcttattcattaaactctgtatcagcacactttcttggggagcaaggggcagccaaggagagccctttggctccaacaatttcctagcttcttcttttctcatctgcatgctccataatcaggaaggctgggggac

SEQ ID NO: 45548 - DNA, 1648 bp, Zea Mays
cctacctcgccagtaatggcgggaactccccagtttcagtccccgcacttcccgcctccctctccccctctcggtcccaccttcgtccctccggcgatgaactcaggcggacgcggcggcaagcggcggggtcccccgcccctcgctccctccggtgcggcggcgaagagggtcaatcccagccccggcacgccgcatgtgcctcctcccgcgtcggcggcggccgccgtggaggaggacatgatggacgaggacgtgttcctggatgagtccatcctggcggaggacgaggcggcgctgctgatgctccagcgcgacgaggcactcgcgtcccgcctcgcgcggtggaagcgccccgcaatacccaccgacctcgccgccggatgctcccgcactgtcgcttttcagcagttggaaatagattatgttattggtgagagccacaaagaattactccccagctcatctggttcagcagccatactcaggatttttggtgtcaccagagaaggccacagcttatgctgtcaggtgcatggatttgagccatatttctatattggctgtccttcagggatgggtcctgatgatatatcacgctttcatcaaacactagaggggaggatgaaggagtcaaatagaagcagcaatgttccaaggttcgtgaagagagttgagcttgtgcagaagcagacaattatgcattaccaaacacaacaatctcaacctttcctcaagatagtagtcgctctgcctaccatggttgctagctgtcgtggtatcctggaaaggggcataacaattgaaggccttggttcaaagagttttctgacatatgaaagcaacattctttttgcccttcgtttcatgattgattgcaatattgttggtggcaactggattgagcttcctgctgggaaatacaggaaagcagcctgtatcatgtcctattgtcagctagagctagattgcttatactcagatctggtaagccatgcggctgaaggagaatattctaagatggccccgtttcgcatattaagttttgatattgaatgtgctggtcgcaaaggtcatttcccagaaccaactcatgatcctgttattcagatagctaatttggttacacatcaaggagaagaccaaccttttgtacggaatgtcatgactcttaaatcctgctctcccattgtgggagtcgaggttatgtcatttgatgcagagagagatattctacttgcatggagggatttcatacgtgaagtggatcctgatatcataattggatacaacatttgcaaatttgacatgccctatcttattgagagggctgaggttctcaagatagcggagtttccaatacttggccgaatcagaaatagtcgtgttcgtgtccgtgatacgaccttttcctcgaggcaatatggtgtgcgtgaaagtaaggatgttactattgaaggaagagtgcaatttgatctcctgcaggctatgcaacgggattacaagttgagttcttattcattaaactctgtatcagcacactttcttggggagcaaggggcagccaaggagagccctttggctccaacaatttcctagcttcttcttttctcatctgcatgctccataatcaggaaggctgggggac

SEQ ID NO: 45549 - DNA, 272 bp, Zea Mays
ttttgctttttccttttaccttttcctattacttatttatttgtcgatcggtttcctataataacgctcctgcgagtgacaagttccttgtctgcctagcctctttgtcacattgagaagattaacccgttataacaccttctgtccatctggcctcgctcgtcacttgctttgagaaaagaaatcgtgtgcgtagaaatgtctggatcatttatttcgtccttattggattcagcaaccaggagctcggaaatttgaaggccaaatgccac

SEQ ID NO: 45550 - DNA, 321 bp, Zea Mays
atggcgcaccgccccaaccgccgccgatcgccacaaccacctgccggcgactcgcaccccagcgacagacgcaaccgggagcttggcgggcccgtggggcgcgcagaagtcgagcatcaagccaagcgcggcgtgctcacgcggcgccggcggcggggaggaggggtcagggccaagaaagaccggagctttgcgcgggggcagctacgagctttcctcaaggaagcgcggcggcgtcgctgtcgaggagtatgttgtcccggtgagcgccccgatggcatccacaggaaggggaagcgagggcctagagatcagaattga

SEQ ID NO: 45551 - DNA, 774 bp, Zea Mays
tgtaagatgacagtcgaatcgaatttgatcgaatatgacaagactctggtaaggaaaagattgatatcaagcaacaacactcgtgtcaaggcagagtctggcacctgttaacgatgatgagtttagtgcaacctcatatcatgctttgtatctgtaactggtagaaacaaagttgttgcaacatcatccattgccgatgatttgtcagaggttgacatgccatcaaaacgcaggaggctgttgaatcaagacacaagactatctagagcagaataccttgatgacaacaactcatgtgttactggtatatcagcagaaggcaaacttcttgtggataagaaaaaaacttcaagctggattgatgttgatgtggtgcttttgtgactaatcatctttagagcttttgtgaatgatctagctagctatctgtaaatgatctagttgtgaatgatattataattgtgatgcttttgtgaatatataattgtggtgctattgtgtttatgtgatggatctatgactatggtatactgattaactgtgtatgtctttatgattaatgtataaaaatctgtgatttgtggtgcttaattaaatgtatgttattattaataacaactgtaaaagagcgactttctgttggttgctaaatgtatagtatgccgacttatggttggttgctaaatctatagtacagcaacccacggttagtcgctaaatatacaatattagcaacggtcggtgggtcgctaaaaaaatgtcggtcgctaaagc

SEQ ID NO: 45552 - DNA, 2951 bp, Zea Mays
atatatttaattagatagtgattaatcagttgcggtatgcgttagctacggagaaaaaaataccgagttgcagaggtgttggatcgaagcaaggtagcggcaggcgcaaccgggctggagacgagcagaaaagaaaagaaaaaaagccgcgagcagacagcagacaggaaacgggaccggacgggacgtttttcaccgcaggggaggaggcaggagggcccaacgtcaaagaaacaggaggccgcataaaacgcagcctcccgcggatccccctacttttctttcttctttctcatctcagttgcagttcccctctctctcctctgccgtagcgaggcaggcaagccaccaagtccgagcctcggaggcatcgaccaacgccggcggcagcggcgccatgaggctgctcgtccccgacggcgcgcgccgccagcggttgctccagtgcgaggcgcccccgtcgccctcgccgccttccccgtccccgtacccgtcgtcgtccccgtccaggacggtcgtggtggggatcaggcgcgacgccgccagccgcgagctgctcacctgggcgctcgtcaaggtcgccaatgctggggaccgcgtcgtcgcactccacgtcgccaccgcggccgccgccgacggtttgctcgtgagactggatgagcgcagcagggccgcggactcgctcgcctccgtgctcgccgtctacgacggtttctgcaacctcaagcagattaatttggagctcaaggtctgtggagggtcatctatccggaaaactctggttaaagaagcagctgcttgtggcgcagcacatctcatccttggtgtcacgaacaattcccggtccttcggatcctccttgacatcagttgccaagtactgctcaaagagagttccagccagctgctcggttcttgcagtgaacaatggcaaagtcgtttatcataaagatgctggtcacgggttgcaacatgaactgtaccaaagcaataccacgatacctgagacaccaaggaggagctaccggaagctcttgtcgaccatgataggggataaactctgggatgagaatggaaaagacagaaggtgtgtgtctcgtgccgtcaccatgccaatgaggtctcccgcacggccaaaagaattttcactggcattagtcccggtgaagggttgccaacacgaatcgccagcggtagcaactggctggcccctacttaggaagaagttcttgccagaccggaaagcttctgcgcctgacaagtccaagatgtctgtggtgcagtgggcaatgcggctcccaagcaggtattcagcagtatcgccagtccattcagaatacagaaccacaaaaccggactccacgagcgccagccatatcctccgtgaccgtgtgattgttccctcaaggagcaattctggaaagtcttgtgtagtgattgaagaattggagaaggaaactccagaggaactgacgttgctcaaagagaaattctcatccatttattcttcattcagttacagtgaacttgcaaagatcacctctgacttctcaccagagtgtgtagttggacaaggaggcactagtcaagtttacagaggctgtttggcaaatggcaaggagctagcagtgaagatcctgaagtattctgatgaggtactgaaggagtttgtatcagagattgagattgtcagttctctcagccacaagaatgtgatatccctcgttggtttctgcttcaagaatgatgaccttctgttagtgtatgagtatttgcaacgaggcagcctggaagagatactgcatggtaaaaaagaatgcaagagcatatttggttggactgagaggttcagcgtggctatgggagttgctcgtgctctggattatctccatagtgataacaacagtcgtccagtgatccatagggatgtcaagtcatcaaatatcctcatttcaaaatgctttgaaccaaagtctgggctgctgatgtgacatctcagatgacatgcaatgatgttgcaggaactttcggatacttggctcctgaatacttcatgcatggcaaggtgggcaacaaaatcgatgtgtatgctttcggtgttgtacttctggagctcatctctggcaggaaaccactttgcactggttgtccaaaagggcaggagagcctagtgatgtgggcaaattccatcatacagggaggaaagctcagacaacttgtagatccaaacttgcccactgaaggccatgtcgatgaagttgagaggatgacccttgctgcgtccctctgcatcagacaaacacctcagaaccgtcctgaaattgatgctgttctgaagcttctccacggtgacaatgataccctcaagtgggcaagatcacaagtcgggttgtcatgcgagagcagcgatatcgatgaatttgtgatgacaccgccagcgccgaggagtaacaccaacatccagtcctacatcaacctcgcctttgatgtcgatgacgactcagcctctgtcagcagcaacgacttcattgcagccaacacctccttggaagagtatctgaagggaagatggagccggtcgtcgagctttgactgacggacccatggtcagagttaaccctttattagtgtatagatcgttcttgttcttcttctaatttaagtttcaattttgcgccttggatgagagttggcacctgcaatgccctccaccaggaaatcctttgattatgtcttagttatttttttccttttcttttgggggtccctcttactctctgaagaggcaccctgttgttttactgtctgaagagacttatcatactcaggtagtctcatccaaagaggtgacaaataaagtcgggatcatacgaaactgtggctttctttccatacctaaatcaatcatcttttgttctgcacacgttgttattgttcaggactttgttttat

SEQ ID NO: 45553 - DNA, 2751 bp, Zea Mays
atatatttaattagatagtgattaatcagttgcggtatgcgttagctacggagaaaaaaataccgagttgcagaggtgttggatcgaagcaaggtagcggcaggcgcaaccgggctggagacgagcagaaaagaaaagaaaaaaagccgcgagcagacagcagacaggaaacgggaccggacgggacgtttttcaccgcaggggaggaggcaggagggcccaacgtcaaagaaacaggaggccgcataaaacgcagcctcccgcggatccccctacttttctttcttctttctcatctcagttgcagttcccctctctctcctctgccgtagcgaggcaggcaagccaccaagtccgagcctcggaggcatcgaccaacgccggcggcagcggcgccatgaggctgctcgtccccgacggcgcgcgccgccagcggttgctccagtgcgaggcgcccccgtcgccctcgccgccttccccgtccccgtacccgtcgtcgtccccgtccaggacggtcgtggtggggatcaggcgcgacgccgccagccgcgagctgctcacctgggcgctcgtcaaggtcgccaatgctggggaccgcgtcgtcgcactccacgtcgccaccgcggccgccgccgacggtttgctcgtgagactggatgagcgcagcagggccgcggactcgctcgcctccgtgctcgccgtctacgacggtttctgcaacctcaagcagattaatttggagctcaaggtctgtggagggtcatctatccggaaaactctggttaaagaagcagctgcttgtggcgcagcacatctcatccttggtgtcacgaacaattcccggtccttcggatcctccttgacatcagttgccaagtactgctcaaagagagttccagccagctgctcggttcttgcagtgaacaatggcaaagtcgtttatcataaagatgctggtcacgggttgcaacatgaactgtaccaaagcaataccacgatacctgagacaccaaggaggagctaccggaagctcttgtcgaccatgataggggataaactctgggatgagaatggaaaagacagaaggtgtgtgtctcgtgccgtcaccatgccaatgaggtctcccgcacggccaaaagaattttcactggcattagtcccggtgaagggttgccaacacgaatcgccagcggtagcaactggctggcccctacttaggaagaagttcttgccagaccggaaagcttctgcgcctgacaagtccaagatgtctgtggtgcagtgggcaatgcggctcccaagcaggtattcagcagtatcgccagtccattcagaatacagaaccacaaaaccggactccacgagcgccagccatatcctccgtgaccgtgtgattgttccctcaaggagcaattctggaaagtcttgtgtagtgattgaagaattggagaaggaaactccagaggaactgacgttgctcaaagagaaattctcatccatttattcttcattcagttacagtgaacttgcaaagatcacctctgacttctcaccagagtgtgtagttggacaaggaggcactagtcaagtttacagaggctgtttggcaaatggcaaggagctagcagtgaagatcctgaagtattctgatgaggtactgaaggagtttgtatcagagattgagattgtcagttctctcagccacaagaatgtgatatccctcgttggtttctgcttcaagaatgatgaccttctgttagtgtatgagtatttgcaacgaggcagcctggaagagatactgcatggtaaaaaagaatgcaagagcatatttggttggactgagaggttcagcgtggctatgggagttgctcgtgctctggattatctccatagtgataacaacagtcgtccagtgatccatagggatgtcaagtcatcaaatatcctcatttcaaaatgctttgaaccaaagttatcggactttggtctcgcagtctgggctgctgatgtgacatctcagatgacatgcaatgatgttgcaggaactttcggatacttggctcctgaatacttcatgcatggcaaggtgggcaacaaaatcgatgtgtatgctttcggtgttgtacttctggagctcatctctggcaggaaaccactttgcactggttgtccaaaagggcaggagagcctagtgatgtgggcaaattccatcatacagggaggaaagctcagacaacttgtagatccaaacttgcccactgaaggccatgtcgatgaagttgagaggatgacccttgctgcgtccctctgcatcagacaaacacctcagaaccgtcctgaaattgatgctgttctgaagcttctccacggtgacaatgataccctcaagtgggcaagatcacaagtcgggttgtcatgcgagagcagcgatatcgatgaatttgtgatgacaccgccagcgccgaggagtaacaccaacatccagtcctacatcaacctcgcctttgatgtcgatgacgactcagcctctgtcagcagcaacgacttcattgcagccaacacctccttggaagagtatctgaagggaagatggagccggtcgtcgagctttgactgacggacccatggtagtctcatccaaagaggtgacaaataaagtcgggatcatacgaaactgtggctttctttccatacctaaatcaatcatcttttgttctgcacacgttgttattgttcaggactttgttttat

SEQ ID NO: 45554 - DNA, 4555 bp, Zea Mays
tgagcatacaattaaatagtccaaacaagcacaatgcaagcgagggtttctgatataggaaacggctagaaactttcttttttaaaaagattcgagaacataattggcccggtttacaaggaaaattgggcaaaaaaactatacaacataccaacactaattgtaatgatctgttatgcctatggggggctgagtacgcctgttaaaaacactcgaaattctgttagcaacaggtgcagcattgcctgttggggccaaagactgccgtgtcgtggcactgttgcacgcacagatctactcgagatcacaactcaaaaactgcccgaaggaaattatatcaagtaaattattgagtttcctagagtaattcatcacttgaagttatcatagaaacacaaattagtagatcaggaccaaaccctaaaatgaccacttcaacaagtaatgcacaatataaatcaagaacacaatagacatgaagatttatcccacgaaggctggccacgttgttaaggaagccacaaaggcttaagattattcaaacactatccttgttctcaagtcaagatagtaagctcttgagctctaatttcaagtcgtccgactaatcgcgattagtcgggctagtcggttcagtgggggcgattagcagtgttcttacggcgcctaggcgagcaagtgcaccagccaaccgccttagcgcctaggcggcgcctaggcgacgcctaggcgggtatggcgagcaaggcggccagttttgcccgggcgcctggacgcctaggcgtaacgcctaggcgacgccttaagaacactggcgattaggagatctgacccgatcaggtgttctggtcgccctggtcgtccgactagtcgacgactaggagcgattagtcgctcgatcaggcgcatctgggcgaccaaggtttaaagctgtgaaaatttggtgggctttttttgtgggcaacccggctacaggaagaccaaacgccagccgccatcgtgacctggtgataaacccttctcctgacggtttgtttgcacatctcctcgatttcttgcgtgtgtctcgatctcagacacaaacctgatggtgataaaattttggggtgctgtggatgaagctctagatgcaacttagggcctctggggccgaaatttgcttaggactgttgctgctgcaggtgctggttcctcctctcagacacaaacctatgttagaaacagaaaacgacctagaaatgcagcagctacagctcaacacatacgtgaagaagatgacaatgctcctgctgaagatgaacaacaagaacaagagacagcaagatacaataaacgatgatgaagatgaaggcgaacatgaatcaggtggaaagggacctgctgttgatgaatttcagttggacgaagatcttctttaggtcgctgcactaccactagtaatgtggtagtaactagcaagtgttgctttgctgtttttagttggaatgttggaaacttggatgaacaaatagtcaaatatcttctcttaatcagtattgcagaattcatgccatgtttagttgtttaccctaccctttatatatagttatacactatatacatatgtcctggatgaacaggacgactaggtcgaccagaggtcgattagtcgagctaatcgtcgtctaatcgagattagtcgcctagtcggacccctaggtcgtccagctagtcactcgaccagaaaacactgctcttgagatgattggtttttactcaattgaagggggtgattaaaaactttcgaggctgtcacacaagatggcaagctccacaggcgacactaccggctaagagcacggctctaagagtaacaaatacaacaactagcttgaatgtgaaccaagtgttcttggagttgaagaacaggttggtgagctctctagacagtttaaaggctcaatctctcaaagaattgaagtgaaaaggttgagagaagctcgaggtgttccaatggtgtgagagaggaagagagctttctagtttagcacaatgaggttaggtcgaaaagtaactgttggagcaggaaagtggtagatataccccttccctacccaattgtgtcatattcaagtcatggtagtgccgagctatgcgtgacaatgacaatgtcaaggagcaacagtattgcttaagcagagcatccaagagtaggaaaaaaaacaagaggtagtgtcgggctaggcttttaggatgtcgtggtggaacttttgagcacatggttacacattggacctatgcatgtgtccttctcaatagtgtggattttcctatactaaaattcgaaatgtaaaataaatgtaaacatctgagtcgattgttgtatcctttagtaattaggaatatactaaggtacaaaaggccctgctcgacaatacatggatttctcttatttctccggtttctggggaaactgaaataattgaatttgtgagactttgggaagccatccatgaagtccatataaatattgaggaagtagacaaaattagatggcgctggacatcagatggcgaatactctaccaagagtgcttacctggctcagttccacgggagttttgccaagctcaaactttctccagtttggaaggcgaagacggagcctaaatgtcggttctttgcatggaccctactccataaaaaaattctaacggccaataatcttcagaagcgaggttggaataatgatcctatctgcaagctttgtaagcgagaaccggagacggtgggccatctagcaaaagattgcatattcacaaaatcgtgttggagttggctcagctcgtggtacaacctctcctatctgccaaagttggaccagtgctcgtcggtctatggatggtggaggaagtgcagactaaaagtagagaaaactgctcgcaaggaattcgatggtctctgtatttacttttggtgggagatttggaaagaaagaaatcgaagaatctttcatggtcttgagaagagcgagcgagaagtggccaatttcgtcaaagaagatttcaacccgcaaagagcttctagttagttttagcgttttagcattttgtttgtgtggcgtgctgggtttctagtgggctgttttgctagtgtttcttttcttttctttgccccccccctctcccctagtgttgtctttcctatccagtgtttgtaagtgtccctttctaataaatttttggccatggcaaagctcttgccgtgtcctttttcaaaaaaaaaactatcacatgtattgtcctctttttatttaacatgcttgtcaacttgataaatctcattaattctctaattgtatggtcattaccaccaaaacccactatgacaagcgatagagctcgtcaagcaccaatatgccaccaagtccaataaccgactagataaaaagtctacatggttctccttgccaaccactaccacacaaaccaaacacaactttgagtttgagccatcattgtcaagctcatcaacctggacatagcagttccaacttctaataggccacaagtggttgccaccaccaatcatggggcgctagacacaaaagacaacaccttcaagaaggtgcaacaccaattggtggtgctattgtcggcccacaaatagacagtgttttcacacaatgaaactatcatataggacagagtggacgtctcctaagaggaagcgacatctacaattgtcgccatctaggatttcgccctgaccacaaccatcctagctttgtcggccaaaatagagcacctgatagcacgatcatagcagaggggaggcagagaaaccaatgattcacatctagtcgagttggaccatcgtcggcaaaccatcagtcataatagcaacgacgaggatgacaactcttgagcctccaagtcgccacagcccatgcaaccacatgttgctactccactatagatcacacagccattgcgccctccatagcatgtgcggcccctatgctgttgtgccactgccacctgctcactttcactacccacggcctcattgccaccattgcccatgtgtgggtttcgtgtcttcgccatgccaacttcgcaccgccaccacgtgctctcaatcacctctgtgttggtgttgttcctggcctcgccgcaccattgccacgccaccgcagcacacgcactgcctaccgcctccaccactcacgcacacccaccacaaatcatgcacggccttcacatcatggtcgcacgatcgttgcacacacatggccttcgtgcaggcactgcgctcgcacgacattctagtcgtcgatgtgcatgcgtggcctcccgccgcctccacgcaactgccaccacacctgagtcagccacaagctcctctaggaccgcctcttcacggtcgtcactcgaaagcacatctccgacaaacgattccgatctgagttgaacagatctggttgttagactctagaccgtcgtcccccggtgtgaatccatcatgttgcgctctcgtcatcgacatcagcaagtgcaaactaaactattgtgcaa

SEQ ID NO: 45555 - DNA, 264 bp, Zea Mays
atgccgcccagcgccaggtcgacgcccaccgcctccattgctcgctgtggtgctctgctgctgcgcgcgaggggaggggcgagggacgcggcgaccagttgggctacggctcaatctctgagtgatccggaggtgaggtgtaaagaagaggagagagatagggccgagcaggcggtgctagctggtggcggaaatgcagtgacgggtgtgatcgagcaggacgcaccaggagatgagcagcagatacatctaggcgccgagtga

SEQ ID NO: 45556 - DNA, 214 bp, Zea Mays
tctcggcgcgtgtagagccatgcttggcgcgcgtgtgcagctgaaggggtggcaacaggcagctgttgcacttggttctgcgtttggggccttgcttgacccaaggagggctgatcttatagctgctcttggagagactactgggaaaccagcgtttgagcgtgtgctggaacgaatgaagaacagtgcagaaggcagggtaaacacatattgc

SEQ ID NO: 45557 - DNA, 521 bp, Zea Mays
aatagtatagtcctccacctcgctcctcgcagaaaggaatcgaaaaggagcaagaacaattgtttcctctcatggcacaactcatgagaagctgcatcacagaatttatagccgctcctctcttggttcttttgatcttggcttcaacgtctccgtcctttcaagtgcatgtgaagggcgacgatggccgtcaacatggatcgccggcgcttcggcagcgactggcggcggcgacgtgcttcgagaccactgccggcttctgttgggtgaagcaatgccagagtttctgcgcatcaaaaggcttcaacgccgcgagtgctttctgctataaacggcctggttctggccgtcttcatctctggcagtgctgctgccaaccataagatgcctgcactatgggggaatttcattagaatgccgctactgctgcagtagctgatgagaagtggattctgcagtagcagccaccagcaggcagaaggctataactgcagtagctcctaaaacaatctaactataag

SEQ ID NO: 45558 - DNA, 1836 bp, Zea Mays
aataactcaaatgtgttgaatttatgatcgaaaaaatcatcaagtttgagcgtaaaataatggcaaatatagtgtaaatgctattaacataaaaatacaagttagagacgccatattcatcatcataaaatcatctaatggaatatctaaagtactgcagtggttggcataaaaagcaaccatggaggcataaacatggatctgatgagctccatcgctggaggataccccaaagtcgtcgggttggaggagactgtcgccggaggatactcgaaatgcgcaggattggaggatgtcacggggcccgtggtgcggatggtgaaccccgcacacgcctctggggagccacctccgggaagccaccggtgtcgtgccttcggattagggagccgctgtcgttgtgcctccgggtcgaggaaccgacatcgcgccaccggatctgcgagccacagtcgctgcaccaccagatcggagagccggtatcgccatgccttcggatcggagagctaccaccgtcgtgcctctggatcaaggaattgtcgtcgccgccacgcatggtgccgccgtcgcacgcatcccggggtccaccgccatcgcgcactgtcacacccagatttaaggggcaaacccagatttaagatcaacacatataatgactcagtgtatagagacaaatgtcaccaactttattacataacaaaaatgtcttaaaaaataactgataataaataaagcaaaataataatattatcatcccttggcgccatcatgctgactgggagacgacacctagacctcatcgaacttgtcgtagtagtcctcctccggtggcacctgctcttcacctgggcggttatcgcaagagtgagctcataaaagttcatcgctcaacaagtgtggcgaataatgtgcatgagctcacttacggtgggggttcatgtataatgtaaggctgatcaacaaataatggttaaagctgacattgcttttaataagttggtcaaattttattagcctttagtaagtataaatgtataccatcccaatataataatagatcataattataataaaacccacagtgcaatgcatatgacaagttaagtttaatttcatacgttactcatgtgagtgttcgagtcgctcatgactgtgagcacgactgatatactagttttacagtctgcagaggttgcacatctttacccacaagccgtgtcacccatttgccaaggtgtctagaaatcccattcatctataccgaggatacaaggcagagtagcactaagaggcctttccaaagtttcactagttcgagaaaacccgctacagattcaggaagaaggaagcataggaatccctcgtccaaaaagctttacagacagtccgatccgaggacctccctatactttgtagcgatgcactccccgcttgtcccttttgggtaaggtagtctctccctagctttcctaattacttgaccaagggtgtcccattccacccttgtggcagcactatttacctgggtggttctctatgttctagttaacacaataatcttatcatgaacaacaaataatccaacagtaataataaagcatgatcacgtgttataaaatattacttcccaaaaccaagtatagcatagccaaactacccaataattcatttgtatgcaaggtgtgaggtaaacaaactagggcaacctattaggtcccctcaatttaacctgagcatatcacaatgattatagagaacattattgggtaaagaagaatggtcaagggcacaacttgccttcagcgagctcctgtttagtatcttcaacctgctgtg

SEQ ID NO: 45559 - DNA, 1621 bp, Zea Mays
gttcaatgcagaccgtcgaccctctcaccaacggccgtcaattcagcaccgctggtccgccttccccatccccatcccccgccaccggcggcggccgttattcagcaccgccttcctccggcgaccgccgcgccgccgttccctggtctaggttctcgcctcttagcaaccagagcgcgcgcctaaatgaatgcggtggcggaggaggacagggcggcggagctggccggcccgctccgggacctcctcccgcctgtggacttctgctgcgcgtacggctccacgctccttcacgcacgccccgacgggacgtccatggtcgattacatcatcggcgtcgctgaccccctccagtggcactccgaggaattgtttcttggtcggtgcagaacctggaaaggaaccccgcgcactactcccgctggatggccggcttcggtgcaggcgccatcactggactggcggatcatgttggggtcggggtgtacttcaacccatttgtggaatggagagacaagaggataaaatatggggtggtaaggatgagggacctggcaatggatgtcttgacctgggacaggttctacctcagtggtcggctgcagaaaccggtccatgttcttgttgacaactgggatataaggaaggtcaactcaattaacctagaaatggcaacttcagcttctctactccttttaccagcggagttcacggagtacgacctatatgctcaaatctgcagtctatcatatatgggtgatttgagaatgctgtttgcggaagacaaagataaggtgaagaagattgttgagggtagttttcagtcgttccaattgatgtacagccccctcttgcaagagtatattgctgaaggcctattgaagacatcatcccatggacaatataaaactttccggcaggattgcggtccatgtacaacaaatgaactgttctctgttcttccgtggacgatccaaagccaaatgcaaggaaggcacacattgcacggaaaagaagtaccaccacgcaccgtagtttcttccaaggagatggcagcaaactgtgtccggagggccctgaggcaccgagtaatggtttcaagcgtgcggcaagcagtgtgtggtctgctcgcctctggcggtgcagttgctgctcaatacctcgggaagaagatggcgaaggcttggcgatctagagtgccttaagccaatgctgcccccccccaccccacacaccaacaccccaatggtgtacgctaggcttttgccagttctgggtttcatgcagtgtatggcaatcagtatcgtatgtttttcaccgctgaaagcctgataccggctgaaattttgtaggaccagaaacgtcaatgcttcagaatcaacaccacgcatatattagttataggcaaattcgtcttcactcagagctagtttggaaattcaaaccatctttaaaattgaaggagatttgagcttccaaaccaacccttagcacttcattgcaccttgtgtagcgaaagattggttcttggggcagcattttctttatcacactcccgttctaaaataatagacattatagctcttggtttttgtctatattcaattgaatgaggatgaac

SEQ ID NO: 45560 - DNA, 1594 bp, Zea Mays
gttcaatgcagaccgtcgaccctctcaccaacggccgtcaattcagcaccgctggtccgccttccccatccccatcccccgccaccggcggcggccgttattcagcaccgccttcctccggcgaccgccgcgccgccgttccctggtctaggttctcgcctcttagcaaccagagcgcgcgcctaaatgaatgcggtggcggaggaggacagggcggcggagctggccggcccgctccgggacctcctcccgcctgtggacttctgctgcgcgtacggctccacgctccttcacgcacgccccgacgggacgtccatggtcgattacatcatcggcgtcgctgaccccctccagtggcactccgagaacctggaaaggaaccccgcgcactactcccgctggatggccggcttcggtgcaggcgccatcactggactggcggatcatgttggggtcggggtgtacttcaacccatttgtggaatggagagacaagaggataaaatatggggtggtaaggatgagggacctggcaatggatgtcttgacctgggacaggttctacctcagtggtcggctgcagaaaccggtccatgttcttgttgacaactgggatataaggaaggtcaactcaattaacctagaaatggcaacttcagcttctctactccttttaccagcggagttcacggagtacgacctatatgctcaaatctgcagtctatcatatatgggtgatttgagaatgctgtttgcggaagacaaagataaggtgaagaagattgttgagggtagttttcagtcgttccaattgatgtacagccccctcttgcaagagtatattgctgaaggcctattgaagacatcatcccatggacaatataaaactttccggattgcggtccatgtacaacaaatgaactgttctctgttcttccgtggacgatccaaagccaaatgcaaggaaggcacacattgcacggaaaagaagtaccaccacgcaccgtagtttcttccaaggagatggcagcaaactgtgtccggagggccctgaggcaccgagtaatggtttcaagcgtgcggcaagcagtgtgtggtctgctcgcctctggcggtgcagttgctgctcaatacctcgggaagaagatggcgaaggcttggcgatctagagtgccttaagccaatgctgcccccccccaccccacacaccaacaccccaatggtgtacgctaggcttttgccagttctgggtttcatgcagtgtatggcaatcagtatcgtatgtttttcaccgctgaaagcctgataccggctgaaattttgtaggaccagaaacgtcaatgcttcagaatcaacaccacgcatatattagttataggcaaattcgtcttcactcagagctagtttggaaattcaaaccatctttaaaattgaaggagatttgagcttccaaaccaacccttagcacttcattgcaccttgtgtagcgaaagattggttcttggggcagcattttctttatcacactcccgttctaaaataatagacattatagctcttggtttttgtctatattcaattgaatgaggatgaac

SEQ ID NO: 45561 - DNA, 1724 bp, Zea Mays
gttcaatgcagaccgtcgaccctctcaccaacggccgtcaattcagcaccgctggtccgccttccccatccccatcccccgccaccggcggcggccgttattcagcaccgccttcctccggcgaccgccgcgccgccgttccctggtctaggttctcgcctcttagcaaccagagcgcgcgcctaaatgaatgcggtggcggaggaggacagggcggcggagctggccggcccgctccgggacctcctcccgcctgtggacttctgctgcgcgtacggctccacgctccttcacgcacgccccgacgggacgtccatggtcgattacatcatcggcgtcgctgaccccctccagtggcactccgagaacctggaaaggaaccccgcgcactactcccgctggatggccggcttcggtgcaggcgccatcactggactggcggatcatgttggggtcggggtgtacttcaacccatttgtggaatggagagacaaggtaccatgaatcgtggtgccttgtgttcgatggcattgtgttccactggctgtgcgtgaattgagtacttgatgaagaaatctgtcttttggtggcgcagaggataaaatatggggtggtaaggatgagggacctggcaatggatgtcttgacctgggacaggttctacctcagtggtcggctgcagaaaccgttgattttgtctctgtattttgctaggtccatgttcttgttgacaactgggatataaggaaggtcaactcaattaacctagaaatggcaacttcagcttctctactccttttaccagcggagttcacggagtacgacctatatgctcaaatctgcagtctatcatatatgggtgatttgagaatgctgtttgcggaagacaaagataaggtgaagaagattgttgagggtagttttcagtcgttccaattgatgtacagccccctcttgcaagagtatattgctgaaggcctattgaagacatcatcccatggacaatataaaactttccggcaggattgcggtccatgtacaacaaatgaactgttctctgttcttccgtggacgatccaaagccaaatgcaaggaaggcacacattgcacggaaaagaagtaccaccacgcaccgtagtttcttccaaggagatggcagcaaactgtgtccggagggccctgaggcaccgagtaatggtttcaagcgtgcggcaagcagtgtgtggtctgctcgcctctggcggtgcagttgctgctcaatacctcgggaagaagatggcgaaggcttggcgatctagagtgccttaagccaatgctgcccccccccaccccacacaccaacaccccaatggtgtacgctaggcttttgccagttctgggtttcatgcagtgtatggcaatcagtatcgtatgtttttcaccgctgaaagcctgataccggctgaaattttgtaggaccagaaacgtcaatgcttcagaatcaacaccacgcatatattagttataggcaaattcgtcttcactcagagctagtttggaaattcaaaccatctttaaaattgaaggagatttgagcttccaaaccaacccttagcacttcattgcaccttgtgtagcgaaagattggttcttggggcagcattttctttatcacactcccgttctaaaataatagacattatagctcttggtttttgtctatattcaattgaatgaggatgaac

SEQ ID NO: 45562 - DNA, 521 bp, Zea Mays
gccccgccccccgctttctctctctctcgcgcgcgccccatggacaaagttggcctttcctgagggtcttgttcctcgggcgaagttactgctatcacttggcagcaccttctttctggcgtttgggcccctgattcttgtcaccgtctcccttttcgctgttttatacgtgtactttggaccgagttttgtacacgatgcaagcaagacgccggtgtcgccgccaccgtacattgatccatacgagctactggaggacgagaggctcagccggccctccccagatgtgttctgaacatgaacagtgcaagaaccagtgcataattgattacaagaaatagtcatacatagcccaaaacttatcttttttactagacgtatagttgtaaatgcaactataaccatagagtgttataatcacttaatcagaagttttagcacgtagtattccatccatcgatttcagatctgaaacagttaaggtgtttggtttctagggctaaattttagtcctacatttt

SEQ ID NO: 45563 - DNA, 871 bp, Zea Mays
agatccccacagctgccgccaagcgagcccggtccgacttggcctctcccccgccaaacaacgcctcgacgcgacgacccagcccagccccgcgccgcgatggccatgaccgtgatccgcctcgccgccatccgcccgccgtcggcctcttcctccgccgcgtccccgtcgctgtggccgcccgcgcggctgcgcctccgcgtgaggtgccgcgccggcggggacggagggatgaagaaggaggagggggaggccgaggcgcccgagtcgctcttcgccagggagctccggcggcgtgggatggcgccgggggccggggccaagcgcggggtggcggccaccgagttcgagcgcggcgccgcggcggacggccagcgggagcgctccatggcgctcaacagcgagggcctcgagggtcttgttcctcgggcgaagttactgctatcacttggcagcaccttctttctggcgtttgggcccctgattcttgtcaccgtctcccttttcgctgttttatacgtgtactttggaccgagttttgtacacgatgcaagcaagacgccggtgtcgccgccaccgtacattgatccatacgagctactggaggacgagaggctcagccggccctccccagatgtgttctgaacatgaacagtgcaagaaccagtgcataattgattacaagaaatagtcatacatagcccaaaacttatcttttttactagacgtatagttgtaaatgcaactataaccatagagtgttataatcacttaatcagaagttttagcacgtagtattccatccatcgatttcagatctgaaacagttaaggtgtttggtttctagggctaaattttagtcctacatttt

SEQ ID NO: 45564 - DNA, 2201 bp, Zea Mays
tccccatcagagagccctcttgacgccagcccactcccagctcaaccatttccagcctcaattagccgaggcccggcccattccttgcccacgtcatctttctgtctctccctctcatcgccgcgtcacgcacagccgccgccgtcgtgcgcgtgtgccggaacggccgcgtggatcctccgccccgtcccagcggcgacttgtccgtgcgaagatgctggggttctcgaccggacagctgctggtcgtcctcggggcctgctccgtcatgatgaagcccagtgatatggtgaagattgcgaggacggccgggcggatgactggaagagcggttgggcggctcatagtggctcgccggcagctggacgagattctgggccagtctgcagccacccaggttcataaggagcttaaagacgctatgacacaattagactcgatccgttatgaagtccagaacttatcaagattatctcctgggcagtttatgttgaagcaacataacgctggcatggctgaagcagggaaatctgactcctctgatggtcctacaaccaacgtatggtggtatatcattttatttcagttttagtccaagtacttgaagggcctggtgcaatgcaggtcgcgggttcgaagcagtctcctcatttgcggagaaggcttgtcttggttgattcgttccccaaaccccactcatatgggagcctccgtctgtccgccactgggtctgcccttttaatatgagtatttgaggtctaatggttgatatttcaacagatttaaaatgcttaaatgtgaatttgctataagtagcagcctgatgtgcctactatgacatacagatacagtctgttgtgtgacttcagtacagatacattttaggctgatatagtcctattctgtgcattctggccatgattcattttgaaattattccaaggcttaaaacatgcacaagaaacaatcacacgaaggatgtgcttttttaagttatgtgttgttcaatgttttttcacttttttgtagatagatcatagatctgagtgttgaccatgttgtggtcgccaatagctacatgatgttggaacttttcatttcaatgcttgcactgcacttgaaacattggttccttctacttgttaacttttggtttacttctttgtcaagagatatacttaatagagcttttatggcaatgcagcaagaagaatttcgtcaggaaattcgcagtataattcgcgatgaatttgaaaaatactgtagaacacagcccattcaaaactctgtgagcacaactgaacacagaaaacttcatgtggctgatgaaccaacggcactgaaatccaaggattgacaaatctgcacaaccaagcaatgacgtatgcaaggctatctgaagccccaggacttaagatggattcttccttgagtgggaactacaaagatcaatctaaggagatggatgggctgctaactgtactgccaatatcagctgaaagtgctggattacttccaagccgcccagataaaccaacaggctcagatctagtccttgaggctgtgcttgaagcggaagttgcggagaacgctaaactgtttgtgtcgcagcctcatgatcagctacctaaggaatgaagacgaagatgatgtgcttgaagacgttgcaaacaggaccaaactgttcagctgacagccgcatggtcagttgcctacggagcgatgatggtagtttttgatccttaacaggatttggcatactaggcctgtttggtagagctctagaagttgatataccgatctggcgtccagcaccagcggtgtagcttgtagtcttgtaccctcaggcctcaactagccagctaggattcggatgccatggtagaaactggcgacatagcttgtagcctcaactagccaggtaggtttggctgccatagttgaggtaaagctgtggccggtgggcacgtagcttgtggcctcaaaaggagcaagaaagaaaaatagagtaaattagttgtggttatcaatgtgcatggtgattttaaagcttttaaggatgtcatctgtattctgtgtcctcgcaacactgatattctttgcaactctgagtagagagatacacggaatgttcagcttttcagatccattgatggtagtgttgtttttaatgttcccaagacttctgaggaagctgcaag

SEQ ID NO: 45565 - DNA, 1706 bp, Zea Mays
caaagatgtaagcccggttgacactccccatcagagagccctcttgacgccagcccactcccagctcaaccatttccagcctcaattagccgaggcccggcccattccttgcccacgtcatctttctgtctctccctctcatcgccgcgtcacgcacagccgccgccgtcgtgcgcgtgtgccggaacggccgcgtggatcctccgccccgtcccagcggcgacttgtccgtgcgaagatgctggggttctcgaccggacagctgctggtcgtcctcggggcctgctccgtcatgatgaagcccagtgatatggtgaagattgcgaggacggccgggcggatgactggaagagcggttgggcggctcatagtggctcgccggcagctggacgagattctgggccagtctgcagccacccaggttcataaggagcttaaagacgctatgacacaattagactcgatccgttatgaagtccagaacttatcaagattatctcctgggcagtttatgttgaagcaacataacgctggcatggctgaagcagggaaatctgactcctctgatggtcctacaaccaacgtcgcgggttcgaagcagtctcctcatttgcggagaaggcttgtcttggttgattcgttccccaaaccccactcatatgggagcctccgtctgtccgccactggcaagaagaatttcgtcaggaaattcgcagtataattcgcgatgaatttgaaaaatactgtagaacacagcccattcaaaactctgtgagcacaactgaacacagaaaacttcatgtggctgatgaaccaacggcactgaaatccaaggacatgaagatggctaattcaggattgacaaatctgcacaaccaagcaatgacgtatgcaaggctatctgaagccccaggacttaagatggattcttccttgagtgggaactacaaagatcaatctaaggagatggatgggctgctaactgtactgccaatatcagctgaaagtgctggattacttccaagccgcccagataaaccaacaggctcagatctagtccttgaggctgtgcttgaagcggaagttgcggagaacgctaaactgtttgtgtcgcagcctcatgatcagctacctaaggaatgaagacgaagatgatgtgcttgaagacgttgcaaacaggaccaaactgttcagctgacagccgcatggtcagttgcctacggagcgatgatggtagtttttgatccttaacaggatttggcatactaggcctgtttggtagagctctagaagttgatataccgatctggcgtccagcaccagcggtgtagcttgtagtcttgtaccctcaggcctcaactagccagctaggattcggatgccatggtagaaactggcgacatagcttgtagcctcaactagccaggtaggtttggctgccatagttgaggtaaagctgtggccggtgggcacgtagcttgtggcctcaaaaggagcaagaaagaaaaatagagtaaattagttgtggttatcaatgtgcatggtgattttaaagcttttaaggatgtcatctgtattctgtgtcctcgcaacactgatattctttgcaactctgagtagagagatacacggaatgttcagcttttcagatccattgatggtagtgttgtttttaatgttcccaagacttctgaggaagctgcaag

SEQ ID NO: 45566 - DNA, 1715 bp, Zea Mays
aagtgcctctcatcagcatcacccatcggccatctactccagtctcccactcacctatctcgcagcgcccgagcaatcgccacgcccacgccccaatggaagacagcgccaccaatggccatggggtgtgacggctgtcccggcctcgtggaacttcgagccaaacgagaccctcctgggtcttccggcgctctcggttcgcggcgtgctgaccagagtcatggccgggatgttgcccgacggtgggcgggcggtggtccggttgggcagcggcgacccgacagcgttcccgtgcttccggacggtgccagaggccgtggacgccgtcgccagcgcggtccagtccgggcagtacaactcctattccactagcgtcggccttgagctcgcacggaggtccattgctcagtacttatcctgtgatttgccatataaactgtcacctgatgatgtctacctcacaagtggttgcactcaagcaattgagatactctgctctgcgttagctcgtcctggtgcaaacatcctgcttccaagacctggatttatgttctatgaggcgcgtgctatcttcaatggcatggaagcccgttacttcaatcttctacctgggaacggctgggaggttgacattgatggcgtccaagctcttgccgacaagaatactgttgccatggtcattgtgaacccaggaaacccatgtggcaatgtgtactcctatgagcacctggccaaggtcgctgagaccgcgcgaaagcttggcatattcgtcatagcagatgaggtttacgcacacttgacatttggagagaggaaatttgtgccgatgggtgtgtttggggctgtggctccagtgttaacactggggtccatatcaaagagatggatggtgcctggatggcggcttggatggattgttaccaatgatccgaatggtgtatttcagaggactaaggtagtgcacagcatcaagagctaccttgatatctcctctgatcctgcaacatttgtccagggagcaataccaaaactcgtggagaacacaaaggaggaattcttcgaaaaaactatcgaaattctaaaacgatgtgtagatatatgctgtgaaaagctgaagggcatcaatgcaatcacgtgcccaagcaaaccagagggatccatgtttgtaatggtctgtgaaactggatctgtcctgcctggagggcatcaaagatgacatggacttctgctgccggctggcaaaggaagaattagtggttgttctgccaggatgtgctgtcggatacaaggattggcttcgcatcacctttgcgattgatccatcttctctggaagaggggcttgacaggctcaagtccttctgcttgcgatacagaaagccaacaaagtgataagataaagtcaccagttctatgcaacagagacaaaaattgttatgaacttctgcacagatatatgatattgtatcatcttcactcgaagatgacatgtttgatgctctttgtctatagtaaataaatgatgtctcttctctgtcatctacttatctactgtttgtaggcgcaacacaaattttaggggatatgaagtgtagaagactctgcctcttgcacgaaaccatcatgcaagtttggcataataactttcgaaatgaaatcaccacattgattctgctcccatgattctaaattataagttgttttgttgttttttct

SEQ ID NO: 45567 - DNA, 1460 bp, Zea Mays
gttatgcaaaaaaaaattaatcctataccagcagtaatacactaatactactatactctgctttgtacttctataatacataagaatacatataatcaagtataaacataatccgcctaattttctcatggcagcttgaatcaacatgaattgaggggtgtgaggcaatcataatatgatgggaagtaaactcagggaaacatgtacacaacacattagcaaagctagaatgcaacaaatgatgaagtttagagctttagtgttttttacactagtttctgaatctgattgtacatgcatacctttcttgaaggcccagagcctgttttggctggaggatttttcaactgccacaaagaataatgaagtaagttggagaaacacgattcatgagctaacaacaaaaatatactagaaagtaaaaaaaatagtggcaagctcaaaaagcagaaatctgtggatgtagttaaatattctgcaatgataacaagccaaatatactttccaaattatgcaaaggggctcacggcaagtggcaataactttctgcaattgttccttctttctgtcaagttatttcaattgtcttatgcaatgattctgcaattattctgcaattgtttctgcaagtggcatatatgtggatgtagttaaatattctgcaatgataacaagccaaatataactttctgcaaaggggctcatgagaaattgtcttaactttctgtcaagttcaattcacctattcctcatcaatttcaccatatatgtcaatcattgtcataacttacaactacttagttattttaggtattgtgccttctttgttgtttgaatctaaataatatacccttaaagtactgaaagctattacaaagttttaaattacatagacatccgaaattttcataggaaaatgtttgaatctaaataatgtacccttaaggtacagaaaaagagcaggaccagctatactattacatagttctaaatttcatagacatctgaaatcagtgtagaagccggctcaactccttaagccatgggatgatcctgtcattggtgtcacacagtcgatgtaagttgtttacatgcatgctggactaattcatgatcaaccctattacacgatctattctctattacagtggacaaactccacctctttaagcttaatgccaagcagttcagcctcggttaaaccaattgtcttttttattttagagcttagttcactgataattgttttgttttttctctgaaaaattagagaaattaataacttattttcctgttcctacaacttaataaagtctcattacaagtcatgtttttaagcaggctatgcgttctttctccgagaaagatattctttctctaattgctaaacttgtactaaggggtgttgaacaaaaagatttttgtcggaggcgttgcttgggagacaactgaagatttat

SEQ ID NO: 45568 - DNA, 2240 bp, Zea Mays
gttatgcaaaaaaaaattaatcctataccagcagtaatacactaatactactatactctgctttgtacttctataatacataagaatacatataatcaagtataaacataatccgcctaattttctcatggcagcttgaatcaacatgaattgaggggtgtgaggcaatcataatatgatgggaagtaaactcagggaaacatgtacacaacacattagcaaagctagaatgcaacaaatgatgaagtttagagctttagtgttttttacactagtttctgaatctgattgtacatgcatacctttcttgaaggcccagagcctgttttggctggaggatttttcaactgccacaaagaataatgaagtaagttggagaaacacgattcatgagctaacaacaaaaatatactagaaagtaaaaaaaatagtggcaagctcaaaaagcagaaatctgtggatgtagttaaatattctgcaatgataacaagccaaatatactttccaaattatgcaaaggggctcacggcaagtggcaataactttctgcaattgttccttctttctgtcaagttatttcaattgtcttatgcaatgattctgcaattattctgcaattgtttctgcaagtggcatatatgtggatgtagttaaatattctgcaatgataacaagccaaatataactttctgcaaaggggctcatgagaaattgtcttaactttctgtcaagttcaattcacctattcctcatcaatttcaccatatatgtcaatcattgtcataacttacaactacttagttattttaggtattgtgccttctttgttgtttgaatctaaataatatacccttaaagtactgaaagctattacaaagttttaaattacatagacatccgaaattttcataggaaaatgtttgaatctaaataatgtacccttaaggtacagaaaaagagcaggaccagctatactattacatagttctaaatttcatagacatctgaaatcagtgtagaagccggctcaactccttaagccatgggatgatcctgtcattggtgtcacacagtcgatgtaagttgtttacatgcatgctggactaattcatgatcaaccctattacacgatctattctctattacagtggacaaactccacctctttaagcttaatgccaagcagttcagcctcggttaaaccaattgtcttttttattttagagcttagttcactgataattgttttgttttttctctgaaaaattagagaaattaataacttattttcctgttcctacaacttaataaagtctcattacaagtcatgtttttaagcaggctatgcgttctttctccgagaaaggtaatccttcttttatcaatttgaagaaaaccatttgtattatgatttttctatcctaattcctagaaactgaattctgaattttctatttcttgtaatgttcatttcagatattctttctctaattgctaaacttgtactaaggggtgttgaacaaatttttgtcggaggcgttgcttgggagacaactgaaggtaaaatttatgtgttatttactggactgcttgcgcctggagtttgatttttctattttggttctttagatgtttggaatgctaaaataaaggagctcctggagttttctttgcctagaactagatgggttctctagatgttttgaatgctgaaataaaaatgtggaaacatcaaacattaactatcggcgagtaggttgtcatatagggttgatatggcgtctgttattgtggaaagtagtgtttctgttagcatgcttccattaagtgtccgacatgccattttccttgtttgtctctgttcttttgctacattggcttaatgttattcgtgtgttttcttccatattttgttgcttgtggcattattcgttatttggttggttgaagatatagagcatgcattcatcatatctaagtgatcggagtgatattgattggcttattagatggatattggcccagtttatctttcattttttctatagctgttagaaatttactttgctcatagttcatactataattaatatgagactcttgttttgtggtccaagtgttcaacgctcagggtgccttggaagtacgctagcttgttgtcatgaagaagtcattcaagttccttccagggagttattagttcatatgtatatttctgtttatatcttatcttgtttatg

SEQ ID NO: 45569 - DNA, 518 bp, Zea Mays
tgaaactctccctcccacgtcgtccctgtctcctcccgacatcgtcgtcgtcgcccccgtccctgtagtcgccccgtgctccgcccgctccaccagggcgcctcgccctggggggacggtctctgaccactggcctcccttcaccgccgaccagcgaccacgtgctcagtgacgcctaggtcatcgacgccgaagtttggaggccctatacgtgcttcacgtgcgggttcttcaagaatacctctgtcacttcctccatggccgaagtctgggagcggcaaggctatgcgttctttctccgagaaagatattctttctctaattgctaaacttgtactaaggggtgttgaacaaaaagatttttgtcggaggcgttgcttgggagacaactgaagtgttcaacgctcagggtgccttggaagtacgctagcttgttgtcatgaagaagtcattcaagttccttccagggagttattagttcatatgtatatttctgtttatatcttatcttgtttatg

SEQ ID NO: 45570 - DNA, 2323 bp, Zea Mays
cttttttgaaccttggagtagagaatgcggattttacggcttccgtcctgaaatataagagacagactaacttgaggtggcattctaagtctggagaaagtccaatctctccagttgatttgacatctagtgatgaagaacacagccatgatcctgattcttcttccataaaaaagtctaggaaaaaactaaagcagctagatgccacattagctgaaggttctgaacacgcttcagtctctgagatggacattcctttgtcagctatgtgcaagtcaccagaaagcacacattcgccgaattctttgctctctgagaagagcagtcctcaaggttcacatgtgatagtgaatttggttccaatgaatggacttcattgtgcttcttcagggcattcagcaccagtggacaaccaagcaatcctgtctgatatgggtgtttttgatggtgagcttcatgaatctgtatctgggagaagcgttgatgcatatgatatgcttcccattgctgaactaagaaagaaaatggcttcagctagaagaaattgtgctgtccaacatacagaggaacaacatgtgaaatcgctcagagtgaagaaatgtatatcgaatagtaaagacaaaaaaacgcgccctattcaagagcttatgggagaaattcagttgaagggaaacaagaatttctctagggactttgttttagctttgggcgtctctagggatggcccgactactttatctccagatagactggtgtcaatagggccaaaaaggtgctcaagtacaaaggttcttgcctgtaagaaattggctaagaggagaggatccaaagaactgtgcagtccaaatagctcattggatgtgactaggactgaccagcagggaggaagaaaggaagtggcagaagcaatgaaagaatgttccttagcacttgacagaactttggaggatgcaaagaatataactgaattatcaaatcaggagaacctcttatccatgctgcctcctggctttaaatcagtgtctaacaggaaaggtactaacatacatgatgctcaacttggggaagaaccagcggttatgaccaacaacagccttattgaaccgaatggaaatgatgacatgtgcacagaccatgctgctactaccaagttagctgaaaactacaatgtgatggaaacagctatcatgtctattgattgtccggctcaacaaccctgtggggaagtggatgagaggtcagttttaggtcttaagaatgctgggagtacacagtgcatcatcgacagttctccatcgagtgagagcttgttgccttcaccgcaggctttgttcgtcaagagctcacctgtgtggcatatagttgaagcaatgcatgtgtttaaagagttacctcaacaaccacatttcattccactccaagaagtccccccgacactacgcgaaggaatggcattaggtatgatggtgtcattcgcggacttggtgaaggttacaatggaagcaagcataggcaacgacatggaatggtttgaggacaagatcaggacaatctcccatctagaggcaaatggatttagtgtgcaatctatacagagcgccatgaccgaaatggtcaaggtcaaaactgagcacaccagttatcattgcgaaatcggcaagctgagttcaaagttagtggagaatatggcttcctcctccagagccggtgcactgcttgatgaaaaagatgaagctgcagcacggctcgaggaagaacttgtgagtattcgccaagaaagccagaaaatcgcaaaggagaaggaaaaaatagatgcagaggtcgtgagtatcaagacagcatgtagcgggtatgaggatttgtgcagcggtgtggaacgcaagtttaaggaagtcttggctgggctgcagcggaagaggctaacctgatgcgcaaggtgttgatgtcatttcgctgcttcaaagttctaattctgaccactgtttctgcttttgggctgtaggtcatctatgtatcacggtaggttcagatcgatgtgctgtgcttagtttgtgcaagtcattcggtaccttttatatatctgtatggtgatcatgatggcttagggagcctgatgaagatcgactcttgataattgttactgctatattagttggaccgtatttatttgcctgcggcataattagtttgagggcaatttgtttccgttcttgtcaactttgattctcctgacttctatcgtctgatgttatttgatccaacttgacataggattgtcttatccgatgtctcgcttgaaacctttgtaacaccctatccctac

SEQ ID NO: 45571 - DNA, 2384 bp, Zea Mays
aacctggatcacctgcagtcgcctagcgcttttttgaaccttggagtagagaatgcggattttacggcttccgtcctgaaatataagagacagactaacttgaggtggcattctaagtctggagaaagtccaatctctccagttgatttgacatctagtgatgaagaacacagccatgatcctgattcttcttccataaaaaagtctaggaaaaaactaaagcagctagatgccacattagctgaaggttctgaacacgcttcagtctctgagatggacattcctttgtcagctatgtgcaagtcaccagaaagcacacattcgccgaattctttgctctctgagaagagcagtcctcaaggttcacatgtgatagtgaatttggttccaatgaatggacttcattgtgcttcttcagggcattcagcaccagtggacaaccaagcaatcctgtctgatatgggtgtttttgatggtgagcttcatgaatctgtatctgggagaagcgttgatgcatatgatatgcttcccattgctgaactaagaaagaaaatggcttcagctagaagaaattgtgctgtccaacatacagaggaacaacatgtgaaatcgctcagagtgaagaaatgtatatcgaatagtaaagacaaaaaaacgcgccctattcaagagcttatgggagaaattcagttgaagggaaacaagaatttctctagggactttgttttagctttgggcgtctctagggatggcccgactactttatctccagatagactggtgtcaatagggccaaaaaggtgctcaagtacaaaggttcttgcctgtaagaaattggctaagaggagaggatccaaagaactgtgcagtccaaatagctcattggatgtgactaggactgaccagcagggaggaagaaaggaagtggcagaagcaatgaaagaatgttccttagcattggagtgtccgaaatctgatgctcaagggcagcttgacagaactttggaggatgcaaagaatataactgaattatcaaatcaggagaacctcttatccatgctgcctcctggctttaaatcagtgtctaacaggaaaggtactaacatacatgatgctcaacttggggaagaaccagcggttatgaccaacaacagccttattgaaccgaatggaaatgatgacatgtgcacagaccatgctgctactaccaagttagctgaaaactacaatgtgatggaaacagctatcatgtctattgattgtccggctcaacaaccctgtggggaagtggatgagaggtcagttttaggtcttaagaatgctgggagtacacagtgcatcatcgacagttctccatcgagtgagagcttgttgccttcaccgcaggctttgttcgtcaagagctcacctgtgtggcatatagttgaagcaatgcatgtgtttaaagagttacctcaacaaccacatttcattccactccaagaagtccccccgacactacgcgaaggaatggcattaggtatgatggtgtcattcgcggacttggtgaaggttacaatggaagcaagcataggcaacgacatggaatggtttgaggacaagatcaggacaatctcccatctagaggcaaatggatttagtgtgcaatctatacagagcgccatgaccgaaatggtcaaggtcaaaactgagcacaccagttatcattgcgaaatcggcaagctgagttcaaagttagtggagaatatggcttcctcctccagagccggtgcactgcttgatgaaaaagatgaagctgcagcacggctcgaggaagaacttgtgagtattcgccaagaaagccagaaaatcgcaaaggagaaggaaaaaatagatgcagaggtcgtgagtatcaagacagcatgtagcgggtatgaggatttgtgcagcggtgtggaacgcaagtttaaggaagtcttggctgggctgcagcggaagaggctaacctgatgcgcaaggtgttgatgtcatttcgctgcttcaaagttctaattctgaccactgtttctgcttttgggctgtaggtcatctatgtatcacggtaggttcagatcgatgtgctgtgcttagtttgtgcaagtcattcggtaccttttatatatctgtatggtgatcatgatggcttagggagcctgatgaagatcgactcttgataattgttactgctatattagttggaccgtatttatttgcctgcggcataattagtttgagggcaatttgtttccgttcttgtcaactttgattctcctgacttctatcgtctgatgttatttgatccaacttgacataggattgtcttatccgatgtctcgcttgaaacctttgtaacaccctatccctac

SEQ ID NO: 45572 - DNA, 2838 bp, Zea Mays
agcagagtccccaagaccccaaccgaaaaccccagctgccccaaacccccgaatcccgttcgatacttcgatcccaatggtggcctcctccgccaatgcgccaccgggcgccggcgcacggaggccgcgcagccgcccccgcgggagcgtgcgctcgcggagcctgaggtggagcacgcctccgcgcagccccctgccgtcgtcgttgtccgcgtcgccccggcggcattgctcgctccccgcgctggacccgatcacgcccttacctgtcggcaccgaggtcgaggtccgcgtcgacgacgacggcttctacggctcatggttcgaggccaccgtcctcgacttcgcgcccgcgcgcggctaccgccaccctgcgcggtacaccgtcaagtacgtgcacctcctcgccgaggccgacgacgaaggcgtcctcgcggagcccttcgcgccgtcccacatccgcccgcggccgccgctcccgtcttcgccgccgcgcttccgcccccaccacatcgtcgaggcgttccacaacgaggggtggtggtcgggcatcgtcgtgtccgccgccggagccggggtcaccgtcgcgttccccgtcacccgtgaggtcatcgagttcccgtcgggcctcgtccgcccccgctgcgactacgttgacggtgactggatcccgtcccgggtcgcgatggttgtccgccccagccgcaccgtcagggtctacgaggtcggggacaaggtcgaggtggtgaggaaccgggacgtgtacggggactcctggtttcccgccacggtgaaggtcgtcatcgacaacctcagctacgtcgtcgagtactttgatctggaggaggaggagggcgggctggagaaggccaccgagtatctgcattggcggttcatcaggccggcttttgagcatacaccgggggagggtgagttccagctccagcctggtgatgccgtggaggcctactgtgatggggcatggtcaccgggagtcgtccatagggtcgtcagcgagggtgagtatgacatcagtattgttggcaagaaggcggaactgctggtgaccaaggtggtggaattgctcaagccgcggtataagtggaatggcaaccgatggagaattgcaactgctaagattcagttgaagggaaacaagaatttctctagggactttgttttagctttgggcgtctctagggatggcccgactactttatctccagatagactggtgtcaatagggccaaaaaggtgctcaagtacaaaggttcttgcctgtaagaaattggctaagaggagaggatccaaagaactgtgcagtccaaatagctcattggatgtgactaggactgaccagcagggaggaagaaaggaagtggcagaagcaatgaaagaatgttccttagcattggagtgtccgaaatctgatgctcaagggcagcttgacagaactttggaggatgcaaagaatataactgaattatcaaatcaggagaacctcttatccatgctgcctcctggctttaaatcagtgtctaacaggaaaggtactaacatacatgatgctcaacttggggaagaaccagcggttatgaccaacaacagccttattgaaccgaatggaaatgatgacatgtgcacagaccatgctgctactaccaagttagctgaaaactacaatgtgatggaaacagctatcatgtctattgattgtccggctcaacaaccctgtggggaagtggatgagaggtcagttttaggtcttaagaatgctgggagtacacagtgcatcatcgacagttctccatcgagtgagagcttgttgccttcaccgcaggctttgttcgtcaagagctcacctgtgtggcatatagttgaagcaatgcatgtgtttaaagagttacctcaacaaccacatttcattccactccaagaagtccccccgacactacgcgaaggaatggcattaggtatgatggtgtcattcgcggacttggtgaaggttacaatggaagcaagcataggcaacgacatggaatggtttgaggacaagatcaggacaatctcccatctagaggcaaatggatttagtgtgcaatctatacagagcgccatgaccgaaatggtcaaggtcaaaactgagcacaccagttatcattgcgaaatcggcaagctgagttcaaagttagtggagaatatggcttcctcctccagagccggtgcactgcttgatgaaaaagatgaagctgcagcacggctcgaggaagaacttgtgagtattcgccaagaaagccagaaaatcgcaaaggagaaggaaaaaatagatgcagaggtcgtgagtatcaagacagcatgtagcgggtatgaggatttgtgcagcggtgtggaacgcaagtttaaggaagtcttggctgggctgcagcggaagaggctaacctgatgcgcaaggtgttgatgtcatttcgctgcttcaaagttctaattctgaccactgtttctgcttttgggctgtaggtcatctatgtatcacggtaggttcagatcgatgtgctgtgcttagtttgtgcaagtcattcggtaccttttatatatctgtatggtgatcatgatggcttagggagcctgatgaagatcgactcttgataattgttactgctatattagttggaccgtatttatttgcctgcggcataattagtttgagggcaatttgtttccgttcttgtcaactttgattctcctgacttctatcgtctgatgttatttgatccaacttgacataggattgtcttatccgatgtctcgcttgaaacctttgtaacaccctatccctac

SEQ ID NO: 45573 - DNA, 4050 bp, Zea Mays
cgtcatctcccttctcgatgaccttctgccgagctcatgccttcaacttcaccttcatcgggagcactaaatatgagtaatttatctttgtgagggcggtgtagttatccctaccacccacctcatgaatcacctcctggatgcctggatcaccatgccatctttaaaggtgttgttcttagactttgtcttggatatcttcgacaatatatctctgataccaattgttaggacccttagaactttgttgtagcaagcacttgaccaagagagcacacaaactcacgtaacagtaacacataagaacacatatgaagcacaggacagtagcgcaaggattgacaaatcacagctgggtggagcatattagaggggccctgtcagtgcaagttctggtcgaaaatttgcaactttgggatcttgtatatgcgctggaactccaagccaacaatctaggcggtcaaacacataaaggctaattttctaatatgggtaacataccaaaacttagcactcaaggtttattttcaacatgtccatgtgaacttgattaggctaataaagggattttgggtctttcgtttgggtgaatttagaatgaggtggtcttggagtatttggcctacaattaagcatctttgtgtgagtttgtgctgttcatgggaggttttatttgattcctttggggattatggaactctgtattttgacatggggaagatttggattgagccatattgtttgaataatgattgtctaacatccatccttatcctctcctcctagttgcaggtacaaccgtgaataccgacatccctgttgtactcacaggcatctccatcaacctttgttttcttcgtgatgtgtgtgctaaatatttttgtgttcagatgatccattcacattgtactgactgagtcaacacactccactctagcatgatattggttcttccgatgtggcagctcagttcaaagtcatctcgatgctactttgtgtgcttgctcacatggagagtgctaaaatatgtggttttgagttattataaatgcccatgccaacgttttttttttgtttttttttttttgcagaagaatacaaacctgtggctttgtgttataaattgctttacatactgtagttttgtgagatttgttttttctttcctatcaaaataagtgtagaacaactgattctatagctcatggactaatcctttagtcttgggcttctatcatcagatcagtaggccagacaacctctcttgttcaccagttgcatgactaaaaaatatggtccacagagatagtaaagtgtggcatacaactattgaaataagttaaatgtgccatatagagaagattggaataaattaacttatcctgcttgtcaacatatttcaaataaataaaagtcctactaatattactgttaatttcggtttttatttatcttttatttatttattctggtcaataacaggtgctcagcattgtggcgaatgtgctttggtaaataagattatgactggaaatctcatacaccgccatgataagataaagcgtgaagctgatatcagtggcaatattaagatttttacggaagatgagattgaaagaattaccaacaacttcagcactcttatcggaaaaggtggctttggagaagtttacaggggaacccttgatgacgacaacgagcctgtagcagtgaagaaatacatcaacgaagattcgagggaagtgttcatggaagaggtacgcatccacagtaaaattggccacaagaacgtggtgaagctcataggctattgcatcggggaaagcactctcatgatcgtgatggagtatatgtccaaaggaaatctcaacgacctgctccactctgaaatctcgatccctttggatgtgagattgggtatcgctatagggtgtgcagaggcattgagctacatgcactcgatgcatgtatcatccggcaaccttgtctgtcatggtgacattaagccggccaacatacttttagacgacaatctgacagcaaaattgacggattttgggatctcaaggcttctggttggtggcgtcactcgctacactaccactgtgaaaggaagcataggttacatggatcctatatacattcaagagggacgccttactccaagaagtgatgtttatagctttggattagttctatgtgaactaatggctggaaaaggggtaagaaaaggtgcaatcaacctcattctatacgccaacaaaggctgtgcaagtggtaaagggttcagagagatttgtgatgctgcaatcgcaaacgagaacaacatgaagatccttaaagagatgcagaaactggcagccgaatgcctatcgctgaccatttctaggcgtcctcagatgactgacgtggtcaaacgcctccggacgctgagaaaggaactaaagaacaggcatgagaactattcggaaccaatcttggcatcgcaccattcgtggcgcaagaacaagaagcaagagatgatcgcgcccacctataactctaagctgcagatcaagaagagcctgagcttcttcaagaggagcatcagcagttccaaggtccaatcggagcccagcaacgtgaggattttcgcgcaggaggagctgaaagaagtcacgcacaattactcttgtctactcggtggaggtctttcaggcaaagtctacagagggacactcgaggacaacgcagtggtcgcggtgagagtgttctctgaagtgctcgagggcttcgaggaagcgtttgtcaatggcgggatgatcctgtctcagatatcccacaggaacgtcgtcaaactcttgggatactgcttggacgccgattgcccggcgttcgtgtacgagtacgcagctagaggcagcctatccgatgttctggacaggcacgaggacttcccgctcgatctacgcgcgaagatcgcggtgaagatcgcagaggcattggagtatctccattcaccagcgaccggtatcatcaggcacggctacgtggtaccgtccaagatacttctggatggcaatttcatgccgaagctcactggcttctcatgggcgaggaagcttatcaaggacccgattcacgatcgctgtgtgtcactgagagtgaaagccgatgtgtaccagttcggcgtccttctcctgatgcttatcagcaggaagaactttgtgttctacgccgaccacgacgacatcgttgcgcagttccgcgcggctcggcaggcagatggcagcgggagggcgttcttcgacgatgatgttgcaggtcatggcggagacgttggtctgcttgaggagatggggaggctgtcgctcaagtgtgtttgcgaggaaatagaccagagaccgacgatgagtgaagtggcagagcaccttcggatcattacgaggtcctggaagaagtgttcttcgtcagagggagctacggcgctggtatctaaagccatggctaaaaagtcccatgtcgccgccgaggctgaagccactaaacttgattggccacctggttcggacattagagactgaccaccgtaaggaatcgtgtacatactgtgaatgatgtattgtattgtataatcatcatcagcaatctttcatgcgctgcaatttggtttgcaattatataatgtgtcatgcatgtggtcatgtggatgaccaaccggaacgtgtcctgttcaaagttaacaggtcaacttgcaacctgaatgtgtcatgcatgtggtcatgtggatggcaaccttactgcaggagatgggaagagtcacaagaacacggttggcgaagcttggaggcgcagaacaggtctccgaacccgaggccattccctggtttgatggcagttccattctggaaacggtgggcgcatgtaatcggatcaaatatgaacggatattatttattttatatttgttttcattttttgaattcagactgggatactgatattatcaagtcgtgtcggataagatttgaatagatatcgatatcttaaatatctatctttaagaatatg

SEQ ID NO: 45574 - DNA, 4700 bp, Zea Mays
tgggctgattattatgcatgggttactgtattgttttgagtaaaatcgcagaacagcgtgtataatatggcgatatgtactagagaacacctgtgttggtgctcttttgcacaaattaagccacatggatggacgtgttcgtaatagcacagagccatgggacactattttcgcgatcttgattccaagcgggcacacgcggaagctgaaacggcctgaaagctcctgccatggcacatccaaaggatggaaagatactggatgctttcatcgtctttctcaggtcaaaaaaccagcggacctccatggcgctgaggcctagagtccgcaccttgctgtatgaacttgcaatgctagaggacagcgtgcacaactgtatgcacgatctgctggacacaagcttagccaatatagaatacacaaactcaacttatgtcctaaaccctaaacaccatcttactttaatgatgacaatttttctaaggtctattcctttgcttaaataaaagattgcatgcaaaataaattgcagttttattatcaaacacgtaaaaggctaccaccacactttctgcttctctggttgctaggtgtgttgggactgacaatgagaaaaaagataactcatgttgttctttcccgcacatctatatcgccggcgaaatcgtcgtcactgagcccaaccagatgagcttgttccttcttcctcccatactactgcctccaatacttgattcctgcggaatatgcttcacctcagcaaggtgatctttatacgaccctacaaaacggctcacatagccagcaaagaatgcaatatcatgacgggtgttaaccaagtacatgagacttgctgcagtgatgtcagtggtttctcgtttgcatcctccaccgccctgagccgaccggtaaggccttcgacagtgagtgtccacacatcaaggagggtcgtgatcgcttccacgatctgcttcaaatgttttggcgcactacaaatgatcttgttaaccatagtctcctccaatttttcgcccaaggtagctagagttgcgaccatccctttgagacacaacaacaaatctttgatgctcttgccctccttgaatgctgctagatcgaacaaccatcgaaggttctatatcgtcgtcttcttcacgcggtcatcccgtcatccccgacagacatctctgtgatggcatcccacacctccttcaccgtctccttgtcggtgactgcagacaccatctcaagtggcaatacacaacagagagcgtcaagcgccatcatctcctcgtgtgaatcgtcatctcccttctcgatgaccttctgccgagctcatgccttcaacttcaccttcatcgggagcactaaatatgagtaatttatctttgtgagggcggtgtagttatccctaccacccacctcatgaatcacctcctggatgcctggatcaccatgccatctttaaaggtgttgttcttagactttgtcttggatatcttcgacaatatatctctgataccaattgttaggacccttagaactttgttgtagcaagcacttgaccaagagagcacacaaactcacgtaacagtaacacataagaacacatatgaagcacaggacagtagcgcaaggattgacaaatcacagctgggtggagcatattagaggggccctgtcagtgcaagttctggtcgaaaatttgcaactttgggatcttgtatatgcgctggaactccaagccaacaatctaggcggtcaaacacataaaggctaattttctaatatgggtaacataccaaaacttagcactcaaggtttattttcaacatgtccatgtgaacttgattaggctaataaagggattttgggtctttcgtttgggtgaatttagaatgaggtggtcttggagtatttggcctacaattaagcatctttgtgtgagtttgtgctgttcatgggaggttttatttgattcctttggggattatggaactctgtattttgacatggggaagatttggattgagccatattgtttgaataatgattgtctaacatccatccttatcctctcctcctagttgcaggtacaaccgtgaataccgacatccctgttgtactcacaggtgctcagcattgtggcgaatgtgctttggtaaataagattatgactggaaatctcatacaccgccatgataagataaagcgtgaagctgatatcagtggcaatattaagatttttacggaagatgagattgaaagaattaccaacaacttcagcactcttatcggaaaaggtggctttggagaagtttacaggggaacccttgatgacgacaacgagcctgtagcagtgaagaaatacatcaacgaagattcgagggaagtgttcatggaagaggtacgcatccacagtaaaattggccacaagaacgtggtgaagctcataggctattgcatcggggaaagcactctcatgatcgtgatggagtatatgtccaaaggaaatctcaacgacctgctccactctgaaatctcgatccctttggatgtgagattgggtatcgctatagggtgtgcagaggcattgagctacatgcactcgatgcatgtatcatccggcaaccttgtctgtcatggtgacattaagccggccaacatacttttagacgacaatctgacagcaaaattgacggattttgggatctcaaggcttctggttggtggcgtcactcgctacactaccactgtgaaaggaagcataggttacatggatcctatatacattcaagagggacgccttactccaagaagtgatgtttatagctttggattagttctatgtgaactaatggctggaaaaggggtaagaaaaggtgcaatcaacctcattctatacgccaacaaaggctgtgcaagtggtaaagggttcagagagatttgtgatgctgcaatcgcaaacgagaacaacatgaagatccttaaagagatgcagaaactggcagccgaatgcctatcgctgaccatttctaggcgtcctcagatgactgacgtggtcaaacgcctccggacgctgagaaaggaactaaagaacaggcatgagaactattcggaaccaatcttggcatcgcaccattcgtggcgcaagaacaagaagcaagagatgatcgcgcccacctataactctaagctgcagatcaagaagagcctgagcttcttcaagaggagcatcagcagttccaaggtccaatcggagcccagcaacgtgaggattttcgcgcaggaggagctgaaagaagtcacgcacaattactcttgtctactcggtggaggtctttcaggcaaagtctacagagggacactcgaggacaacgcagtggtcgcggtgagagtgttctctgaagtgctcgagggcttcgaggaagcgtttgtcaatggcgggatgatcctgtctcagatatcccacaggaacgtcgtcaaactcttgggatactgcttggacgccgattgcccggcgttcgtgtacgagtacgcagctagaggcagcctatccgatgttctggacaggcacgaggacttcccgctcgatctacgcgcgaagatcgcggtgaagatcgcagaggcattggagtatctccattcaccagcgaccggtatcatcaggcacggctacgtggtaccgtccaagatacttctggatggcaatttcatgccgaagctcactggcttctcatgggcgaggaagcttatcaaggacccgattcacgatcgctgtgtgtcactgagagtgaaagccgatgtgtaccagttcggcgtccttctcctgatgcttatcagcaggaagaactttgtgttctacgccgaccacgacgacatcgttgcgcagttccgcgcggctcggcaggcagatggcagcgggagggcgttcttcgacgatgatgttgcaggtcatggcggagacgttggtctgcttgaggagatggggaggctgtcgctcaagtgtgtttgcgaggaaatagaccagagaccgacgatgagtgaagtggcagagcaccttcggatcattacgaggtcctggaagaagtgttcttcgtcagagggagctacggcgctggtatctaaagccatggctaaaaagtcccatgtcgccgccgaggctgaagccactaaacttgattggccacctggttcggacattagagactgaccaccgtaaggaatcgtgtacatactgtgaatgatgtattgtattgtataatcatcatcagcaatctttcatgcgctgcaatttggtttgcaattatataatgtgtcatgcatgtggtcatgtggatgaccaaccggaacgtgtcctgttcaaagttaacaggtcaacttgcaacctgaatgtgtcatgcatgtggtcatgtggatggcaaccttactgcaggagatgggaagagtcacaagaacacggttggcgaagcttggaggcgcagaacaggtctccgaacccgaggccattccctggtttgatggcagttccattctggaaacggtgggcgcatgtaatcggatcaaatatgaacggatattatttattttatatttgttttcattttttgaattcagactgggatactgatattatcaagtcgtgtcggataagatttgaatagatatcgatatcttaaatatctatctttaagaatatg

SEQ ID NO: 45575 - DNA, 2598 bp, Zea Mays
cttttgagttcagagaagatctacatatgtgtgctcagcattgtggcgaatgtgctttggtaaataagattatgactggaaatctcatacaccgccatgataagataaagcgtgaagctgatatcagtggcaatattaagatttttacggaagatgagattgaaagaattaccaacaacttcagcactcttatcggaaaaggtggctttggagaagtttacaggggaacccttgatgacgacaacgagcctgtagcagtgaagaaatacatcaacgaagattcgagggaagtgttcatggaagaggtacgcatccacagtaaaattggccacaagaacgtggtgaagctcataggctattgcatcggggaaagcactctcatgatcgtgatggagtatatgtccaaaggaaatctcaacgacctgctccactctgaaatctcgatccctttggatgtgagattgggtatcgctatagggtgtgcagaggcattgagctacatgcactcgatgcatgtatcatccggcaaccttgtctgtcatggtgacattaagccggccaacatacttttagacgacaatctgacagcaaaattgacggattttgggatctcaaggcttctggttggtggcgtcactcgctacactaccactgtgaaaggaagcataggttacatggatcctatatacattcaagagggacgccttactccaagaagtgatgtttatagctttggattagttctatgtgaactaatggctggaaaaggggtaagaaaaggtgcaatcaacctcattctatacgccaacaaaggctgtgcaagtggtaaagggttcagagagatttgtgatgctgcaatcgcaaacgagaacaacatgaagatccttaaagagatgcagaaactggcagccgaatgcctatcgctgaccatttctaggcgtcctcagatgactgacgtggtcaaacgcctccggacgctgagaaaggaactaaagaacaggcatgagaactattcggaaccaatcttggcatcgcaccattcgtggcgcaagaacaagaagcaagagatgatcgcgcccacctataactctaagctgcagatcaagaagagcctgagcttcttcaagaggagcatcagcagttccaaggtccaatcggagcccagcaacgtgaggattttcgcgcaggaggagctgaaagaagtcacgcacaattactcttgtctactcggtggaggtctttcaggcaaagtctacagagggacactcgaggacaacgcagtggtcgcggtgagagtgttctctgaagtgctcgagggcttcgaggaagcgtttgtcaatggcgggatgatcctgtctcagatatcccacaggaacgtcgtcaaactcttgggatactgcttggacgccgattgcccggcgttcgtgtacgagtacgcagctagaggcagcctatccgatgttctggacaggcacgaggacttcccgctcgatctacgcgcgaagatcgcggtgaagatcgcagaggcattggagtatctccattcaccagcgaccggtatcatcaggcacggctacgtggtaccgtccaagatacttctggatggcaatttcatgccgaagctcactggcttctcatgggcgaggaagcttatcaaggacccgattcacgatcgctgtgtgtcactgagagtgaaagccgatgtgtaccagttcggcgtccttctcctgatgcttatcagcaggaagaactttgtgttctacgccgaccacgacgacatcgttgcgcagttccgcgcggctcggcaggcagatggcagcgggagggcgttcttcgacgatgatgttgcaggtcatggcggagacgttggtctgcttgaggagatggggaggctgtcgctcaagtgtgtttgcgaggaaatagaccagagaccgacgatgagtgaagtggcagagcaccttcggatcattacgaggtcctggaagaagtgttcttcgtcagagggagctacggcgctggtatctaaagccatggctaaaaagtcccatgtcgccgccgaggctgaagccactaaacttgattggccacctggttcggacattagagactgaccaccgtaaggaatcgtgtacatactgtgaatgatgtattgtattgtataatcatcatcagcaatctttcatgcgctgcaatttggtttgcaattatataatgtgtcatgcatgtggtcatgtggatgaccaaccggaacgtgtcctgttcaaagttaacaggtcaacttgcaacctgaatgtgtcatgcatgtggtcatgtggatggcaaccttactgcaggagatgggaagagtcacaagaacacggttggcgaagcttggaggcgcagaacaggtctccgaacccgaggccattccctggtttgatggcagttccattctggaaacggtgggcgcatgtaatcggatcaaatatgaacggatattatttattttatatttgttttcattttttgaattcagactgggatactgatattatcaagtcgtgtcggataagatttgaatagatatcgatatcttaaatatctatctttaagaatatg

SEQ ID NO: 45576 - DNA, 3206 bp, Zea Mays
ctccggtaccacccccgcttgtgcttgtggcagcacagccactggtatctagtttactcattcctgactccctccctccgtgctgctacgatgcttcactccctgtatgctgttagtacagtacaaagattaaaccctctgaaaacactggctttggaatctgttccattcccacgtgtgcttgctctagatcgaatccccgtatatgcagcggtacaatcatttgccgtgttaggttttcgtttgctagtttgatgtcagaagtccgccgtggtgcagcactgcagtctgcaacggcgatcagctaccgacactttgactggcgtcctgcgcgctgcagcggggggatctccaggcaccgctgctgcatccgcgaaagttcctcttattgaaaaaaaaaaatcgcttgaccgattccacagacggacagatcaaccaatgagcgtcttccgggtaggccctcgaagccagtggactggttctgccacgtgggtttgctccccgtcgcagttcagcaccacaggctccatatggctcctttcgctgcagggctccttggttgcctggccggagaagtcgcttctggcagccgtcgccggagctgaggagcgggaaagcctgacgctgacgtgcgcacggtgctcagcattgtggcgaatgtgctttggtaaataagattatgactggaaatctcatacaccgccatgataagataaagcgtgaagctgatatcagtggcaatattaagatttttacggaagatgagattgaaagaattaccaacaacttcagcactcttatcggaaaaggtggctttggagaagtttacaggggaacccttgatgacgacaacgagcctgtagcagtgaagaaatacatcaacgaagattcgagggaagtgttcatggaagaggtacgcatccacagtaaaattggccacaagaacgtggtgaagctcataggctattgcatcggggaaagcactctcatgatcgtgatggagtatatgtccaaaggaaatctcaacgacctgctccactctgaaatctcgatccctttggatgtgagattgggtatcgctatagggtgtgcagaggcattgagctacatgcactcgatgcatgtatcatccggcaaccttgtctgtcatggtgacattaagccggccaacatacttttagacgacaatctgacagcaaaattgacggattttgggatctcaaggcttctggttggtggcgtcactcgctacactaccactgtgaaaggaagcataggttacatggatcctatatacattcaagagggacgccttactccaagaagtgatgtttatagctttggattagttctatgtgaactaatggctggaaaaggggtaagaaaaggtgcaatcaacctcattctatacgccaacaaaggctgtgcaagtggtaaagggttcagagagatttgtgatgctgcaatcgcaaacgagaacaacatgaagatccttaaagagatgcagaaactggcagccgaatgcctatcgctgaccatttctaggcgtcctcagatgactgacgtggtcaaacgcctccggacgctgagaaaggaactaaagaacaggcatgagaactattcggaaccaatcttggcatcgcaccattcgtggcgcaagaacaagaagcaagagatgatcgcgcccacctataactctaagctgcagatcaagaagagcctgagcttcttcaagaggagcatcagcagttccaaggtccaatcggagcccagcaacgtgaggattttcgcgcaggaggagctgaaagaagtcacgcacaattactcttgtctactcggtggaggtctttcaggcaaagtctacagagggacactcgaggacaacgcagtggtcgcggtgagagtgttctctgaagtgctcgagggcttcgaggaagcgtttgtcaatggcgggatgatcctgtctcagatatcccacaggaacgtcgtcaaactcttgggatactgcttggacgccgattgcccggcgttcgtgtacgagtacgcagctagaggcagcctatccgatgttctggacaggcacgaggacttcccgctcgatctacgcgcgaagatcgcggtgaagatcgcagaggcattggagtatctccattcaccagcgaccggtatcatcaggcacggctacgtggtaccgtccaagatacttctggatggcaatttcatgccgaagctcactggcttctcatgggcgaggaagcttatcaaggacccgattcacgatcgctgtgtgtcactgagagtgaaagccgatgtgtaccagttcggcgtccttctcctgatgcttatcagcaggaagaactttgtgttctacgccgaccacgacgacatcgttgcgcagttccgcgcggctcggcaggcagatggcagcgggagggcgttcttcgacgatgatgttgcaggtcatggcggagacgttggtctgcttgaggagatggggaggctgtcgctcaagtgtgtttgcgaggaaatagaccagagaccgacgatgagtgaagtggcagagcaccttcggatcattacgaggtcctggaagaagtgttcttcgtcagagggagctacggcgctggtatctaaagccatggctaaaaagtcccatgtcgccgccgaggctgaagccactaaacttgattggccacctggttcggacattagagactgaccaccgtaaggaatcgtgtacatactgtgaatgatgtattgtattgtataatcatcatcagcaatctttcatgcgctgcaatttggtttgcaattatataatgtgtcatgcatgtggtcatgtggatgaccaaccggaacgtgtcctgttcaaagttaacaggtcaacttgcaacctgaatgtgtcatgcatgtggtcatgtggatggcaaccttactgcaggagatgggaagagtcacaagaacacggttggcgaagcttggaggcgcagaacaggtctccgaacccgaggccattccctggtttgatggcagttccattctggaaacggtgggcgcatgtaatcggatcaaatatgaacggatattatttattttatatttgttttcattttttgaattcagactgggatactgatattatcaagtcgtgtcggataagatttgaatagatatcgatatcttaaatatctatctttaagaatatg

SEQ ID NO: 45577 - DNA, 3235 bp, Zea Mays
ctccggtaccacccccgcttgtgcttgtggcagcacagccactggtatctagtttactcattcctgactccctccctccgtgctgctacgatgcttcactccctgtatgctgttagtacagtacaaagattaaaccctctgaaaacactggctttggaatctgttccattcccacgtgtgcttgctctagatcgaatccccgtatatgcagcggtacaatcatttgccgtgttaggttttcgtttgctagtttgatgtcagaagtccgccgtggtgcagcactgcagtctgcaacggcgatcagctaccgacactttgactggcgtcctgcgcgctgcagcggggggatctccaggcaccgctgctgcatccgcgaaagttcctcttattgaaaaaaaaaaatcgcttgaccgattccacagacggacagatcaaccaatgagcgtcttccgggtaggccctcgaagccagtggactggttctgccacgtgggtttgctccccgtcgcagttcagcaccacaggctccatatgggctccttggttgcctggccggagaagtcgcttctggcagccgtcgccggagctgaggagcgggaaagcctgacgctgacgtgcgcacgttgcaggtacaaccgtgaataccgacatccctgttgtactcacaggtgctcagcattgtggcgaatgtgctttggtaaataagattatgactggaaatctcatacaccgccatgataagataaagcgtgaagctgatatcagtggcaatattaagatttttacggaagatgagattgaaagaattaccaacaacttcagcactcttatcggaaaaggtggctttggagaagtttacaggggaacccttgatgacgacaacgagcctgtagcagtgaagaaatacatcaacgaagattcgagggaagtgttcatggaagaggtacgcatccacagtaaaattggccacaagaacgtggtgaagctcataggctattgcatcggggaaagcactctcatgatcgtgatggagtatatgtccaaaggaaatctcaacgacctgctccactctgaaatctcgatccctttggatgtgagattgggtatcgctatagggtgtgcagaggcattgagctacatgcactcgatgcatgtatcatccggcaaccttgtctgtcatggtgacattaagccggccaacatacttttagacgacaatctgacagcaaaattgacggattttgggatctcaaggcttctggttggtggcgtcactcgctacactaccactgtgaaaggaagcataggttacatggatcctatatacattcaagagggacgccttactccaagaagtgatgtttatagctttggattagttctatgtgaactaatggctggaaaaggggtaagaaaaggtgcaatcaacctcattctatacgccaacaaaggctgtgcaagtggtaaagggttcagagagatttgtgatgctgcaatcgcaaacgagaacaacatgaagatccttaaagagatgcagaaactggcagccgaatgcctatcgctgaccatttctaggcgtcctcagatgactgacgtggtcaaacgcctccggacgctgagaaaggaactaaagaacaggcatgagaactattcggaaccaatcttggcatcgcaccattcgtggcgcaagaacaagaagcaagagatgatcgcgcccacctataactctaagctgcagatcaagaagagcctgagcttcttcaagaggagcatcagcagttccaaggtccaatcggagcccagcaacgtgaggattttcgcgcaggaggagctgaaagaagtcacgcacaattactcttgtctactcggtggaggtctttcaggcaaagtctacagagggacactcgaggacaacgcagtggtcgcggtgagagtgttctctgaagtgctcgagggcttcgaggaagcgtttgtcaatggcgggatgatcctgtctcagatatcccacaggaacgtcgtcaaactcttgggatactgcttggacgccgattgcccggcgttcgtgtacgagtacgcagctagaggcagcctatccgatgttctggacaggcacgaggacttcccgctcgatctacgcgcgaagatcgcggtgaagatcgcagaggcattggagtatctccattcaccagcgaccggtatcatcaggcacggctacgtggtaccgtccaagatacttctggatggcaatttcatgccgaagctcactggcttctcatgggcgaggaagcttatcaaggacccgattcacgatcgctgtgtgtcactgagagtgaaagccgatgtgtaccagttcggcgtccttctcctgatgcttatcagcaggaagaactttgtgttctacgccgaccacgacgacatcgttgcgcagttccgcgcggctcggcaggcagatggcagcgggagggcgttcttcgacgatgatgttgcaggtcatggcggagacgttggtctgcttgaggagatggggaggctgtcgctcaagtgtgtttgcgaggaaatagaccagagaccgacgatgagtgaagtggcagagcaccttcggatcattacgaggtcctggaagaagtgttcttcgtcagagggagctacggcgctggtatctaaagccatggctaaaaagtcccatgtcgccgccgaggctgaagccactaaacttgattggccacctggttcggacattagagactgaccaccgtaaggaatcgtgtacatactgtgaatgatgtattgtattgtataatcatcatcagcaatctttcatgcgctgcaatttggtttgcaattatataatgtgtcatgcatgtggtcatgtggatgaccaaccggaacgtgtcctgttcaaagttaacaggtcaacttgcaacctgaatgtgtcatgcatgtggtcatgtggatggcaaccttactgcaggagatgggaagagtcacaagaacacggttggcgaagcttggaggcgcagaacaggtctccgaacccgaggccattccctggtttgatggcagttccattctggaaacggtgggcgcatgtaatcggatcaaatatgaacggatattatttattttatatttgttttcattttttgaattcagactgggatactgatattatcaagtcgtgtcggataagatttgaatagatatcgatatcttaaatatctatctttaagaatatg

SEQ ID NO: 45578 - DNA, 3239 bp, Zea Mays
ccgccttcgcctccggtaccacccccgcttgtgcttgtggcagcacagccactggtatctagtttactcattcctgactccctccctccgtgctgctacgatgcttcactccctgtatgctgttagtacagtacaaagattaaaccctctgaaaacactggctttggaatctgttccattcccacgtgtgcttgctctagatcgaatccccgtatatgcagcggtacaatcatttgccgtgttaggttttcgtttgctagtttgatgtcagaagtccgccgtggtgcagcactgcagtctgcaacggcgatcagctaccgacactttgactggcgtcctgcgcgctgcagcggggggatctccaggcaccgctgctgcatccgcgaaagttcctcttattgaaaaaaaaaaatcgcttgaccgattccacagacggacagatcaaccaatgagcgtcttccgggtaggccctcgaagccagtggactggttctgccacgtgggtttgctccccgtcgcagttcagcaccacaggctccatatgggctccttggttgcctggccggagaagtcgcttctggcagccgtcgccggagctgaggagcgggaaagcctgacgctgacgtgcgcacggtacaaccgtgaataccgacatccctgttgtactcacaggtgctcagcattgtggcgaatgtgctttggtaaataagattatgactggaaatctcatacaccgccatgataagataaagcgtgaagctgatatcagtggcaatattaagatttttacggaagatgagattgaaagaattaccaacaacttcagcactcttatcggaaaaggtggctttggagaagtttacaggggaacccttgatgacgacaacgagcctgtagcagtgaagaaatacatcaacgaagattcgagggaagtgttcatggaagaggtacgcatccacagtaaaattggccacaagaacgtggtgaagctcataggctattgcatcggggaaagcactctcatgatcgtgatggagtatatgtccaaaggaaatctcaacgacctgctccactctgaaatctcgatccctttggatgtgagattgggtatcgctatagggtgtgcagaggcattgagctacatgcactcgatgcatgtatcatccggcaaccttgtctgtcatggtgacattaagccggccaacatacttttagacgacaatctgacagcaaaattgacggattttgggatctcaaggcttctggttggtggcgtcactcgctacactaccactgtgaaaggaagcataggttacatggatcctatatacattcaagagggacgccttactccaagaagtgatgtttatagctttggattagttctatgtgaactaatggctggaaaaggggtaagaaaaggtgcaatcaacctcattctatacgccaacaaaggctgtgcaagtggtaaagggttcagagagatttgtgatgctgcaatcgcaaacgagaacaacatgaagatccttaaagagatgcagaaactggcagccgaatgcctatcgctgaccatttctaggcgtcctcagatgactgacgtggtcaaacgcctccggacgctgagaaaggaactaaagaacaggcatgagaactattcggaaccaatcttggcatcgcaccattcgtggcgcaagaacaagaagcaagagatgatcgcgcccacctataactctaagctgcagatcaagaagagcctgagcttcttcaagaggagcatcagcagttccaaggtccaatcggagcccagcaacgtgaggattttcgcgcaggaggagctgaaagaagtcacgcacaattactcttgtctactcggtggaggtctttcaggcaaagtctacagagggacactcgaggacaacgcagtggtcgcggtgagagtgttctctgaagtgctcgagggcttcgaggaagcgtttgtcaatggcgggatgatcctgtctcagatatcccacaggaacgtcgtcaaactcttgggatactgcttggacgccgattgcccggcgttcgtgtacgagtacgcagctagaggcagcctatccgatgttctggacaggcacgaggacttcccgctcgatctacgcgcgaagatcgcggtgaagatcgcagaggcattggagtatctccattcaccagcgaccggtatcatcaggcacggctacgtggtaccgtccaagatacttctggatggcaatttcatgccgaagctcactggcttctcatgggcgaggaagcttatcaaggacccgattcacgatcgctgtgtgtcactgagagtgaaagccgatgtgtaccagttcggcgtccttctcctgatgcttatcagcaggaagaactttgtgttctacgccgaccacgacgacatcgttgcgcagttccgcgcggctcggcaggcagatggcagcgggagggcgttcttcgacgatgatgttgcaggtcatggcggagacgttggtctgcttgaggagatggggaggctgtcgctcaagtgtgtttgcgaggaaatagaccagagaccgacgatgagtgaagtggcagagcaccttcggatcattacgaggtcctggaagaagtgttcttcgtcagagggagctacggcgctggtatctaaagccatggctaaaaagtcccatgtcgccgccgaggctgaagccactaaacttgattggccacctggttcggacattagagactgaccaccgtaaggaatcgtgtacatactgtgaatgatgtattgtattgtataatcatcatcagcaatctttcatgcgctgcaatttggtttgcaattatataatgtgtcatgcatgtggtcatgtggatgaccaaccggaacgtgtcctgttcaaagttaacaggtcaacttgcaacctgaatgtgtcatgcatgtggtcatgtggatggcaaccttactgcaggagatgggaagagtcacaagaacacggttggcgaagcttggaggcgcagaacaggtctccgaacccgaggccattccctggtttgatggcagttccattctggaaacggtgggcgcatgtaatcggatcaaatatgaacggatattatttattttatatttgttttcattttttgaattcagactgggatactgatattatcaagtcgtgtcggataagatttgaatagatatcgatatcttaaatatctatctttaagaatatg

SEQ ID NO: 45579 - DNA, 3279 bp, Zea Mays
ggttgccgtcgcatccggcatccatgccatggctggccgatcgcgtcccccccccccccccccccccccccagccggcgccgccttcgcctccggtaccacccccgcttgtgcttgtggcagcacagccactggtatctagtttactcattcctgactccctccctccgtgctgctacgatgcttcactccctgtatgctgttagtacagtacaaagattaaaccctctgaaaacactggctttggaatctgttccattcccacgtgtgcttgctctagatcgaatccccgtatatgcagcggtacaatcatttgccgtgttaggttttcgtttgctagtttgatgtcagaagtccgccgtggtgcagcactgcagtctgcaacggcgatcagctaccgacactttgactggcgtcctgcgcgctgcagcggggggatctccaggcaccgctgctgcatccgcgaaagttcctcttattgaaaaaaaaaaatcgcttgaccgattccacagacggacagatcaaccaatgagcgtcttccgggtaggccctcgaagccagtggactggttctgccacgtgggtttgctccccgtcgcagttcagcaccacaggctccatatgggctccttggttgcctggccggagaagtcgcttctggcagccgtcgccggagctgaggagcgggaaagcctgacgctgacgtgcgcacggtgctcagcattgtggcgaatgtgctttggtaaataagattatgactggaaatctcatacaccgccatgataagataaagcgtgaagctgatatcagtggcaatattaagatttttacggaagatgagattgaaagaattaccaacaacttcagcactcttatcggaaaaggtggctttggagaagtttacaggggaacccttgatgacgacaacgagcctgtagcagtgaagaaatacatcaacgaagattcgagggaagtgttcatggaagaggtacgcatccacagtaaaattggccacaagaacgtggtgaagctcataggctattgcatcggggaaagcactctcatgatcgtgatggagtatatgtccaaaggaaatctcaacgacctgctccactctgaaatctcgatccctttggatgtgagattgggtatcgctatagggtgtgcagaggcattgagctacatgcactcgatgcatgtatcatccggcaaccttgtctgtcatggtgacattaagccggccaacatacttttagacgacaatctgacagcaaaattgacggattttgggatctcaaggcttctggttggtggcgtcactcgctacactaccactgtgaaaggaagcataggttacatggatcctatatacattcaagagggacgccttactccaagaagtgatgtttatagctttggattagttctatgtgaactaatggctggaaaaggggtaagaaaaggtgcaatcaacctcattctatacgccaacaaaggctgtgcaagtggtaaagggttcagagagatttgtgatgctgcaatcgcaaacgagaacaacatgaagatccttaaagagatgcagaaactggcagccgaatgcctatcgctgaccatttctaggcgtcctcagatgactgacgtggtcaaacgcctccggacgctgagaaaggaactaaagaacaggcatgagaactattcggaaccaatcttggcatcgcaccattcgtggcgcaagaacaagaagcaagagatgatcgcgcccacctataactctaagctgcagatcaagaagagcctgagcttcttcaagaggagcatcagcagttccaaggtccaatcggagcccagcaacgtgaggattttcgcgcaggaggagctgaaagaagtcacgcacaattactcttgtctactcggtggaggtctttcaggcaaagtctacagagggacactcgaggacaacgcagtggtcgcggtgagagtgttctctgaagtgctcgagggcttcgaggaagcgtttgtcaatggcgggatgatcctgtctcagatatcccacaggaacgtcgtcaaactcttgggatactgcttggacgccgattgcccggcgttcgtgtacgagtacgcagctagaggcagcctatccgatgttctggacaggcacgaggacttcccgctcgatctacgcgcgaagatcgcggtgaagatcgcagaggcattggagtatctccattcaccagcgaccggtatcatcaggcacggctacgtggtaccgtccaagatacttctggatggcaatttcatgccgaagctcactggcttctcatgggcgaggaagcttatcaaggacccgattcacgatcgctgtgtgtcactgagagtgaaagccgatgtgtaccagttcggcgtccttctcctgatgcttatcagcaggaagaactttgtgttctacgccgaccacgacgacatcgttgcgcagttccgcgcggctcggcaggcagatggcagcgggagggcgttcttcgacgatgatgttgcaggtcatggcggagacgttggtctgcttgaggagatggggaggctgtcgctcaagtgtgtttgcgaggaaatagaccagagaccgacgatgagtgaagtggcagagcaccttcggatcattacgaggtcctggaagaagtgttcttcgtcagagggagctacggcgctggtatctaaagccatggctaaaaagtcccatgtcgccgccgaggctgaagccactaaacttgattggccacctggttcggacattagagactgaccaccgtaaggaatcgtgtacatactgtgaatgatgtattgtattgtataatcatcatcagcaatctttcatgcgctgcaatttggtttgcaattatataatgtgtcatgcatgtggtcatgtggatgaccaaccggaacgtgtcctgttcaaagttaacaggtcaacttgcaacctgaatgtgtcatgcatgtggtcatgtggatggcaaccttactgcaggagatgggaagagtcacaagaacacggttggcgaagcttggaggcgcagaacaggtctccgaacccgaggccattccctggtttgatggcagttccattctggaaacggtgggcgcatgtaatcggatcaaatatgaacggatattatttattttatatttgttttcattttttgaattcagactgggatactgatattatcaagtcgtgtcggataagatttgaatagatatcgatatcttaaatatctatctttaagaatatg

SEQ ID NO: 45580 - DNA, 3199 bp, Zea Mays
ggttgccgtcgcatccggcatccatgccatggctggccgatcgcgtcccccccccccccccccccccccccagccggcgccgccttcgcctccggtaccacccccgcttgtgcttgtggcagcacagccactggtatctagtttactcattcctgactccctccctccgtgctgctacgatgcttcactccctgtatgctgttagtacagtacaaagattaaaccctctgaaaacactggctttggaatctgttccattcccacgtgtgcttgctctagatcgaatccccgtatatgcagcggtacaatcatttgccgtgttaggttttcgtttgctagtttgatgtcagaagtccgccgtggtgcagcactgcagtctgcaacggcgatcagctaccgacactttgactggcgtcctgcgcgctgcagcggggggatctccaggcaccgctgctgcatccgcgaaagttcctcttattgaaaaaaaaaaatcgcttgaccgattccacagacggacagatcaaccaatgagcgtcttccggggctccttggttgcctggccggagaagtcgcttctggcagccgtcgccggagctgaggagcgggaaagcctgacgctgacgtgcgcacggtgctcagcattgtggcgaatgtgctttggtaaataagattatgactggaaatctcatacaccgccatgataagataaagcgtgaagctgatatcagtggcaatattaagatttttacggaagatgagattgaaagaattaccaacaacttcagcactcttatcggaaaaggtggctttggagaagtttacaggggaacccttgatgacgacaacgagcctgtagcagtgaagaaatacatcaacgaagattcgagggaagtgttcatggaagaggtacgcatccacagtaaaattggccacaagaacgtggtgaagctcataggctattgcatcggggaaagcactctcatgatcgtgatggagtatatgtccaaaggaaatctcaacgacctgctccactctgaaatctcgatccctttggatgtgagattgggtatcgctatagggtgtgcagaggcattgagctacatgcactcgatgcatgtatcatccggcaaccttgtctgtcatggtgacattaagccggccaacatacttttagacgacaatctgacagcaaaattgacggattttgggatctcaaggcttctggttggtggcgtcactcgctacactaccactgtgaaaggaagcataggttacatggatcctatatacattcaagagggacgccttactccaagaagtgatgtttatagctttggattagttctatgtgaactaatggctggaaaaggggtaagaaaaggtgcaatcaacctcattctatacgccaacaaaggctgtgcaagtggtaaagggttcagagagatttgtgatgctgcaatcgcaaacgagaacaacatgaagatccttaaagagatgcagaaactggcagccgaatgcctatcgctgaccatttctaggcgtcctcagatgactgacgtggtcaaacgcctccggacgctgagaaaggaactaaagaacaggcatgagaactattcggaaccaatcttggcatcgcaccattcgtggcgcaagaacaagaagcaagagatgatcgcgcccacctataactctaagctgcagatcaagaagagcctgagcttcttcaagaggagcatcagcagttccaaggtccaatcggagcccagcaacgtgaggattttcgcgcaggaggagctgaaagaagtcacgcacaattactcttgtctactcggtggaggtctttcaggcaaagtctacagagggacactcgaggacaacgcagtggtcgcggtgagagtgttctctgaagtgctcgagggcttcgaggaagcgtttgtcaatggcgggatgatcctgtctcagatatcccacaggaacgtcgtcaaactcttgggatactgcttggacgccgattgcccggcgttcgtgtacgagtacgcagctagaggcagcctatccgatgttctggacaggcacgaggacttcccgctcgatctacgcgcgaagatcgcggtgaagatcgcagaggcattggagtatctccattcaccagcgaccggtatcatcaggcacggctacgtggtaccgtccaagatacttctggatggcaatttcatgccgaagctcactggcttctcatgggcgaggaagcttatcaaggacccgattcacgatcgctgtgtgtcactgagagtgaaagccgatgtgtaccagttcggcgtccttctcctgatgcttatcagcaggaagaactttgtgttctacgccgaccacgacgacatcgttgcgcagttccgcgcggctcggcaggcagatggcagcgggagggcgttcttcgacgatgatgttgcaggtcatggcggagacgttggtctgcttgaggagatggggaggctgtcgctcaagtgtgtttgcgaggaaatagaccagagaccgacgatgagtgaagtggcagagcaccttcggatcattacgaggtcctggaagaagtgttcttcgtcagagggagctacggcgctggtatctaaagccatggctaaaaagtcccatgtcgccgccgaggctgaagccactaaacttgattggccacctggttcggacattagagactgaccaccgtaaggaatcgtgtacatactgtgaatgatgtattgtattgtataatcatcatcagcaatctttcatgcgctgcaatttggtttgcaattatataatgtgtcatgcatgtggtcatgtggatgaccaaccggaacgtgtcctgttcaaagttaacaggtcaacttgcaacctgaatgtgtcatgcatgtggtcatgtggatggcaaccttactgcaggagatgggaagagtcacaagaacacggttggcgaagcttggaggcgcagaacaggtctccgaacccgaggccattccctggtttgatggcagttccattctggaaacggtgggcgcatgtaatcggatcaaatatgaacggatattatttattttatatttgttttcattttttgaattcagactgggatactgatattatcaagtcgtgtcggataagatttgaatagatatcgatatcttaaatatctatctttaagaatatg

SEQ ID NO: 45581 - DNA, 133 bp, Zea Mays
gttcaattggtgggcaactgcgtggagctccgataattgctcgacggagcataattgtcgccgcgatatcactgtacaccgcggccggatctccctgccatcttcaatccatgagaacgatccggtcgaagag

SEQ ID NO: 45582 - DNA, 3198 bp, Zea Mays
gggctgtgtgaggataatattggaagtgggaggtgggtatccttcctccactgtcctttttcatctctctctctctcttttctctctctaaaagactttgctaattggcctgctagccggtctccctcccccggcctctttccctttcagctggaggagatagatgagagagaggatcagaggaagcaggaaggagagagggatatataggccggtgtcttctgtagagagagagattgagagcaaaagggaaataaaggagctctcgcaggcactcggtactgacatgagtgatctcatgctcttgataccttgggaaaggacagcacgtgccggagctcataagctggtagctgcatcagttcctgaggtaactgacatagagaaatagatagagatggtgaggaggaagatagatgtgtgcgctgctggggtgatgtgtatgtgtgcgtgcttgtgttgacatctgcgcaccccgtttttttctttgttaaatcacttgatgaagatgggatgatgcctgccttttcctttccttattaatatattttttctctctctctgatactgatgcctattccacatctctctcaagctatctcctctcgagctgctagatatagctagcttagtgtgttcttccttttccatgcatatatacatgctggcatgctgcaccctagctagctacacatctccctctcccccctgcaaccttcactcttcatggatccagtttcacttctcacgccacatactcctcaaatcattgctttggcaaaaccacctgcttacgatcttgcagtcatcatcacgctattagttgaggataatttcgcgcacaagagcacgacaagccgagatttttgggggcgtcggcgtcgacctgtaggcgatggcggcgtactaccacggtggcgccggcacggacatccaggccagcaccgacggcctgcagacgctgtacctcatgaacccgagctacgccgtcgggctacaacctgtggaccccggccatggctggcggcgccgcggacatgtcgccgcaggcgcaggcgcagactcccggcgccgcgggtgctgctggggtcagcgccgtgctcagcctgtcgtcccgcgaggcgccgccggtcaccgtggccgcggtggccgcctgcaccgacgagggcaagtacctgggcgtgtcggccacgccgcaggggcagatggtcatgagctccaagtacctcaaggccgcgcaggagctgctcgacgaggtggtcagcgtcagcaagggcgtcgaggacgctaagacggccgctgccgccgcgaccaagagcctggccgcggtgaagaagaaggaggactcggagggcgcgtcaggtggcggcaccgacgacggtgccggcgcaaagagcggcggtggtgccgcgccagagatgtccacggcggagcggcaggagatgcagatgaagaagagcaagcttctcaacatgcttgacgaggtggagcagcggtaccggcagtaccacgggcagatgcaggcggtgtcgtcgtcgttcgaggcggcggcgggggccgggtcggcgcggacgtacacggcgctggcgctgcgcaccgtggggtcccgcctccgctacatcgaccaccagctccggcagcagcgcgcgctgcagcagctcggcatgatgcagggcggcgcctggcggccccagcgcggcctccccgagcgctccgtctccatcctccgcgcctggctcttcgagcacttcctgcacccataccccaaggattcggacaagatcatgctcgccaagcaaaccgggctcaccaggagtcaggtgtccaattggttcatcaatgcgagggtgcggctgtggaagcctatggtggaggagatgtacctggaggagacaaaggaccaggacgctggaggcggcggcaacgacgagggcaagtccggtggcggcggcagcaagagcagcgacaccgtcgacggcgtcatgccgagggcggacgtgatgtccaagtccgcggtgcgcgtgggaggcggcggggcgggggcggagagcgcgtccaccaacaagggcatccatggctcctccctgctcgagctcggcggcggcgatcaccagcagtcccacgcggggttctacgacgacgatgaagacgacggcgacgacgtgatggggcggaggctcaagaaggcgcgcggcaacgagccggcgccggcgttccaccacgtgcacgacatagccacgctgcacgcgcaggccgcggcggccgcgaggcagcagcacgaggaggtcagccaccgggagctcctcatgaagttcatggagagcggcggcggtggcggcgtgagggaccaccaccaggacggcggcgggtactcgctgttcgcgccggggccgtacgggcagttcaccacggagcccttcgcgttcgctgggaacggcggggtgtcgctgacgctcggcctcccgcacggcgccggaggcagcgccgagcagaccgcgtcgttcctcatgggcagcaccacggccggcgacagcggcagccacggcgccgccaccagctacgacatgaacatgcagagcaccaagtcgttcgcggcgcagctcatgagggacttcgtggcctagctcccttaggacgcatagcatagcagtcgtccacgcaattaatcaaatcatctctccatcgatcaattaatttagagcttgtatagaaataaagggttcaagcctaaatatgctttgcgtatataaagcagttaagcttggactcataggtcttgctgggaatgtaaagatgggatatatatcatggggccatgtatatataggtataggaggataggtaactagttgatacccaaacattgtacaagattttatatgtagatcatagggattggggggtatacagtaaagtatgcgaaaagggtatattggaactggacttagtgtatgctgtagaaattggcctactagtattatctgcagcaattcagtatttgttttgcttactgtaaacatagcacattgtgattcattggcagcaccatgtgctgttagatgacattgtggataatgctgctccagtgagatgtttgttggtggcctcagctagaatccagtgatctagtacctctgaatgttgccagcagtatctgttcggagcaatgacaaatctgctcaggtgtttttccactag

SEQ ID NO: 45583 - DNA, 2736 bp, Zea Mays
gggctgtgtgaggataatattggaagtgggaggtgggtatccttcctccactgtcctttttcatctctctctctctcttttctctctctaaaagactttgctaattggcctgctagccggtctccctcccccggcctctttccctttcagctggaggagatagatgagagagaggatcagaggaagcaggaaggagagagggatatataggccggtgtcttctgtagagagagagattgagagcaaaagggaaataaaggagctctcgcaggcactcggtactgacatgagtgatctcatgctcttgataccttggcaaaaccacctgcttacgatcttgcagtcatcatcacgctattagttgaggataatttcgcgcacaagagcacgacaagccgagatttttgggggcgtcggcgtcgacctgtaggcgatggcggcgtactaccacggtggcgccggcacggacatccaggccagcaccgacggcctgcagacgctgtacctcatgaacccgagctacgccgtcgggctacaacctgtggaccccggccatggctggcggcgccgcggacatgtcgccgcaggcgcaggcgcagactcccggcgccgcgggtgctgctggggtcagcgccgtgctcagcctgtcgtcccgcgaggcgccgccggtcaccgtggccgcggtggccgcctgcaccgacgagggcaagtacctgggcgtgtcggccacgccgcaggggcagatggtcatgagctccaagtacctcaaggccgcgcaggagctgctcgacgaggtggtcagcgtcagcaagggcgtcgaggacgctaagacggccgctgccgccgcgaccaagagcctggccgcggtgaagaagaaggaggactcggagggcgcgtcaggtggcggcaccgacgacggtgccggcgcaaagagcggcggtggtgccgcgccagagatgtccacggcggagcggcaggagatgcagatgaagaagagcaagcttctcaacatgcttgacgaggtggagcagcggtaccggcagtaccacgggcagatgcaggcggtgtcgtcgtcgttcgaggcggcggcgggggccgggtcggcgcggacgtacacggcgctggcgctgcgcaccgtggggtcccgcctccgctacatcgaccaccagctccggcagcagcgcgcgctgcagcagctcggcatgatgcagggcggcgcctggcggccccagcgcggcctccccgagcgctccgtctccatcctccgcgcctggctcttcgagcacttcctgcacccataccccaaggattcggacaagatcatgctcgccaagcaaaccgggctcaccaggagtcaggtgtccaattggttcatcaatgcgagggtgcggctgtggaagcctatggtggaggagatgtacctggaggagacaaaggaccaggacgctggaggcggcggcaacgacgagggcaagtccggtggcggcggcagcaagagcagcgacaccgtcgacggcgtcatgccgagggcggacgtgatgtccaagtccgcggtgcgcgtgggaggcggcggggcgggggcggagagcgcgtccaccaacaagggcatccatggctcctccctgctcgagctcggcggcggcgatcaccagcagtcccacgcggggttctacgacgacgatgaagacgacggcgacgacgtgatggggcggaggctcaagaaggcgcgcggcaacgagccggcgccggcgttccaccacgtgcacgacatagccacgctgcacgcgcaggccgcggcggccgcgaggcagcagcacgaggaggtcagccaccgggagctcctcatgaagttcatggagagcggcggcggtggcggcgtgagggaccaccaccaggacggcggcgggtactcgctgttcgcgccggggccgtacgggcagttcaccacggagcccttcgcgttcgctgggaacggcggggtgtcgctgacgctcggcctcccgcacggcgccggaggcagcgccgagcagaccgcgtcgttcctcatgggcagcaccacggccggcgacagcggcagccacggcgccgccaccagctacgacatgaacatgcagagcaccaagtcgttcgcggcgcagctcatgagggacttcgtggcctagctcccttaggacgcatagcatagcagtcgtccacgcaattaatcaaatcatctctccatcgatcaattaatttagagcttgtatagaaataaagggttcaagcctaaatatgctttgcgtatataaagcagttaagcttggactcataggtcttgctgggaatgtaaagatgggatatatatcatggggccatgtatatataggtataggaggataggtaactagttgatacccaaacattgtacaagattttatatgtagatcatagggattggggggtatacagtaaagtatgcgaaaagggtatattggaactggacttagtgtatgctgtagaaattggcctactagtattatctgcagcaattcagtatttgttttgcttactgtaaacatagcacattgtgattcattggcagcaccatgtgctgttagatgacattgtggataatgctgctccagtgagatgtttgttggtggcctcagctagaatccagtgatctagtacctctgaatgttgccagcagtatctgttcggagcaatgacaaatctgctcaggtgtttttccactag

SEQ ID NO: 45584 - DNA, 2453 bp, Zea Mays
gggctgtgtgaggataatattggaagtgggaggcaaaaccacctgcttacgatcttgcagtcatcatcacgctattagttgaggataatttcgcgcacaagagcacgacaagccgagatttttgggggcgtcggcgtcgacctgtaggcgatggcggcgtactaccacggtggcgccggcacggacatccaggccagcaccgacggcctgcagacgctgtacctcatgaacccgagctacgccgtcgggctacaacctgtggaccccggccatggctggcggcgccgcggacatgtcgccgcaggcgcaggcgcagactcccggcgccgcgggtgctgctggggtcagcgccgtgctcagcctgtcgtcccgcgaggcgccgccggtcaccgtggccgcggtggccgcctgcaccgacgagggcaagtacctgggcgtgtcggccacgccgcaggggcagatggtcatgagctccaagtacctcaaggccgcgcaggagctgctcgacgaggtggtcagcgtcagcaagggcgtcgaggacgctaagacggccgctgccgccgcgaccaagagcctggccgcggtgaagaagaaggaggactcggagggcgcgtcaggtggcggcaccgacgacggtgccggcgcaaagagcggcggtggtgccgcgccagagatgtccacggcggagcggcaggagatgcagatgaagaagagcaagcttctcaacatgcttgacgaggtggagcagcggtaccggcagtaccacgggcagatgcaggcggtgtcgtcgtcgttcgaggcggcggcgggggccgggtcggcgcggacgtacacggcgctggcgctgcgcaccgtggggtcccgcctccgctacatcgaccaccagctccggcagcagcgcgcgctgcagcagctcggcatgatgcagggcggcgcctggcggccccagcgcggcctccccgagcgctccgtctccatcctccgcgcctggctcttcgagcacttcctgcacccataccccaaggattcggacaagatcatgctcgccaagcaaaccgggctcaccaggagtcaggtgtccaattggttcatcaatgcgagggtgcggctgtggaagcctatggtggaggagatgtacctggaggagacaaaggaccaggacgctggaggcggcggcaacgacgagggcaagtccggtggcggcggcagcaagagcagcgacaccgtcgacggcgtcatgccgagggcggacgtgatgtccaagtccgcggtgcgcgtgggaggcggcggggcgggggcggagagcgcgtccaccaacaagggcatccatggctcctccctgctcgagctcggcggcggcgatcaccagcagtcccacgcggggttctacgacgacgatgaagacgacggcgacgacgtgatggggcggaggctcaagaaggcgcgcggcaacgagccggcgccggcgttccaccacgtgcacgacatagccacgctgcacgcgcaggccgcggcggccgcgaggcagcagcacgaggaggtcagccaccgggagctcctcatgaagttcatggagagcggcggcggtggcggcgtgagggaccaccaccaggacggcggcgggtactcgctgttcgcgccggggccgtacgggcagttcaccacggagcccttcgcgttcgctgggaacggcggggtgtcgctgacgctcggcctcccgcacggcgccggaggcagcgccgagcagaccgcgtcgttcctcatgggcagcaccacggccggcgacagcggcagccacggcgccgccaccagctacgacatgaacatgcagagcaccaagtcgttcgcggcgcagctcatgagggacttcgtggcctagctcccttaggacgcatagcatagcagtcgtccacgcaattaatcaaatcatctctccatcgatcaattaatttagagcttgtatagaaataaagggttcaagcctaaatatgctttgcgtatataaagcagttaagcttggactcataggtcttgctgggaatgtaaagatgggatatatatcatggggccatgtatatataggtataggaggataggtaactagttgatacccaaacattgtacaagattttatatgtagatcatagggattggggggtatacagtaaagtatgcgaaaagggtatattggaactggacttagtgtatgctgtagaaattggcctactagtattatctgcagcaattcagtatttgttttgcttactgtaaacatagcacattgtgattcattggcagcaccatgtgctgttagatgacattgtggataatgctgctccagtgagatgtttgttggtggcctcagctagaatccagtgatctagtacctctgaatgttgccagcagtatctgttcggagcaatgacaaatctgctcaggtgtttttccactag

SEQ ID NO: 45585 - DNA, 598 bp, Zea Mays
agggtgagggacttcgtggcctagctcccttaggacgcatagcatagcagtcgtccacgcaattaatcaaatcatctctccatcgatcaattaatttagagcttgtatagaaataaagggttcaagcctaaatatgctttgcgtatataaagcagttaagcttggactcataggtcttgctgggaatgtaaagatgggatatatatcatggggccatgtatatataggtataggaggataggtaactagttgatacccaaacattgtacaagattttatatgtagatcatagggattggggggtatacagtaaagtatgcgaaaagggtatattggaactggacttagtgtatgctgtagaaattggcctactagtattatctgcagcaattcagtatttgttttgcttactgtaaacatagcacattgtgattcattggcagcaccatgtgctgttagatgacattgtggataatgctgctccagtgagatgtttgttggtggcctcagctagaatccagtgatctagtacctctgaatgttgccagcagtatctgttcggagcaatgacaaatctgctcaggtgtttttccactag

SEQ ID NO: 45586 - DNA, 4028 bp, Zea Mays
caggaatccaaatttctcccagtggaacggtggaagtgtggaaccatcgcataaatgccccactcgtcagcgtggagcgtggctatatggacccacatggcattcggctacacgcattcgctaggtgggcctcacaacagagcacacaggctggttcgagaccccgggcacgtttctacaaatcctaagaaaactccaaaaaaagacaaaataacccagaaataaaaatcgccgtggaggcgagtcgccgccggcaccgcccggcacggccttcttctccggcgaaggcggagctcgttacggggattccgcatccgttaatcggtcccaccggatccctcgccgcctcccacgggccgggccgcgccgtggcgcgcgcgcaggccgagatgcggaagaggatggagagcgtcgacgatctgatcgaggaggcaaagctgcgcaccgtctggtgggcgctctgcatcttcgccgtctcctacttcctcacgcatacaagtaaatcaatgtggacaaatgtgcccatgtcaatccttatacttgcatttctgcgatatctctccttcaaagtggagttccgttggagggaacaccctgtacgtaagcagacacatttgtctcaagcctcaaagagacagttgtctgcaaatgatcatcgcctttcgactgtaccaccagtctccagatggagaaggaaagttggttcaccttctgttgaggctgcttttgaaagtttcattgagaaaattttacgagactttgttttagacttgtggtactcagatattactcccgacagagaggcaccagaactgatacgtggcttagtacttcatgctcttggtgaattatcaggcagggtgaaagagatgaatctagttgacatgctaacaagggatatggttgatttgattggtaatcatttagatatttttcggaaaaatgaaattctaattggcgttgatgtcatgaggactttgtcttcagaggaaatagatgagagactgaagcagcacctaatagtttcacaggaacttcatccagcactgttatcttcagagcatgagtacaaggttcttcaagaaattgttgggggcattatggctctagtgttgagaccacaggatgctcagagtccgctagttcgctgtttctccagggaattgatgacctgcctaatcttgcagcctgttatgaacttcgcaagccctgtctacatcaatgagttggttgtctaccttctaaatgccaaagatacaggtagcgctggaggtacaaacatggctaatacaggaacagtaacactagtgccttacaaaggaggctcacaaggttgtcaaatggaatcaaggaatttgactgtagaaactagcggtttagttccaccaaataattctgggatgagatcacttgttacttctgaatgtggaaagtcaaaagtgtcagaggatgacaatgatggtaccatccaacctcgtcagccagactgggcggcggtattggatgcagctactaaaagaaggtcagaggttcttgcccctgagaatcttgagaacatgtgggcaattggaagaaattatcaaaagaaaatggttaaattagaccactcatcaagacagaaaggctctgaaggttcagataatagtacaagtgcaggggcagttggtaaagagctatcctctaacttcaacgacagaattgcatctgttgatgataaatacatggtcaatttgatgcaaagtaaaaataggaatgctcaatctaccttcgtcacaggtagtcatccacttgctctacaaaatatgaatgaagtgaaaccaaaagaggggagtcaagttaattttaccagcaaggaaaaaccacatgaaaccagcaacagagtaaaagcccaactaaaacggtgtaatagtactcctgatattgagaaaagatatttggcaaaaagtaaccagcccatggtttccagtgaaaggctaaatgtgaggataaatcaggatgagagaggtgttggtcctgcctcacatgttgaggtgctaatgcatgttccgaagataagatgtcgggttgttggtgcatattttgagaaacaaggttcaaaatcttttgcagtttattctattgtggtgactgatgcggataacaagagctgataccggaattttgaacgtcttcatcgacaactgaaggagatacctaattattcattacatctgcctccaaagagttttctttcatctagcgttgatgattatcttgtgcaccaacggtgcattctcctggacaaatatcttcaagatctcttgtctatagctaatattgcagagcagcatgaagttttggattttctgagtgcatcctcaaagacttactctgctggaaagtcctcctctgttatgaaaaccttggctgttaatgttgatgatgcaatggatgacattgttcgacaatttaaaggagtttcagatggtttgaaacgggcggtcggcacatcaccttctagtgcaactgcccaatttgcagataataggatgtctctatcttggaaccaggaagagaaagataaccacaacttgcatcaaagaaacttggaaagggctcatagcctttcagatggtgatagtaactatgaagatcacatctcttctgtgaatagtggatgccattcagacaatgaggtcaataatagaggacatacttcaaatgatgttgagcacatcgaaacatgctctagtttggataaacaagccagcgaccaaataggaaaacctgcaaaggaatattctgattcttcaaacatgtcatctctaaatgcatttgaggatccaacaggaattcctcctgagtggatgccaacaaatgttagtgtgcctttattgaacctggttgacaaagtattccagctaaagcgacggggttggatacggagacaggttctttggatatcaaaacaaattttgcagttggtcatggaagatgcaattgatgaatggatcataagacaaatcaattggctccgaagagaagatgtcatcgtacaaggaatacattggattcaagataccctttggccaaatggtatattcttcaccaagttggatgaatataaagggaatgcaggcacaagtgaatttgacaagcagtcattagggagtcccacactggctgttggcaataaaaagggccgcacaagctcttttgaacttcatcttgaggcatccagaaatgccagtgaggtcaaaaaacttattttagatggaactccatcggccttggtcagcataattggatacaagcagtaccggcgcagcgcaagggacatgtactacttcctccaatccaacgtctgcatcaaacagctcgcatatgcaatgctagagcaggtcctcgtgacagtcttcccagagcttcgccagctaatagaagacatacatgagaaaggccgcaaagagcaagcctcattcacataccaactctgacccaagagaaaacatgctaattcagagaggagtcgcaacaattttgaacgcacttgcattgctccacggtgagttactgaaacacaaagcctttgcaattatattttgatgatgcataagttggattgaggaagtgcttggtgcttaagaatgatctgtacagatgtatatcagaggttatgtaaattatccccctgatgtagtcaaccagaacaacttacagtgagatcttgtaggtgttgaatgtaatgtatcattctttaattcccccccccccccccccccccaagaattaagttattctcccccctgacttatgctgaggcttgtaaagttttgaaagttccaagtgtatagctgtactgtttgtgttgctgagtaaatcaaaatgttgcgcgagatgccatctctgtttcccaatatttgtccggtcgcacactcaggaggcagaaggtatgtaaattttttaaccaaactaagtgattccttgttgttttggatgaaatataataacatactataatacccaaacagcgcaaattcacgtggata

SEQ ID NO: 45587 - DNA, 4021 bp, Zea Mays
caggaatccaaatttctcccagtggaacggtggaagtgtggaaccatcgcataaatgccccactcgtcagcgtggagcgtggctatatggacccacatggcattcggctacacgcattcgctaggtgggcctcacaacagagcacacaggctggttcgagaccccgggcacgtttctacaaatcctaagaaaactccaaaaaaagacaaaataacccagaaataaaaatcgccgtggaggcgagtcgccgccggcaccgcccggcacggccttcttctccggcgaaggcggagctcgttacggggattccgcatccgttaatcggtcccaccggatccctcgccgcctcccacgggccgggccgcgccgtggcgcgcgcgcaggccgagatgcggaagaggatggagagcgtcgacgatctgatcgaggaggcaaagctgcgcaccgtctggtgggcgctctgcatcttcgccgtctcctacttcctcacgcatacaagtaaatcaatgtggacaaatgtgcccatgtcaatccttatacttgcatttctgcgatatctctccttcaaagtggagttccgttggagggaacaccctgtacgtaagcagacacatttgtctcaagcctcaaagagacagttgtctgcaaatgatcatcgcctttcgactgtaccaccagtctccagatggagaaggaaagttggttcaccttctgttgaggctgcttttgaaagtttcattgagaaaattttacgagactttgttttagacttgtggtactcagatattactcccgacagagaggcaccagaactgatacgtggcttagtacttcatgctcttggtgaattatcaggcagggtgaaagagatgaatctagttgacatgctaacaagggatatggttgatttgattggtaatcatttagatatttttcggaaaaatgaaattctaattggcgttgatgtcatgaggactttgtcttcagaggaaatagatgagagactgaagcagcacctaatagtttcacaggaacttcatccagcactgttatcttcagagcatgagtacaaggttcttcaagaaattgttgggggcattatggctctagtgttgagaccacaggatgctcagagtccgctagttcgctgtttctccagggaattgatgacctgcctaatcttgcagcctgttatgaacttcgcaagccctgtctacatcaatgagttggttgtctaccttctaaatgccaaagatacaggtagcgctggaggtacaaacatggctaatacaggaacagtaacactagtgccttacaaaggaggctcacaaggttgtcaaatggaatcaaggaatttgactgtagaaactagcggtttagttccaccaaataattctgggatgagatcacttgttacttctgaatgtggaaagtcaaaagtgtcagaggatgacaatgatggtaccatccaacctcgtcagccagactgggcggcggtattggatgcagctactaaaagaaggtcagaggttcttgcccctgagaatcttgagaacatgtgggcaattggaagaaattatcaaaagaaaatggttaaattagaccactcatcaagacagaaaggctctgaaggttcagataatagtacaagtgcaggggcagttggtaaagagctatcctctaacttcaacgacagaattgcatctgttgatgataaatacatggtcaatttgatgcaaagtaaaaataggaatgctcaatctaccttcgtcacaggtagtcatccacttgctctacaaaatatgaatgaagtgaaaccaaaagaggggagtcaagttaattttaccagcaaggaaaaaccacatgaaaccagcaacagagtaaaagcccaactaaaacggtgtaatagtactcctgatattgagaaaagatatttggcaaaaagtaaccagcccatggtttccagtgaaaggctaaatgtgaggataaatcaggatgagagaggtgttggtcctgcctcacatgttgaggtgctaatgcatgttccgaagataagatgtcgggttgttggtgcatattttgagaaacaaggttcaaaatcttttgcagtttattctattgtggtgactgatgcggataacaagagctgataccggaattttgaacgtcttcatcgacaactgaaggagatacctaattattcattacatctgcctccaaagagttttctttcatctagcgttgatgattatcttgtgcaccaacggtgcattctcctggacaaatatcttcaagatctcttgtctatagctaatattgcagagcagcatgaagttttggattttctgagtgcatcctcaaagacttactctgctggaaagtcctcctctgttatgaaaaccttggctgttaatgttgatgatgcaatggatgacattgttcgacaatttaaaggagtttcagatggtttgaaacgggcggtcggcacatcaccttctagtgcaactgcccaatttgcagataataggatgtctctatcttggaaccaggaagagaaagataaccacaacttgcatcaaagaaacttggaaagggctcatagcctttcagatggtgatagtaactatgaagatcacatctcttctgtgaatagtggatgccattcagacaatgaggtcaataatagaggacatacttcaaatgatgttgagcacatcgaaacatgctctagtttggataaacaagccagcgaccaaataggaaaacctgcaaaggaatattctgattcttcaaacatgtcatctctaaatgcatttgaggatccaacaggaattcctcctgagtggatgccaacaaatgttagtgtgcctttattgaacctggttgacaaagtattccagctaaagcgacggggttggatacggttctttggatatcaaaacaaattttgcagttggtcatggaagatgcaattgatgaatggatcataagacaaatcaattggctccgaagagaagatgtcatcgtacaaggaatacattggattcaagataccctttggccaaatggtatattcttcaccaagttggatgaatataaagggaatgcaggcacaagtgaatttgacaagcagtcattagggagtcccacactggctgttggcaataaaaagggccgcacaagctcttttgaacttcatcttgaggcatccagaaatgccagtgaggtcaaaaaacttattttagatggaactccatcggccttggtcagcataattggatacaagcagtaccggcgcagcgcaagggacatgtactacttcctccaatccaacgtctgcatcaaacagctcgcatatgcaatgctagagcaggtcctcgtgacagtcttcccagagcttcgccagctaatagaagacatacatgagaaaggccgcaaagagcaagcctcattcacataccaactctgacccaagagaaaacatgctaattcagagaggagtcgcaacaattttgaacgcacttgcattgctccacggtgagttactgaaacacaaagcctttgcaattatattttgatgatgcataagttggattgaggaagtgcttggtgcttaagaatgatctgtacagatgtatatcagaggttatgtaaattatccccctgatgtagtcaaccagaacaacttacagtgagatcttgtaggtgttgaatgtaatgtatcattctttaattcccccccccccccccccccccaagaattaagttattctcccccctgacttatgctgaggcttgtaaagttttgaaagttccaagtgtatagctgtactgtttgtgttgctgagtaaatcaaaatgttgcgcgagatgccatctctgtttcccaatatttgtccggtcgcacactcaggaggcagaaggtatgtaaattttttaaccaaactaagtgattccttgttgttttggatgaaatataataacatactataatacccaaacagcgcaaattcacgtggata

SEQ ID NO: 45588 - DNA, 3982 bp, Zea Mays
caggaatccaaatttctcccagtggaacggtggaagtgtggaaccatcgcataaatgccccactcgtcagcgtggagcgtggctatatggacccacatggcattcggctacacgcattcgctaggtgggcctcacaacagagcacacaggctggttcgagaccccgggcacgtttctacaaatcctaagaaaactccaaaaaaagacaaaataacccagaaataaaaatcgccgtggaggcgagtcgccgccggcaccgcccggcacggccttcttctccggcgaaggcggagctcgttacggggattccgcatccgttaatcggtcccaccggatccctcgccgcctcccacgggccgggccgcgccgtggcgcgcgcgcaggccgagatgcggaagaggatggagagcgtcgacgatctgatcgaggaggcaaagctgcgcaccgtctggtgggcgctctgcatcttcgccgtctcctacttcctcacgcatacaagtaaatcaatgtggacaaatgtgcccatgtcaatccttatacttgcatttctgcgatatctctccttcaaagtggagttccgttggagggaacaccctgtacgtaagcagacacatttgtctcaagcctcaaagagacagttgtctgcaaatgatcatcgcctttcgactgtaccaccagtctccagatggagaaggaaagttggttcaccttctgttgaggctgcttttgaaagtttcattgagaaaattttacgagactttgttttagacttgtggtactcagatattactcccgacagagaggcaccagaactgatacgtggcttagtacttcatgctcttggtgaattatcaggcagggtgaaagagatgaatctagttgacatgctaacaagggatatggttgatttgattggtaatcatttagatatttttcggaaaaatgaaattctaattggcgttgatgtcatgaggactttgtcttcagaggaaatagatgagagactgaagcagcacctaatagtttcacaggaacttcatccagcactgttatcttcagagcatgagtacaaggttcttcaagaaattgttgggggcattatggctctagtgttgagaccacaggatgctcagagtccgctagttcgctgtttctccagggaattgatgacctgcctaatcttgcagcctgttatgaacttcgcaagccctgtctacatcaatgagttggttgtctaccttctaaatgccaaagatacaggtagcgctggaggtacaaacatggctaatacaggaacagtaacactagtgccttacaaaggaggctcacaaggttgtcaaatggaatcaaggaatttgactgtagaaactagcggtttagttccaccaaataattctgggatgagatcacttgttacttctgaatgtggaaagtcaaaagtgtcagaggatgacaatgatggtaccatccaacctcgtcagccagactgggcggcggtattggatgcagctactaaaagaaggtcagaggttcttgcccctgagaatcttgagaacatgtgggcaattggaagaaattatcaaaagaaaatggttaaattagaccactcatcaagacagaaaggctctgaaggttcagataatagtacaagtgcaggggcagttggtaaagagctatcctctaacttcaacgacagaattgcatctgttgatgataaatacatggtcaatttgatgcaaagtaaaaataggaatgctcaatctaccttcgtcacaggtagtcatccacttgctctacaaaatatgaatgaagtgaaaccaaaagaggggagtcaagttaattttaccagcaaggaaaaaccacatgaaaccagcaacagagtaaaagcccaactaaaacggtgtaatagtactcctgatattgagaaaagatatttggcaaaaagtaaccagcccatggtttccagtgaaaggctaaatgtgaggataaatcaggatgagagaggtgttggtcctgcctcacatgttgaggtgctaatgcatgttccgaagataagatgtcgggttgttggtgcatattttgagaaacaaggttcaaaatcttttgcagtttattctattgtggtgactgatgcggataacaagagctggtttgtgaaaagaagataccggaattttgaacgtcttcatcgacaactgaaggagatacctaattattcattacatctgcctccaaagagttttctttcatctagcgttgatgattatcttgtgcaccaacggtgcattctcctggacaaatatcttcaagatctcttgtctatagctaatattgcagagcagcatgaagttttggattttctgagtgcatcctcaaagacttactctgctggaaagtcctcctctgttatgaaaaccttggctgatggtttgaaacgggcggtcggcacatcaccttctagtgcaactgcccaatttgcagataataggatgtctctatcttggaaccaggaagagaaagataaccacaacttgcatcaaagaaacttggaaagggctcatagcctttcagatggtgatagtaactatgaagatcacatctcttctgtgaatagtggatgccattcagacaatgaggtcaataatagaggacatacttcaaatgatgttgagcacatcgaaacatgctctagtttggataaacaagccagcgaccaaataggaaaacctgcaaaggaatattctgattcttcaaacatgtcatctctaaatgcatttgaggatccaacaggaattcctcctgagtggatgccaacaaatgttagtgtgcctttattgaacctggttgacaaagtattccagctaaagcgacggggttggatacggttctttggatatcaaaacaaattttgcagttggtcatggaagatgcaattgatgaatggatcataagacaaatcaattggctccgaagagaagatgtcatcgtacaaggaatacattggattcaagataccctttggccaaatggtatattcttcaccaagttggatgaatataaagggaatgcaggcacaagtgaatttgacaagcagtcattagggagtcccacactggctgttggcaataaaaagggccgcacaagctcttttgaacttcatcttgaggcatccagaaatgccagtgaggtcaaaaaacttattttagatggaactccatcggccttggtcagcataattggatacaagcagtaccggcgcagcgcaagggacatgtactacttcctccaatccaacgtctgcatcaaacagctcgcatatgcaatgctagagcaggtcctcgtgacagtcttcccagagcttcgccagctaatagaagacatacatgagaaaggccgcaaagagcaagcctcattcacataccaactctgacccaagagaaaacatgctaattcagagaggagtcgcaacaattttgaacgcacttgcattgctccacggtgagttactgaaacacaaagcctttgcaattatattttgatgatgcataagttggattgaggaagtgcttggtgcttaagaatgatctgtacagatgtatatcagaggttatgtaaattatccccctgatgtagtcaaccagaacaacttacagtgagatcttgtaggtgttgaatgtaatgtatcattctttaattcccccccccccccccccccccaagaattaagttattctcccccctgacttatgctgaggcttgtaaagttttgaaagttccaagtgtatagctgtactgtttgtgttgctgagtaaatcaaaatgttgcgcgagatgccatctctgtttcccaatatttgtccggtcgcacactcaggaggcagaaggtatgtaaattttttaaccaaactaagtgattccttgttgttttggatgaaatataataacatactataatacccaaacagcgcaaattcacgtggata

SEQ ID NO: 45589 - DNA, 4020 bp, Zea Mays
caggaatccaaatttctcccagtggaacggtggaagtgtggaaccatcgcataaatgccccactcgtcagcgtggagcgtggctatatggacccacatggcattcggctacacgcattcgctaggtgggcctcacaacagagcacacaggctggttcgagaccccgggcacgtttctacaaatcctaagaaaactccaaaaaaagacaaaataacccagaaataaaaatcgccgtggaggcgagtcgccgccggcaccgcccggcacggccttcttctccggcgaaggcggagctcgttacggggattccgcatccgttaatcggtcccaccggatccctcgccgcctcccacgggccgggccgcgccgtggcgcgcgcgcaggccgagatgcggaagaggatggagagcgtcgacgatctgatcgaggaggcaaagctgcgcaccgtctggtgggcgctctgcatcttcgccgtctcctacttcctcacgcatacaagtaaatcaatgtggacaaatgtgcccatgtcaatccttatacttgcatttctgcgatatctctccttcaaagtggagttccgttggagggaacaccctgtacgtaagcagacacatttgtctcaagcctcaaagagacagttgtctgcaaatgatcatcgcctttcgactgtaccaccagtctccagatggagaaggaaagttggttcaccttctgttgaggctgcttttgaaagtttcattgagaaaattttacgagactttgttttagacttgtggtactcagatattactcccgacagagaggcaccagaactgatacgtggcttagtacttcatgctcttggtgaattatcaggcagggtgaaagagatgaatctagttgacatgctaacaagggatatggttgatttgattggtaatcatttagatatttttcggaaaaatgaaattctaattggcgttgatgtcatgaggactttgtcttcagaggaaatagatgagagactgaagcagcacctaatagtttcacaggaacttcatccagcactgttatcttcagagcatgagtacaaggttcttcaagaaattgttgggggcattatggctctagtgttgagaccacaggatgctcagagtccgctagttcgctgtttctccagggaattgatgacctgcctaatcttgcagcctgttatgaacttcgcaagccctgtctacatcaatgagttggttgtctaccttctaaatgccaaagatacaggtagcgctggaggtacaaacatggctaatacaggaacagtaacactagtgccttacaaaggaggctcacaaggttgtcaaatggaatcaaggaatttgactgtagaaactagcggtttagttccaccaaataattctgggatgagatcacttgttacttctgaatgtggaaagtcaaaagtgtcagaggatgacaatgatggtaccatccaacctcgtcagccagactgggcggcggtattggatgcagctactaaaagaaggtcagaggttcttgcccctgagaatcttgagaacatgtgggcaattggaagaaattatcaaaagaaaatggttaaattagaccactcatcaagacagaaaggctctgaaggttcagataatagtacaagtgcaggggcagttggtaaagagctatcctctaacttcaacgacagaattgcatctgttgatgataaatacatggtcaatttgatgcaaagtaaaaataggaatgctcaatctaccttcgtcacaggtagtcatccacttgctctacaaaatatgaatgaagtgaaaccaaaagaggggagtcaagttaattttaccagcaaggaaaaaccacatgaaaccagcaacagagtaaaagcccaactaaaacggtgtaatagtactcctgatattgagaaaagatatttggcaaaaagtaaccagcccatggtttccagtgaaaggctaaatgtgaggataaatcaggatgagagaggtgttggtcctgcctcacatgttgaggtgctaatgcatgttccgaagataagatgtcgggttgttggtgcatattttgagaaacaaggttcaaaatcttttgcagtttattctattgtggtgactgatgcggataacaagagctggtttgtgaaaagaagataccggaattttgaacgtcttcatcgacaactgaaggagatacctaattattcattacatctgcctccaaagagttttctttcatctagcgttgatgattatcttgtgcaccaacggtgcattctcctggacaaatatcttcaactaatattgcagagcagcatgaagttttggattttctgagtgcatcctcaaagacttactctgctggaaagtcctcctctgttatgaaaaccttggctgttaatgttgatgatgcaatggatgacattgttcgacaatttaaaggagtttcagatggtttgaaacgggcggtcggcacatcaccttctagtgcaactgcccaatttgcagataataggatgtctctatcttggaaccaggaagagaaagataaccacaacttgcatcaaagaaacttggaaagggctcatagcctttcagatggtgatagtaactatgaagatcacatctcttctgtgaatagtggatgccattcagacaatgaggtcaataatagaggacatacttcaaatgatgttgagcacatcgaaacatgctctagtttggataaacaagccagcgaccaaataggaaaacctgcaaaggaatattctgattcttcaaacatgtcatctctaaatgcatttgaggatccaacaggaattcctcctgagtggatgccaacaaatgttagtgtgcctttattgaacctggttgacaaagtattccagctaaagcgacggggttggatacggttctttggatatcaaaacaaattttgcagttggtcatggaagatgcaattgatgaatggatcataagacaaatcaattggctccgaagagaagatgtcatcgtacaaggaatacattggattcaagataccctttggccaaatggtatattcttcaccaagttggatgaatataaagggaatgcaggcacaagtgaatttgacaagcagtcattagggagtcccacactggctgttggcaataaaaagggccgcacaagctcttttgaacttcatcttgaggcatccagaaatgccagtgaggtcaaaaaacttattttagatggaactccatcggccttggtcagcataattggatacaagcagtaccggcgcagcgcaagggacatgtactacttcctccaatccaacgtctgcatcaaacagctcgcatatgcaatgctagagcaggtcctcgtgacagtcttcccagagcttcgccagctaatagaagacatacatgagaaaggccgcaaagagcaagcctcattcacataccaactctgacccaagagaaaacatgctaattcagagaggagtcgcaacaattttgaacgcacttgcattgctccacggtgagttactgaaacacaaagcctttgcaattatattttgatgatgcataagttggattgaggaagtgcttggtgcttaagaatgatctgtacagatgtatatcagaggttatgtaaattatccccctgatgtagtcaaccagaacaacttacagtgagatcttgtaggtgttgaatgtaatgtatcattctttaattcccccccccccccccccccccaagaattaagttattctcccccctgacttatgctgaggcttgtaaagttttgaaagttccaagtgtatagctgtactgtttgtgttgctgagtaaatcaaaatgttgcgcgagatgccatctctgtttcccaatatttgtccggtcgcacactcaggaggcagaaggtatgtaaattttttaaccaaactaagtgattccttgttgttttggatgaaatataataacatactataatacccaaacagcgcaaattcacgtggata

SEQ ID NO: 45590 - DNA, 3925 bp, Zea Mays
caggaatccaaatttctcccagtggaacggtggaagtgtggaaccatcgcataaatgccccactcgtcagcgtggagcgtggctatatggacccacatggcattcggctacacgcattcgctaggtgggcctcacaacagagcacacaggctggttcgagaccccgggcacgtttctacaaatcctaagaaaactccaaaaaaagacaaaataacccagaaataaaaatcgccgtggaggcgagtcgccgccggcaccgcccggcacggccttcttctccggcgaaggcggagctcgttacggggattccgcatccgttaatcggtcccaccggatccctcgccgcctcccacgggccgggccgcgccgtggcgcgcgcgcaggccgagatgcggaagaggatggagagcgtcgacgatctgatcgaggaggcaaagctgcgcaccgtctggtgggcgctctgcatcttcgccgtctcctacttcctcacgcatacaagtaaatcaatgtggacaaatgtgcccatgtcaatccttatacttgcatttctgcgatatctctccttcaaagtggagttccgttggagggaacaccctgtacgtaagcagacacatttgtctcaagcctcaaagagacagttgtctgcaaatgatcatcgcctttcgactgtaccaccagtctccagatggagaaggaaagttggttcaccttctgttgaggctgcttttgaaagtttcattgagaaaattttacgagactttgttttagacttgtggtactcagatattactcccgacagagaggcaccagaactgatacgtggcttagtacttcatgctcttggtgaattatcaggcagggtgaaagagatgaatctagttgacatgctaacaagggatatggttgatttgattggtaatcatttagatatttttcggaaaaatgaaattctaattggcgttgatgtcatgaggactttgtcttcagaggaaatagatgagagactgaagcagcacctaatagtttcacaggaacttcatccagcactgttatcttcagagcatgagtacaaggttcttcaagaaattgttgggggcattatggctctagtgttgagaccacaggatgctcagagtccgctagttcgctgtttctccagggaattgatgacctgcctaatcttgcagcctgttatgaacttcgcaagccctgtctacatcaatgagttggttgtctaccttctaaatgccaaagatacaggtagcgctggaggtacaaacatggctaatacaggaacagtaacactagtgccttacaaaggaggctcacaaggttgtcaaatggaatcaaggaatttgactgtagaaactagcggtttagttccaccaaataattctgggatgagatcacttgttacttctgaatgtggaaagtcaaaagtgtcagaggatgacaatgatggtaccatccaacctcgtcagccagactgggcggcggtattggatgcagctactaaaagaaggtcagaggttcttgcccctgagaatcttgagaacatgtgggcaattggaagaaattatcaaaagaaaatggttaaattagaccactcatcaagacagaaaggctctgaaggttcagataatagtacaagtgcaggggcagttggtagtcatccacttgctctacaaaatatgaatgaagtgaaaccaaaagaggggagtcaagttaattttaccagcaaggaaaaaccacatgaaaccagcaacagagtaaaagcccaactaaaacggtgtaatagtactcctgatattgagaaaagatatttggcaaaaagtaaccagcccatggtttccagtgaaaggctaaatgtgaggataaatcaggatgagagaggtgttggtcctgcctcacatgttgaggtgctaatgcatgttccgaagataagatgtcgggttgttggtgcatattttgagaaacaaggttcaaaatcttttgcagtttattctattgtggtgactgatgcggataacaagagctggtttgtgaaaagaagataccggaattttgaacgtcttcatcgacaactgaaggagatacctaattattcattacatctgcctccaaagagttttctttcatctagcgttgatgattatcttgtgcaccaacggtgcattctcctggacaaatatcttcaagatctcttgtctatagctaatattgcagagcagcatgaagttttggattttctgagtgcatcctcaaagacttactctgctggaaagtcctcctctgttatgaaaaccttggctgttaatgttgatgatgcaatggatgacattgttcgacaatttaaaggagtttcagatggtttgaaacgggcggtcggcacatcaccttctagtgcaactgcccaatttgcagataataggatgtctctatcttggaaccaggaagagaaagataaccacaacttgcatcaaagaaacttggaaagggctcatagcctttcagatggtgatagtaactatgaagatcacatctcttctgtgaatagtggatgccattcagacaatgaggtcaataatagaggacatacttcaaatgatgttgagcacatcgaaacatgctctagtttggataaacaagccagcgaccaaataggaaaacctgcaaaggaatattctgattcttcaaacatgtcatctctaaatgcatttgaggatccaacaggaattcctcctgagtggatgccaacaaatgttagtgtgcctttattgaacctggttgacaaagtattccagctaaagcgacggggttggatacggttctttggatatcaaaacaaattttgcagttggtcatggaagatgcaattgatgaatggatcataagacaaatcaattggctccgaagagaagatgtcatcgtacaaggaatacattggattcaagataccctttggccaaatggtatattcttcaccaagttggatgaatataaagggaatgcaggcacaagtgaatttgacaagcagtcattagggagtcccacactggctgttggcaataaaaagggccgcacaagctcttttgaacttcatcttgaggcatccagaaatgccagtgaggtcaaaaaacttattttagatggaactccatcggccttggtcagcataattggatacaagcagtaccggcgcagcgcaagggacatgtactacttcctccaatccaacgtctgcatcaaacagctcgcatatgcaatgctagagcaggtcctcgtgacagtcttcccagagcttcgccagctaatagaagacatacatgagaaaggccgcaaagagcaagcctcattcacataccaactctgacccaagagaaaacatgctaattcagagaggagtcgcaacaattttgaacgcacttgcattgctccacggtgagttactgaaacacaaagcctttgcaattatattttgatgatgcataagttggattgaggaagtgcttggtgcttaagaatgatctgtacagatgtatatcagaggttatgtaaattatccccctgatgtagtcaaccagaacaacttacagtgagatcttgtaggtgttgaatgtaatgtatcattctttaattcccccccccccccccccccccaagaattaagttattctcccccctgacttatgctgaggcttgtaaagttttgaaagttccaagtgtatagctgtactgtttgtgttgctgagtaaatcaaaatgttgcgcgagatgccatctctgtttcccaatatttgtccggtcgcacactcaggaggcagaaggtatgtaaattttttaaccaaactaagtgattccttgttgttttggatgaaatataataacatactataatacccaaacagcgcaaattcacgtggata

SEQ ID NO: 45591 - DNA, 1712 bp, Zea Mays
tcgcttctgctgctaatgccgccatgttgataagtctcgtcgggttgccggatctttccctgatctcagcggtttcgtgcgtgcattgcagtacaaggaggtcgtgggatcaggggccttcaagacagtctacaaaggtttcgacgtggtcgaaggcatcgaggtggcatgggctaaagtggagataaccggccggaccatgggatcccccaaggagctccagcggctcaagacggagatccagctgctgcggtcgctccatcacaagcacattctcaagctctacgcctcatgggtcgacaacaagaagagggcggtcaatataatcactgagcttttcacgtccggcaacttgagagagtaccgtacgaagcacaagaaagttgacatgaaggcaatgaggcgatgggccaaacaaatactgacagggctagcctatctgcatagtcagaagccaccaatcatacacagggacttgaagtgtgacaacattttcatcaatgggaaccatgggaaagttaagattggagacttcggtttggcaatggtgatgcagcagaggaaaacacagagtatacaaggcaccttagagttcatggcaccagagctgtttggtgaaaactacaacgagttggtggatatatactctttcggcatgtgcatgcttgagatggtgactggtgagtgcccttacagtgaatgtcagggctttgttcagatatacaagaagatatctgaaggtgtaaaaccagttgctctctccaaggtcaaagatgcagaagtaaggagtttcatagagagctgcctagcttcagctgctgatagattgccagcaagtgagctcttgaagagcccttttctcatgatagatgacatcatcatcaatgataaaacctctaatcctgtgcaagaacctatagcattcccgccaaatttggatctggatcttgaagccacaccaatttttatatctttgctaccaaatggaaccgttgataatgggaagggatctttcagcctagtgcttcgaaggggtggattcgtactagaaggagatatgagtggtagcaaccctgttaatttattactaaggattcctgtccccaatggtaaatgtaagaacattgagttcgcgtttgacctggagaatgatacaagtcttttggtggctacagagatggtgcaagagcttgaactaccttcttggagcatgcctattgtggcaaagctggtagatgcgttcctgctcaaaactgttcgtggttggaggccgtgtgttcaggtcggtcagatgattcaggcagtgcaaaacactgcatccgtgaatggaaaaagcatctgaatcaatgtttgtagctgatgcattattctgcaccttatgtaaatatatcatgcccgaatgcaacgccaggccttgctgactaagcacatcttcttttatctgatgctggttaaagtttgggcatgattcctaattagaatagtggtatgtttcgtattttttttggttcgtattgttagaaagaggttcagagataagagaaattaagaatgctgtaacagccatccttgctttttttcagttttttttaaaagccttaccatgtgtctatttggtactgctcaacttcatgatttgcagcttagctttacaagaagtctgttgttcacttgttaccaaatgctatggataaaaaacaagacaattgtta

SEQ ID NO: 45592 - DNA, 2280 bp, Zea Mays
gcagcctcacgtgatcccgttcctaagttctaactacccgcggcgctgtgcccgtggaacttggaacgagtatttactgtattttgagtcacaactcacaagggtagttcaaagtccggaactccagactcgcgttcgcacgccgcctttcgcgctgcgttagcgccttagcctgctagggctcgtcgattcatcgccggctcgacttctgatctcgcgggcagagcagcgcgccggcgcgatggcttcggatccggatgtgtccggcggcgagcaggcggagccgcccgacgatgtggacgaccccgacgtcgacgaggtcgaccccactggccgctacttcaggtacaaggaggtcgtgggatcaggggccttcaagacagtctacaaaggtttcgacgtggtcgaaggcatcgaggtggcatgggctaaagtggagataaccggccggaccatgggatcccccaaggagctccagcggctcaagacggagatccagctgctgcggtcgctccatcacaagcacattctcaagctctacgcctcatgggtcgacaacaagaagagggcggtcaatataatcactgagcttttcacgtccggcaacttgagagagtatgtaaatataacataacccctccctatatgtgctgctacgatggagtgtgattgtttttattatttgtgcctagtaccttattttgtggcaaggtaaatgttcagttatttactaatggcaaacaaaatctgaacaactctttcttttttcaaatttaaaatctaatggtagttttagttttcacttctcaggggacaaaaataaatacaaagttggttcttttttcctttccattcagaaggacagcagctgtacagaagtagctagcttcaccatcccctttcatgatctatgttatggtgtggttaggtaccgtacgaagcacaagaaagttgacatgaaggcaatgaggcgatgggccaaacaaatactgacagggctagcctatctgcatagtcagaagccaccaatcatacacagggacttgaagtgtgacaacattttcatcaatgggaaccatgggaaagttaagattggagacttcggtttggcaatggtgatgcagcagaggaaaacacagagtatacaaggcaccttagagttcatggcaccagagctgtttggtgaaaactacaacgagttggtggatatatactctttcggcatgtgcatgcttgagatggtgactggtgagtgcccttacagtgaatgtcagggctttgttcagatatacaagaagatatctgaaggtgtaaaaccagttgctctctccaaggtcaaagatgcagaagtaaggagtttcatagagagctgcctagcttcagctgctgatagattgccagcaagtgagctcttgaagagcccttttctcatgatagatgacatcatcatcaatgataaaacctctaatcctgtgcaagaacctatagcattcccgccaaatttggatctggatcttgaagccacaccaatttttatatctttgctaccaaatggaaccgttgataatgggaagggatctttcagcctagtgcttcgaaggggtggattcgtactagaaggagatatgagtggtagcaaccctgttaatttattactaaggattcctgtccccaatggtaaatgtaagaacattgagttcgcgtttgacctggagaatgatacaagtcttttggtggctacagagatggtgcaagagcttgaactaccttcttggagcatgcctattgtggcaaagctggtagatgcgttcctgctcaaaactgttcgtggttggaggccgtgtgttcaggtcggtcagatgattcaggcagtgcaaaacactgcatccgtgaatggaaaaagcatctgaatcaatgtttgtagctgatgcattattctgcaccttatgtaaatatatcatgcccgaatgcaacgccaggccttgctgactaagcacatcttcttttatctgatgctggttaaagtttgggcatgattcctaattagaatagtggtatgtttcgtattttttttggttcgtattgttagaaagaggttcagagataagagaaattaagaatgctgtaacagccatccttgctttttttcagttttttttaaaagccttaccatgtgtctatttggtactgctcaacttcatgatttgcagcttagctttacaagaagtctgttgttcacttgttaccaaatgctatggataaaaaacaagacaattgtta

SEQ ID NO: 45593 - DNA, 1883 bp, Zea Mays
gcagcctcacgtgatcccgttcctaagttctaactacccgcggcgctgtgcccgtggaacttggaacgagtatttactgtattttgagtcacaactcacaagggtagttcaaagtccggaactccagactcgcgttcgcacgccgcctttcgcgctgcgttagcgccttagcctgctagggctcgtcgattcatcgccggctcgacttctgatctcgcgggcagagcagcgcgccggcgcgatggcttcggatccggatgtgtccggcggcgagcaggcggagccgcccgacgatgtggacgaccccgacgtcgacgaggtcgaccccactggccgctacttcaggtacaaggaggtcgtgggatcaggggccttcaagacagtctacaaaggtttcgacgtggtcgaaggcatcgaggtggcatgggctaaagtggagataaccggccggaccatgggatcccccaaggagctccagcggctcaagacggagatccagctgctgcggtcgctccatcacaagcacattctcaagctctacgcctcatgggtcgacaacaagaagagggcggtcaatataatcactgagcttttcacgtccggcaacttgagagagtaccgtacgaagcacaagaaagttgacatgaaggcaatgaggcgatgggccaaacaaatactgacagggctagcctatctgcatagtcagaagccaccaatcatacacagggacttgaagtgtgacaacattttcatcaatgggaaccatgggaaagttaagattggagacttcggtttggcaatggtgatgcagcagaggaaaacacagagtatacaaggcaccttagagttcatggcaccagagctgtttggtgaaaactacaacgagttggtggatatatactctttcggcatgtgcatgcttgagatggtgactggtgagtgcccttacagtgaatgtcagggctttgttcagatatacaagaagatatctgaaggtgtaaaaccagttgctctctccaaggtcaaagatgcagaagtaaggagtttcatagagagctgcctagcttcagctgctgatagattgccagcaacattcccgccaaatttggatctggatcttgaagccacaccaatttttatatctttgctaccaaatggaaccgttgataatgggaagggatctttcagcctagtgcttcgaaggggtggattcgtactagaaggagatatgagtggtagcaaccctgttaatttattactaaggattcctgtccccaatggtaaatgtaagaacattgagttcgcgtttgacctggagaatgatacaagtcttttggtggctacagagatggtgcaagagcttgaactaccttcttggagcatgcctattgtggcaaagctggtagatgcgttcctgctcaaaactgttcgtggttggaggccgtgtgttcaggtcggtcagatgattcaggcagtgcaaaacactgcatccgtgaatggaaaaagcatctgaatcaatgtttgtagctgatgcattattctgcaccttatgtaaatatatcatgcccgaatgcaacgccaggccttgctgactaagcacatcttcttttatctgatgctggttaaagtttgggcatgattcctaattagaatagtggtatgtttcgtattttttttggttcgtattgttagaaagaggttcagagataagagaaattaagaatgctgtaacagccatccttgctttttttcagttttttttaaaagccttaccatgtgtctatttggtactgctcaacttcatgatttgcagcttagctttacaagaagtctgttgttcacttgttaccaaatgctatggataaaaaacaagacaattgtta

SEQ ID NO: 45594 - DNA, 1538 bp, Zea Mays
gcagcctcacgtgatcccgttcctaagttctaactacccgcggcgctgtgcccgtggaacttggaacgagtatttactgtattttgagtcacaactcacaagggtagttcaaagtccggaactccagactcgcgttcgcacgccgcctttcgcgctgcgttagcgccttagcctgctagggctcgtcgattcatcgccggctcgacttctgatctcgcgggcagagcagcgcgccggcgcgatggcttcggatccggatgtgtccggcggcgagcaggcggagccgcccgacgatgtggacgaccccgacgtcgacgaggtcgaccccactggccgctacttcaggtacaaggaggtcgtgggatcaggggccttcaagacagtctacaaaggtttcgacgtggtcgaaggcatcgaggtggcatgggctaaagtggagataaccggccggaccatgggatcccccaaggagctccagcggctcaagacggagatccagctgctgcggtcgctccatcacaagcacattctcaagctctacgcctcatgggtcgacaacaagaagagggcggtcaatataatcactgagcttttcacgtccggcaacttgagagagtaccgtacgaagcacaagaaagttgacatgaaggcaatgaggcgatgggccaaacaaatactgacagggctagcctatctgcatagtcagaagccaccaatcatacacagggacttgaagtgtgacaacattttcatcaatgggaaccatgggaaagttaagattggagacttcggtttggcaatggtgatgcagcagaggaaaacacagagtatacaaggcaccttagagttcatggcaccagagctgtttggtgaaaactacaacgagttggtggatatatactctttcggcatgtgcatgcttgagatggtgactggtaaatgtaagaacattgagttcgcgtttgacctggagaatgatacaagtcttttggtggctacagagatggtgcaagagcttgaactaccttcttggagcatgcctattgtggcaaagctggtagatgcgttcctgctcaaaactgttcgtggttggaggccgtgtgttcaggtcggtcagatgattcaggcagtgcaaaacactgcatccgtgaatggaaaaagcatctgaatcaatgtttgtagctgatgcattattctgcaccttatgtaaatatatcatgcccgaatgcaacgccaggccttgctgactaagcacatcttcttttatctgatgctggttaaagtttgggcatgattcctaattagaatagtggtatgtttcgtattttttttggttcgtattgttagaaagaggttcagagataagagaaattaagaatgctgtaacagccatccttgctttttttcagttttttttaaaagccttaccatgtgtctatttggtactgctcaacttcatgatttgcagcttagctttacaagaagtctgttgttcacttgttaccaaatgctatggataaaaaacaagacaattgtta

SEQ ID NO: 45595 - DNA, 1824 bp, Zea Mays
gcagcctcacgtgatcccgttcctaagttctaactacccgcggcgctgtgcccgtggaacttggaacgagtatttactgtattttgagtcacaactcacaagggtagttcaaagtccggaactccagactcgcgttcgcacgccgcctttcgcgctgcgttagcgccttagcctgctagggctcgtcgattcatcgccggctcgacttctgatctcgcgggcagagcagcgcgccggcgcgatggcttcggatccggatgtgtccggcggcgagcaggcggagccgcccgacgatgtggacgaccccgacgtcgacgaggtcgaccccactggccgctacttcaggtacaaggaggtcgtgggatcaggggccttcaagacagtctacaaaggtttcgacgtggtcgaaggcatcgaggtggcatgggctaaagtggagataaccggccggaccatgggatcccccaaggagctccagcggctcaagacggagatccagctgctgcggtcgctccatcacaagcacattctcaagctctacgcctcatgggtcgacaacaagaagagggcggtcaatataatcactgagcttttcacgtccggcaacttgagagagtaccgtacgaagcacaagaaagttgacatgaaggcaatgaggcgatgggccaaacaaatactgacagggctagcctatctgcatagtcagaagccaccaatcatacacagggacttgaagtgtgacaacattttcatcaatgggaaccatgggaaagttaagattggagacttcggtttggcaatggtgatgcagcagaggaaaacacagagtatacaaggcaccttagagttcatggcaccagagctgtttggtgaaaactacaacgagttggtggatatatactctttcggcatgtgcatgcttgagatggtgactgggtgtaaaaccagttgctctctccaaggtcaaagatgcagaagtaaggagtttcatagagagctgcctagcttcagctgctgatagattgccagcaacattcccgccaaatttggatctggatcttgaagccacaccaatttttatatctttgctaccaaatggaaccgttgataatgggaagggatctttcagcctagtgcttcgaaggggtggattcgtactagaaggagatatgagtggtagcaaccctgttaatttattactaaggattcctgtccccaatggtaaatgtaagaacattgagttcgcgtttgacctggagaatgatacaagtcttttggtggctacagagatggtgcaagagcttgaactaccttcttggagcatgcctattgtggcaaagctggtagatgcgttcctgctcaaaactgttcgtggttggaggccgtgtgttcaggtcggtcagatgattcaggcagtgcaaaacactgcatccgtgaatggaaaaagcatctgaatcaatgtttgtagctgatgcattattctgcaccttatgtaaatatatcatgcccgaatgcaacgccaggccttgctgactaagcacatcttcttttatctgatgctggttaaagtttgggcatgattcctaattagaatagtggtatgtttcgtattttttttggttcgtattgttagaaagaggttcagagataagagaaattaagaatgctgtaacagccatccttgctttttttcagttttttttaaaagccttaccatgtgtctatttggtactgctcaacttcatgatttgcagcttagctttacaagaagtctgttgttcacttgttaccaaatgctatggataaaaaacaagacaattgtta

SEQ ID NO: 45596 - DNA, 1929 bp, Zea Mays
gcagcctcacgtgatcccgttcctaagttctaactacccgcggcgctgtgcccgtggaacttggaacgagtatttactgtattttgagtcacaactcacaagggtagttcaaagtccggaactccagactcgcgttcgcacgccgcctttcgcgctgcgttagcgccttagcctgctagggctcgtcgattcatcgccggctcgacttctgatctcgcgggcagagcagcgcgccggcgcgatggcttcggatccggatgtgtccggcggcgagcaggcggagccgcccgacgatgtggacgaccccgacgtcgacgaggtcgaccccactggccgctacttcaggctacaaaggtttcgacgtggtcgaaggcatcgaggtggcatgggctaaagtggagataaccggccggaccatgggatcccccaaggagctccagcggctcaagacggagatccagctgctgcggtcgctccatcacaagcacattctcaagctctacgcctcatgggtcgacaacaagaagagggcggtcaatataatcactgagcttttcacgtccggcaacttgagagagtaccgtacgaagcacaagaaagttgacatgaaggcaatgaggcgatgggccaaacaaatactgacagggctagcctatctgcatagtcagaagccaccaatcatacacagggacttgaagtgtgacaacattttcatcaatgggaaccatgggaaagttaagattggagacttcggtttggcaatggtgatgcagcagaggaaaacacagagtatacaaggcaccttagagttcatggcaccagagctgtttggtgaaaactacaacgagttggtggatatatactctttcggcatgtgcatgcttgagatggtgactggtgagtgcccttacagtgaatgtcagggctttgttcagatatacaagaagatatctgaaggtgtaaaaccagttgctctctccaaggtcaaagatgcagaagtaaggagtttcatagagagctgcctagcttcagctgctgatagattgccagcaagtgagctcttgaagagcccttttctcatgatagatgacatcatcatcaatgataaaacctctaatcctgtgcaagaacctatagcattcccgccaaatttggatctggatcttgaagccacaccaatttttatatctttgctaccaaatggaaccgttgataatgggaagggatctttcagcctagtgcttcgaaggggtggattcgtactagaaggagatatgagtggtagcaaccctgttaatttattactaaggattcctgtccccaatggtaaatgtaagaacattgagttcgcgtttgacctggagaatgatacaagtcttttggtggctacagagatggtgcaagagcttgaactaccttcttggagcatgcctattgtggcaaagctggtagatgcgttcctgctcaaaactgttcgtggttggaggccgtgtgttcaggtcggtcagatgattcaggcagtgcaaaacactgcatccgtgaatggaaaaagcatctgaatcaatgtttgtagctgatgcattattctgcaccttatgtaaatatatcatgcccgaatgcaacgccaggccttgctgactaagcacatcttcttttatctgatgctggttaaagtttgggcatgattcctaattagaatagtggtatgtttcgtattttttttggttcgtattgttagaaagaggttcagagataagagaaattaagaatgctgtaacagccatccttgctttttttcagttttttttaaaagccttaccatgtgtctatttggtactgctcaacttcatgatttgcagcttagctttacaagaagtctgttgttcacttgttaccaaatgctatggataaaaaacaagacaattgtta

SEQ ID NO: 45597 - DNA, 8014 bp, Zea Mays
cacgttctccaggcccgacatcgcttacgccgtccagcaggtgtgcctgcacatgcacactccgcgggagccccatctcactgcgctcaagcggattctacgctacctccgcggctccctcgactacggtctcctactccgcccatccccgacgacggagctcgtggtctacaccgacgctgactgggctggctgtcccgacacgcgccggtccacctccggctacgccgtcttcctgggcgccaacctcgtctcttgggccgccaagaggcagcccgtcgtctctcgctccagcgctgaggccgagtaccgtgccgtggccaacggcgtggccgaggcctcctggctgcgccagctcctccacgagcttcacagtcccctccagcgcgccaccctcgtctactgcgacaacgtcagcgcggtctacctctccaccaaccccgtgcagcatcagcgcacgaagcatgtggagatcgacctccacttcgtccgcgagcgtgtcgctgccggtgacgtccgcgttctcagcgtccccaccacgcttcagttcgccgacatcttcaccaaggggttaccgtcgagtgtctttttagacttccgatccagcctcaacatctgtacaggatagagttgtgactgcgggggggtgttagactacccgtctagggtttgtgttattccctgtgtaatgactgttatacccctgtgtaatgggccttggcccagttactctctctatttaatatcactcccaacccctgattagggtatgggcacacattccaacacagatgaatgtaagggcacagatattttaacttctgatgaaaaaatcaagtgtgtgtacagaaacaatgagtactagcaaggaatgctaaaactcaaccaaatggcactggcaatcagttatactcataccaaaatgcactaatagcaactcaagacttggaaagaacttggtgggtaggaaatagcatgcattcacaaagtataataaaacagtttccaaaacacatcaaacgtgagcaaaggttcaaaattccaaggtcagatatccataatccaatgcctaaacctaaattagttgcaaccttatcatttacaaaatgaccaaatgggcctgtttgtttcagcttatagattatatattctggattataatctagattatataatccaaattataatttgtctagattataatatgtatgtaactgtttggtagtgtagattatacaaatgcaaattattgttatctaagacacaaagtcaacaatgccctttcaattgaagcctttcagtaagtccaatttattcttcaattgaagccttgaatggtgcaaccctgttgttatcttgtacttttcagctatgttgttgtacccacgaatagtcacgatgccattcggcctattaccagcattggtttcttagatacagatttcacaaaatactctagtgttctcaaaagtccaagctgctttgtcataaacttcattctactcaaaattaaaaacatgtatgcaagccgtgctttcttcgtcttccaagaaggcattgaaatccaacccacacctcaaggtgctcctatacttcaaggctccagccaggttttcctcggcgtcgaggtcgtccatggagctggcgggatgtacgaggggcggcgagatgctcctgtggagccggtggtaggattttccaaggagcggcggcgtgggatgtatgagggtttacaagggcgatggtggtatggatacctgggctggggctggggctggggagcggtcacctgtgctggtgctggcgagccatcaccttggttggggagcggtggcagtatagattaccagggaggcgcgtgggatgctaatctccaaggggcggacagtggttttcgggaggcggcgtgggatgcttgtgaggggcggcgggatggcttgagagacgaacgggtaaaaaataggatggcagattaacgtaatttcagttcacataaccatgggtgctgggtcttttaccaaaaataatctgaaataagttactcttgagaagattatgagtgttagaagataagattagattgtaaacaaatatctgtaacaaacaagagtaagcatctctgggaagataaagatagggatattctgttgtaactagaattcctgaagcttctctagtttgttacgatcctgtaaatcctgcgcatgttgtttatgcctatataaacatgtagggcggccctccaacgaggcagcacgctttaacctattgccctctgattttacatggtaatcagagcctaaaccatctaccaaaaccctcatcatgtcgtccagtgcttcctccgccgcacttgttgcacatcccgtttctgagaagcttaccagggccaaccatgccttgtggaaggcccaggtacgtgctgccatgcgcggcgcacgtctggagggatacctcaccggcgcaaccaagatgcctgatgaggagactgtcgacaacgcgggcaagaagagccccaatcctgcttttgaagaatgggaggcgaaggatcaacagatccttagctatctcctctcatctataagcagagaggtgcagattcaagtcacctcagccaagactgcggcggaggcatggcactccatcgaggccatgttcgcatcacagacccgagcccgggctgtgaatcttcgccttgctctgtcaactacaaaaaaaggtagtatgaccgtcgccgagtactacaccaaaatgaagggctacggcgatgagatggctgcagcaggaagaccgctgcaagatgaagagatggtcgagtacatcctcaccggcctggaggaagaattcctaccgatggtgtctgcccttgtcacgagggtagatccaatctcacttgaagacctctactctcagttgctgaattttgagaccaagttggatctcatgagaggtggaggcgagcagcatcaaggatcagcaaatatggctggtcgcggtggccgtggaaatcaacgtggaggcagtggtggtcgtggccagcgtggtggccgcgggtcatctcgtggtggccgtgctagttggtccggagggcgccaaagcaaccagggaggctacatcaggcgttccaacaactccagcgacgagaggccggtctgccaggtctgcttcaagaagggccacaccgcagccaggtgctggcacaggtttgaagaagacttcgtcccagatgagaagcttgctggagccgccaccaactcctaccacgtcgacaccaattggtacacggacaccggcgccaccgaccacataacaggagagcttgagaagctctcaatcagggagaagtacgctggtggtgatcaaattcacactgccagcggttcaggtatgacaatcagtcacattggtcaatctactgttaatacccctaatagaaatcttcatctaaatgatgttctttatgttccacaagctaaaaaaaaccttgtctcggttcataaattaacttcagataactctgccttcatagaatttcatccaaatttttttgttatcaaggacaaagacaccaagaacattttgcttaaggggcgatgtcacaaaggactgtatcccatccccgctacatccacaataaagaacgctcttggtgctgtcaagccctccatgtcccgatggcacaatcgtttaggtcatccatcttctttcattgttcgtcaggttgttagcaagaataaacttccttgtttaggtccctcaacagatgaatccgtgtgtgatgcctgtcagaaagccaaagctcatcaattcccatatcctagatccactagcgtatctagctcccctctcgagctagttttttctgatgtatggggtcctgcacccgaatctgttggcagaaaaaaatattatgtgagctttattgatgattatagtaaatttacctgggtttatcttattaagtataagtctgaagtttttcagaagtttcatgaatttcaaagccttgttgaacgactttttgacaggaagattcttgctgtccaaactgattggggaggggaatatcagcgcttgaataccttttttaataagatcggcatttctcatctggtttcttgtcctcacgctcaccaacaaaatgggtcggctgagcgaaaacatcgacacatcgtagaagttgggctttctttgcttgcacatgcgtctatgccccttaaattttgggatgaggcatttctagctgccgcatatctgatcaatcgcactcccacaaaaattcttaatctagacacaccttttgagcgcttgtttcataaacaacctgattattcagttctccgcatttttggatgcgtatgttggcctaatcttcgcccatataactctcacaaacttcagtttcgttccaagcaatgtgtttttcttgggtatagtagcttacacaaagggtttaagtgtttagatgtctctactggcagggtatatgtttctcgagatgttacatttgatgaaaatgtttttccctttgcttccttgcatagcaatgcgggtgcacgattgagatctgaaatccagcttctttcacctgatcttttaaatcctgccacatttaattctggggtagacagtttgattgatcatgcggctgatatgtctactgaccctaaccaaatttctggagacaattctgttcaagatcaggcagaacacacaccaaatatggatgtcctagcgccttcagtaccaaacactgctcctgaagctgatgcggtgcatattcctgggagtgcttcgcactcgggatctgctcctgcagcgccatcgacagctgcaccgtctccaacctgtcgtggcgactcgcgcgttgccacgcacccttcagctagccacgattatgtggcttccgtcgacatgtcccgcggcattgcgggacgggaagagagcttcttgacagctcccactaccgcgacatcaccagcgagttctgagccgtctggttctctgcctgcgaccgctgctgatgcacaagtccctgaaccgattttgggaggtgtatcttctatggaccctgcatcaactcgcccaaggacaagacttcaacaaggggtcaggaaaccaaaggtttatacagatggcactattcgatatggttgttttacttcttctggtgaaccttatgatctaaatgaagctttaggagatgttaattggaaagatgctatggatatagaatactcggctcttatgaaaaataaaacttggcaccttgttcctccaaaaaaaggtaggaacgttataggatgcaaatgggtgtataaaattaaaaggaaagccgatggaagcttggataggtacaaggcacgactagtagctaaagggtataaacaacaatatgggatagattatgatgatactttcagtcctgttgttaaacatgctaccattcgtataattctttctattgctgtgtcacgagggtggagtctacgtcagcttgatgttcagaatgcattccttcatggagtattggaggaggaagtctacatgcagcaacctccaggatatgaggattccacaaaactcaactatgtgtgcaaacttgataaggcactctatggattgaaacaagctccacgtgcatggtattcacgattgagcaataagcttctttctcttgggtttcaagcatctaaggctgacacatcattattcttctacaataagggaagtgttactatttttgtgcttgtgtatgttgatgatataattgttgcaagctccactcacaaagcaacagaagcattactaagtgatctcaacaaagagtttgcactcaaggacttgggtgacctcaactacttcctaggaatagaggtgaataaggtacgagatggtattatcttgactcaagacaagtatgcttcagatttacttaaaaaggttggtatgtctgactgcaaaccgatcagtacacctctttccactagtgagaagctatctatacatgaagggtcacctttaggagaaaaagatataacccagtacaggagtatagtgggggctttacaatatcttactttaactagacctgatattgcattttcagttaataaagtttgtcaatttcttcatgctcctactacgttgcactgggcagcagtcaaaaggatacttagatacatcaagcaatgtacaaacttagggctgcatatccatagatcagattctactcttgttagtgccttttccgatgcagattgggctggcagtgtagatgatagaaaatctacaggtgggtttgctgttttcttaggatcaaatcttgtctcatggagtgcaagaaagcaacctacggtgtcaagatctagcactgaatctgaatataaagctttggccaatgctactgcagagttgatatgggtacaaattttactcactgaaattagtattaaaagtcctagagcagctaagttgtggtgtgacaatttgggagctaaatatttgtcagccaatcctatctttcatgcaagaacaaaacatattgaagtggattatcattttgtgagagatcgggtcgcaaagaaactacttgatatagaatatgtgcctactggagatcaagttgcagatgggtttactaaacctctttcagttcggcttctggagaatttcaaagtcaatctcaacctcactcggttatgattgagggagggtgttagaagataagattagattgtaaacaaatatctgtaacaaacaagagtaagcatctctgggaagataaagatagggatattctgttgtaactagaattcctgaagcttctctagtttgttacgatcctgtaaatcctgcgcatgttgtttatgcctatataaacatgtagggcggccctccaacgaggcagcacgctttaacctattgccctctgattttcacaatgagattataataatctaggtactagattatataatctggacctataatctaggtatttgtttacccatccagattatataatcttgtcagattataatctgaaacaaacagggcctaaaggaaggtgcaatattcctgtgacataggaggaattaatccatgaaccagcaaggagacaattcatatcgacctaaggatcgaagagtttaacttcggaagaaatcctcaagaagcagcaaaaactctagtgagaagaagaaacaaaaaggttttaaacccaagttacttgaatgaaactgataagccagggcaagaaaccattagactggacaatcataaggagaggatgtgagtgatggtaacatcttgctttctttatatagataatcgtatgatgccaaggtttaagtaagctaagttcgttttcccacttgtccagcacggcaagagagcaaataattaagagcggtgggataaaataatagctgatctcctatcgtggtacttgtagttgtagcaagagacaagccccagttaaaaaattagcgctggttgaagcaatgatacgtttcgtacacccaaccacaagattttttttttctgtccaaggataagcgggactttggaggagggcacaataagttatgatagtgcctggtcaaagcaaccaaacaaatattcgttacctgaagaagcgtgagctgtgccgaaagcgtggtggcctctgtctgcagcgtctgcaccttcctctccagctcactggtgtacttgatcttcctctccttggacctcgccgcggactgccggttcgccaggatcctgcaccgccgcgggagaggaaattatacctatcttgaaaccaggacttgaccaggcaggacaaggtatcacgtcccagctccatgaagcatctcaagcagcgggggaagcaattccaaggtgaagacagctcgcggacgctgaaggcgtttgctcacctcttggcgcgcttgggatcgaggagcgcgagctcggcgagcttgtcgtcgggcacggccttcttggcgtagtccggcagcacggacggcgg

SEQ ID NO: 45598 - DNA, 2064 bp, Zea Mays
cttccctcaaggcatcatttagagctgcatcaaaacacaaccagggtttattaacaagggtgcttgatacgcttgttcaactaatatctgcatatctgctcagaagataactgttttttaggagaataaattggtcaggggataactcatcggttgataccatttgcctcgtaatgttcttgaaacaggaaaagtggagtctctttctgggccttatatgacagtggctttagaccttccaaagaaagacaaggacataccatctcgaagtttagcttgttcttccatggcctgcaaccggagtttcagctccctgttctcagtggttaaaccagaggtgtccctctgcattacaagtaaattgcagcatcacaatggaatcaatattagagttgtcattgaccatatatacattgaaggcaacggaacaaacagttgtacaagacgatgactaacgaaaacaaacaaatgcaatagctaacagtcctgacgctaaaccaacagagagttctcaggatgattaccaatggagcaaataattcaaaaaccgttccaatccaaaaatatcaaaatagctaaaaattctaaatccagtttaacacttcagaatatgtttttgctttggttcttttgccacttaaataacaacaacaaagcctttatcccaggcaagttggtgtacgctagtgttttacccaatagagcccacttaaataaccagccgaaatttctagagaaagataaataaaggacaactatcccctaccacaaaaaaccaaaagcttccgcctaacaccactccatttgattcctcatctccaatcaattcggctttcaatcagaacatctatttgtgacacgacctacctatcaagtgcagaggcatctccactatgtccctacttttaggtgtaataaatccttcagtagtcacatcaactaaaacaatacttgcaggcaagattattaattagagaacttcaaaaactattgctatgtttcagctgtgttggccatgaagaaaaggcaacacatctacaattattgttgcttggctacaaataatatggcaacttttaattcacacatcctctggtacgtcatacacaatccatataggaccagaagttcaagatgcaattgcacttgcatggatcggcttaaggccatgtttggctcatggctcatttttagaatcttaatgttaactaaacagctcttggagtttgaattgaattttgtcccagaatctcacaatctctccactagccgataaagtattggctttcgtgtggtatttcaattccgataatccatggggaaccaaatgaacccttattctgcttcagagcgtgcggaaaaatgaagatatctaagtatccctggagcatagtgaccttttggtctcgaatattcactccagccttcatgtaacataaatttgtaaaatagagaaaacaatgttacaatgattatatatcatagacatggtatctactctacatccatgaggaccatataaatgaaaagaaaaacagtatccacaatgtaatagggtttatctggtgctactatatgcccatttattactaagttaccagtatatgtagcaaaatatatatgtctaaggaaatactccattcaacgtttctttagtaatactatcacaagatagtgtatttaaatctcaatcgtatagagtgcatggctacataaactaaaatgttatgccaaagaaatttgcaagtcaaggcaacttggagggtaacttttctgctgatggtataatatacattaatgctcatgattgtttcagcaaagacagaacataaagtgggttagtcatcaaaactattcacctacactgtagaggtaagacagattgttagactacccgtctagggtttgtgttattccctgtgtaatgactgttatacccctgtgtaatgggccttggcccagttactctctctatttaatatcactcccaacccctgattagggtatgggcacacattccaacatggtatcatagagctagggttagtttttccagccgccatc

SEQ ID NO: 45599 - DNA, 785 bp, Zea Mays
gcttttagtaggtaactacttcgattttgcagatctgacagtggcttcttcaccgcctgaccggcgtccatgctatcacggtggctactcctcgccgattattcctgcaccggttcgagttggagaagaatttccaccgtcttgggatctagaaattagaagcaaacaagttgaagatgaagcgacacaattggcaagagaaagggaggttagaggaagtgatgatttctcaattaagaattgcatagcagttctaaacacattggaagtcacaaaggaggagaaggtcaaagcctataaggtgtttaaggactctgacaatcgacagatttcttgagtgcctgtaatgatgatagagaggctgcattgatgtggttgagggatgagatggcttagtagttctagacttccaggggtcgagttatgtacgaagtagctccaatctttagaggaagattgtcttcttgacgggttttatgtacttgttctatcaaagagtgagatgaatcattatctagatctatgatctcgtcatgtttagtacactggaaatgtaatcttttgcaacttattagtgttaacagaccatgagataattgtgcaggttgtttgaaaaggcattaatattgagctgactgaaaatttttattttggtattattgtggtacggttgtttaaaatcgcatgttcagtgcacctgtttgaaacgtgtactgaacgttagggcacctgtttgagttattttgaggctagtattttctctatccctggattaagcgaacaac

SEQ ID NO: 45600 - DNA, 2236 bp, Zea Mays
cgccctccttcgctcgcactcgcacactactggaggggggcagggcagagcagagcagagcagccgcagccatggtgcatgtaggggagatgctggcctcggccgtcattaaggaagttgttcgcaggctgcctgcgctgctccaggctcccgtcaaaggtccggcaaagatgatccggagcttcagggaggacctcgacgagatgaaaatgacgctcgagtccatcaaggcaaccatggcggaagcagagcagcggtctatcaacgacgagaccgcgcggctgtggctcaaacggctcaagagggcagcctatgatatctctgatatgtttgatgagttcgaacacggcagcccaccgggcaagaagctgcagggccctagttggttcgagataatgtttagccgtgacatggctaagaaaatgaagaaaatgaataaaaggctgaaagaaatagcagagcaatggaaaaattacggcgggattggccgtgtatcatgtgagcccaaaaatgatgctgctgaggaacaagaaacaacttcaagttcatcatcagccgtggttgttggtcgtagagctgagaaacaagcagtcattaatatactgcttagctccaataacacataccctcaagaaactattagtcactgtactgttatccatggacttggtggtgttggtaagagcgaactggcaacatcagtgttcaatgacgaaagaatcaaggaggcctttcctcaacgggcatgggtttggttgggccaaaatttccgcgaaaaggatattggaagagctataatctctatagttgaatgtggatcttgtaatctcgagattcttgaatctatataccaacatctcagaaaggtgctcctgggtagatgtctcattgtattggacaatctctgggattcagttcacttagccaaactgcagggtgaactaggaagcaatgtttcgatcttagttacttcacgcagagaaattcaattgaatatgcccagatcgacattattccgcttggatccattgtcagaaagatttagccttgatttagttaaggaagttgcatcctcatattttcctgcaggtgatattccagaaactgcaatggaagaaattgtaaagatgtgcggaggtgtacctttggcccttaaatctgttgcgtcacaactgagaccagaaagaagcgttaaagagctgttgagtttaataagagctatctctccgcccaaatcagattatggaacaacggatatccaggaccgtgttcttgcatcccttaagctgacatatcacttaatgtccccgagtctcaagttatgctttgcttactgtgcaattttcgctaaaggcgatgaaattgatcgggaaggcttatgccaccaatggatcgctcttggactaactgaaaagatgtatgcagaggacagagtccgtgacttattgaccatgtcatttcttcgggatccagagccacctgcgatcacgaggagcagttctggtggttcatccaaacttaagatgcatgatctgggtttcttcctggagagtcctatggggaccaacagctgcatcttaccagctagatcgttgagtatactttggggacaggatgacagatactggaggttgaattctattcctgagtccaggttcgcattatcgatggagctcatagcagtctggtggctcgagattgagggatgggtccctttcgagttcctctccaccgacactagctatgatatattccttgtctacaagctggcagatgagcatgatggcctcagatggggggagtcctacgtagcagtggatggagtacacaccactgatggcgttgtttcctttgtagacgaagatgccgtgcgtgtagatcgcgtggcttacccggttacccgttcagaaggttggatggagctctggcttggtgagttttacaataagtatgttgatagagaggtaaaagtgagtgtctgggagaaaaccgatacctatgccaagatagggctcatcattgagggcatggagatcagaaagaagagcgggagtattagctaggtaggtacatgttagtaatgaacctgatcttggggaacttgtcacatacttaggttttgcttttgcatgccatgaatttctacaagagatggccaaacgggccgcccggcccggcccggcccgggcccagtgaagcccggccaaaaaccgggtcgggcctgctgtgccagcgg

SEQ ID NO: 45601 - DNA, 2432 bp, Zea Mays
gtgcaatattgaacaccgaaccctaacttgagctgtgtggctatttgtttgcggatctgatctaatcactactgtatacatcccgattaggttgttctttacggttacggagcaagatccatttagccatggtgctgccgcagttcgcttttcagaagttttgggtcttcaattgaacccttgagtttaagtccgagcagccacacaaccatggctgtggctgccggcgtgtcggaaccaccaattgtggagcaagtgatcactgaattctttgccaagagcctccacatcatcctggagtcgcgctcaccctacgactcatcgcggaacttcatacgaccctccccaccgtcgtcaccactggctggcagccagccgcgtgaccggtggttcaatcttgctctccgggactgccctgccgcacttgagaattttgacctatggagacagagcaaccttgagcctctggtcattgacattgtcctccttcaacgtgacaataccaaaaccaccagtgtcggggccagcaggatcattgagaggtggataataaagtatgaaactagcagatctggaaatattatcaagaacagtggcaagaaagctagaagcggctcttctcaggatcatagcttgtacaggagggcatacagtgggtcaacagtgttattccggtcattatatctggttgtcaggctcttgccagcataccatctttttcaggagctcaattcatctggaaggatctgtcccttgaacctctcacacaagatttcatcatttgttgagccattcacccgcgcagaggacgcagagatgaaacactatgcatttgctccgattgaaactctgtttggttccttaagcttgtcagtttcgtatgtgccagtgctggacttggctgcagtaccagagcaatcctcaccgatgccaccagagcttataaaggattatgttggaagccccacaacagattttcttaggaagcttgattccctaccttcagatggcattgcacctggatgttttccaatgaccaggaggcacagttggagcactgagcatggagttagacagtcggcatcaccatttcctatgagttcagaaccccatggatgcctacagccacgtatgcctactgataattctccaacagcatactcacatccacataacacaccatcatctgggaaggagagaaatacagtaaatgaagagtattatccatcaccacctctatcaccatcaccatcccattcgccttctagctacccaagaaatcctttcttccgatatgagagtcctccttcaagtattcccacagtgatggccggtggaggttgtagcagactgcctccttctccacgtaggaatgataagcaacaatgctcatctcaaaatgagaatttgtcacattctcccaacaataaatcaatagtatcaaaggatctggtcaagcttagtgggtttcggaatgagaagtctttgcaaaaggttttatcttttagtaatgatgatttggtgtattttcgtggactaaagttgacccgtacctccagcaaacttttcatcatggatgagctggatgagcgggagttggtttttgcatgggaagataaagacaccatcattgatcagcttaacagggttgatctttctgacagggaggaccatgagtcgagtcaggatcttggaggctcgttaacgaggtctccagatgcagcaatcggtattctcatgcgcatcctaaagaacgctccaggcctcagggaaaggctactgacaggccctagcgccccggttcctcaagaaccttcttcactccagagggtaatgaccgaggaacatggcagcggcgcatcaagctctgcaggggtgccttcttctcttctgaggtcaaggacagcggcggacacgctggaggagctgaacaagtacaaggagattagagaatcaatactgaaccgcgacaaagggcattcctgcagcaccaagctgctggaggagaaacccgcggatggagatcggtagcaatatacgaaagcctgctgtacataagtagtagaagctagctgaccgtccttaagttgctggtgtctgctgagatgattttggaaactaggtagctgttaggagtgaccaataactcttatatatttacatgatactatatatataaggtatggaagacatatatcgccaatgcatccatccatccaggtgccctgagatgatgacccacttgctgggttgtgtaaagtcgagatgtttaactgaagttcatgcagtgaaaatgtgacacgcaatcaaatcagctcagaaatgcttgtcagctggttaagcttggttctgttctgtcgaccatgtggtaccggagccatggaatgttttgaagctgttctctattaaaaaaggtttcttctttgtttttc

SEQ ID NO: 45602 - DNA, 2355 bp, Zea Mays
attagggcggccgccgccgcccaggtcttcgtcgggccctttgcccgccacaagaacccagcacaccagcccgattaggttgttctttacggttacggagcaagatccatttagccatggtgctgccgcagttcgcttttcagaagttttgggtcttcaattgaacccttgagtttaagtccgagcagccacacaaccatggctgtggctgccggcgtgtcggaaccaccaattgtggagcaagtgatcactgaattctttgccaagagcctccacatcatcctggagtcgcgctcaccctacgactcatcgcggaacttcatacgaccctccccaccgtcgtcaccactggctggcagccagccgcgtgaccggtggttcaatcttgctctccgggactgccctgccgcacttgagaattttgacctatggagacagagcaaccttgagcctctggtcattgacattgtcctccttcaacgtgacaataccaaaaccaccagtgtcggggccagcaggatcattgagaggtggataataaagtatgaaactagcagatctggaaatattatcaagaacagtggcaagaaagctagaagcggctcttctcaggatcatagcttgtacaggagggcatacagtgggtcaacagtgttattccggtcattatatctggttgtcaggctcttgccagcataccatctttttcaggagctcaattcatctggaaggatctgtcccttgaacctctcacacaagatttcatcatttgttgagccattcacccgcgcagaggacgcagagatgaaacactatgcatttgctccgattgaaactctgtttggttccttaagcttgtcagtttcgtatgtgccagtgctggacttggctgcagtaccagagcaatcctcaccgatgccaccagagcttataaaggattatgttggaagccccacaacagattttcttaggaagcttgattccctaccttcagatggcattgcacctggatgttttccaatgaccaggaggcacagttggagcactgagcatggagttagacagtcggcatcaccatttcctatgagttcagaaccccatggatgcctacagccacgtatgcctactgataattctccaacagcatactcacatccacataacacaccatcatctgggaaggagagaaatacagtaaatgaagagtattatccatcaccacctctatcaccatcaccatcccattcgccttctagctacccaagaaatcctttcttccgatatgagagtcctccttcaagtattcccacagtgatggccggtggaggttgtagcagactgcctccttctccacgtaggaatgataagcaacaatgctcatctcaaaatgagaatttgtcacattctcccaacaataaatcaatagtatcaaaggatctggtcaagcttagtgggtttcggaatgagaagtctttgcaaaagcaaacttttcatcatggatgagctggatgagcgggagttggtttttgcatgggaagataaagacaccatcattgatcagcttaacagggttgatctttctgacagggaggaccatgagtcgagtcaggatcttggaggctcgttaacgaggtctccagatgcagcaatcggtattctcatgcgcatcctaaagaacgctccaggcctcagggaaaggctactgacaggccctagcgccccggttcctcaagaaccttcttcactccagagggtaatgaccgaggaacatggcagcggcgcatcaagctctgcaggggtgccttcttctcttctgaggtcaaggacagcggcggacacgctggaggagctgaacaagtacaaggagattagagaatcaatactgaaccgcgacaaagggcattcctgcagcaccaagctgctggaggagaaacccgcggatggagatcggtagcaatatacgaaagcctgctgtacataagtagtagaagctagctgaccgtccttaagttgctggtgtctgctgagatgattttggaaactaggtagctgttaggagtgaccaataactcttatatatttacatgatactatatatataaggtatggaagacatatatcgccaatgcatccatccatccaggtgccctgagatgatgacccacttgctgggttgtgtaaagtcgagatgtttaactgaagttcatgcagtgaaaatgtgacacgcaatcaaatcagctcagaaatgcttgtcagctggttaagcttggttctgttctgtcgaccatgtggtaccggagccatggaatgttttgaagctgttctctattaaaaaaggtttcttctttgtttttc

SEQ ID NO: 45603 - DNA, 955 bp, Zea Mays
cgcgtgcgcgatcattagggcggccgccgccgcccaggtcttcgtcgggccctttgcccgccacaagaacccagcacaccagcaaacttttcatcatggatgagctggatgagcgggagttggtttttgcatgggaagataaagacaccatcattgatcagcttaacagggttgatctttctgacagggaggaccatgagtcgagtcaggatcttggaggctcgttaacgaggtctccagatgcagcaatcggtattctcatgcgcatcctaaagaacgctccaggcctcagggaaaggctactgacaggccctagcgccccggttcctcaagaaccttcttcactccagagggtaatgaccgaggaacatggcagcggcgcatcaagctctgcaggggtgccttcttctcttctgaggtcaaggacagcggcggacacgctggaggagctgaacaagtacaaggagattagagaatcaatactgaaccgcgacaaagggcattcctgcagcaccaagctgctggaggagaaacccgcggatggagatcggtagcaatatacgaaagcctgctgtacataagtagtagaagctagctgaccgtccttaagttgctggtgtctgctgagatgattttggaaactaggtagctgttaggagtgaccaataactcttatatatttacatgatactatatatataaggtatggaagacatatatcgccaatgcatccatccatccaggtgccctgagatgatgacccacttgctgggttgtgtaaagtcgagatgtttaactgaagttcatgcagtgaaaatgtgacacgcaatcaaatcagctcagaaatgcttgtcagctggttaagcttggttctgttctgtcgaccatgtggtaccggagccatggaatgttttgaagctgttctctattaaaaaaggtttcttctttgtttttc

SEQ ID NO: 45604 - DNA, 2518 bp, Zea Mays
gaataatgttcttcctccagttggaccgctttctctgatgaacgagcgtagctacgcacgtgcacctgcagaaaaagataaagaggaatcggcccagtagcacgagcagagaataaggaacatccccacctgttttctgtttctcttcttcactacacctggcgtgcgcgtgcgcgatcattagggcggccgccgccgcccaggtcttcgtcgggccctttgcccgccacaagaacccagcacaccagcccgattaggttgttctttacggttacggagcaagatccatttagccatggtgctgccgcagttcgcttttcagaagttttgggtcttcaattgaacccttgagtttaagtccgagcagccacacaaccatggctgtggctgccggcgtgtcggaaccaccaattgtggagcaagtgatcactgaattctttgccaagagcctccacatcatcctggagtcgcgctcaccctacgactcatcgcggaacttcatacgaccctccccaccgtcgtcaccactggctggcagccagccgcgtgaccggtggttcaatcttgctctccgggactgccctgccgcacttgagaattttgacctatggagacagagcaaccttgagcctctggtcattgacattgtcctccttcaacgtgacaataccaaaaccaccagtgtcggggccagcaggatcattgagaggtggataataaagtatgaaactagcagatctggaaatattatcaagaacagtggcaagaaagctagaagcggctcttctcaggatcatagcttgtacaggagggcatacagtgggtcaacagtgttattccggtcattatatctggttgtcaggctcttgccagcataccatctttttcaggagctcaattcatctggaaggatctgtcccttgaacctctcacacaagatttcatcatttgttgagccattcacccgcgcagaggacgcagagatgaaacactatgcatttgctccgattgaaactctgtttggttccttaagcttgtcagtttcgtatgtgccagtgctggacttggctgcagtaccagagcaatcctcaccgatgccaccagagcttataaaggattatgttggaagccccacaacagattttcttaggaagcttgattccctaccttcagatggcattgcacctggatgttttccaatgaccaggaggcacagttggagcactgagcatggagttagacagtcggcatcaccatttcctatgagttcagaaccccatggatgcctacagccacgtatgcctactgataattctccaacagcatactcacatccacataacacaccatcatctgggaaggagagaaatacagtaaatgaagagtattatccatcaccacctctatcaccatcaccatcccattcgccttctagctacccaagaaatcctttcttccgatatgagagtcctccttcaagtattcccacagtgatggccggtggaggttgtagcagactgcctccttctccacgtaggaatgataagcaacaatgctcatctcaaaatgagaatttgtcacattctcccaacaataaatcaatagtatcaaaggatctggtcaagcttagtgggtttcggaatgagaagtctttgcaaaaggttttatcttttagtaatgatgatttggtgtattttcgtggactaaagttgacccgtacctccagcaaacttttcatcatggatgagctggatgagcgggagttggtttttgcatgggaagataaagacaccatcattgatcagcttaacagggttgatctttctgacagggaggaccatgagtcgagtcaggatcttggaggctcgttaacgaggtctccagatgcagcaatcgaaccttcttcactccagagggtaatgaccgaggaacatggcagcggcgcatcaagctctgcaggggtgccttcttctcttctgaggtcaaggacagcggcggacacgctggaggagctgaacaagtacaaggagattagagaatcaatactgaaccgcgacaaagggcattcctgcagcaccaagctgctggaggagaaacccgcggatggagatcggtagcaatatacgaaagcctgctgtacataagtagtagaagctagctgaccgtccttaagttgctggtgtctgctgagatgattttggaaactaggtagctgttaggagtgaccaataactcttatatatttacatgatactatatatataaggtatggaagacatatatcgccaatgcatccatccatccaggtgccctgagatgatgacccacttgctgggttgtgtaaagtcgagatgtttaactgaagttcatgcagtgaaaatgtgacacgcaatcaaatcagctcagaaatgcttgtcagctggttaagcttggttctgttctgtcgaccatgtggtaccggagccatggaatgttttgaagctgttctctattaaaaaaggtttcttctttgtttttc

SEQ ID NO: 45605 - DNA, 500 bp, Zea Mays
aaccgcccacttccccaaaacctgccacgcttgaacggctctcaatcccaaccctaacagcaccgtctctcggatctgatctgatctgatcctccaattcgttcgtccacgtctcgccatggaggacgaggaacttgttgatcagaagaaatatcttgaggaacgatgcaagccgcaatgtgtaaaatcactttacgaatatgagaaatgcgtcaagagagttgagaatgatgatactggtcacaaacactgcactgggcaatactttgattactggtcatgcatcgacaaatgtagcactggaaatttgacttctcttcaggatgtgtttggttcaagtgtgtggatgtgtttggttcaagtgtgtgagaaaaaaactgaaagttgtttgatttaaactattgtaagttatctattgtaagtaaactgtatattgtttatatatactttgtttaactatatctcttaatcaacatatctaattttaaaatcaattttgt

SEQ ID NO: 45606 - DNA, 1509 bp, Zea Mays
aaccgcccacttccccaaaacctgccacgcttgaacggctctcaatcccaaccctaacagcaccgtctctcggatctgatctgatctgatcctccaattcgttcgtccacgtctcgccatggaggacgaggaacttgttgatcagaagaaatatcttgaggaacgatgcaagccgcaatgtgtaaaatcactttacgaatatgaggtctgcctccttggaagctcaaaatttggcacagtgttggccaatgatttgacatattcttcagttgacagtttgacacaagggtttctatatgatactgtttatttttcttcaagaaagttcaagaagtagctgattaaggataccttaccaaattagtcgggacatgatactggtattagtcatgtttttttttgtctgtgtgatcaactgatcatgtgcaacctatttgccatgtgaaaatatgaaatttagccaatgcatggtttcacttcccaaagatgtgcgagcagtattgcagtaacattgctttgccttatattatgcttattcttagtggcaaataccaagaactaacatcgtcaagtgataccccctattgtcctcagtcatgccattctgagagttgtgcgcagaatctttagctgtagtcatgcatacatcatactagtgatttactgatcaggtcaaaagtgatgaaacaatgagatgctctgaatgtcaacttttgattacctgttcaaccaatgtaatatttacttgtttagcctgtacactgatcgaaacattataggttcctatgtggtcctgttttggacatgcatattatttgggtgcttgccaaactcctataggtttctcataagctgtggaggtttggaattacataaatcttcattgcaattccctatatatgatgttgtagacccataataatcttctataaactaggaagactctgagccggaggttaggtcatgacctaatctcctataaattgaattttaatagtagccttcttatagttttgttttaccctagggtgctaatagtattccattttttaatatgcatgcctggcacatgagtatttttgttcaaactttaacggtggctgtctgttatcagaaatgcgtcaagagagttgagaatgatgatactggtcacaaacactgcactgggcaatactttgattactggtcatgcatcgacaaatgtgtagcatcaaagctctttaagaagctcaaatgatttgtgcgatgtgatgcgacttctgacaaagtgaatcgaatttgcataccttacacctttggaaagtagcactggaaatttgacttctcttcaggatgtgtttggttcaagtgtgtggatgtgtttggttcaagtgtgtgagaaaaaaactgaaagttgtttgatttaaactattgtaagttatctattgtaagtaaactgtatattgtttatatatactttgtttaactatatctcttaatcaacatatctaattttaaaatcaattttgt

SEQ ID NO: 45607 - DNA, 596 bp, Zea Mays
aaccgcccacttccccaaaacctgccacgcttgaacggctctcaatcccaaccctaacagcaccgtctctcggatctgatctgatctgatcctccaattcgttcgtccacgtctcgccatggaggacgaggaacttgttgatcagaagaaatatcttgaggaacgatgcaagccgcaatgtgtaaaatcactttacgaatatgagaaatgcgtcaagagagttgagaatgatgatactggtcacaaacactgcactgggcaatactttgattactggtcatgcatcgacaaatgtcatcaaagctctttaagaagctcaaatgatttgtgcgatgtgatgcgacttctgacaaagtgaatcgaatttgcataccttacacctttggaaagtagcactggaaatttgacttctcttcaggatgtgtttggttcaagtgtgtggatgtgtttggttcaagtgtgtgagaaaaaaactgaaagttgtttgatttaaactattgtaagttatctattgtaagtaaactgtatattgtttatatatactttgtttaactatatctcttaatcaacatatctaattttaaaatcaattttgt

SEQ ID NO: 45608 - DNA, 631 bp, Zea Mays
gtcaactatggtcccgtaccaggctaccagtaaccgcccacttccccaaaacctgccacgcttgaacggctctcaatcccaaccctaacagcaccgtctctcggatctgatctgatctgatcctccaattcgttcgtccacgtctcgccatggaggacgaggaacttgttgatcagaagaaatatcttgaggaacgatgcaagccgcaatgtgtaaaatcactttacgaatatgagaaatgcgtcaagagagttgagaatgatgatactggtcacaaacactgcactgggcaatactttgattactggtcatgcatcgacaaatgtgtagcatcaaagctctttaagaagctcaaatgatttgtgcgatgtgatgcgacttctgacaaagtgaatcgaatttgcataccttacacctttggaaagtagcactggaaatttgacttctcttcaggatgtgtttggttcaagtgtgtggatgtgtttggttcaagtgtgtgagaaaaaaactgaaagttgtttgatttaaactattgtaagttatctattgtaagtaaactgtatattgtttatatatactttgtttaactatatctcttaatcaacatatctaattttaaaatcaattttgt

SEQ ID NO: 45609 - DNA, 861 bp, Zea Mays
aaccgcccacttccccaaaacctgccacgcttgaacggctctcaatcccaaccctaacagcaccgtctctcggatctgatctgatctgatcctccaattcgttcgtccacgtctcgccatggatgcagccccgcgcgtcacgcctaagaattatgcgacctggtggtgtgcacggctgattggtcgctgcttcagtcatgagaggggaggacgaggaacttgttgatcagaagaaatatcttgaggaacgatgcaagccgcaatgtgtaaaatcactttacgaatatgagaaatgcgtcaagagagttgagaatgatgatactggtcacaaacactgcactgggcaatactttgattactggtcatgcatcgacaaatgtcatcaaagctctttaagaagctcaaatgatttgtgcgatgtgatgcgacttctgacaaagtgaatcgaatttgcataccttacacctttggaaagtgtatgagctcgtacatcttggaataaaacatcaatttttctttgctagcatgtggactggactgtgcataaatttcatgtgcatgcatctggtgtcaatcttgctcatttacgtgctgttttgtgagaaaacatattatcaaatggtttttcagtaaggagaacgaacctgagtcttttctagtttggcttcacggcctctcgatccggcatgttgtgttagatcatgctggcatctgtgatcaccaaaggaagatagcagcaggcaggagatcgctgagtggctgcgtgttccagtattgttaataaataaattgttaatgataaacgaaaacgaaaaattatcaaagatgaatacagtaatatttttagaaaagaattagaaa

SEQ ID NO: 45610 - DNA, 1040 bp, Zea Mays
aaccgcccacttccccaaaacctgccacgcttgaacggctctcaatcccaaccctaacagcaccgtctctcggatctgatctgatctgatcctccaattcgttcgtccacgtctcgccatggatgcagccccgcgcgtcacgcctaagaattatgcgacctggtggtgtgcacggctgattggtcgctgcttcagtcatgagaggggaggacgaggaacttgttgatcagaagaaatatcttgaggaacgatgcaagccgcaatgtgtaaaatcactttacgaatatgaggtctgcctccttggaagctcaaaatttggcacagtgttggccaatgatttgacatattcttcagttgacagtttgacacaagggtttctatatgatactgtttatttttcttcaagaaagttcaagaagtagctgattaaggataccttaccaaattagtcgggacatgatactgaaatgcgtcaagagagttgagaatgatgatactggtcacaaacactgcactgggcaatactttgattactggtcatgcatcgacaaatgtgtagcatcaaagctctttaagaagctcaaatgatttgtgcgatgtgatgcgacttctgacaaagtgaatcgaatttgcataccttacacctttggaaagtgtatgagctcgtacatcttggaataaaacatcaatttttctttgctagcatgtggactggactgtgcataaatttcatgtgcatgcatctggtgtcaatcttgctcatttacgtgctgttttgtgagaaaacatattatcaaatggtttttcagtaaggagaacgaacctgagtcttttctagtttggcttcacggcctctcgatccggcatgttgtgttagatcatgctggcatctgtgatcaccaaaggaagatagcagcaggcaggagatcgctgagtggctgcgtgttccagtattgttaataaataaattgttaatgataaacgaaaacgaaaaattatcaaagatgaatacagtaatatttttagaaaagaattagaaa

SEQ ID NO: 45611 - DNA, 1774 bp, Zea Mays
aaccgcccacttccccaaaacctgccacgcttgaacggctctcaatcccaaccctaacagcaccgtctctcggatctgatctgatctgatcctccaattcgttcgtccacgtctcgccatggatgcagccccgcgcgtcacgcctaagaattatgcgacctggtggtgtgcacggctgattggtcgctgcttcagtcatgagaggggaggacgaggaacttgttgatcagaagaaatatcttgaggaacgatgcaagccgcaatgtgtaaaatcactttacgaatatgaggtctgcctccttggaagctcaaaatttggcacagtgttggccaatgatttgacatattcttcagttgacagtttgacacaagggtttctatatgatactgtttatttttcttcaagaaagttcaagaagtagctgattaaggataccttaccaaattagtcgggacatgatactggtattagtcatgtttttttttgtctgtgtgatcaactgatcatgtgcaacctatttgccatgtgaaaatatgaaatttagccaatgcatggtttcacttcccaaagatgtgcgagcagtattgcagtaacattgctttgccttatattatgcttattcttagtggcaaataccaagaactaacatcgtcaagtgataccccctattgtcctcagtcatgccattctgagagttgtgcgcagaatctttagctgtagtcatgcatacatcatactagtgatttactgatcaggtcaaaagtgatgaaacaatgagatgctctgaatgtcaacttttgattacctgttcaaccaatgtaatatttacttgtttagcctgtacactgatcgaaacattataggttcctatgtggtcctgttttggacatgcatattatttgggtgcttgccaaactcctataggtttctcataagctgtggaggtttggaattacataaatcttcattgcaattccctatatatgatgttgtagacccataataatcttctataaactaggaagactctgagccggaggttaggtcatgacctaatctcctataaattgaattttaatagtagccttcttatagttttgttttaccctagggtgctaatagtattccattttttaatatgcatgcctggcacatgagtatttttgttcaaactttaacggtggctgtctgttatcagaaatgcgtcaagagagttgagaatgatgatactggtcacaaacactgcactgggcaatactttgattactggtcatgcatcgacaaatgtgtagcatcaaagctctttaagaagctcaaatgatttgtgcgatgtgatgcgacttctgacaaagtgaatcgaatttgcataccttacacctttggaaagtgtatgagctcgtacatcttggaataaaacatcaatttttctttgctagcatgtggactggactgtgcataaatttcatgtgcatgcatctggtgtcaatcttgctcatttacgtgctgttttgtgagaaaacatattatcaaatggtttttcagtaaggagaacgaacctgagtcttttctagtttggcttcacggcctctcgatccggcatgttgtgttagatcatgctggcatctgtgatcaccaaaggaagatagcagcaggcaggagatcgctgagtggctgcgtgttccagtattgttaataaataaattgttaatgataaacgaaaacgaaaaattatcaaagatgaatacagtaatatttttagaaaagaattagaaa

SEQ ID NO: 45612 - DNA, 820 bp, Zea Mays
cccaattcatcttctcctacacgcatcgctcgcgcggtcggtggcgctactgcatccttcaccgacacttcaccatcgcgatcttgtctggttaagtccagcatctcttttcgcatcttgctagtgtttattttctctatccttgcaccttcctggatggcaacgacgcgttttggaagaaggtggctggggcgggtcggtagcaacggcggacgcaacagggacggaagtggagatggctttgggcaagagtaggctgactgacgacagctgcagcaggtcgctatacaggccaccaaccatcttgccccaacctagggtttggctgcttgagtgaggagagatgtgatttggagaagaagaccatagcccgctcggtcaggtggtcagtgtcgaaaacctcaccgcagctgcgatcggaccgtctgtgcgatcgttgtgcgtgtgacggaatgaagatgctgctacgctacaacaaacatgtgttttggttgtgaatcgtggtgtcgggtagtagggtagcaacctagcaggagttgttgtcggcgtattgatatgtacttatctacaattcaagatggacaactaatgcatgactgttaatctgtgagcttccataaaaaactaattatattccgtggcctgataactgattttattgttcagtcataactttttgaagagacacattctgatataaaaatttgacatctttatattcccttgggactgaatggtctcttgattatgattataactgtagaaagaaggacactatatttttgttccaatttgattccttaatttgcatcaattttat

SEQ ID NO: 45613 - DNA, 383 bp, Zea Mays
ctctctttcatctccacgagaagaaacagaacactgcaccaagacttgactgccaacaattggatacacgacatcaaccttcagcatcgaaacttctctgcccaacatttgccgagtacatcacgcctatggcaagagactgaggcgcaacatcctactaagaatggcacgctacatggaaatttgaggaaaatggagagtactctgcttcttcggcttaccaggcccagtttataggcgcaacccgctataattttgaagccataatatggaaaccctgggctccgtttgaatgtaaattcttgaggtgacttgcaattcagaaccgaatttggaccgttcacatattagaagcctagacgtgcccaaaccaaagggatctg

SEQ ID NO: 45614 - DNA, 325 bp, Zea Mays
ctcacaacacatgacacgccaccatttgtttcacaaacatcactcgtatttgtacatatcccaatcggactagttgttgataccaaaccataatttgtctgtccagatgaattttatgctctgcgattgctaggtgacggggcaacagagcaaaaaattgtgtctcgcatctaaaattcattaaaaacaacacgaatgctgcggttatatactgtaatggataatgacttgtgtgatacgtattcagatcatctccaggtccaggagcacatcatcaccatcatcaccgaaacaactctgggaaggaccacatgatgaaccttgc

SEQ ID NO: 45615 - DNA, 1827 bp, Zea Mays
agagcctgtcaaatgctccgtcgccaaccgcgcctccctgccgcaccctcgccgccgctggctgtgctccggcgagccttccgctcggaagctgccctcgaggccatccgatcgcacttgcactcacccccatcaaagtccacctcaacatcctccgatgcggacggggacgacaaggcggcccccgccagcctcgcgctctacaactaccccaccttcgctggcgcttatgccgcgctcgccgcccgcctcttccatcaacgcgtccgccgccgcctcctcgttctccctttctcctccgtcgtacccttcagagccgaagactttaaggatgcggggttccagacgtgctatctcttggacttcattgggcccaagaagtttgctttcgagctcgcccgattcatccccagtgtgaaagcatttgatcaccggcaaagtacgcttgcaagaatccccaagttgggtcagtgcccaaacaatgtggagcttcatattgacatctcaataggcagtgcccggtctgtatttgactatttctccaaggaactagcaggaacaaagtctgattctcgaatgtgggaaaacttgttggagcaagaacatgttgagcgagtttcaaatgttcttgaatgcatagaggatgcagacctgcgacggtatcagctacctaacaccaaggaatttcagacagcacttagggatgaacgcgcaaagttaaactgtgtcacaaatcctcatgtttttgaacagggagaaatcgcgtgttcgtggcctcctgcagtctgcaggggcgttcatacagaagcctttcaggattcagcttggaagagggtcatatggtgaatgcttggcaatcagagcagatggacagacacaattgagccatgaaatagctttggagctaagtcagaggagtgctgctgctggactaaggccgattggagcagtggtcttcatgcaacggggtgtcctgaaggtttgcttgaggactactgacagtacagttaatacatcagagattgcaaaggcatatggcggaggtggaaaacgaagttcgagttcattcactctaagaatggatgagttcaacatctggacttcagtgaactcatgaattgaactggagaggtcacatagtgttcatactgtgggaactcgcaaccagctcatctgggcatggattccctcagtggtgaacatgtgaagatggggtggtctttttgtgctccggtatgagaggaaggaaaacaaaatcttagtctaacctaccatattgatatgagcttacaggagaataatctcttcgatatgaatgactggagagcaatttggaggcataatgcttaagccgttcgagagaagatttgatgcctttaaatgaaaggtttgctggtacatcaaaagacgtattttatgctctttctaatctttctccagtagacctatgcgcttaattttagagatgataagggtggtgcgggccgaagatctgtcatactcctaggggccaattatagcttacacttatgttgttattagttttaaatgctgaaaatacatggagatgcttagctcagctcagcttggatataacttggtttctatccaaactagtactttgctccgtagggaatgcatctggcaacggaaattgttaacaagctccagtagcagaaaggatcatcttcaattattgtaatcctgctccttaataatacattcttggatcttgctctgggcttaaaaaatctgcatctccaaattgttcctcgttgcgaacaattatgtaatacagaaccttagaaactggaaatgttcattccg

SEQ ID NO: 45616 - DNA, 998 bp, Zea Mays
gtcaatcagagcctgtcaaatgctccgtcgccaaccgcgcctccctgccgcaccctcgccgccgctggctgtgctccggcgagccttccgctcggaagctgccctcgaggccatccgatcgcacttgcactcacccccatcaaagtccacctcaacatcctccgatgcggacggggacgacaaggcggcccccgccagcctcgcgctctacaactaccccaccttcgctggcgcttatgccgcgctcgccgcccgcctcttccatcaacgcgtccgccgccgcctcctcgttctccctttctcctccgtcgtacccttcagagccgaagactttaaggatgcggggttccagacgtgctatctcttggacttcattgggcccaagaagtttgctttcgagctcgcccgattcatccccagtgtgaaagcatttgatcaccggcaaagtacgcttgcaagaatccccaagttgggtcagtgcccaaacaatgtggagcttcatattgacatctcaataggcagtgcccggtctgtatttgactatttctccaaggaactagcaggaacaaagtctgattctgtgagtagagaaaacatttcatttatgttcattatattgtatgattaaaagaaaagtgaggatgttctatgtccacacagcgaatgtgggaaaacttgttggagcaagaacatgttgagcgagtttcaaatgttcttgaatgcatagaggatgcagacctgcgacggtatcagctacctaacaccaaggaatttcagacagcacttagggatgaacgcgcaaagttaaactgtgtcacaaatcctcatgtttttgaacagcttctacaacttgatgttggcgatctgcttactagggagaaatcgcgtgttcgtggcctcctgcagtctgcaggggcgttcatacagaagcctttcaggattcagcttggaagagggtcatatggtgaatgcttgctcttttgatactgaagccaaaa

SEQ ID NO: 45617 - DNA, 561 bp, Zea Mays
cagctttgcctcacatgtcactactaattgcacaatattgctacttgcaaaaggatcgtgtcccaccttcagtgaacagaacagttgggagttaccacgaaatcagaagtttcttaaaagtgacaagggagcaaaagcagagtcttgtggaccttgacaggcttgattctgccaggaagaggctccaggagaattaccaagaagcacaaaatgccaaaaagcagaggacaatccaagtgatggacatcaatgacataccaaagccgaagagcagaaacgctttcatccgcaagagcggcagcggtgggctcccggcgaggcaccgatagcctaacctccttcgtcggctggatatctgcgacacttgcgaagttgtgccctagaaccgcaacgggaaagaaaaagaagcaaacggtttcttgttctttttttccctgtaccttgactgcctaggtttacctccagtgtaatattgtcaggtacataagggtgaaatgatatgatgtttctcgaggaaaaagaaagaaattagtcactgtttttgctatggtttggttgctg

SEQ ID NO: 45618 - DNA, 718 bp, Zea Mays
ctcatgctgggtaaactaagcagtaacataaaacagattgtgcagtgtcagtagctattatatatggtttcggggtttcagtattctccaagcccacagaggtttaatggttcaacttcagagatggctaacaatgggtttgagtcaacaatggatgcgaagcgtagggccagccctgtaccagcacatcataactccaggcagatgaacaacaatcatcattctactactattaccaccagcacgtcatctgctccagctttctcggtgcagaaagtgacaagggagcaaaagcagagtcttgtggaccttgacaggcttgattctgccaggaagaggctccaggagaattaccaagaagcacaaaatgccaaaaagcagaggacaatccaagtgatggacatcaatgacataccaaagccgaagagcagaaacgctttcatccgcaagagcggcagcggtgggctcccggcgaggcaccgatagcctaacctccttcgtcggctggatatctgcgacacttgcgaagttgtgccctagaaccgcaacgggaaagaaaaagaagcaaacggtttcttgttctttttttccctgtaccttgactgcctaggtttacctccagtgtaatattgtcaggtacataagggtgaaatgatatgatgtttctcgaggaaaaagaaagaaattagtcactgtttttgctatggtttggttgctg

SEQ ID NO: 45619 - DNA, 721 bp, Zea Mays
attgtccatgcttttctcatgctgggtaaactaagcagtaacataaaacagattgtgcagtgtcagtagctattatatatggtttcggggtttcagtattctccaagcccacagaggtttaatggttcaacttcagagatggctaacaatgggtttgagtcaacaatggatgcgaagcgtagggccagccctgtaccagcacatcataactccaggcagatgaacaacaatcatcattctactactattaccaccagcacgtcatctgctccagctaaagtgacaagggagcaaaagcagagtcttgtggaccttgacaggcttgattctgccaggaagaggctccaggagaattaccaagaagcacaaaatgccaaaaagcagaggacaatccaagtgatggacatcaatgacataccaaagccgaagagcagaaacgctttcatccgcaagagcggcagcggtgggctcccggcgaggcaccgatagcctaacctccttcgtcggctggatatctgcgacacttgcgaagttgtgccctagaaccgcaacgggaaagaaaaagaagcaaacggtttcttgttctttttttccctgtaccttgactgcctaggtttacctccagtgtaatattgtcaggtacataagggtgaaatgatatgatgtttctcgaggaaaaagaaagaaattagtcactgtttttgctatggtttggttgctg

SEQ ID NO: 45620 - DNA, 694 bp, Zea Mays
ccctcctatgttattcccctgttagtttgccaaccaatcacagctcttaaaggggtttcggggtttcagtattctccaagcccacagaggtttaatggttcaacttcagagatggctaacaatgggtttgagtcaacaatggatgcgaagcgtagggccagccctgtaccagcacatcataactccaggcagatgaacaacaatcatcattctactactattaccaccagcacgtcatctgctccagctaaagtgacaagggagcaaaagcagagtcttgtggaccttgacaggcttgattctgccaggaagaggctccaggagaattaccaagaagcacaaaatgccaaaaagcagaggacaatccaagtgatggacatcaatgacataccaaagccgaagagcagaaacgctttcatccgcaagagcggcagcggtgggctcccggcgaggcaccgatagcctaacctccttcgtcggctggatatctgcgacacttgcgaagttgtgccctagaaccgcaacgggaaagaaaaagaagcaaacggtttcttgttctttttttccctgtaccttgactgcctaggtttacctccagtgtaatattgtcaggtacataagggtgaaatgatatgatgtttctcgaggaaaaagaaagaaattagtcactgtttttgctatggtttggttgctg

SEQ ID NO: 45621 - DNA, 1525 bp, Zea Mays
ctaccgtctgcgtctgcccgtcttcctctctctctctctctcctctccctcattctggatccaccgccgcagccttagctgggtccgtcgctgtcgctccgcctcccgctcgcttgccgggcccgacacgcccgccaccgcctccgctttgtctctccggcgatccgacgccccacccggcgtctgtgcagagcagtcgtgaggagttctctgttgtgggctgcccggcgatggaccggggcgagcgtctcggccgcgcgctggacgccttcgggggcaacctgtgggcgctggttgacgcagcgctggacgcggccgctcgcgaccgccccgacgagcttcgcgcgcgccgcgatagcatcgtcgagcgcctctacgctgccgccgcgggctgtagcaactgcgccgggcgtccgccgtctgttgccgctttagcggccgcggggctggaggaagaggacggcgaggaggcggctccggcttctccgtgggcggaggctgacgcgcaagccggtggcgcggaggcacagaccgaggtgctcggcgccggcgagcctgatctcgagagcaagatcgtggccatcagggacttcttggaggaccctaatcagcccgagaacgagctggtgagcttgctgcagaacctggcagacatggatgttacctacaacgcactccaggagactgacatcgggcggcaggttaatggtctgcgcaagcatccttcggccgaggtcaggcggctggtgaagcagctcatcaggaagtggaaggagatagtggacgactgggtgcgcctggacaattccggcggtgacggcagtgcctctgttatgactgatggtgactccccacataaaatccaaggcagaagccaccaaagccctcgggtttcggggtttcagtattctccaagcccacagagatggttcaacttcagagatggctaacaatgggtttgagtcaacaatggatgcgaagcgtagggccagccctgtaccagcacatcataactccaggcagatgaacaacaatcatcattctactactattaccaccagcacgtcatctgctccagctaaagtgacaagggagcaaaagcagagtcttgtggaccttgacaggcttgattctgccaggaagaggctccaggagaattaccaagaagcacaaaatgccaaaaagcagaggacaatccaagtgatggacatcaatgacataccaaagccgaagagcagaaacgctttcatccgcaagagcggcagcggtgggctcccggcgaggcaccgatagcctaacctccttcgtcggctggatatctgcgacacttgcgaagttgtgccctagaaccgcaacgggaaagaaaaagaagcaaacggtttcttgttctttttttccctgtaccttgactgcctaggtttacctccagtgtaatattgtcaggtacataagggtgaaatgatatgatgtttctcgaggaaaaagaaagaaattagtcactgtttttgctatggtttggttgctg

SEQ ID NO: 45622 - DNA, 1575 bp, Zea Mays
gccaaatccagccagcgataggaatatcgccaagaattctaccgtctgcgtctgcccgtcttcctctctctctctctctcctctccctcattctggatccaccgccgcagccttagctgggtccgtcgctgtcgctccgcctcccgctcgcttgccgggcccgacacgcccgccaccgcctccgctttgtctctccggcgatccgacgccccacccggcgtctgtgcagagcagtcgtgaggagttctctgttgtgggctgcccggcgatggaccggggcgagcgtctcggccgcgcgctggacgccttcgggggcaacctgtgggcgctggttgacgcagcgctggacgcggccgctcgcgaccgccccgacgagcttcgcgcgcgccgcgatagcatcgtcgagcgcctctacgctgccgccgcgggctgtagcaactgcgccgggcgtccgccgtctgttgccgctttagcggccgcggggctggaggaagaggacggcgaggaggcggctccggcttctccgtgggcggaggctgacgcgcaagccggtggcgcggaggcacagaccgaggtgctcggcgccggcgagcctgatctcgagagcaagatcgtggccatcagggacttcttggaggaccctaatcagcccgagaacgagctggtgagcttgctgcagaacctggcagacatggatgttacctacaacgcactccaggagactgacatcgggcggcaggttaatggtctgcgcaagcatccttcggccgaggtcaggcggctggtgaagcagctcatcaggaagtggaaggagatagtggacgactgggtgcgcctggacaattccggcggtgacggcagtgcctctgttatgactgatggtgactccccacataaaatccaaggcagaagccaccaaagccctcgggtttcggggtttcagtattctccaagcccacagagatggttcaacttcagagatggctaacaatgggtttgagtcaacaatggatgcgaagcgtagggccagccctgtaccagcacatcataactccaggcagatgaacaacaatcatcattctactactattaccaccagcacgtcatctgctccagctttctcggtgcagaaagtgacaagggagcaaaagcagagtcttgtggaccttgacaggcttgattctgccaggaagaggctccaggagaattaccaagaagcacaaaatgccaaaaagcagaggacaatccaagtgatggacatcaatgacataccaaagccgaagagcagaaacgctttcatccgcaagagcggcagcggtgggctcccggcgaggcaccgatagcctaacctccttcgtcggctggatatctgcgacacttgcgaagttgtgccctagaaccgcaacgggaaagaaaaagaagcaaacggtttcttgttctttttttccctgtaccttgactgcctaggtttacctccagtgtaatattgtcaggtacataagggtgaaatgatatgatgtttctcgaggaaaaagaaagaaattagtcactgtttttgctatggtttggttgctg

SEQ ID NO: 45623 - DNA, 1580 bp, Zea Mays
gccaaatccagccagcgataggaatatcgccaagaattctaccgtctgcgtctgcccgtcttcctctctctctctctctcctctccctcattctggatccaccgccgcagccttagctgggtccgtcgctgtcgctccgcctcccgctcgcttgccgggcccgacacgcccgccaccgcctccgctttgtctctccggcgatccgacgccccacccggcgtctgtgcagagcagtcgtgaggagttctctgttgtgggctgcccggcgatggaccggggcgagcgtctcggccgcgcgctggacgccttcgggggcaacctgtgggcgctggttgacgcagcgctggacgcggccgctcgcgaccgccccgacgagcttcgcgcgcgccgcgatagcatcgtcgagcgcctctacgctgccgccgcgggctgtagcaactgcgccgggcgtccgccgtctgttgccgctttagcggccgcggggctggaggaagaggacggcgaggaggcggctccggcttctccgtgggcggaggctgacgcgcaagccggtggcgcggaggcacagaccgaggtgctcggcgccggcgagcctgatctcgagagcaagatcgtggccatcagggacttcttggaggaccctaatcagcccgagaacgagctggtgagcttgctgcagaacctggcagacatggatgttacctacaacgcactccaggagactgacatcgggcggcaggttaatggtctgcgcaagcatccttcggccgaggtcaggcggctggtgaagcagctcatcaggaagtggaaggagatagtggacgactgggtgcgcctggacaattccggcggtgacggcagtgcctctgttatgactgatggtgactccccacataaaatccaaggcagaagccaccaaagccctcgggtttcggggtttcagtattctccaagcccacagaggtttaatggttcaacttcagagatggctaacaatgggtttgagtcaacaatggatgcgaagcgtagggccagccctgtaccagcacatcataactccaggcagatgaacaacaatcatcattctactactattaccaccagcacgtcatctgctccagctttctcggtgcagaaagtgacaagggagcaaaagcagagtcttgtggaccttgacaggcttgattctgccaggaagaggctccaggagaattaccaagaagcacaaaatgccaaaaagcagaggacaatccaagtgatggacatcaatgacataccaaagccgaagagcagaaacgctttcatccgcaagagcggcagcggtgggctcccggcgaggcaccgatagcctaacctccttcgtcggctggatatctgcgacacttgcgaagttgtgccctagaaccgcaacgggaaagaaaaagaagcaaacggtttcttgttctttttttccctgtaccttgactgcctaggtttacctccagtgtaatattgtcaggtacataagggtgaaatgatatgatgtttctcgaggaaaaagaaagaaattagtcactgtttttgctatggtttggttgctg

SEQ ID NO: 45624 - DNA, 1597 bp, Zea Mays
tgacgctgagcgcagccaaatccagccagcgataggaatatcgccaagaattctaccgtctgcgtctgcccgtcttcctctctctctctctctcctctccctcattctggatccaccgccgcagccttagctgggtccgtcgctgtcgctccgcctcccgctcgcttgccgggcccgacacgcccgccaccgcctccgctttgtctctccggcgatccgacgccccacccggcgtctgtgcagagcagtcgtgaggagttctctgttgtgggctgcccggcgatggaccggggcgagcgtctcggccgcgcgctggacgccttcgggggcaacctgtgggcgctggttgacgcagcgctggacgcggccgctcgcgaccgccccgacgagcttcgcgcgcgccgcgatagcatcgtcgagcgcctctacgctgccgccgcgggctgtagcaactgcgccgggcgtccgccgtctgttgccgctttagcggccgcggggctggaggaagaggacggcgaggaggcggctccggcttctccgtgggcggaggctgacgcgcaagccggtggcgcggaggcacagaccgaggtgctcggcgccggcgagcctgatctcgagagcaagatcgtggccatcagggacttcttggaggaccctaatcagcccgagaacgagctggtgagcttgctgcagaacctggcagacatggatgttacctacaacgcactccaggagactgacatcgggcggcaggttaatggtctgcgcaagcatccttcggccgaggtcaggcggctggtgaagcagctcatcaggaagtggaaggagatagtggacgactgggtgcgcctggacaattccggcggtgacggcagtgcctctgttatgacagctgatggtgactccccacataaaatccaaggcagaagccaccaaagccctcgggtttcggggtttcagtattctccaagcccacagaggtttaatggttcaacttcagagatggctaacaatgggtttgagtcaacaatggatgcgaagcgtagggccagccctgtaccagcacatcataactccaggcagatgaacaacaatcatcattctactactattaccaccagcacgtcatctgctccagctttctcggtgcagaaagtgacaagggagcaaaagcagagtcttgtggaccttgacaggcttgattctgccaggaagaggctccaggagaattaccaagaagcacaaaatgccaaaaagcagaggacaatccaagtgatggacatcaatgacataccaaagccgaagagcagaaacgctttcatccgcaagagcggcagcggtgggctcccggcgaggcaccgatagcctaacctccttcgtcggctggatatctgcgacacttgcgaagttgtgccctagaaccgcaacgggaaagaaaaagaagcaaacggtttcttgttctttttttccctgtaccttgactgcctaggtttacctccagtgtaatattgtcaggtacataagggtgaaatgatatgatgtttctcgaggaaaaagaaagaaattagtcactgtttttgctatggtttggttgctg

SEQ ID NO: 45625 - DNA, 1563 bp, Zea Mays
gcaagaacgaaccaaaccaacccacacccacggcaccaacaccacccgaagctgattgacgctgagcgcagccaaatccagccagcgataggaatatcgccaagaattctaccgtctgcgtctgcccgtcttcctctctctctctctctcctctccctcattctggatccaccgccgcagccttagctgggtccgtcgctgtcgctccgcctcccgctcgcttgccgggcccgacacgcccgccaccgcctccgctttgtctctccggcgatccgacgccccacccggcgtctgtgcagagcagtcgtgaggagttctctgttgtgggctgcccggcgatggaccggggcgagcgtctcggccgcgcgctggacgccttcgggggcaacctgtgggcgctggttgacgcagcgctggacgcggccgctcgcgaccgccccgacgagcttcgcgcgcgccgcgatagcatcgtcgagcgcctctacgctgccgccgcgggctgtagcaactgcgccgggcgtccgccgtctgttgccgctttagcggccgcggggctggaggaagaggacggcgaggaggcggctccggcttctccgtgggcggaggctgacgcgcaagccggtggcgcggaggcacagaccgagcccgagaacgagctggtgagcttgctgcagaacctggcagacatggatgttacctacaacgcactccaggagactgacatcgggcggcaggttaatggtctgcgcaagcatccttcggccgaggtcaggcggctggtgaagcagctcatcaggaagtggaaggagatagtggacgactgggtgcgcctggacaattccggcggtgacggcagtgcctctgttatgactgatggtgactccccacataaaatccaaggcagaagccaccaaagccctcgggtttcggggtttcagtattctccaagcccacagaggtttaatggttcaacttcagagatggctaacaatgggtttgagtcaacaatggatgcgaagcgtagggccagccctgtaccagcacatcataactccaggcagatgaacaacaatcatcattctactactattaccaccagcacgtcatctgctccagctaaagtgacaagggagcaaaagcagagtcttgtggaccttgacaggcttgattctgccaggaagaggctccaggagaattaccaagaagcacaaaatgccaaaaagcagaggacaatccaagtgatggacatcaatgacataccaaagccgaagagcagaaacgctttcatccgcaagagcggcagcggtgggctcccggcgaggcaccgatagcctaacctccttcgtcggctggatatctgcgacacttgcgaagttgtgccctagaaccgcaacgggaaagaaaaagaagcaaacggtttcttgttctttttttccctgtaccttgactgcctaggtttacctccagtgtaatattgtcaggtacataagggtgaaatgatatgatgtttctcgaggaaaaagaaagaaattagtcactgtttttgctatggtttggttgctg

SEQ ID NO: 45626 - DNA, 2169 bp, Zea Mays
ccgaacaccaactctcgcctccgattagccactgtggaccgcgaattttggttttgccccaaatcagccaaactggtcgccgaggagagctcttccgtggtcagtgtcgccgaagaaaacgaagaagaagctgtagtcaaagaagaagttgtcccacaagctgaggatcccccagttgagaacaacttctattttgacttctgtgggacagacccagaacctcctgcaacacaaggcaagccccagtgcatttacccctttccttgatgttttaaactctttatcacttgagatgatgcattaggtgatgataggagttgtgtgctaaacaattgctgcatttccatccttggaactgattaccattccttgatacctgttttacttaaagttttctgatgcttagctttgctttagaaaacaaaatgttttgttttaatcaaaagatgatgcttcatatggaatgggaagttttcaaagaaaagacttgatggtgaatccatcatggccatgatgggttcaacatatgaaaagatgtacctctgtcaggtaccaaactttgggttgcaaatgataaagatgagaccgagcgggtgacttgcacgagaaggaagtctcggtgtagtgtctctgtctgagtcgattaaggaccaaaccgatgtaggcttgatgatcgaggaccttttaactggccacatgcctcgtcatgggtaagctttgcctcggtcagaccaatacctgaaaggccaccacgcaatggaagtggagagatggtgagagtagcgtgtaccctccgtggcaagaggctggactgtggtgtatctgtgctctcgagtggcgtgaacccgttctggtcttgagaaacctgatggtaagttgacatatacaagggttaagtgctacatatgtcgtgtggctggagatccccagctgggtattaatcgattcggatcgccgttacttctcggacatgaagacttggtcactgacttacacgtagcaatccagtaaacttaaggggtgataaaagatggctagtgtaggctaagtgcctgaactaggatagaaagaactctagatacaggtaatgacttaacctgataataaaactggatttttaaggatccactgttagtaagcttttctacaaacagagtctttgattcttgatcagctttaccttgaatcccacaagccagcatatccttgagaagtctttttcctttgtcgggtaagacttgcgaaagtacagtccatactcagggtcttcgaacccatgttgttgtaggtgatgaaacaaccgagttttgttgtttctgctcaaaggtggtgccaaagcacaaggaaaatcagtaaacttgttgacgagaggatgttttgcctcctagttatgtaatattaagtgctgcacttgaacacccgttatgtaataaatactctctctatattttatatgaatgtaaattattgtattgtaatcctttccgcttattctttactctgattatgtgtaatgtctacatgatgggtgaagcgctcttgggcgatatgatgaagatacagataatgaacttgccgagtgattgcgcgcacctgcatgactgtttgaggtccttaggacaaggacatctgtaggtgggcctaatgccttgggaggttctgtgacaaatccatccaacttcaagggcaccagaatcaacctcaagacacatcccaagcactaggggtgcaagttgaattttcgcaatgaattttagaccattacctccaagaggaggacgaggggtcaaagcgttgaaggatgattcaactcataactatgaaagttgtattgtgtttcaaaagacctatcagggccacactatgaagacctatcaggtaatcttctcagtgatccactggatctgagcttgggttgtgcttcagaggcttggatcacgagataaggtgctagctacttgtcattgtttggagcaggtctaatttttttacccaggcacatggatggtgatctagtctctggattgatcttagctaggtgtctggaagcttttgccttctttcttctttttgttggtgtgggttgtgtgtgtctgttgacacagaggctgagaaaacttgttgaagaaagttgtaatcactcgatataactaccttgatcttaataat

SEQ ID NO: 45627 - DNA, 625 bp, Zea Mays
gttaaaattaccttccataatggtggaggttggcaattttgatgtggatttatggggatatttatgttttagggtttaccgatacttccctttaatgtaaacagtgcagcttggaatgtaccctggaataccgatacatgtcagaaaaataagcaatgcaggccggaaaagagtggaggaacggtttgaaaacaccttagcagctggaaaggaaaacacctatctacgagaggacgactaacactgattaattcagtattaagtagtgtttctatgtatatgatgtccttttttgctacccctagaggagttctgaaaaaacttgattatttctgatccaggttcttttggcaacaagaagcgaagcgaaagtatcatttagcggagtggagcatcttgtgtcaacctaaggatcaaggaggagggaatttgaaacctagccattcaaaacacaacacttcttagcaaatggttatataaactgcttacatcagatgggacttggcagcaattgattcgaaacaaatatttaggatcgtaaccaatttcccagacatattggaaaactagtgattcacaattttgggctggtataatgaaggtatagagagatttttacgctttg

SEQ ID NO: 45628 - DNA, 4042 bp, Zea Mays
ccaactctcgcctccgattagccactgtggaccgcgaattttggttttgccccaaatcagccaaactggtcgccgaggagagctcttccgtggtcagtgtcgccgaaggtagttctagcccaattacgatctgttctagcttcctttcggtgtgacgatgctccccatacttagaattcgaacgctaccgcgcctcatcgtcgggaacggcttggcccgccctcggtttttgtcgtcgtcgtagataggagaatccagggccggatgagctcgattagagcattgcctaggctcgcctgggttcggggatttctatcgagtgctcggtttcatcaggcatcaccatttggggcgatttctcgtgagagatggccggcgggtgagcgcgccgtcgccggggattgagttggagaaggaacagaaactctaggttttatccacaaatgtcagcgagacagagaaacaatgtcacaggctctttaccggtttttcaaatcaccgagggtcctacgcaaaattgccaacaaaggcgcgcgcgcgggcgcacttttcctggttgtggctcggtttgggccagaatcagctcggtactattcataattttcctttttcctttttctgccagacatggaaaattgtaggaaattttaaaaaaatggtaaaattataggaccaatttttctaaactcctaaattcatctagtatttaataaaaatagttccaagatttttagtccaaacctggatttatttagaatttaaatatgcataaatccagtcttttagaattttagaattaatttggtagctccaaaaataatacaactttttgggtaagcttagtttgatgattaaagcccttgggtggagtttgaagtgatttggacattgtttggtctcaaacccaataagctagcctcctagggtttaattgcctagtactgatagaatactaactcaggaaaccctagtcactagtgtgtaccgtgaaggaaagttgtattcaagatacaacctagtatgtttctattacatacctgcatattcatagcatcacataagcattcatgtatatgtatagaaaacgaagaagaagctgtagtcaaagaagaagttgtcccacaagctgaggatcccccagttgagaacaacttctattttgacttctgtgggacagacccagaacctcctgcaacacaaggcaagccccagtgcatttacccctttccttgatgttttaaactctttatcacttgagatgatgcattaggtgatgataggagttgtgtgctaaacaattgctgcatttccatccttggaactgattaccattccttgatacctgttttacttaaagttttctgatgcttagctttgctttagaaaacaaaatgttttgttttaatcaaaagatgatgcttcatatggaatgggaagttttcaaagaaaagacttgatggtgaatccatcatggccatgatgggttcaacatatgaaaagatgtacctctgtcaggtaccaaactttgggttgcaaatgataaagatgagaccgagcgggtgacttgcacgagaaggaagtctcggtgtagtgtctctgtctgagtcgattaaggaccaaaccgatgtaggcttgatgatcgaggaccttttaactggccacatgcctcgtcatgggtaagctttgcctcggtcagaccaatacctgaaaggccaccacgcaatggaagtggagagatggtgagagtagcgtgtaccctccgtggcaagaggctggactgtggtgtatctgtgctctcgagtggcgtgaacccgttctggtcttgagaaacctgatggtaagttgacatatacaagggttaagtgctacatatgtcgtgtggctggagatccccagctgggtattaatcgattcggatcgccgttacttctcggacatgaagacttggtcactgacttacacgtagcaatccagtaaacttaaggggtgataaaagatggctagtgtaggctaagtgcctgaactaggatagaaagaactctagatacaggtaatgacttaacctgataataaaactggatttttaaggatccactgttagtaagcttttctacaaacagagtctttgattcttgatcagctttaccttgaatcccacaagccagcatatccttgagaagtctttttcctttgtcgggtaagacttgcgaaagtacagtccatactcagggtcttcgaacccatgttgttgtaggtgatgaaacaaccgagttttgttgtttctgctcaaaggtggtgccaaagcacaaggaaaatcagtaaacttgttgacgagaggatgttttgcctcctagttatgtaatattaagtgctgcacttgaacacccgttatgtaataaatactctctctatattttatatgaatgtaaattattgtattgtaatcctttccgcttattctttactctgattatgtgtaatgtctacatgatgggtgaagcgctcttgggcgatatgatgaagatacagataatgaacttgccgagtgattgcgcgcacctgcatgactgtttgaggtccttaggacaaggacatctgtaggtgggcctaatgccttgggaggttctgtgacaaatccatccaacttcaagggcaccagaatcaacctcaagacacatcccaagcactaggggtgcaagttgaattttcgcaatgaattttagaccattacctccaagaggaggacgaggggtcaaagcgttgaaggatgattcaactcataactatgaaagttgtattgtgtttcaaaagacctatcagggccacactatgaagacctatcaggtaacaattcaaaagcaaaagtgtagataagtcaaccaaagagatccttcacacatcatcatatttttcactatacattccacaacacatctaccatcaggagccaaagccacaacctttagcctccattgcttcaacgagtccttcgcctagccattggggagctactccatttatcctacgtccctgaccatatgagaaagtacctatgggtcatcctcaatttccaatgcaggacctgcaccaataggacaggaaggagccttccaaatctcaaatagtaaatagcgctattcttgagtcaaagcatatatatcgaggctagaggggttggctcaagaacccaaagttgccgtaaaatcgaaagacttttacacattcttttacattttttattgttcatcccgaccttcgcctcaatgaactaaagaggtgaaaaaacctctctcaagttttctaaatgtaattttgtggttgcaccttcaagtgtagtgaaagtaaaaaatgctcccaaagaccttcgtacaaaggaagatcagtcacctagtaatggtgacaagagtctgaagttcttctgtaggaccggtgagacgaccagaggggggtgaatgcaagtgactaaaaattcccgacttgcgagcacgtgactttgaacccaaagttcaacccgaaagccctctagggactcaaagcagcagatcagagtgcaacatagaccagtgtcgtttgtatgcaccaaaaaccctaagaacagcagacccaactccctagtaaaacacatttttactgacagttttttcttacaaaatttgctagtgaaaatcgttttctactagcgcatttttaaggaacctccagtaaaaataatttgaaatcgattattttagtctttcaaatgacctcgtacgaaaaaaccatcaaaataaaaagttatagatctcgaaaagctattcaactttatactgataactttttccgtttgaattcgtttgcagccttaaacaattaatttacacttggtttgttcgaatatgtgtagactttctagcagaaggttgttcaaatgccacgcccaattaaaaagtatttttttacacagcagcaagatcacaataaacttgagaccggagatggtagtacggtattggcgcaagatcacagtagcggtttttatttgtcagaaaccacctgtgtgcgc

SEQ ID NO: 45629 - DNA, 4499 bp, Zea Mays
actactacgacggtgtatataataaagtacttatacgcgtagttctactgacagacgagagaggctgagagcaggagagagaatgagtatattttttatatttatataaatggggtgttttgggagcgtgcagtgcaggatcgttggcggcgtggcaggccttccgccgctgtcgctttctccccggcctcttcatcactcacctcagtacctcaccacacaaaattaaagcaagctcccctcacttgagctcctactaccttcctttccgctccatccttcccctccctctcctctcctctcctctcctctctactccccctcactcgcagacacgccaaaattctagggaacccccactacgcctgcacgcgcccactagctagccaccttagatcggtcgatacagctagctatacccgctagctgcacctctcgctgccgccgcccggccgggccgcgcgagaccgctcaaaattcgcgcgcaccgccacgcggcgcggacatgctgcgggcggcggggagcagctagcaggtagccgagcacggcagggcgacccggcgcgcgatccgccgctgcccgcgtgggcggccgcctatggatctggccgcatggcgggcttccctctaggcggaggaggccacggccgcggcgaccaccaccaccctcacgtgaacccttcctccggctccggctccgactccgcggccgccgcctacctctacacggccgccgccgcgccgcgcggcggcttccagctatggccgcctcacccggcgcaggagcaccaccaccacttctacgcccccaacataatccgcttcgccgatgaccccgccgcgggctcctcgcgcggcggcaggggctccgccagcggcgccggcgcgggcaccatcagctgccaggactgcggcaaccaggccaagaaggactgcgtccacatgcgctgccgcacctgctgcaagagccggggcttcgactgccccacccatgtcaagtccacctgggtgcccgccgccaagcgccgggagcgccagcagcagcaggccaccggcgccgccgagccctccaagcgccaccgtgacgccgctaccggtgcccagccctcctctaccaccgccacaaccacttcctcgggtgagcagcagcagatggcggtggtggcggagcggttcccgcgggaagtgagctcggaggcgctgttccgctgcgtccgcctgggcccggtcgacgagcccgacgccgaggtggcgtaccagaccagcgtcagcatcgccggccacgtcttcaagggcatcctgcacgacgtcggcccggagccgtcgacggtcgctgcgggcggcggcttccgccacgccaccgaggggtcctcccctagcacggccgcggcgggcgaaggcagcgtcgtggggcccgtctcgtcatcggctgtggtcatggacccgtacccgacgcccggcccgtacggcgccgctcatttcttccacggccatccgaggtgatgatcaaacggccaccatgattgacacggctagctagcctagctgatgggtttcgttctctttggacatgccatgcatctttccatccactgcttcaatatttgctttactggagggattatcgatcgtcaccaaattgttactagtagtttttatttgtctccgtcctccatccctcttctctcttacattctcaatgatcgatgcataaactgatgagcaccattcatcactgtttctttcggatcagttcttactgtcgcagtagctagcccatcaggttgttgctagaagtaaatataaagcttggagtagctagctaggaaactgtgttcatcatgattcaaagtttaaaacctgacagttaggtaatcttgattgatgctcttgtcattgcttcttcatcctttcatctttgttcaatggtcgtgatgatgctgtccccctggtggtgtcaggaagatatatagaatgttggggcttaagaaggcttcttcgcatatttgctcaagtatatacagtactactgccctcttccttctactactcctgtgtgtgtgtcacacctttgcagctttgctttagcttttctcttcaaaagctgaaccctagtttcctagctagtggcaactgctagatgattcttagttggaaaatttggtagtatgaatgataggagtacctgtgtatgtcatggtcggtagagagagggggagtgagaggagagtggagagaggagagataaatgatttcttccagtcatcatatgctcaaggaagaaggcaggtggagtcagatatctatgtctcgagaagaatcaaatgacgagacgcttggggagaaaaaaaagaataatgctagtcactatgcgcttgtaccagttctgattagagcgttaccgatgtttcctagtttggtatttggaaacagcttctccactgtgggactgggatcccaacctatattccgatccatcatatttcatcacatctccaatccaattgccattgccagtgtcatttcaaccagttacattttctatacgcagttgcacttgttgaagttctgtcagcacataactaattaatttagtacataatgtaattgtaataatattatcatggcccaaaaagccatgctggtcattctctctttttcctgaaatcatgggagattcaaatatctgggaacgtcgttctcccttttccacattttttttcctgtttttttaggattagtggagttaactgaaaaaaaatcaaagtcaaacattgttttgatacaccactaaaaagattgcaaacattgttctcgatacacaccaccactaaacattgtgatattatttttaccttgcaatgttttgaaaacattacattttgccttcagtttcctaaaaaacatattcttagtacaatgacggcaatcaagtattattggtctctcaggctctaccttgcaccgcaaatatgcgtagtgtagagtatttgtgagaactcaatcatcatacgattatttaatgtgtatggttaaccgatttgcatatgcaataatactgataaaatttcaaacttcatcaacaaaagattcattatgtttgattaaggacttactgcttcaaaataatgtgtatttctgtatgtgctatatttatgtttttgatgatatggtattgtgtgcatatatatacatctgaactatatttatttttttctacatttgcatggcatcaatgtctgattatgggttgttcattatgaataaaaaggttagcgcgggtgtgccctactttaagatagtatttgtcttcttaggattttagaactgctggtagtagatgtatttattttcctttccaaggttaccaatgcaacgttgaatgttctgaaaattgtcttcgttaatgctcttgcagtataaaagcttatagtctagaattctctgacatgggcattttcccttctgttgatactatgcatttgttgcgttattaatatgcggtattgaacttgtagataggtcggatttgtatgaagatagctgcgttaacctattattctcagctttgctaagaagataatattaattttcaaaaggctgcaactttttggcgagattcgttccaatttaataagcgcaattgctcccatatatttatttggactacctagattcaattggttctaaaacacgtactggaacttgatagtacagctgctcccttaatttacaggagatatatatatgaatttagaggttgtttggtttttgtgaactaatttttaggcactcgattttattctatttttaggtcctaaattacccgatacgaaaactaagaactttattttagtttccatatttagtaatttaataactaaaattaaataaaattgagggactaaaaaatagtccctgaaaactaaacaccctcttagtttgatgagccttctatatatattcaatgctaaaaaaacttagagatgttttatgttttgtgacacacactgtagtgtgcttatgtttacatttctgtcaaattgatggtcgtcgattgtgtttactgctggtggtctataattttaagaaacactgacaggaacatgaagcaatagtttggacaagacattatttgacctccaggcacactatggtggccgacctttatttcgctatcctgttaatatttgttacgcagacaacaatgctaaatctgcaaaatttatctaaagttagtcagatataatcaccccattatatatgtacttgtttgacggatcagatgctctcagctaattggtatacatgcgtgttgcctcttgaaattatagaggagctaattaaggctaagctaccagcggtacctgtaatttagtttctcatcagtagaattgtccaaactatttatgcgtgttgcgagattttgctgtgtggtgagcacaaagtggcatttttaaagagataaaacgtacggcacgcgaattcattggtttctt

SEQ ID NO: 45630 - DNA, 281 bp, Zea Mays
atggttcatatcttctgctcccttttcagaactgaaagacaagcccatggaacgctacttaataagcatgttgaggatacaaatcttgtttctgttttcctattagaattggttcatgacgttttctgtttgaagaaactcgtcttccttttcaactcatcaatccagcttgcatttacactcattttccacattctgaagcttcctgtgaatgtcatttttctcctcttattcaacagaaatcacatccatcaattcctggatctcattttcatctgtac

SEQ ID NO: 45631 - DNA, 1214 bp, Zea Mays
gctctagagcctatcaaagcaaagaatccaaagataacatatgcagacctgtatcagcttgctggagtggttgcagtcgaagtgactggggggccaactgttgaatttattcctggcagacgtgattcgtcggtgtgcccccgtgaagggcgtctgccagatgctaagaaaggtgcaccacatctgagggacatcttttatcggatgggcttatcggacaaagatattgtagctctatcagggggacatactctgggaagggctcaccctgagaggtctggattcgatggtgcctggacaaaggagcctcttaagtttgataactcatactttcttgagctgttgaatgaggaatctgagggacttttaaagctcccaactgacaaggcactgttatcagatcctgaatttaggcgctatgtggagctctatgcaaaggatgaagatgcgttcttcaaagattatgctgaatcacacaagaaactctctgagcttggcttcacgcctcgcagcacagcaccatccaaatcagatcttccaaccgccgccgtgcttgcacagagtgcctttggggtagcagttgctgcagccgtagttatcgctggctacttgtacgaggcttccaagaaggccaagtagagggcgaagttcttctccacatggctttgctttagtaagtctgaagatcgaataacaggaccatatctgaagatcgaataacggatcatataaatgagttactcggaaaatgttctgaaatccttacgaacagaacgttgccttcatgtttacactgtactcatgagtcacagtgatatggagatggcatagcctactattggaagtatatgcattctgtgtaatctatgcatcggattgcagctggaacttccgtggaaattgacagtgatgtgtcgacataggaactgcgatttggttcaatgaccacgtagagggaatgtactggcgggatccttttatttatagcagatagtgttggtgagggaggcctatgtcgcgttttcttgactgagcaagtacagccgactgctggctataaagatgcttccaacgtacccctctgtcccaatatataattcttttagccttttacttttgtgtctatatttaagtagatgataataaatctaaacacataaataatatacatatactaaatattgtataaatccttaacacccttaactgaatac

SEQ ID NO: 45632 - DNA, 1448 bp, Zea Mays
tcaccaacgactgcaggagccggcatatttcgtcgccatggcggcaaggagagaggaggaacggaagaaggccgaggaggagagatcagtgctgactcgtcaggttgatgaaactgatggcatgatgctggaacttatgacctgaagacaaaaactggtggtgcaaatggttcgattagatatgaagaagagtacactcatggttcaaatgctggtttaaagattgctatcgatctccttgagcctatcaaagcaaagaatccaaagataacatatgcagacctgtatcagcttgctggagtggttgcagtcgaagtgactggggggccaactgttgaatttattcctggcagacgtgattcgtcggtgtgcccccgtgaagggcgtctgccagatgctaagaaaggtgcaccacatctgagggacatcttttatcggatgggcttatcggacaaagatattgtagctctatcagggggacatactctgggaagggctcaccctgagaggtctggattcgatggtgcctggacaaaggagcctcttaagtttgataactcatactttcttgagctgttgaatgaggaatctgagggacttttaaagctcccaactgacaaggcactgttatcagatcctgaatttaggcgctatgtggagctctatgcaaaggatgaagatgcgttcttcaaagattatgctgaatcacacaagaaactctctgagcttggcttcacgcctcgcagcacagcaccatccaaatcagatcttccaaccgccgccgtgcttgcacagagtgcctttggggtagcagttgctgcagccgtagttatcgctggctacttgtacgaggcttccaagaaggccaagtagagggcgaagttcttctccacatggctttgctttagtaagtctgaagatcgaataacaggaccatatctgaagatcgaataacggatcatataaatgagttactcggaaaatgttctgaaatccttacgaacagaacgttgccttcatgtttacactgtactcatgagtcacagtgatatggagatggcatagcctactattggaagtatatgcattctgtgtaatctatgcatcggattgcagctggaacttccgtggaaattgacagtgatgtgtcgacataggaactgcgatttggttcaatgaccacgtagagggaatgtactggcgggatccttttatttatagcagatagtgttggtgagggaggcctatgtcgcgttttcttgactgagcaagtacagccgactgctggctataaagatgcttccaacgtacccctctgtcccaatatataattcttttagccttttacttttgtgtctatatttaagtagatgataataaatctaaacacataaataatatacatatactaaatattgtataaatccttaacacccttaactgaatac

SEQ ID NO: 45633 - DNA, 1625 bp, Zea Mays
caactggaggccaatagaatcgctcgcttgcgttatcttgttcgcctcgtcagttgttgtttcctcccttcccatcccccactgctcagcagtcagtcagcactcgccacccacacgcctccgctccgcccacggttccactccaactctccgatctccaggaatccgcggctgaggcgccggcgatggcggctcccatggtcgacgccgaatacctgcgccaggtcgacagggcgcgccgccacctccgcgccctcatctccaacaagggatgcgccccgatcatgctccgcctcgcatggcatgatgctggaacttatgacctgaagacaaaaactggtggtgcaaatggttcgattagatatgaagaagagtacactcatggttcaaatgctggtttaaagattgctatcgatctccttgagcctatcaaagcaaagaatccaaagataacatatgcagacctgtatcagcttgctggagtggttgcagtcgaagtgactggggggccaactgttgaatttattcctggcagacgtgattcgtcggtgtgcccccgtgaagggcgtctgccagatgctaagaaaggtgcaccacatctgagggacatcttttatcggatgggcttatcggacaaagatattgtagctctatcagggggacatactctgggctcaccctgagaggtctggattcgatggtgcctggacaaaggagcctcttaagtttgataactcatactttcttgagctgttgaatgaggaatctgagggacttttaaagctcccaactgacaaggcactgttatcagatcctgaatttaggcgctatgtggagctctatgcaaaggatgaagatgcgttcttcaaagattatgctgaatcacacaagaaactctctgagcttggcttcacgcctcgcagcacagcaccatccaaatcagatcttccaaccgccgccgtgcttgcacagagtgcctttggggtagcagttgctgcagccgtagttatcgctggctacttgtacgaggcttccaagaaggccaagtagagggcgaagttcttctccacatggctttgctttagtaagtctgaagatcgaataacaggaccatatctgaagatcgaataacggatcatataaatgagttactcggaaaatgttctgaaatccttacgaacagaacgttgccttcatgtttacactgtactcatgagtcacagtgatatggagatggcatagcctactattggaagtatatgcattctgtgtaatctatgcatcggattgcagctggaacttccgtggaaattgacagtgatgtgtcgacataggaactgcgatttggttcaatgaccacgtagagggaatgtactggcgggatccttttatttatagcagatagtgttggtgagggaggcctatgtcgcgttttcttgactgagcaagtacagccgactgctggctataaagatgcttccaacgtacccctctgtcccaatatataattcttttagccttttacttttgtgtctatatttaagtagatgataataaatctaaacacataaataatatacatatactaaatattgtataaatccttaacacccttaactgaatac

SEQ ID NO: 45634 - DNA, 1564 bp, Zea Mays
caactggaggccaatagaatcgctcgcttgcgttatcttgttcgcctcgtcagttgttgtttcctcccttcccatcccccactgctcagcagtcagtcagcactcgccacccacacgcctccgctccgcccacggttccactccaactctccgatctccaggaatccgcggctgaggcgccggcgatggcggctcccatggtcgacgccgaatacctgcgccaggtcgacagggcgcgccgccacctccgcgccctcatctccaacaagggatgcgccccgatcatgctccgcctcgcatggcatgatgctggaacttatgacctgaagacaaaaactggtggtgcaaatggttcgattagatatgaagaagagtacactcatggttcaaatgctggtttaaagattgctatcgatctccttgagcctatcaaagcaaagaatccaaagataacatatgcagacctgtatcaggattcgtcggtgtgcccccgtgaagggcgtctgccagatgctaagaaaggtgcaccacatctgagggacatcttttatcggatgggcttatcggacaaagatattgtagctctatcagggggacatactctgggaagggctcaccctgagaggtctggattcgatggtgcctggacaaaggagcctcttaagtttgataactcatactttcttgagctgttgaatgaggaatctgagggacttttaaagctcccaactgacaaggcactgttatcagatcctgaatttaggcgctatgtggagctctatgcaaaggatgaagatgcgttcttcaaagattatgctgaatcacacaagaaactctctgagcttggcttcacgcctcgcagcacagcaccatccaaatcagatcttccaaccgccgccgtgcttgcacagagtgcctttggggtagcagttgctgcagccgtagttatcgctggctacttgtacgaggcttccaagaaggccaagtagagggcgaagttcttctccacatggctttgctttagtaagtctgaagatcgaataacaggaccatatctgaagatcgaataacggatcatataaatgagttactcggaaaatgttctgaaatccttacgaacagaacgttgccttcatgtttacactgtactcatgagtcacagtgatatggagatggcatagcctactattggaagtatatgcattctgtgtaatctatgcatcggattgcagctggaacttccgtggaaattgacagtgatgtgtcgacataggaactgcgatttggttcaatgaccacgtagagggaatgtactggcgggatccttttatttatagcagatagtgttggtgagggaggcctatgtcgcgttttcttgactgagcaagtacagccgactgctggctataaagatgcttccaacgtacccctctgtcccaatatataattcttttagccttttacttttgtgtctatatttaagtagatgataataaatctaaacacataaataatatacatatactaaatattgtataaatccttaacacccttaactgaatac

SEQ ID NO: 45635 - DNA, 1933 bp, Zea Mays
tcacttcggacaggtcactgctctaactccaacctacccagcctcggccagccacctccccgtcgctctcacgctcttcgtgcccgccgcctcccctcttcccctccacctcactcctcccgtctgacgcacatggcatccatcgccggatcttccgctctctccttcgccatgcctgtcaaggcaatcaactcaaattctctagccttctccccggtgaggaagggtaacacattcctccgcctgcaaccagtgcctatgagatctgtttcctgcgctgtgagttttatacttggccttacaatgcacaaatatatttggcgagggttttctgtatcataacaatgctagtgatttacctgagttattgcttctgtgcataattatgacaaagctattgatttcctaaatcaactgtgtctctggatctcaactgaactagtaatctgtatatactatcggtcaagtttcaccaaagctccttattgtttatagaagggctctgttttcttcccttacctttgttctggaagtcaaggaaacttatacgtgctcctagtgttgttgcagtgctcttgatctagcaagataaccatactcccagtgacacctttttcaatatatattctcttatactgcaaacataatgaaatttcaaaatatggattatgacaggccaagaaggatacggtggacaaggtttgtgaaattgtgaagaagcagcttgctcttcctgaccacactgaagtttgtggtgaatcgaaattctctgaacttggtgcggattcgctggacacggtaaatcacaatatttcttttcgctgatgtcatctacatatgtcacttgtaaaatgattttttaatggaaatgtatggttgtgaatttgtcaatttatacttaggcccgtttgttttgttggaattgaattccattataataatcataatttagacaaactaattaagttaatatatttatatatttaatatattagtatattatcctgaatcatatgagagatatagttatacgctacacgtatgctatagagaagtaagtataagagtgtggtataagttgtatattagaaaagtagcatgtaaatttatagaaccaattttatctctcaccctatgaatttgagataggcttatatataaactttggaaagttatggaatgtcacattctaaaaaaatagcttactccattagttagattccaattcttcgaaatgatgggaaacaaacgggcccttagcctaatgcaactacaatgccctatttttttttcttttggcctgaataattagagagactgcaaacagtaagtaaactttgacctatctacttcatactgaggaactttgttgcttcaatataatcgctgtactccacacttgcctccaggacattgtcagtcagtctgtaattccttattccctataaggactaaagaagcactttgaaataatgttctgtgtagtaccacagataatgcatactccatctctggatgaatcaacttctagagttgcaacagtttgatcaatttcatacaaaaggttgagattgtgatgggccttgaggagcacttcgacattagcgtggaggagtccagcgcgcagacaattgccaccgttgaagacgccgctgacctcattgacaagcttgttgctgtgaaggcataggccgcatctcttctatcattgtcttaccactctaggtttctatggtctgaagacttgtgattttctccgcactgctgttgctattcccgtgtcgtaataatacgagatgttttaagcggctgaacacacggtggtgtaatctgttactggtaaggtgcattgttgtatgaattgtttctcacccagaagaaccagaccatcggggattctagcatcatatataagaaatgaaataaaaaaata

SEQ ID NO: 45636 - DNA, 783 bp, Zea Mays
ataaaagggccctcacttcggacaggtcactgctctaactccaacctacccagcctcggccagccacctccccgtcgctctcacgctcttcgtgcccgccgcctcccctcttcccctccacctcactcctcccgtctgacgcacatggcatccatcgccggatcttccgctctctccttcgccatgcctgtcaaggcaatcaactcaaattctctagccttctccccggtgaggaagggtaacacattcctccgcctgcaaccagtgcctatgagatctgtttcctgcgctgccaagaaggatacggtggacaaggtttgtgaaattgtgaagaagcagcttgctcttcctgaccacactgaagtttgtggtgaatcgaaattctctgaacttggtgcggattcgctggacacggttgagattgtgatgggccttgaggagcacttcgacattagcgtggaggagtccagcgcgcagacaattgccaccgttgaagacgccgctgacctcattgacaagcttgttgctgtgaaggcataggccgcatctcttctatcattgtcttaccactctaggtttctatggtctgaagacttgtgattttctccgcactgctgttgctattcccgtgtcgtaataatacgagatgttttaagcggctgaacacacggtggtgtaatctgttactggtaaggtgcattgttgtatgaattgtttctcacccagaagaaccagaccatcggggattctagcatcatatataagaaatgaaataaaaaaata

SEQ ID NO: 45637 - DNA, 479 bp, Zea Mays
ataaaagggccctcacttcggacaggtcactgctctaactccaacctacccagcctcggccagccacctccccgtcgctctcacgctcttcgtgcccgccgcctcccctcttcccctccacctcactcctcccgtctgacgcacatggcatccatcgccggatcttccgctctctccttcgccatgcctgtcaaggcaatcaactcaaattctctagccttctccccggtgaggaagggtaacacattcctccgcctgcaaccagtgcctatgagatctgtttcctgcgctgccaagaaggatacggtggacaaggtttgtgaaattgtgaagaagcagcttgctcttcctgaccacactgaagtttgtggtgaatcgaaattctctgaacttggtgcggattcgctggacacggacattgtcagtcagtctgtaattccttattccctataaggactaaagaagcactttgaaataat

SEQ ID NO: 45638 - DNA, 1885 bp, Zea Mays
aggcagcccagaaatgtctgctgcagggctgctgggtttctgatgccaagtggagcgggacacgaggacaccacaaagcggtgaaggagaaccaaggtaatcgaacccggaagcgaccttcttgagcccgaagcaaaaggcactgctcatcgatccgccaccacgccacaaaatcctctcctactccggcagttctgctcgccgccgcctccacgatgacggaagacgtgcagatgaacgactcggagccccagcctgcggcctcagctcccgccgtcggggcgccggcgctctccacactacaccatctgaaggagatcgcgtccgtgatcgaggccggttctctgtccaaggaggtccgccggatctcccgcgccttccgcctcaccgtcgcgctccgtcgccgcctcgccgcgcgggacgtctccgccttcctcgccttcgcgctacccgcgtcctccgaagcctacggacgcctcactgccctggtgcccaaggaagatgatactgagatggatgttgatgctgcagctccagcaactcagatttcaatcaaacatggtctccctgagattgaaatatattgctacttgctcgtactgattttccttattgatcataagaaatatgatgaggctaaggcatgcgcaagtgtgagcattgctcgcctgaagaatctaaaccggagaactgttgatgttttggcatcacgactgtacttctattactcttatgtgtatgagcttaccaacagccttgctgaaatccgtgggaatttgcttgctctacacagaatggcaactttgcatcgtgacgagcttggccaggaaacactgctcaatctcctccttcgcaattacctccactacaatttgtatgatcaggcagaaaagcttagatcaaaggcacctcgttttgaagcacactccaatcaacaattctgccgatacttgttctacttgggtaaaatcaggacaatccagttggagtacaccgatgctaaagaaagcctcctgcaagctgctcaaaggaatgaagaaagctctgataccttattttgagctcacaaatgctgtcagggttggggaccttgaactgttcagggctgttgcagacaaatttgcaagcacattcagcgcagacaggactcgtaatttgattgtgaggctgcgccataatgtcattcgaactggactgcgcaacatcagcatttcttactcaaggatctcccttgctgacattgctaagaagctaagactagactctgagaaccctattgctgatgcggagagcattgtagccaaggccataagagatggcgccattgacgccaccatagatcatgcaaatggctggatggtatccaaggaaactggtgatgtctactcaacaaatgagccacaaattgcattcaactccaggattgcgttctgcctcaacatgcacaatgaggcggtcaaggcgatgagattcccccctaattctcacaaggaaaaggagagtgctgagaagcgccgagagaggcttcagcaggaggaagaactggctaagcacatggctgaggatgatgacgacgacttctaagttagctgccttttgagcaactacttgcaatgtggagtttgttcgatttgtgaacgcctggttcaaagcaattcccctacctctagttactccagtcatgcaaacactgaagttcatccactgtaatgttgtgtcgatcaggattttgtattaattctatacttgatttttagtccccctgaattgttgaaccagggaatttactcaccattaaacggctttgtttatttctttaatcccagttcggcctcttttgaaattctgtattctgtgtttattatttctgtgtcttaatttaata

SEQ ID NO: 45639 - DNA, 936 bp, Zea Mays
cgggatccccgcccttccctcgaaaccccgccccgcgcccctccctgagctctgtcgcgtcatccctgccttgtccccttcctcccactccgacgcacacgaggaagctgttaaccagcgccgccacttccaccgagtccctcgtggcgcttgaggcccgctgtctctccccccgctgtcgaggctcgcgccggctagaggtccacgctccccccccccagagatagctccctccccgaggagctgaaggcagcggcgtcacgggggctgcggtaggagctcgacaccgagcgggagttcgcggagacggcagccagatccggatcgaccctcttcgccttattcgagctcctggggctcgcagataaaggggccgaccgggtcgctggagccctcctacgacgaggccctgtggccggatgaggaggccggcgtcgacgcggcggaggccgcgccggcggaagcggacgatggcatcgaggtctgctgcttcgacaatcgcggtgtcggccacagctccgtgctccccaacaaatcctactactcgacggcaatcatggcgacggatgccttggccttgatggatcatttggggtggaagaaggctcacgtcttcggccactccatgggtgccatgattgcttgcaagctagatgtgatggcacctcacaggctatgttcgctggcattgcttaatgtcaccagaggtggctttcagtgcttcccaaaggtagacgcgcagatgctatctcttgcattccgtttcttaagggcaaaaactccagaggaaagagcccttgtggacctggaaacacattatacaaaggttgtccacactgtactcagtgctcaggaggagatgttggcaacatggaggacttcgaggagtttcaggactacgatgagttctagtttatcttagtggcaaacccccgg

SEQ ID NO: 45640 - DNA, 2193 bp, Zea Mays
cgcgcgcagtgattggagtagtggggccggtttgatacagcgccgcgcgcggtgaggagcgtgggctgcacgggagcagtccggagctgggccgaaaacgggtaatccggcccagtaaggttccttattccctttttctttatgttttatttttttctgttttctttaattgttttgaatccaaatttgaatttgaatgtgagtttattctttgagtccattatacaaattcacactctaatgttggaataatatattttcatttacttatttttatcctcacaatatttatttccttctcttttctagattcaagaatttcttttaggttctaaattccctttttggactttaatattttcttgtcacattacttttataatgccacataatgcacacaaaataaagaaccgacatggtgcacattttttttgtgataagtcttttatgaacaattattattattattattttgaatatggtgttcacatgtgatgataagtaggttcaatcatacacataaaatattggaaaataatttttctccccttttattacctttacaaattaggtattacactccctgagctccatcgcgtcatccctgccctgtccccttcctcttcccactccgacgcacacaaggaagccattaaccagcgcctccacttccacctcaaagctactcgtggcgcttgaggcccgctgtccctccccccgctgccgaggctcgtgccggctggaggtccacgctcgcaccccccagagattgctccctccccgaggagctgaaggcagtggcatcgcgggggttgcggtaggaactcgaaacccagtgggggtctgtggagatggcagccagatccgactcgaccctcttcgccttattcgagctcctcacgctcccgaccttctccaaggtacgcactccacccttcagcgtcctgctttgttacaccgggacccactattggacttgggttagggttttggttgagaagaacagctttgccccccccacacacacacccacactaaggcaacatctgacctacgctcactggctacccccccctccatctgcagcaatatagtcgtctttcctcatatgctgacgtaattgtgcctgtcgtgcattatcgtaatggttggcctacaatgctgagcgtttgaccatataaaatatatacggctactaacgtttgtaccattctgaaaactaaaatttgttgaggttagcactgttaattttgctgcagatatctattatgtgaagccttacccctgtgatgtgtatgccactatgaacttttattgaacaacaaagagtagtgtaatgttctattgtagtttcttttcgttctcttatgtttatgttgcaggctccaggctgcatagacaaaagtgttgtaaccagatctattcttaatggtgatagtgaactgaatatattttcacaattagtctagatttatggatgtgtgcctttcttttcggatggattttgctaccactctaaaacataagagacaagagtttagtgtgcctgagcttattgggtctcttgatgttgaggagagggtgagagcaaaagacacttgtgggaaaggaggtgagacttctagtgccaatatggtacaaaagaactccaatgcgtcacataaaaccatgaagcccaagcaggcaaccttgtttaaaaagaagaacaaaggagttggttgctttgtttgtgggagtattgatcaatgggcaagcgcttgtccagaccgcaaatttaagcaagagaaaaaaccagctcaagagaagaaaacaacaaacatggttgttagcgataccgcagaaggaacatcaggtgcaaaggggctggaacattgctgatggggaacggatcacatgcgtgtgttcttagtgttggtacagtcattctgaagtttacttcgggaaagacggtgctattgaagaatgtgcagcatgtcccctccatcaacaagaatcttgttagtggctcattgctatgtcgagatggctataaacttgtgtttgagtccaataaatgtatactatcaaagtatgggacatttgttggaaaaggctatgacagtggaggcttgttctgcttatctttgcatgatgtttgcaataagtctgtgaacaatgtgatttcgaacgagtcatatatttggcattcacgac

SEQ ID NO: 45641 - DNA, 1637 bp, Zea Mays
cgggatccccgcccttccctcgaaaccccgccccgcgcccctccctgagctctgtcgcgtcatccctgccttgtccccttcctcccactccgacgcacacgaggaagctgttaaccagcgccgccacttccaccgagtccctcgtggcgcttgaggcccgctgtctctccccccgctgtcgaggctcgcgccggctagaggtccacgctccccccccccagagatagctccctccccgaggagctgaaggcagcggcgtcacgggggctgcggtaggagctcgacaccgagcgggagttcgcggagacggcagccagatccggatcgaccctcttcgccttattcgagctcctggggctcgcagataaaggggccgaccgggtcgctggagccctcctacgacgaggccctgtggccggatgaggaggccggcgtcgacgcggcggaggccgcgccggcggaagcggacgatggcatcgaggtctgctgcttcgacaatcgcggtgtcggccacagctccgtgctccccaacaaatcctactactcgacggcaatcatggcgacggatgccttggccttgatggatcatttggggtggaagaaggctcacgtcttcggccactccatgggtgccatgattgcttgcaagctagatgtgatggcacctcacaggctatgttcgctggcattgcttaatgtcaccagaggtggctttcagtgcttcccaaaggtagacgcgcagatgctatctcttgcattccgtttcttaagggcaaaaactccagaggaaagagcccttgtggacctggaaacacattatacaaaggctccaggctgcatagacaaaagtgttgtaaccagatctattcttaatggtgatagtgaactgaatatattttcacaattagtctagatttatggatgtgtgcctttcttttcggatggattttgctaccactctaaaacataagagacaagagtttagtgtgcctgagcttattgggtctcttgatgttgaggagagggtgagagcaaaagacacttgtgggaaaggaggtgagacttctagtgccaatatggtacaaaagaactccaatgcgtcacataaaaccatgaagcccaagcaggcaaccttgtttaaaaagaagaacaaaggagttggttgctttgtttgtgggagtattgatcaatgggcaagcgcttgtccagaccgcaaatttaagcaagagaaaaaaccagctcaagagaagaaaacaacaaacatggttgttagcgataccgcagaaggaacatcaggtgcaaaggggctggaacattgctgatggggaacggatcacatgcgtgtgttcttagtgttggtacagtcattctgaagtttacttcgggaaagacggtgctattgaagaatgtgcagcatgtcccctccatcaacaagaatcttgttagtggctcattgctatgtcgagatggctataaacttgtgtttgagtccaataaatgtatactatcaaagtatgggacatttgttggaaaaggctatgacagtggaggcttgttctgcttatctttgcatgatgtttgcaataagtctgtgaacaatgtgatttcgaacgagtcatatatttggcattcacgac

SEQ ID NO: 45642 - DNA, 1439 bp, Zea Mays
cgggatccccgcccttccctcgaaaccccgccccgcgcccctccctgagctctgtcgcgtcatccctgccttgtccccttcctcccactccgacgcacacgaggaagctgttaaccagcgccgccacttccaccgagtccctcgtggcgcttgaggcccgctgtctctccccccgctgtcgaggctcgcgccggctagaggtccacgctccccccccccagagatagctccctccccgaggagctgaaggcagcggcgtcacgggggctgcggtaggagctcgacaccgagcgggagttcgcggagacggcagccagatccggatcgaccctcttcgccttattcgagctcctggggctcgcagataaaggggccgaccgggtcgctggagccctcctacgacgaggccctgtggccggatgaggaggccggcgtcgacgcggcggaggccgcgccggcggaagcggacgatggcatcgaggtctgctgcttcgacaatcgcggtgtcggccacagctccgtgctccccaacaaatcctactactcgacggcaatcatggcgacggatgccttggccttgatggatcatttggggtggaagaaggctcacgtcttcggccactccatgggtgccatgattgcttgcaagctagatgtgatggcacctcacaggctatgttcgctggcattgcttaatgtcaccagaggtggctttcagtgcttcccaaaggtagacgcgcagatgctatctcttgcattccgtttcttaagggcaaaaactccagaggaaagagcccttgtggacctggaaacacattatacaaagggtgagagcaaaagacacttgtgggaaaggaggtgagacttctagtgccaatatggtacaaaagaactccaatgcgtcacataaaaccatgaagcccaagcaggcaaccttgtttaaaaagaagaacaaaggagttggttgctttgtttgtgggagtattgatcaatgggcaagcgcttgtccagaccgcaaatttaagcaagagaaaaaaccagctcaagagaagaaaacaacaaacatggttgttagcgataccgcagaaggaacatcaggtgcaaaggggctggaacattgctgatggggaacggatcacatgcgtgtgttcttagtgttggtacagtcattctgaagtttacttcgggaaagacggtgctattgaagaatgtgcagcatgtcccctccatcaacaagaatcttgttagtggctcattgctatgtcgagatggctataaacttgtgtttgagtccaataaatgtatactatcaaagtatgggacatttgttggaaaaggctatgacagtggaggcttgttctgcttatctttgcatgatgtttgcaataagtctgtgaacaatgtgatttcgaacgagtcatatatttggcattcacgac

SEQ ID NO: 45643 - DNA, 1185 bp, Zea Mays
gccatctcctcaaccgtcgcgggatccccgcccttccctcgaaaccccgccccgcgcccctccctgagctctgtcgcgtcatccctgccttgtccccttcctcccactccgacgcacacgaggaagctgttaaccagcgccgccacttccaccgagtccctcgtggcgcttgaggcccgctgtctctccccccgctgtcgaggctcgcgccggctagaggtccacgctccccccccccagagatagctccctccccgaggagctgaaggcagcggcgtcacgggggctgcggtaggagctcgacaccgagcgggagttcgcggagacggcagccagatccggatcgaccctcttcgccttattcgagctcctggggctcgcagataaaggggccgaccgggtcgctggagccctcctacgacgaggccctgtggccggatgaggaggccggcgtcgacgcggcggaggccgcgccggcggaagcggacgatggcatcgaggtctgctgcttcgacaatcgcggtgtcggccacagctccgtgctccccaacaaatcctactactcgacggcaatcatggcgacggatgccttggccttgatggatcatttggggtggaagaaggctcacgtcttcggccactccatgggtgccatgattgcttgcaagctagatgtgatggcacctcacaggctatgttcgctggcattgcttaatgtcaccagaggtggctttcagtgcttcccaaaggtagacgcgcagatgctatctcttgcattccgtttcttaagggcaaaaactccagaggaaagagcccttgtggacctggaaacacattatacaaagtgcaaaggggctggaacattgctgatggggaacggatcacatgcgtgtgttcttagtgttggtacagtcattctgaagtttacttcgggaaagacggtgctattgaagaatgtgcagcatgtcccctccatcaacaagaatcttgttagtggctcattgctatgtcgagatggctataaacttgtgtttgagtccaataaatgtatactatcaaagtatgggacatttgttggaaaaggctatgacagtggaggcttgttctgcttatctttgcatgatgtttgcaataagtctgtgaacaatgtgatttcgaacgagtcatatatttggcattcacgac

SEQ ID NO: 45644 - DNA, 1558 bp, Zea Mays
gtcccattaaacccttgtggtagcactgttttcccgggtggttctccatgttccaattaacataatgatcttatcatgaacagtaaataacaactgataataaaagtataatcgtgaacgatgtatcttcatacctgaaaccacataaaagcactagcaagtactacccaaaaagttcagtggtaaacaaggtataaagatagacaaactagggtaacctattgggtcccatcaaaattaacctatgcagatcattatgattaatcagaacatggctgggtaaaaagaagtgatcaagggcacaacttgcctgagacttgagattccaggtaccaggatgatccttcagacgacacgtgtcctcactactagtcgtagcaatacaaacaaacatggtatagacaaaattaacatcacaccaatcataagaacacactgcataataatgatctacgcgtcgctaggagatcgtgggaacgagaatcactaagatcggagttacaattaaggggttatgatttttcggaagatctgtgtgattaaactattaaactatattataatttgaccaatacacatcatatgagagaatatcttacaaataattaattcaactttaatctaagtccttacttggtcatattttaggccaaagataaccataggatcaggatactatattaatattaggaaagctaatccagaaaacataaattaatcaaattagttacctagttataaaagtatgggatatcatataaccaaggttgttatttcgtagtaaatattcatacgaagctaacacaacttggatggatcgaatcgaaattaaaattaagaagttatgaatttccaagggttttatgtatttgatataagattaattaggaaataaattttaatatcattttcatgttaaaacagagacacagagtgataaacaacattattacaaaattatagagactgaaatgggtcgatttggactaagtatgcattttctatacattaaacaagttctggcatttatttttacactaaaaatcaatttctaaatgattttataggtttttcttccctgcctgggctgcgcgcactatttacagaggacccaggggtctcggagaaagattcccaagacacaaaaaatcctggactggaccgcgggttagtatcctaaatccagaggggctctttagcaaaatactacggccgaaggggtacggagggatttgggccgttggatcatacatccacggatcagaatagatcggtcgtggaatgaagcggtacgcactgctgaccctacgatccgagatctacggtccttgtttaatgaagccaaatctcatcctagccgagggatcgtagatctatggtcacgattcaattgcacgaacgggtgcgcgactgtctgatctcgaccgttgcgcagaagatcaacgggccacgagctcaaacccctccgtcgacggccaccctacggcgtgcactctaaactgcggcggcgccatagccggtgagcgcgaaagctcaaatccccggcccacgtttcagg

SEQ ID NO: 45645 - DNA, 1352 bp, Zea Mays
cttccccatcgtggcagccatctcctcaaccgtcgcgggatccccgcccttccctcgaaaccccgccccgcgcccctccctgagctctgtcgcgtcatccctgccttgtccccttcctcccactccgacgcacacgaggaagctgttaaccagcgccgccacttccaccgagtccctcgtggcgcttgaggcccgctgtctctccccccgctgtcgaggctcgcgccggctagaggtccacgctccccccccccagagatagctccctccccgaggagctgaaggcagcggcgtcacgggggctgcggtaggagctcgacaccgagcgggagttcgcggagacggcagccagatccggatcgaccctcttcgccttattcgagctcctggggctcgcagataaaggggccgaccgggtcgctggagccctcctacgacgaggccctgtggccggatgaggaggccggcgtcgacgcggcggaggccgcgccggcggaagcggacgatggcatcgaggtctgctgcttcgacaatcgcggtgtcggccacagctccgtgctccccaacaaatcctactactcgacggcaatcatggcgacggatgccttggccttgatggatcatttggggtggaagaaggctcacgtcttcggccactccatgggtgccatgattgcttgcaagctagatgtgatggcacctcacaggctatgttcgctggcattgcttaatgtcaccagaggtggctttcagtgcttcccaaaggtagacgcgcagatgctatctcttgcattccgtttcttaagggcaaaaactccagaggaaagagcccttgtggacctggaaacacattatacaaaggtttttcttccctgcctgggctgcgcgcactatttacagaggacccaggggtctcggagaaagattcccaagacacaaaaaatcctggactggaccgcgggttagtatcctaaatccagaggggctctttagcaaaatactacggccgaaggggtacggagggatttgggccgttggatcatacatccacggatcagaatagatcggtcgtggaatgaagcggtacgcactgctgaccctacgatccgagatctacggtccttgtttaatgaagccaaatctcatcctagccgagggatcgtagatctatggtcacgattcaattgcacgaacgggtgcgcgactgtctgatctcgaccgttgcgcagaagatcaacgggccacgagctcaaacccctccgtcgacggccaccctacggcgtgcactctaaactgcggcggcgccatagccggtgagcgcgaaagctcaaatccccggcccacgtttcagg

SEQ ID NO: 45646 - DNA, 3892 bp, Zea Mays
cttccccatcgtggcagccatctcctcaaccgtcgcgggatccccgcccttccctcgaaaccccgccccgcgcccctccctgagctctgtcgcgtcatccctgccttgtccccttcctcccactccgacgcacacgaggaagctgttaaccagcgccgccacttccaccgagtccctcgtggcgcttgaggcccgctgtctctccccccgctgtcgaggctcgcgccggctagaggtccacgctccccccccccagagatagctccctccccgaggagctgaaggcagcggcgtcacgggggctgcggtaggagctcgacaccgagcgggagttcgcggagacggcagccagatccggatcgaccctcttcgccttattcgagctcctggggctcgcagataaaggggccgaccgggtcgctggagccctcctacgacgaggccctgtggccggatgaggaggccggcgtcgacgcggcggaggccgcgccggcggaagcggacgatggcatcgaggtctgctgcttcgacaatcgcggtgtcggccacagctccgtgctccccaacaaatcctactactcgacggcaatcatggcgacggatgccttggccttgatggatcatttggggtggaagaaggctcacgtcttcggccactccatgggtgccatgattgcttgcaagctagatgtgatggcacctcacaggctatgttcgctggcattgcttaatgtcaccagaggtggctttcagtgcttcccaaaggtagacgcgcagatgctatctcttgcattccgtttcttaagggcaaaaactccagaggaaagagcccttgtggacctggaaacacattatacaaaggtttttcttccctgcctgggctgcgcgcactatttacagaggacccaggggtctcggggaaagattcccaagacacaaaaaatcctggactggaccgcgggttagtatcctaaatccagaggggctctttagcaaaatactacggccgaaggggtacgaagggatttgggccgttggatcatacatccacggatcagaatagatcggtcgtggaatgaagcggtacgcactgctgaccctacgatccgagatctacggtccttgtttaatgaagccaaatctcatcctagccgagggatcgtagatctatggtcacgattcaattgcacgaacgggtgcgcgattgtctgatctcgatcgttgcgcagaagatcaacggccacagctcaaacccctccgtcgacggccaccctacggcggtgcactctaaaccgcggcggcgccatagccggtgagcgcgaaagctcaaatccccggcccacgttacaaggtaaacagagctacacgcataggagaacagcgcagagagtagggagatgaatttaccgaggattgggcacacaggcgggctgaccacgacacgaggcggcttgacggcgttccgccctctccggcgaacaactacggggcgcgcggtcgacgattcggcacgcaggcaccacggatggttacgcgcccgctcggtgtagacccccgacctccctacgacttccggcggcggcggatggacggtcgggcacggcggcggtggtcttcggttcctaagcgcggaagttatgcaagcgaggcgggtaggtttataggggcggggagagcccaggcgtgcgcggggcctagatccgcggttcccggcggcggataaggactcagttgcaactccgagcgggccggcgagggatgcggaggttcgctccatccgcgatttctcaggggaagatgacgacctgacgaaagggccccacccgccagcgtttcgcccgcgcgcagtgattggagtagtggggccggtttgacagagcgccgcgcgcggtgaggagcgtgggccgcacggaagcagtccggagctgggccgaaaacgggtaatccggcccagtaaggttccttattccctttttctttatgttttattttttctgttttctttaattgttttgaatccaaatttgaatttgaatgtgagtttattctttgagtccattatacaaattcacactctaatgatggaataatatattttcatttacttatttttatcctcacaatatttatttccttctcttttctagattcaagaatttcttttaggttctaaattccctttttggactttaatattttcttgtcacattacttttataatgccacataatgcacacaaaataaagaaccgacatggtgcacattttttttgtgataagtcttttatgaacaattattattattatttttttgaatatggtgttcacatgtgatgataagtaggttcaatcatacacataaaatattggaaaataatttttctccccttttattacctttacaaattaggtattacaaattctacccccttaaaaataatctcgtcctcgagatttgtaagaaaaggaatatagaaagacaaatatttggttgcagtttagcttcgagttttttttaaatggttttaagcacaaatgttttctatatacttttttttgtcatttaaataaggaaatgattaggaacacatgggtatactatgtttagctattaggcagaagtagagaaggttgcggtaacaaggattagggcaaagaaagattccattacggatggtggatcttgactcatctgatgattccgttttgccctttgaagactgtagttggtgcttatcctcccttgacgtggttggtcttctgtggccctcagtcctggagttgccatccgagttgaggacatatggctatagctaggatagctagggtacatgaggtagttagatttaaacagagttttactttgcttttaggatatctagattaggcaacctatgatgtaggttaggtggttgtttacgtacgagttagtccaaggtattaatttagggtaagatatgtttatagaatcatggcctaactttttttgttgccaacattatctaacttatttaagtaactcaatttggattagatcatgttagattaggtaggatctagattaaattggaataagataaaatcttttcaagataagatgaatctattaagataagagagaatcttttaagatgagatggatctattagacttgatatatttttgtgggggatattctaagttggctagttattttatcaacatttttttgctatatgcatatacagatgtaattgtggacattactccacaactcattacactcaatcaaagatccaaatcagacaagtgtcataagaacaagcattcaagttcagagatatcaaaaaaaatagttttgtttttgttcctaaaattaggtctcctattcctaaaagtcactttaggcacaggatttcaaagtgtgaaatcaccttttgtcttttagaagtgaaaaggtaagagtaatcagagtaaagcggaaatagatgagaaaagattaagagaagtttagaaagaatcagagtagcaaaggtaagtaaagaatggttgtctagttctatctaggtttcgtcctacagtcaacattcctctgataccacttctgtcacacccgggttttaggggcaccaagacccgggcgcgaacataaacaccagatatgctgggaccaagtctcacacatatgatgtatagtggcacaagatcgaatgtcacatctttatatataacaggagttctatacaaaataaataattacattataaggcgacaacggtccagcaacccaaagttgactgggagacgacggcctagacctctcacgaacacatcgcagcatcctccaagcgcctcatcctgcggtacctgttcttgacctgtgggggggtgtgagacagcaagagtgagctcac

SEQ ID NO: 45647 - DNA, 1156 bp, Zea Mays
cgcatcccgcccgcggccgcaccccgcttccccatcgtggcagccatctcctcaaccgtcgcgggatccccgcccttccctcgaaaccccgccccgcgcccctccctgagctctgtcgcgtcatccctgccttgtccccttcctcccactccgacgcacacgaggaagctgttaaccagcgccgccacttccaccgagtccctcgtggcgcttgaggcccgctgtctctccccccgctgtcgaggctcgcgccggctagaggtccacgctccccccccccagagatagctccctccccgaggagctgaaggcagcggcgtcacgggggctgcggtaggagctcgacaccgagcgggagttcgcggagacggcagccagatccggatcgaccctcttcgccttattcgagctcctggggctcgcagataaaggggccgaccgggtcgctggagccctcctacgacgaggccctgtggccggatgaggaggccggcgtcgacgcggcggaggccgcgccggcggaagcggacgatggcatcgaggtctgctgcttcgacaatcgcggtgtcggccacagctccgtgctccccaacaaatcctactactcgacggcaatcatggcgacggatgccttggccttgatggatcatttggggtggaagaaggctcacgtcttcggccactccatgggtgccatgattgcttgcaagctagatgtgatggcacctcacaggctatgttcgctggcattgcttaatgtcaccagaggtggctttcagtgcttcccaaaggtagacgcgcagatgctatctcttgcattccgtttcttaagggcaaaaactccagaggaaagagcccttgtggacctggaaacacattatacaaagaaaatacctcggtatcgccctttccccgaaaccccgctctgcgcccctccctgtcacacccgggttttaggggcaccaagacccgggcgcgaacataaacaccagatatgctgagaccaagtctcacacatatgatgtatagtggcacaggatcgaatgtcacatctttatatataacaggagttctatacaaaataaataattacattataaggagacaacggtccagcaacccaaagttgactgggagacgacggcctagacctctc

SEQ ID NO: 45648 - DNA, 2029 bp, Zea Mays
ccccacccccgcgccttcgtcgtcaaggccggggttcctgcggccgcgtctccctcccctcgcccgtacccacacttgattaacgtgtcagctcgctaccggaggccctcgccaactcgactcgtactcccgttcccggcggcgatccggccggcaccggaaccctagggttccaacgaagcaggaaattaggaatgatgagtcatcaacagcaaattgcccctcctagtaggggttctgtgaatggattcccccatctaaagctggatagggtgggtagtggaaggcatgaaagtaaaatcgtgaggtcatcatctggcggttttaccaattcaggaaatgacatcaaactagggcatggaagccattcgagggaccgactaatctatgttctaacacaacttattgggcatcatgtcaacgtgcatgtgaaaaatggctctataatatctggaattttccatgcaacaaactctgacaaagacttcggagtagtcttaaaaatggctcaggtcataaaggatggttctgccagaggacaaagatttgcttctgatgttgtaaagaaacctgagactatgataataccagcaagggagcttgtacaagtttttgccaaggatgtagcacttggcggtgatgagctgccaaaaggtcctggtcatgacaaaaggaaggacttgctgattgattctgccatttcccgctctcattaccttgaagagagggaacttgagcgctgggcaccagatgaaggagattcagagtgtatcgaactggagaagtatgacagaaagggaaataggagctgggatcagttcgaaaccaatgcagccttgtttggggtaaagagtacattcaatgaagaaatttataccacaaagcttgagagaggtcctcatatgagagagcttgaaaagcatgcttcgagaatagctagagaaatagaaggagaagataccaaagatattcatcttgcagaggagagaggcttattcctgggtgatgacttggaccatgatgaagagataaaatattcagcagtgcgtagagacaccgataacagcaagtacaagccaccatttactaatgtcccaagcagtacataccaagttgatttgtttaacaggacagtcaatattgttcccaaggatttgctgggatgttcatcaacaatggatgaagaatcatcatcccacatatttgatgatattgatgcatctgccactattcaaaccaatagcgttagacagccaacatctgattaccttccagatagactctcgtccaatgatgaaaacaggttggacagaaagctgagcaaagggagtaatgaaaatatggataagagaaagttgcaacctgagaataatttatctgatggtgcaagacctcttatttctgaaggaattcaagctaaatcctaatgccaagagtttcactccgtcagcatctttgaggccaccacaccctgcatcatctgatgcatcatattactatactaataacattccagcagcaccacttggacctggtttgccagtgggcatggggttcccaccggcatatggcacccagcctgtcatgtataatgctcaacctggagcatcacagcagggttacatgcatcctgttggtctacagtatgggcagcagatgatgatgggaggagggcagaatcgtcctgtttattattatgcgcctgagatgcaacaatacagaggaagaaacttctagatatactattttgaactgctgctaggtgaaagtcacaacaatccccacaagtgggataatgacccggcaaaagccgctattagaatggaaagaactggtgatgatctccctgactgtcgctccgattccttggacaaaaagccccatcgactttgtgttgcttggttgcctggtcaaaaagctcttcattgttctgtcactgttgctcagaagcagaggacggagaatctcccgttagtctttgggatgaagacctgactagtgttagggcttacatttagaatataggaac

SEQ ID NO: 45649 - DNA, 1429 bp, Zea Mays
atgggcggcgacggcggagcagcacagggcggggagagggccgcctaccggcggtgttgcaggggggctgcacggggtaggggcgcgacggctgggcgcggttggccggagcagcagcaaaggctagaacgaggctgcgaagcctgcgaggggctggtgcagcggtggccgatgcgggcttgcggcatgcctaggggggtgaagacacacaggcagcgccagtgccggccgcttggagcgctagagtggacgagcaggttggacagaaagctgagcaaagggagtaatgaaaatatggataagagaaagttgcaacctgagaataatttatctgatggtgcaagacctcttatttctgaagggtcggatgggccaccctcaagttcatatgcatatgaaccctcatcttctggccaaggattcaaatctccagaaacacctgatttgacagtatctgtcaaacatccttctaagacggaacatgtgattaactctcaaagacctggtagttcaacatcgtcaacatcagagcgcattgctgcaaactcagctgcgagtgctcttggcttgtcaccaagctcttcaataggatcccttacctctgaaaaatcaactttgaaccctaatgctaaggaattcaagctaaatcctaatgccaagagtttcactccgtcagcatctttgaggccaccacaccctgcatcatctgatgcatcatattactatactaataacattccagcagcaccacttggacctggtttgccagtgggcatggggttcccaccggcatatggcacccagcctgtcatgtataatgctcaacctggagcatcacagcagggttacatgcatcctgttggtctacagtatgggcagcagatgatgatgggaggagggcagaatcgtcctgtttattattatgcgcctgagatgcaacaatacagaggaagaaacttctagatatactattttgaactgctgctaggtgaaagtcacaacaatccccacaagtgggataatgacccggcaaaagccgctattagaatggaaagaactggtgatgatctccctgactgtcgctccgattccttggacaaaaagccccatcgactttgtgttgcttggttgcctggtcaaaaagctcttcattgttctgtcactgttgctcagaagcaggttgactggattttttttatgttttttgtcagacttctgttgtaaattaaattgtgggtcatctgttcgacccagaaatgacattcataagggctagtgtggtgacagaaaattgaaggggatccatagaagagaatccacttgctattcaattttgaatagcaagtggattctcttcatggatctattttaatttctcggtcaccaaatcagtcctaaatgtttgagattgccccatattacatttatg

SEQ ID NO: 45650 - DNA, 1160 bp, Zea Mays
atgggcggcgacggcggagcagcacagggcggggagagggccgcctaccggcggtgttgcaggggggctgcacggggtaggggcgcgacggctgggcgcggttggccggagcagcagcaaaggctagaacgaggctgcgaagcctgcgaggggctggtgcagcggtggccgatgcgggcttgcggcatgcctaggggggtgaagacacacaggcagcgccagtgccggccgcttggagcgctagagtggacgagcaggttggacagaaagctgagcaaagggagtaatgaaaatatggataagagaaagttgcaacctgagaataatttatctgatggtgcaagacctcttatttctgaaggaattcaagctaaatcctaatgccaagagtttcactccgtcagcatctttgaggccaccacaccctgcatcatctgatgcatcatattactatactaataacattccagcagcaccacttggacctggtttgccagtgggcatggggttcccaccggcatatggcacccagcctgtcatgtataatgctcaacctggagcatcacagcagggttacatgcatcctgttggtctacagcagtatgggcagcagatgatgatgggaggagggcagaatcgtcctgtttattattatgcgcctgagatgcaacaatacagaggaagaaacttctagatatactattttgaactgctgctaggtgaaagtcacaacaatccccacaagtgggataatgacccggcaaaagccgctattagaatggaaagaactggtgatgatctccctgactgtcgctccgattccttggacaaaaagccccatcgactttgtgttgcttggttgcctggtcaaaaagctcttcattgttctgtcactgttgctcagaagcaggttgactggattttttttatgttttttgtcagacttctgttgtaaattaaattgtgggtcatctgttcgacccagaaatgacattcataagggctagtgtggtgacagaaaattgaaggggatccatagaagagaatccacttgctattcaattttgaatagcaagtggattctcttcatggatctattttaatttctcggtcaccaaatcagtcctaaatgtttgagattgccccatattacatttatg

SEQ ID NO: 45651 - DNA, 2130 bp, Zea Mays
gtctccctcccctcgcccgtacccacacttgattaacgtgtcagctcgctaccggaggccctcgccaactcgactcgtactcccgttcccggcggcgatccggccggcaccggaaccctagggttccaacgaagcaggaatgatgagtcatcaacagcaaattgcccctcctagtaggggttctgtgaatggattcccccatctaaagctggatagggtgggtagtggaaggcatgaaagtaaaatcgtgaggtcatcatctggcggttttaccaattcagggcatggaagccattcgagggaccgactaatctatgttctaacacaacttattgggcatcatgtcaacgtgcatgtgaaaaatggctctataatatctggaattttccatgcaacaaactctgacaaagacttcggagtagtcttaaaaatggctcaggtcataaaggatggttctgccagaggacaaagatttgcttctgatgttgtaaagaaacctgagactatgataataccagcaagggagcttgtacaagtttttgccaaggatgtagcacttggcggtgatgagctgccaaaaggtcctggtcatgacaaaaggaaggacttgctgattgattctgccatttcccgctctcattaccttgaagagagggaacttgagcgctgggcaccagatgaaggagattcagagtgtatcgaactggagaagtatgacagaaagggaaataggagctgggatcagttcgaaaccaatgcagccttgtttggggtaaagagtacattcaatgaagaaatttataccacaaagcttgagagaggtcctcatatgagagagcttgaaaagcatgcttcgagaatagctagagaaatagaaggagaagataccaaagatattcatcttgcagaggagagaggcttattcctgggtgatgacttggaccatgatgaagagataaaatattcagcagtgcgtagagacaccgataacagcaagtacaagccaccatttactaatgtcccaagcagtacataccaagttgatttgtttaacaggacagtcaatattgttcccaaggatttgctgggatgttcatcaacaatggatgaagaatcatcatcccacatatttgatgatattgatgcatctgccactattcaaaccaatagcgttagacagccaacatctgattaccttccagatagactctcgtccaatgatgaaaacaggttggacagaaagctgagcaaagggagtaatgaaaatatggataagagaaagttgcaacctgagaataatttatctgatggtgcaagacctcttatttctgaaggaattcaagctaaatcctaatgccaagagtttcactccgtcagcatctttgaggccaccacaccctgcatcatctgatgcatcatattactatactaataacattccagcagcaccacttggacctggtttgccagtgggcatggggttcccaccggcatatggcacccagcctgtcatgtataatgctcaacctggagcatcacagcagggttacatgcatcctgttggtctacagtatgggcagcagatgatgatgggaggagggcagaatcgtcctgtttattattatgcgcctgagatgcaacaatacagaggaagaaacttctagatatactattttgaactgctgctaggtgaaagtcacaacaatccccacaagtgggataatgacccggcaaaagccgctattagaatggaaagaactggtgatgatctccctgactgtcgctccgattccttggacaaaaagccccatcgactttgtgttgcttggttgcctggtcaaaaagctcttcattgttctgtcactgttgctcagaagcaggttgactggattttttttatgttttttgtcagacttctgttgtaaattaaattgtgggtcatctgttcgacccagaaatgacattcataagggctagtgtggtgacagaaaattgaaggggatccatagaagagaatccacttgctattcaattttgaatagcaagtggattctcttcatggatctattttaatttctcggtcaccaaatcagtcctaaatgtttgagattgccccatattacatttatg

SEQ ID NO: 45652 - DNA, 2187 bp, Zea Mays
ccgcgccttcgtcgtcaaggccggggttcctgcggccgcgtctccctcccctcgcccgtacccacacttgattaacgtgtcagctcgctaccggaggccctcgccaactcgactcgtactcccgttcccggcggcgatccggccggcaccggaaccctagggttccaacgaagcaggaatgatgagtcatcaacagcaaattgcccctcctagtaggggttctgtgaatggattcccccatctaaagctggatagggtgggtagtggaaggcatgaaagtaaaatcgtgaggtcatcatctggcggttttaccaattcaggaaatgacatcaaactagggcatggaagccattcgagggaccgactaatctatgttctaacacaacttattgggcatcatgtcaacgtgcatgtgaaaaatggctctataatatctggaattttccatgcaacaaactctgacaaagacttcggagtagtcttaaaaatggctcaggtcataaaggatggttctgccagaggacaaagatttgcttctgatgttgtaaagaaacctgagactatgataataccagcaagggagcttgtacaagtttttgccaaggatgtagcacttggcggtgatgagctgccaaaaggtcctggtcatgacaaaaggaaggacttgctgattgattctgccatttcccgctctcattaccttgaagagagggaacttgagcgctgggcaccagatgaaggagattcagagtgtatcgaactggagaagtatgacagaaagggaaataggagctgggatcagttcgaaaccaatgcagccttgtttggggtaaagagtacattcaatgaagaaatttataccacaaagcttgagagaggtcctcatatgagagagcttgaaaagcatgcttcgagaatagctagagaaatagaaggagaagataccaaagatattcatcttgcagaggagagaggcttattcctgggtgatgacttggaccatgatgaagagataaaatattcagcagtgcgtagagacaccgataacagcaagtacaagccaccatttactaatgtcccaagcagtacataccaagttgatttgtttaacaggacagtcaatattgttcccaaggatttgctgggatgttcatcaacaatggatgaagaatcatcatcccacatatttgatgatattgatgcatctgccactattcaaaccaatagcgttagacagccaacatctgattaccttccagatagactctcgtccaatgatgaaaacaggttggacagaaagctgagcaaagggagtaatgaaaatatggataagagaaagttgcaacctgagaataatttatctgatggtgcaagacctcttatttctgaaggaattcaagctaaatcctaatgccaagagtttcactccgtcagcatctttgaggccaccacaccctgcatcatctgatgcatcatattactatactaataacattccagcagcaccacttggacctggtttgccagtgggcatggggttcccaccggcatatggcacccagcctgtcatgtataatgctcaacctggagcatcacagcagggttacatgcatcctgttggtctacagtatgggcagcagatgatgatgggaggagggcagaatcgtcctgtttattattatgcgcctgagatgcaacaatacagaggaagaaacttctagatatactattttgaactgctgctaggtgaaagtcacaacaatccccacaagtgggataatgacccggcaaaagccgctattagaatggaaagaactggtgatgatctccctgactgtcgctccgattccttggacaaaaagccccatcgactttgtgttgcttggttgcctggtcaaaaagctcttcattgttctgtcactgttgctcagaagcaggttgactggattttttttatgttttttgtcagacttctgttgtaaattaaattgtgggtcatctgttcgacccagaaatgacattcataagggctagtgtggtgacagaaaattgaaggggatccatagaagagaatccacttgctattcaattttgaatagcaagtggattctcttcatggatctattttaatttctcggtcaccaaatcagtcctaaatgtttgagattgccccatattacatttatg

SEQ ID NO: 45653 - DNA, 2459 bp, Zea Mays
ccgcgccttcgtcgtcaaggccggggttcctgcggccgcgtctccctcccctcgcccgtacccacacttgattaacgtgtcagctcgctaccggaggccctcgccaactcgactcgtactcccgttcccggcggcgatccggccggcaccggaaccctagggttccaacgaagcaggaatgatgagtcatcaacagcaaattgcccctcctagtaggggttctgtgaatggattcccccatctaaagctggatagggtgggtagtggaaggcatgaaagtaaaatcgtgaggtcatcatctggcggttttaccaattcaggaaatgacatcaaactagggcatggaagccattcgagggaccgactaatctatgttctaacacaacttattgggcatcatgtcaacgtgcatgtgaaaaatggctctataatatctggaattttccatgcaacaaactctgacaaagacttcggagtagtcttaaaaatggctcaggtcataaaggatggttctgccagaggacaaagatttgcttctgatgttgtaaagaaacctgagactatgataataccagcaagggagcttgtacaagtttttgccaaggatgtagcacttggcggtgatgagctgccaaaaggtcctggtcatgacaaaaggaaggacttgctgattgattctgccatttcccgctctcattaccttgaagagagggaacttgagcgctgggcaccagatgaaggagattcagagtgtatcgaactggagaagtatgacagaaagggaaataggagctgggatcagttcgaaaccaatgcagccttgtttggggtaaagagtacattcaatgaagaaatttataccacaaagcttgagagaggtcctcatatgagagagcttgaaaagcatgcttcgagaatagctagagaaatagaaggagaagataccaaagatattcatcttgcagaggagagaggcttattcctgggtgatgacttggaccatgatgaagagataaaatattcagcagtgcgtagagacaccgataacagcaagtacaagccaccatttactaatgtcccaagcagtacataccaagttgatttgtttaacaggacagtcaatattgttcccaaggatttgctgggatgttcatcaacaatggatgaagaatcatcatcccacatatttgatgatattgatgcatctgccactattcaaaccaatagcgttagacagccaacatctgattaccttccagatagactctcgtccaatgatgaaaacaggttggacagaaagctgagcaaagggagtaatgaaaatatggataagagaaagttgcaacctgagaataatttatctgatggtgcaagacctcttatttctgaagggtcggatgggccaccctcaagttcatatgcatatgaaccctcatcttctggccaaggattcaaatctccagaaacacctgatttgacagtatctgtcaaacatccttctaagacggaacatgtgattaactctcaaagacctggtagttcaacatcgtcaacatcagagcgcattgctgcaaactcagctgcgagtgctcttggcttgtcaccaagctcttcaataggatcccttacctctgaaaaatcaactttgaaccctaatgctaaggaattcaagctaaatcctaatgccaagagtttcactccgtcagcatctttgaggccaccacaccctgcatcatctgatgcatcatattactatactaataacattccagcagcaccacttggacctggtttgccagtgggcatggggttcccaccggcatatggcacccagcctgtcatgtataatgctcaacctggagcatcacagcagggttacatgcatcctgttggtctacagtatgggcagcagatgatgatgggaggagggcagaatcgtcctgtttattattatgcgcctgagatgcaacaatacagaggaagaaacttctagatatactattttgaactgctgctaggtgaaagtcacaacaatccccacaagtgggataatgacccggcaaaagccgctattagaatggaaagaactggtgatgatctccctgactgtcgctccgattccttggacaaaaagccccatcgactttgtgttgcttggttgcctggtcaaaaagctcttcattgttctgtcactgttgctcagaagcaggttgactggattttttttatgttttttgtcagacttctgttgtaaattaaattgtgggtcatctgttcgacccagaaatgacattcataagggctagtgtggtgacagaaaattgaaggggatccatagaagagaatccacttgctattcaattttgaatagcaagtggattctcttcatggatctattttaatttctcggtcaccaaatcagtcctaaatgtttgagattgccccatattacatttatg

SEQ ID NO: 45654 - DNA, 2205 bp, Zea Mays
cccacccccgcgccttcgtcgtcaaggccggggttcctgcggccgcgtctccctcccctcgcccgtacccacacttgattaacgtgtcagctcgctaccggaggccctcgccaactcgactcgtactcccgttcccggcggcgatccggccggcaccggaaccctagggttccaacgaagcaggaaattaggaatgatgagtcatcaacagcaaattgcccctcctagtaggggttctgtgaatggattcccccatctaaagctggatagggtgggtagtggaaggcatgaaagtaaaatcgtgaggtcatcatctggcggttttaccaattcaggaaatgacatcaaactagggcatggaagccattcgagggaccgactaatctatgttctaacacaacttattgggcatcatgtcaacgtgcatgtgaaaaatggctctataatatctggaattttccatgcaacaaactctgacaaagacttcggagtagtcttaaaaatggctcaggtcataaaggatggttctgccagaggacaaagatttgcttctgatgttgtaaagaaacctgagactatgataataccagcaagggagcttgtacaagtttttgccaaggatgtagcacttggcggtgatgagctgccaaaaggtcctggtcatgacaaaaggaaggacttgctgattgattctgccatttcccgctctcattaccttgaagagagggaacttgagcgctgggcaccagatgaaggagattcagagtgtatcgaactggagaagtatgacagaaagggaaataggagctgggatcagttcgaaaccaatgcagccttgtttggggtaaagagtacattcaatgaagaaatttataccacaaagcttgagagaggtcctcatatgagagagcttgaaaagcatgcttcgagaatagctagagaaatagaaggagaagataccaaagatattcatcttgcagaggagagaggcttattcctgggtgatgacttggaccatgatgaagagataaaatattcagcagtgcgtagagacaccgataacagcaagtacaagccaccatttactaatgtcccaagcagtacataccaagttgatttgtttaacaggacagtcaatattgttcccaaggatttgctgggatgttcatcaacaatggatgaagaatcatcatcccacatatttgatgatattgatgcatctgccactattcaaaccaatagcgttagacagccaacatctgattaccttccagatagactctcgtccaatgatgaaaacaggttggacagaaagctgagcaaagggagtaatgaaaatatggataagagaaagttgcaacctgagaataatttatctgatggtgcaagacctcttatttctgaaggaattcaagctaaatcctaatgccaagagtttcactccgtcagcatctttgaggccaccacaccctgcatcatctgatgcatcatattactatactaataacattccagcagcaccacttggacctggtttgccagtgggcatggggttcccaccggcatatggcacccagcctgtcatgtataatgctcaacctggagcatcacagcagggttacatgcatcctgttggtctacagcagtatgggcagcagatgatgatgggaggagggcagaatcgtcctgtttattattatgcgcctgagatgcaacaatacagaggaagaaacttctagatatactattttgaactgctgctaggtgaaagtcacaacaatccccacaagtgggataatgacccggcaaaagccgctattagaatggaaagaactggtgatgatctccctgactgtcgctccgattccttggacaaaaagccccatcgactttgtgttgcttggttgcctggtcaaaaagctcttcattgttctgtcactgttgctcagaagcaggttgactggattttttttatgttttttgtcagacttctgttgtaaattaaattgtgggtcatctgttcgacccagaaatgacattcataagggctagtgtggtgacagaaaattgaaggggatccatagaagagaatccacttgctattcaattttgaatagcaagtggattctcttcatggatctattttaatttctcggtcaccaaatcagtcctaaatgtttgagattgccccatattacatttatg

SEQ ID NO: 45655 - DNA, 2469 bp, Zea Mays
cccacccccgcgccttcgtcgtcaaggccggggttcctgcggccgcgtctccctcccctcgcccgtacccacacttgattaacgtgtcagctcgctaccggaggccctcgccaactcgactcgtactcccgttcccggcggcgatccggccggcaccggaaccctagggttccaacgaagcaggaatgatgagtcatcaacagcaaattgcccctcctagtaggggttctgtgaatggattcccccatctaaagctggatagggtgggtagtggaaggcatgaaagtaaaatcgtgaggtcatcatctggcggttttaccaattcaggaaatgacatcaaactagggcatggaagccattcgagggaccgactaatctatgttctaacacaacttattgggcatcatgtcaacgtgcatgtgaaaaatggctctataatatctggaattttccatgcaacaaactctgacaaagacttcggagtagtcttaaaaatggctcaggtcataaaggatggttctgccagaggacaaagatttgcttctgatgttgtaaagaaacctgagactatgataataccagcaagggagcttgtacaagtttttgccaaggatgtagcacttggcggtgatgagctgccaaaaggtcctggtcatgacaaaaggaaggacttgctgattgattctgccatttcccgctctcattaccttgaagagagggaacttgagcgctgggcaccagatgaaggagattcagagtgtatcgaactggagaagtatgacagaaagggaaataggagctgggatcagttcgaaaccaatgcagccttgtttggggtaaagagtacattcaatgaagaaatttataccacaaagcttgagagaggtcctcatatgagagagcttgaaaagcatgcttcgagaatagctagagaaatagaaggagaagataccaaagatattcatcttgcagaggagagaggcttattcctgggtgatgacttggaccatgatgaagagataaaatattcagcagtgcgtagagacaccgataacagcaagtacaagccaccatttactaatgtcccaagcagtacataccaagttgatttgtttaacaggacagtcaatattgttcccaaggatttgctgggatgttcatcaacaatggatgaagaatcatcatcccacatatttgatgatattgatgcatctgccactattcaaaccaatagcgttagacagccaacatctgattaccttccagatagactctcgtccaatgatgaaaacaggttggacagaaagctgagcaaagggagtaatgaaaatatggataagagaaagttgcaacctgagaataatttatctgatggtgcaagacctcttatttctgaagggtcggatgggccaccctcaagttcatatgcatatgaaccctcatcttctggccaaggattcaaatctccagaaacacctgatttgacagtatctgtcaaacatccttctaagacggaacatgtgattaactctcaaagacctggtagttcaacatcgtcaacatcagagcgcattgctgcaaactcagctgcgagtgctcttggcttgtcaccaagctcttcaataggatcccttacctctgaaaaatcaactttgaaccctaatgctaaggaattcaagctaaatcctaatgccaagagtttcactccgtcagcatctttgaggccaccacaccctgcatcatctgatgcatcatattactatactaataacattccagcagcaccacttggacctggtttgccagtgggcatggggttcccaccggcatatggcacccagcctgtcatgtataatgctcaacctggagcatcacagcagggttacatgcatcctgttggtctacagcagtatgggcagcagatgatgatgggaggagggcagaatcgtcctgtttattattatgcgcctgagatgcaacaatacagaggaagaaacttctagatatactattttgaactgctgctaggtgaaagtcacaacaatccccacaagtgggataatgacccggcaaaagccgctattagaatggaaagaactggtgatgatctccctgactgtcgctccgattccttggacaaaaagccccatcgactttgtgttgcttggttgcctggtcaaaaagctcttcattgttctgtcactgttgctcagaagcaggttgactggattttttttatgttttttgtcagacttctgttgtaaattaaattgtgggtcatctgttcgacccagaaatgacattcataagggctagtgtggtgacagaaaattgaaggggatccatagaagagaatccacttgctattcaattttgaatagcaagtggattctcttcatggatctattttaatttctcggtcaccaaatcagtcctaaatgtttgagattgccccatattacatttatg

SEQ ID NO: 45656 - DNA, 2485 bp, Zea Mays
ccgcccccgcccccacccccgcgccttcgtcgtcaaggccggggttcctgcggccgcgtctccctcccctcgcccgtacccacacttgattaacgtgtcagctcgctaccggaggccctcgccaactcgactcgtactcccgttcccggcggcgatccggccggcaccggaaccctagggttccaacgaagcaggaaattaggaatgatgagtcatcaacagcaaattgcccctcctagtaggggttctgtgaatggattcccccatctaaagctggatagggtgggtagtggaaggcatgaaagtaaaatcgtgaggtcatcatctggcggttttaccaattcaggaaatgacatcaaactagggcatggaagccattcgagggaccgactaatctatgttctaacacaacttattgggcatcatgtcaacgtgcatgtgaaaaatggctctataatatctggaattttccatgcaacaaactctgacaaagacttcggagtagtcttaaaaatggctcaggtcataaaggatggttctgccagaggacaaagatttgcttctgatgttgtaaagaaacctgagactatgataataccagcaagggagcttgtacaagtttttgccaaggatgtagcacttggcggtgatgagctgccaaaaggtcctggtcatgacaaaaggaaggacttgctgattgattctgccatttcccgctctcattaccttgaagagagggaacttgagcgctgggcaccagatgaaggagattcagagtgtatcgaactggagaagtatgacagaaagggaaataggagctgggatcagttcgaaaccaatgcagccttgtttggggtaaagagtacattcaatgaagaaatttataccacaaagcttgagagaggtcctcatatgagagagcttgaaaagcatgcttcgagaatagctagagaaatagaaggagaagataccaaagatattcatcttgcagaggagagaggcttattcctgggtgatgacttggaccatgatgaagagataaaatattcagcagtgcgtagagacaccgataacagcaagtacaagccaccatttactaatgtcccaagcagtacataccaagttgatttgtttaacaggacagtcaatattgttcccaaggatttgctgggatgttcatcaacaatggatgaagaatcatcatcccacatatttgatgatattgatgcatctgccactattcaaaccaatagcgttagacagccaacatctgattaccttccagatagactctcgtccaatgatgaaaacaggttggacagaaagctgagcaaagggagtaatgaaaatatggataagagaaagttgcaacctgagaataatttatctgatggtgcaagacctcttatttctgaagggtcggatgggccaccctcaagttcatatgcatatgaaccctcatcttctggccaaggattcaaatctccagaaacacctgatttgacagtatctgtcaaacatccttctaagacggaacatgtgattaactctcaaagacctggtagttcaacatcgtcaacatcagagcgcattgctgcaaactcagctgcgagtgctcttggcttgtcaccaagctcttcaataggatcccttacctctgaaaaatcaactttgaaccctaatgctaaggaattcaagctaaatcctaatgccaagagtttcactccgtcagcatctttgaggccaccacaccctgcatcatctgatgcatcatattactatactaataacattccagcagcaccacttggacctggtttgccagtgggcatggggttcccaccggcatatggcacccagcctgtcatgtataatgctcaacctggagcatcacagcagggttacatgcatcctgttggtctacagtatgggcagcagatgatgatgggaggagggcagaatcgtcctgtttattattatgcgcctgagatgcaacaatacagaggaagaaacttctagatatactattttgaactgctgctaggtgaaagtcacaacaatccccacaagtgggataatgacccggcaaaagccgctattagaatggaaagaactggtgatgatctccctgactgtcgctccgattccttggacaaaaagccccatcgactttgtgttgcttggttgcctggtcaaaaagctcttcattgttctgtcactgttgctcagaagcaggttgactggattttttttatgttttttgtcagacttctgttgtaaattaaattgtgggtcatctgttcgacccagaaatgacattcataagggctagtgtggtgacagaaaattgaaggggatccatagaagagaatccacttgctattcaattttgaatagcaagtggattctcttcatggatctattttaatttctcggtcaccaaatcagtcctaaatgtttgagattgccccatattacatttatg

SEQ ID NO: 45657 - DNA, 2488 bp, Zea Mays
ccgcccccgcccccacccccgcgccttcgtcgtcaaggccggggttcctgcggccgcgtctccctcccctcgcccgtacccacacttgattaacgtgtcagctcgctaccggaggccctcgccaactcgactcgtactcccgttcccggcggcgatccggccggcaccggaaccctagggttccaacgaagcaggaaattaggaatgatgagtcatcaacagcaaattgcccctcctagtaggggttctgtgaatggattcccccatctaaagctggatagggtgggtagtggaaggcatgaaagtaaaatcgtgaggtcatcatctggcggttttaccaattcaggaaatgacatcaaactagggcatggaagccattcgagggaccgactaatctatgttctaacacaacttattgggcatcatgtcaacgtgcatgtgaaaaatggctctataatatctggaattttccatgcaacaaactctgacaaagacttcggagtagtcttaaaaatggctcaggtcataaaggatggttctgccagaggacaaagatttgcttctgatgttgtaaagaaacctgagactatgataataccagcaagggagcttgtacaagtttttgccaaggatgtagcacttggcggtgatgagctgccaaaaggtcctggtcatgacaaaaggaaggacttgctgattgattctgccatttcccgctctcattaccttgaagagagggaacttgagcgctgggcaccagatgaaggagattcagagtgtatcgaactggagaagtatgacagaaagggaaataggagctgggatcagttcgaaaccaatgcagccttgtttggggtaaagagtacattcaatgaagaaatttataccacaaagcttgagagaggtcctcatatgagagagcttgaaaagcatgcttcgagaatagctagagaaatagaaggagaagataccaaagatattcatcttgcagaggagagaggcttattcctgggtgatgacttggaccatgatgaagagataaaatattcagcagtgcgtagagacaccgataacagcaagtacaagccaccatttactaatgtcccaagcagtacataccaagttgatttgtttaacaggacagtcaatattgttcccaaggatttgctgggatgttcatcaacaatggatgaagaatcatcatcccacatatttgatgatattgatgcatctgccactattcaaaccaatagcgttagacagccaacatctgattaccttccagatagactctcgtccaatgatgaaaacaggttggacagaaagctgagcaaagggagtaatgaaaatatggataagagaaagttgcaacctgagaataatttatctgatggtgcaagacctcttatttctgaagggtcggatgggccaccctcaagttcatatgcatatgaaccctcatcttctggccaaggattcaaatctccagaaacacctgatttgacagtatctgtcaaacatccttctaagacggaacatgtgattaactctcaaagacctggtagttcaacatcgtcaacatcagagcgcattgctgcaaactcagctgcgagtgctcttggcttgtcaccaagctcttcaataggatcccttacctctgaaaaatcaactttgaaccctaatgctaaggaattcaagctaaatcctaatgccaagagtttcactccgtcagcatctttgaggccaccacaccctgcatcatctgatgcatcatattactatactaataacattccagcagcaccacttggacctggtttgccagtgggcatggggttcccaccggcatatggcacccagcctgtcatgtataatgctcaacctggagcatcacagcagggttacatgcatcctgttggtctacagcagtatgggcagcagatgatgatgggaggagggcagaatcgtcctgtttattattatgcgcctgagatgcaacaatacagaggaagaaacttctagatatactattttgaactgctgctaggtgaaagtcacaacaatccccacaagtgggataatgacccggcaaaagccgctattagaatggaaagaactggtgatgatctccctgactgtcgctccgattccttggacaaaaagccccatcgactttgtgttgcttggttgcctggtcaaaaagctcttcattgttctgtcactgttgctcagaagcaggttgactggattttttttatgttttttgtcagacttctgttgtaaattaaattgtgggtcatctgttcgacccagaaatgacattcataagggctagtgtggtgacagaaaattgaaggggatccatagaagagaatccacttgctattcaattttgaatagcaagtggattctcttcatggatctattttaatttctcggtcaccaaatcagtcctaaatgtttgagattgccccatattacatttatg

SEQ ID NO: 45658 - DNA, 1362 bp, Zea Mays
gtcatgcgttatttctgggttccattataggaaattaggaatgatgagtcatcaacagcaaattgcccctcctagtaggggttctgtgaatggattcccccatctaaagctggatagggtgggtagtggaaggcatgaaagtaaaatcgtgaggtcatcatctggcggttttaccaattcaggaaatgacatcaaactagggcatggaagccattcgagggaccgactaatctatgttctaacacaacttattgggcatcatgtcaacgtgcatgtgaaaaatggctctataatatctggaattttccatgcaacaaactctgacaaagacttcggagtagtcttaaaaatggctcaggtcataaaggatggttctgccagaggacaaagatttgcttctgatgttgtaaagaaacctgagactatgataataccagcaagggagcttgtacaagtttttgccaaggatgtagcacttggcggtgatgagctgccaaaaggtcctggtcatgacaaaaggaaggacttgctgattgattctgccatttcccgctctcattaccttgaagagagggaacttgagcgctgggcaccagatgaaggagattcagagtgtatcgaactggagaagtatgacagaaagggaaataggagctgggatcagttcgaaaccaatgcagccttgtttggggtaaagagtacattcaatgaagaaatttataccacaaagcttgagagaggtcctcatatgagagagcttgaaaagcatgcttcgagaatagctagagaaatagaaggagaagataccaaagatattcatcttgcagaggagagaggcttattcctgggtgatgacttggaccatgatgaagagataaaatattcagcagtgcgtagagacaccgataacagcaagtacaagccaccatttactaatgtcccaagcagtacataccaagttgatttgtttaacaggacagtcaatattgttcccaaggatttgctgggatgttcatcaacaatggatgaagaatcatcatcccacatatttgatgatattgatgcatctgccactattcaaaccaatagcgttagacagccaacatctgattaccttccagatagactctcgtccaatgatgaaaacaggtactatctcccatgatgaagtttctatttattgttgaccagtagctaaactcaatctagccagctgcatatcgatttagctttagttagggggtgtttgggactgctccaggttccagctccaacgtgttgtagtttataatttaaatttaaatagttaaaaaatatttttaatctaaagaatacatggaatgacctacctaaatgtcttac

SEQ ID NO: 45659 - DNA, 1608 bp, Zea Mays
cccgattcgtttggagtttggacttccttccgcctccccgaccgcggctgttgcaacgatccaaccccacctcccgccgccaccgcccccgcccccacccccgcgccttcgtcgtcaaggccggggttcctgcggccgcgtctccctcccctcgcccgtacccacacttgattaacgtgtcagctcgctaccggaggccctcgccaactcgactcgtactcccgttcccggcggcgatccggccggcaccggaaccctagggttccaacgaagcaggaaattaggaatgatgagtcatcaacagcaaattgcccctcctagtaggggttctgtgaatggattcccccatctaaagctggatagggtgggtagtggaaggcatgaaagtaaaatcgtgaggtcatcatctggcggttttaccaattcaggaaatgacatcaaactagggcatggaagccattcgagggaccgactaatctatgttctaacacaacttattgggcatcatgtcaacgtgcatgtgaaaaatggctctataatatctggaattttccatgcaacaaactctgacaaagacttcggagtagtcttaaaaatggctcaggtcataaaggatggttctgccagaggacaaagatttgcttctgatgttgtaaagaaacctgagactatgataataccagcaagggagcttgtacaagtttttgccaaggatgtagcacttggcggtgatgagctgccaaaaggtcctggtcatgacaaaaggaaggacttgctgattgattctgccatttcccgctctcattaccttgaagagagggaacttgagcgctgggcaccagatgaaggagattcagagtgtatcgaactggagaagtatgacagaaagggaaataggagctgggatcagttcgaaaccaatgcagccttgtttggggtaaagagtacattcaatgaagaaatttataccacaaagcttgagagaggtcctcatatgagagagcttgaaaagcatgcttcgagaatagctagagaaatagaaggagaagataccaaagatattcatcttgcagaggagagaggcttattcctgggtgatgacttggaccatgatgaagagataaaatattcagcagtgcgtagagacaccgataacagcaagtacaagccaccatttactaatgtcccaagcagtacataccaagttgatttgtttaacaggacagtcaatattgttcccaaggatttgctgggatgttcatcaacaatggatgaagaatcatcatcccacatatttgatgatattgatgcatctgccactattcaaaccaatagcgttagacagccaacatctgattaccttccagatagactctcgtccaatgatgaaaacaggtactatctcccatgatgaagtttctatttattgttgaccagtagctaaactcaatctagccagctgcatatcgatttagctttagttagggggtgtttgggactgctccaggttccagctccaacgtgttgtagtttataatttaaatttaaatagttaaaaaatatttttaatctaaagaatacatggaatgacctacctaaatgtcttac

SEQ ID NO: 45660 - DNA, 1600 bp, Zea Mays
cttcaaagaggctctacgcctaaagctcgatgcctacaaggccatcttcgagaatatatgattcatgcatgtgtgcaaatgctcccatttttactggcattgagcaattgccacaattttcacatctacaagaattaattggtctaacagctactgattctgttgaacttggagatatcgtggaccctcctgttatccgaactgctacttctatccttcctcttggatggactggactccctggtggtaaaaatgctgagccactgaaagttgatataattgggcatgacctacaaatgtgcactcttttccaggcacaaataaatggaaactggtattccacagtaatagagactctaccatcagctacttcatactcaccaaatggagaactgcaacccacattacagaaaatgcggattcttgttggacaaccactaaagcagcctccaaattacattagtggggatttcatgattcctgtgatggcaggtgctgattcaacacccgactttggatttgaatcattttttgaagataaagattgctgcaagggtttgagtggatttctaatatatgggacaagtgattttgtaactgtacgtaaagaggtccacgttaggactcggagagtgcgattgcttggattagagggggctggcaaaacatccctgcttaaagcaatgttaggacaagttaaagaaagaaatagcactgttcttgaatgcatacatgtcgatttgcatggcaagggaatatcaaatggattgtgctacatagattcgacaacggtaaacttgcaggagctacctttggaggttgggcggttcaaagaagaactgttgttaggactccatgatatcagcaggaagactgaccttgttattgcggtgcataacctagcacaccgaattccacagtatcaacggtccaatacttctcagcctcagcctgctctttcacttctcttggatgaagctaaggcgctaagcattccttggattcttgcaataaccaacaaattctctgttagtgcgcatgagcagaacagattgatcagctcagctatggaagcatatcaagtttctcctgagatgacaaaagttgttaactcttccccatttctgatgccaagtgctagaaacagtttgcagcagatcagatcagctactgggaagttgaagaaggatccagcaaatagatctggttatcttcctgtaaactttggattgtcatcatttcagaggaaggacattgttatgcatgtggagggtgttagttcccttcgtcaacttgtacatcaagtagtcctcaacaatgaagaaacagcatttgaggaacttgctcgtgagagattgttgaaggagctagcgtcagagaaagcagcgtccctgcaagtgaagcagaagccccggaaaagagatggctctgttacagctgctgctgtaggtgcatctctgggcgcgggcctgggaattgtaatggctgtgataatgggggcagcatcagcccttcgaaagccgtgattcatgtttctgaagaatgcgtctatattgagggcaatagaggataatgagttgaggcgagaggcaagacgatc

SEQ ID NO: 45661 - DNA, 1747 bp, Zea Mays
taaaaagcaccctgctatagtcaccttctgcccagaagagcggtaagatcaaaatggtggtggtggactagctcgccgaggtggaaaatttggtgaagcagaatatatgattcatgcatgtgtgcaaatgctcccatttttactggcattgagcaattgccacaattttcacatctacaagaattaattggtctaacagctactgattctgttgaacttggagatatcgtggaccctcctgttatccgaactgctacttctatccttcctcttggatggactggactccctggtggtaaaaatgctgagccactgaaagttgatataattgggcatgacctacaaatgtgcactcttttccaggcacaaataaatggaaactggtattccacagtaatagagactctaccatcagctacttcatactcaccaaatggagaactgcaacccacattacagaaaatgcggattcttgttggacaaccactaaagcagcctccaaattacattagtggggatttcatgattcctgtgatggcaggtgctgattcaacacccgactttggatttgaatcattttttgaagataaagattgctgcaagggtttgagtggatttctaatatatgggacaagtgattttgtaactgtacgtaaagaggtccacgttaggactcggagagtgcgattgcttggattagaggtatctccatgtatttaggtattgttataatatgtccctttacttatgttctatggaaatgctacatatagtatatatttgtctgatgcagggggctggcaaaacatccctgcttaaagcaatgttaggacaagttaaagaaagaaatagcactgttcttgaatgcatacatgtcgatttgcatggcaagggaatatcaaatggattgtgctacatagattcgacaacggtaaacttgcaggagctacctttggaggttgggcggttcaaagaagaactgttgttaggactccatgatatcagcaggaagactgaccttgttattgcggtgcataacctagcacaccgaattccacagtatcaacggtccaatacttctcagcctcagcctgctctttcacttctcttggatgaagctaaggcgctaagcattccttggattcttgcaataaccaacaaattctctgttagtgcgcatgagcagaacagattgatcagctcagctatggaagcatatcaagtttctcctgagatgacaaaagttgttaactcttccccatttctgatgccaagtgctagaaacagtttgcagcagatcagatcagctactgggaagttgaagaaggatccagcaaatagatctggttatcttcctgtaaactttggattgtcatcatttcagaggaaggacattgttatgcatgtggagggtgttagttcccttcgtcaacttgtacatcaagtagtcctcaacaatgaagaaacagcatttgaggaacttgctcgtgagagattgttgaaggagctagcgtcagagaaagcagcgtccctgcaagtgaagcagaagccccggaaaagagatggctctgttacagctgctgctgtaggtgcatctctgggcgcgggcctgggaattgtaatggctgtgataatgggggcagcatcagcccttcgaaagccgtgattcatgtattctgtttctgaagaatgcgtctatattgagggcaatagaggataatgagttgaggcgagaggcaagacgatc

SEQ ID NO: 45662 - DNA, 2829 bp, Zea Mays
caaaaagctaaagcccacttagaggtatctgttagcagaggctggtgacaccctatttgctacatttattggcacaaagcagtacaaagatattattgctgatgtgaacatattccaagggaccttatttcatgaagatactgctcatgatttagctcctgatgttgaccctgaacaaaatgatacccaaaagggtgaggaaagccatgggaaatcttaccgagaaacatcaaagaagctaagaaaaccaaaacctgcagtgcaccgaggtttcttggctcgtgctaatggaattccagcactggacctatacaatcttgcacagaaaagaaacaggaaacttgttctttgtggacactcacttggtggggcggtaggtacccgtagataatatacattatctcattatttgctcatacatcttcaatacaactgcaggttgctgcattggctactcttgcaattttgagagttattgctaccacttcatctgaagaggataacaggcttcatgtgaagtgcatcaccttctctcagccacctgttgggaatgctgctttaagagattatgttcacaaaagaggatggcaggactacttcaaatcctattgtattccagaagacttggtaccacgcattctatctccagcttattttcaccactacaatgcccagacacctgaagcatcttttacaaataaaactgatgtgaaatctgaagaagttatggaggcaagtggggaaaggcccagaggaaacaacagggaacacctcgttctcggtgttggtccagtgcaaaagtcattttggaggctttcaaaacttgttcccttggaaggggtgcggaaaagcttaagtgcaattcaaaaacaaacaaatgtttttgggaaggcaccatcacaattggatagctatttgcaatcaaaggttgatgaatcagaagaaccacctcaatctcttgagattcaagaaagttcacaaggaattgctcttacccctttatcggataaagatggagggaacactgaagataataataggactgagaaaataaatgcatctgaagcaggggggtctaaacgctggagcagggtaccttctttgccttcatatgtgccatttggtgagctttacctattgggagattcatcagtcaatacactttcagattcagaatactccaagatgacgtcggcatgtgcaggtgcagtctgttatatcggagttaagagagcgtttgcagtcgcactcaatgaagtcctatagggctagatttcaaaaaatatatgattcatgcatgtgtgcaaatgctcccatttttactggcattgagcaattgccacaattttcacatctacaagaattaattggtctaacagctactgattctgttgaacttggagatatcgtggaccctcctgttatccgaactgctacttctatccttcctcttggatggactggactccctggtggtaaaaatgctgagccactgaaagttgatataattgggcatgacctacaaatgtgcactcttttccaggcacaaataaatggaaactggtattccacagtaatagagactctaccatcagctacttcatactcaccaaatggagaactgcaacccacattacagaaaatgcggattcttgttggacaaccactaaagcagcctccaaattacattagtggggatttcatgattcctgtgatggcaggtgctgattcaacacccgactttggatttgaatcattttttgaagataaagattgctgcaagggtttgagtggatttctaatatatgggacaagtgattttgtaactgtacgtaaagaggtccacgttaggactcggagagtgcgattgcttggattagagggggctggcaaaacatccctgcttaaagcaatgttaggacaagttaaagaaagaaatagcactgttcttgaatgcatacatgtcgatttgcatggcaagggaatatcaaatggattgtgctacatagattcgacaacggtaaacttgcaggagctacctttggaggttgggcggttcaaagaagaactgttgttaggactccatgatatcagcaggaagactgaccttgttattgcggtgcataacctagcacaccgaattccacagtatcaacggtccaatacttctcagcctcagcctgctctttcacttctcttggatgaagctaaggcgctaagcattccttggattcttgcaataaccaacaaattctctgttagtgcgcatgagcagaacagattgatcagctcagctatggaagcatatcaagtttctcctgagatgacaaaagttgttaactcttccccatttctgatgccaagtgctagaaacagtttgcagcagatcagatcagctactgggaagttgaagaaggatccagcaaatagatctggttatcttcctgtaaactttggattgtcatcatttcagaggaaggacattgttatgcatgtggagggtgttagttcccttcgtcaacttgtacatcaagtagtcctcaacaatgaagaaacagcatttgaggaacttgctcgtgagagattgttgaaggagctagcgtcagagaaagcagcgtccctgcaagtgaagcagaagccccggaaaagagatggctctgttacagctgctgctgtaggtgcatctctgggcgcgggcctgggaattgtaatggctgtgataatgggggcagcatcagcccttcgaaagccgtgattcatgtttctgaagaatgcgtctatattgagggcaatagaggataatgagttgaggcgagaggcaagacgatc

SEQ ID NO: 45663 - DNA, 3078 bp, Zea Mays
ccaaaaagctaaagcccacttagaggtatctgttagcagaggctggtgacaccctatttgctacatttattggcacaaagcagtacaaagatattattgctgatgtgaacatattccaagggaccttatttcatgaagatactgctcatgatttagctcctgatgttgaccctgaacaaaatgatacccaaaagggtgaggaaagccatgggaaatcttaccgagaaacatcaaagaagctaagaaaaccaaaacctgcagtgcaccgaggtttcttggctcgtgctaatggaattccagcactggacctatacaatcttgcacagaaaagaaacaggaaacttgttctttgtggacactcacttggttgctgcattggctactcttgcaattttgagagttattgctaccacttcatctgaagaggataacaggcttcatgtgaagtgcatcaccttctctcagccacctgttgggaatgctgctttaagagattatgttcacaaaagaggatggcaggactacttcaaatcctattgtattccagaagacttggtaccacgcattctatctccagcttattttcaccactacaatgcccagacacctgaagcatcttttacaaataaaactgatgtgaaatctgaagaagttatggaggcaagtggggaaaggcccagaggaaacaacagggaacacctcgttctcggtgttggtccagtgcaaaagtcattttggaggctttcaaaacttgttcccttggaaggggtgcggaaaagcttaagtgcaattcaaaaacaaacaaatgtttttgggaaggcaccatcacaattggatagctatttgcaatcaaaggttgatgaatcagaagaaccacctcaatctcttgagattcaagaaagttcacaaggaattgctcttacccctttatcggataaagatggagggaacactgaagataataataggactgagaaaataaatgcatctgaagcaggggggtctaaacgctggagcagggtaccttctttgccttcatatgtgccatttggtgagctttacctattgggagattcatcagtcaatacactttcagattcagaatactccaagatgacgtcggtgcagtctgttatatcggagttaagagagcgtttgcagtcgcactcaatgaagtcctatagggctagatttcaaaaaatatatgattcatgcatgtgtgcaaatgctcccatttttactggcattgagcaattgccacaattttcacatctacaagaattaattggtctaacagctactgattctgttgaacttggagatatcgtggaccctcctgttatccgaactgctacttctatccttcctcttggatggactggactccctggtggtaaaaatgctgagccactgaaagttgatataattgggcatgacctacaaatgtgcactcttttccaggcacaaataaatggaaactggtattccacagtaatagagactctaccatcagctacttcatactcaccaaatggagaactgcaacccacattacagaaaatgcggattcttgttggacaaccactaaagcagcctccaaattacattagtggggatttcatgattcctgtgatggcaggtgctgattcaacacccgactttggatttgaatcattttttgaagataaagattgctgcaagggtttgagtggatttctaatatatgggacaagtgattttgtaactgtacgtaaagaggtccacgttaggactcggagagtgcgattgcttggattagagggggctggcaaaacatccctgcttaaagcaatgttaggacaagttaaagaaagaaatagcactgttcttgaatgcatacatgtcgatttgcatggcaagggaatatcaaatggattgtgctacatagattcgacaacggtaaacttgcaggagctacctttggaggttgggcggttcaaagaagaactgttgttaggactccatgatatcagcaggaagactgaccttgttattgcggtgcataacctagcacaccgaattccacagtatcaacggtccaatacttctcagcctcagcctgctctttcacttctcttggatgaagctaaggcgctaagcattccttggattcttgcaataaccaacaaattctctgttagtgcgcatgagcagaacagattgatcagctcagctatggaagcatatcaagtttctcctgagatgacaaaagttgttaactcttccccatttctgatgccaagtgctagaaacagtttgcagcagatcagatcagctactgggaagttgaagaaggatccagcaaatagatctggttatcttcctgtaaactttggattgtcatcatttcagaggaaggacattgttatgcatgtggagggtgttagttcccttcgtcaacttgtacatcaagtagtcctcaacaatgaagaaacagcatttgaggaacttgctcgtgagagattgttgaaggagctagcgtcagagaaagcagcgtccctgcaagtgaagcagaagccccggaaaagagatggctctgttacagctgctgctgtaggtgcatctctgggcgcgggcctgggaattgtaatggctgtgataatgggggcagcatcagcccttcgaaagccgtgattcatgtattcttttgatccattatttacttcttgatttaaggatgtctgaacaaaagcactagtgtaggcatgaaaaatgaaattttagggcagaatagttagctgataccgtagtgccacattttggctgtgtatagaatgtaggttgagccttttttttgctgatctgaattttgttgtgttactggagtatggcttggatatgttctacatcatgttttaatttagttataaatctgtatcatgtctatgaccactagccaatttactatctttttttattattttattcttttctaacttggctaaaaattatattaaaattacaaagcaggtttctgaagaatgcgtctatattgagggcaatagaggataatgagttgaggcgagaggcaagacgatc

SEQ ID NO: 45664 - DNA, 3168 bp, Zea Mays
ccgacctcacgtcctcaccccacgccaatggcggccgctctggcgagccgcgtggagagttgggtgcgggaccaggcggcgcggctgcagccctgggcggcggcgctgccgcaggcgccgcggtggccctggcccccgccgcggcccgcctggccgtggcccggggaccgcagacgccagcgggaacgcatgttccgggaggagtacgaacgtcgtagcagacagctccgcgagctctgccgcgctgtccgcgtcgacaccgtagccgagctccaggagttgctctgcgccatggtactcgccgagtgcgtctacaagagacctgtttctgagatgatgagatatatcaacaagtttaagtctgattttggtggaaatgttgtgtccctggagcgtgttcaaccatccttggatcatgtaccacatcggtatctgttagcagaggctggtgacaccctatttgctacatttattggcacaaagcagtacaaagatattattgctgatgtgaacatattccaagggaccttatttcatgaagatactgctcatgatttagctcctgatgttgaccctgaacaaaatgatacccaaaagggtgaggaaagccatgggaaatcttaccgagaaacatcaaagaagctaagaaaaccaaaacctgcagtgcaccgaggtttcttggctcgtgctaatggaattccagcactggacctatacaatcttgcacagaaaagaaacaggaaacttgttctttgtggacactcacttggtggggcggttgctgcattggctactcttgcaattttgagagttattgctaccacttcatctgaagaggataacaggcttcatgtgaagtgcatcaccttctctcagccacctgttgggaatgctgctttaagagattatgttcacaaaagaggatggcaggactacttcaaatcctattgtattccagaagacttggtaccacgcattctatctccagcttattttcaccactacaatgcccagacacctgaagcatcttttacaaataaaactgatgtgaaatctgaagaagttatggaggcaagtggggaaaggcccagaggaaacaacagggaacacctcgttctcggtgttggtccagtgcaaaagtcattttggaggctttcaaaacttgttcccttggaaggggtgcggaaaagcttaagtgcaattcaaaaacaaacaaatgtttttgggaaggcaccatcacaattggatagctatttgcaatcaaaggttgatgaatcagaagaaccacctcaatctcttgagattcaagaaagttcacaaggaattgctcttacccctttatcggataaagatggagggaacactgaagataataataggactgagaaaataaatgcatctgaagcaggggggtctaaacgctggagcagggtaccttctttgccttcatatgtgccatttggtgagctttacctattgggagattcatcagtcaatacactttcagattcagaatactccaagatgacgtcggcatgtgcaggtgcagtctgttatatcggagttaagagagcgtttgcagtcgcactcaatgaagtcctatagggctagatttcaaaaaatatatgattcatgcatgtgtgcaaatgctcccatttttactggcattgagcaattgccacaattttcacatctacaagaattaattggtctaacagctactgattctgttgaacttggagatatcgtggaccctcctgttatccgaactgctacttctatccttcctcttggatggactggactccctggtggtaaaaatgctgagccactgaaagttgatataattgggcatgacctacaaatgtgcactcttttccaggcacaaataaatggaaactggtattccacagtaatagagactctaccatcagctacttcatactcaccaaatggagaactgcaacccacattacagaaaatgcggattcttgttggacaaccactaaagcagcctccaaattacattagtggggatttcatgattcctgtgatggcaggtgctgattcaacacccgactttggatttgaatcattttttgaagataaagattgctgcaagggtttgagtggatttctaatatatgggacaagtgattttgtaactgtacgtaaagaggtccacgttaggactcggagagtgcgattgcttggattagagggggctggcaaaacatccctgcttaaagcaatgttaggacaagttaaagaaagaaatagcactgttcttgaatgcatacatgtcgatttgcatggcaagggaatatcaaatggattgtgctacatagattcgacaacggtaaacttgcaggagctacctttggaggttgggcggttcaaagaagaactgttgttaggactccatgatatcagcaggaagactgaccttgttattgcggtgcataacctagcacaccgaattccacagtatcaacggtccaatacttctcagcctcagcctgctctttcacttctcttggatgaagctaaggcgctaagcattccttggattcttgcaataaccaacaaattctctgttagtgcgcatgagcagaacagattgatcagctcagctatggaagcatatcaagtttctcctgagatgacaaaagttgttaactcttccccatttctgatgccaagtgctagaaacagtttgcagcagatcagatcagctactgggaagttgaagaaggatccagcaaatagatctggttatcttcctgtaaactttggattgtcatcatttcagaggaaggacattgttatgcatgtggagggtgttagttcccttcgtcaacttgtacatcaagtagtcctcaacaatgaagaaacagcatttgaggaacttgctcgtgagagattgttgaaggagctagcgtcagagaaagcagcgtccctgcaagtgaagcagaagccccggaaaagagatggctctgttacagctgctgctgtaggtgcatctctgggcgcgggcctgggaattgtaatggctgtgataatgggggcagcatcagcccttcgaaagccgtgattcatgtttctgaagaatgcgtctatattgagggcaatagaggataatgagttgaggcgagaggcaagacgatc

SEQ ID NO: 45665 - DNA, 3412 bp, Zea Mays
ccgacctcacgtcctcaccccacgccaatggcggccgctctggcgagccgcgtggagagttgggtgcgggaccaggcggcgcggctgcagccctgggcggcggcgctgccgcaggcgccgcggtggccctggcccccgccgcggcccgcctggccgtggcccggggaccgcagacgccagcgggaacgcatgttccgggaggagtacgaacgtcgtagcagacagctccgcgagctctgccgcgctgtccgcgtcgacaccgtagccgagctccaggagttgctctgcgccatggtactcgccgagtgcgtctacaagagacctgtttctgagatgatgagatatatcaacaagtttaagtctgattttggtggaaatgttgtgtccctggagcgtgttcaaccatccttggatcatgtaccacatcggtatctgttagcagaggctggtgacaccctatttgctacatttattggcacaaagcagtacaaagatattattgctgatgtgaacatattccaagggaccttatttcatgaagatactgctcatgatttagctcctgatgttgaccctgaacaaaatgatacccaaaagggtgaggaaagccatgggaaatcttaccgagaaacatcaaagaagctaagaaaaccaaaacctgcagtgcaccgaggtttcttggctcgtgctaatggaattccagcactggacctatacaatcttgcacagaaaagaaacaggaaacttgttctttgtggacactcacttggtggggcggttgctgcattggctactcttgcaattttgagagttattgctaccacttcatctgaagaggataacaggcttcatgtgaagtgcatcaccttctctcagccacctgttgggaatgctgctttaagagattatgttcacaaaagaggatggcaggactacttcaaatcctattgtattccagaagacttggtaccacgcattctatctccagcttattttcaccactacaatgcccagacacctgaagcatcttttacaaataaaactgatgtgaaatctgaagaagttatggaggcaagtggggaaaggcccagaggaaacaacagggaacacctcgttctcggtgttggtccagtgcaaaagtcattttggaggctttcaaaacttgttcccttggaaggggtgcggaaaagcttaagtgcaattcaaaaacaaacaaatgtttttgggaaggcaccatcacaattggatagctatttgcaatcaaaggttgatgaatcagaagaaccacctcaatctcttgagattcaagaaagttcacaaggaattgctcttacccctttatcggataaagatggagggaacactgaagataataataggactgagaaaataaatgcatctgaagcaggggggtctaaacgctggagcagggtaccttctttgccttcatatgtgccatttggtgagctttacctattgggagattcatcagtcaatacactttcagattcagaatactccaagatgacgtcgaatatatgattcatgcatgtgtgcaaatgctcccatttttactggcattgagcaattgccacaattttcacatctacaagaattaattggtctaacagctactgattctgttgaacttggagatatcgtggaccctcctgttatccgaactgctacttctatccttcctcttggatggactggactccctggtggtaaaaatgctgagccactgaaagttgatataattgggcatgacctacaaatgtgcactcttttccaggcacaaataaatggaaactggtattccacagtaatagagactctaccatcagctacttcatactcaccaaatggagaactgcaacccacattacagaaaatgcggattcttgttggacaaccactaaagcagcctccaaattacattagtggggatttcatgattcctgtgatggcaggtgctgattcaacacccgactttggatttgaatcattttttgaagataaagattgctgcaagggtttgagtggatttctaatatatgggacaagtgattttgtaactgtacgtaaagaggtccacgttaggactcggagagtgcgattgcttggattagagggggctggcaaaacatccctgcttaaagcaatgttaggacaagttaaagaaagaaatagcactgttcttgaatgcatacatgtcgatttgcatggcaagggaatatcaaatggattgtgctacatagattcgacaacggtaaacttgcaggagctacctttggaggttgggcggttcaaagaagaactgttgttaggactccatgatatcagcaggaagactgaccttgttattgcggtgcataacctagcacaccgaattccacagtatcaacggtccaatacttctcagcctcagcctgctctttcacttctcttggatgaagctaaggcgctaagcattccttggattcttgcaataaccaacaaattctctgttagtgcgcatgagcagaacagattgatcagctcagctatggaagcatatcaagtttctcctgagatgacaaaagttgttaactcttccccatttctgatgccaagtgctagaaacagtttgcagcagatcagatcagctactgggaagttgaagaaggatccagcaaatagatctggttatcttcctgtaaactttggattgtcatcatttcagaggaaggacattgttatgcatgtggagggtgttagttcccttcgtcaacttgtacatcaagtagtcctcaacaatgaagaaacagcatttgaggaacttgctcgtgagagattgttgaaggagctagcgtcagagaaagcagcgtccctgcaagtgaagcagaagccccggaaaagagatggctctgttacagctgctgctgtaggtgcatctctgggcgcgggcctgggaattgtaatggctgtgataatgggggcagcatcagcccttcgaaagccgtgattcatgtattcttttgatccattatttacttcttgatttaaggatgtctgaacaaaagcactagtgtaggcatgaaaaatgaaattttagggcagaatagttagctgataccgtagtgccacattttggctgtgtatagaatgtaggttgagccttttttttgctgatctgaattttgttgtgttactggagtatggcttggatatgttctacatcatgttttaatttagttataaatctgtatcatgtctatgaccactagccaatttactatctttttttattattttattcttttctaacttggctaaaaattatattaaaattacaaagcaggtttctgaagaatgcgtctatattgagggcaatagaggataatgagttgaggcgagaggcaagacgatc

SEQ ID NO: 45666 - DNA, 3518 bp, Zea Mays
ccgacctcacgtcctcaccccacgccaatggcggccgctctggcgagccgcgtggagagttgggtgcgggaccaggcggcgcggctgcagccctgggcggcggcgctgccgcaggcgccgcggtggccctggcccccgccgcggcccgcctggccgtggcccggggaccgcagacgccagcgggaacgcatgttccgggaggagtacgaacgtcgtagcagacagctccgcgagctctgccgcgctgtccgcgtcgacaccgtagccgagctccaggagttgctctgcgccatggtactcgccgagtgcgtctacaagagacctgtttctgagatgatgagatatatcaacaagtttaagtctgattttggtggaaatgttgtgtccctggagcgtgttcaaccatccttggatcatgtaccacatcggtaaccaaaaagctaaagcccacttagaggtatctgttagcagaggctggtgacaccctatttgctacatttattggcacaaagcagtacaaagatattattgctgatgtgaacatattccaagggaccttatttcatgaagatactgctcatgatttagctcctgatgttgaccctgaacaaaatgatacccaaaagggtgaggaaagccatgggaaatcttaccgagaaacatcaaagaagctaagaaaaccaaaacctgcagtgcaccgaggtttcttggctcgtgctaatggaattccagcactggacctatacaatcttgcacagaaaagaaacaggaaacttgttctttgtggacactcacttggtggggcggttgctgcattggctactcttgcaattttgagagttattgctaccacttcatctgaagaggataacaggcttcatgtgaagtgcatcaccttctctcagccacctgttgggaatgctgctttaagagattatgttcacaaaagaggatggcaggactacttcaaatcctattgtattccagaagacttggtaccacgcattctatctccagcttattttcaccactacaatgcccagacacctgaagcatcttttacaaataaaactgatgtgaaatctgaagaagttatggaggcaagtggggaaaggcccagaggaaacaacagggaacacctcgttctcggtgttggtccagtgcaaaagtcattttggaggctttcaaaacttgttcccttggaaggggtgcggaaaagcttaagtgcaattcaaaaacaaacaaatgtttttgggaaggcaccatcacaattggatagctatttgcaatcaaaggttgatgaatcagaagaaccacctcaatctcttgagattcaagaaagttcacaaggaattgctcttacccctttatcggataaagatggagggaacactgaagataataataggactgagaaaataaatgcatctgaagcaggggggtctaaacgctggagcagggtaccttctttgccttcatatgtgccatttggtgagctttacctattgggagattcatcagtcaatacactttcagattcagaatactccaagatgacgtcggtgcagtctgttatatcggagttaagagagcgtttgcagtcgcactcaatgaagtcctatagggctagatttcaaaaaatatatgattcatgcatgtgtgcaaatgctcccatttttactggcattgagcaattgccacaattttcacatctacaagaattaattggtctaacagctactgattctgttgaacttggagatatcgtggaccctcctgttatccgaactgctacttctatccttcctcttggatggactggactccctggtggtaaaaatgctgagccactgaaagttgatataattgggcatgacctacaaatgtgcactcttttccaggcacaaataaatggaaactggtattccacagtaatagagactctaccatcagctacttcatactcaccaaatggagaactgcaacccacattacagaaaatgcggattcttgttggacaaccactaaagcagcctccaaattacattagtggggatttcatgattcctgtgatggcaggtgctgattcaacacccgactttggatttgaatcattttttgaagataaagattgctgcaagggtttgagtggatttctaatatatgggacaagtgattttgtaactgtacgtaaagaggtccacgttaggactcggagagtgcgattgcttggattagagggggctggcaaaacatccctgcttaaagcaatgttaggacaagttaaagaaagaaatagcactgttcttgaatgcatacatgtcgatttgcatggcaagggaatatcaaatggattgtgctacatagattcgacaacggtaaacttgcaggagctacctttggaggttgggcggttcaaagaagaactgttgttaggactccatgatatcagcaggaagactgaccttgttattgcggtgcataacctagcacaccgaattccacagtatcaacggtccaatacttctcagcctcagcctgctctttcacttctcttggatgaagctaaggcgctaagcattccttggattcttgcaataaccaacaaattctctgttagtgcgcatgagcagaacagattgatcagctcagctatggaagcatatcaagtttctcctgagatgacaaaagttgttaactcttccccatttctgatgccaagtgctagaaacagtttgcagcagatcagatcagctactgggaagttgaagaaggatccagcaaatagatctggttatcttcctgtaaactttggattgtcatcatttcagaggaaggacattgttatgcatgtggagggtgttagttcccttcgtcaacttgtacatcaagtagtcctcaacaatgaagaaacagcatttgaggaacttgctcgtgagagattgttgaaggagctagcgtcagagaaagcagcgtccctgcaagtgaagcagaagccccggaaaagagatggctctgttacagctgctgctgtaggtgcatctctgggcgcgggcctgggaattgtaatggctgtgataatgggggcagcatcagcccttcgaaagccgtgattcatgtattcttttgatccattatttacttcttgatttaaggatgtctgaacaaaagcactagtgtaggcatgaaaaatgaaattttagggcagaatagttagctgataccgtagtgccacattttggctgtgtatagaatgtaggttgagccttttttttgctgatctgaattttgttgtgttactggagtatggcttggatatgttctacatcatgttttaatttagttataaatctgtatcatgtctatgaccactagccaatttactatctttttttattattttattcttttctaacttggctaaaaattatattaaaattacaaagcaggtttctgaagaatgcgtctatattgagggcaatagaggataatgagttgaggcgagaggcaagacgatc

SEQ ID NO: 45667 - DNA, 4123 bp, Zea Mays
ccgacctcacgtcctcaccccacgccaatggcggccgctctggcgagccgcgtggagagttgggtgcgggaccaggcggcgcggctgcagccctgggcggcggcgctgccgcaggcgccgcggtggccctggcccccgccgcggcccgcctggccgtggcccggggaccgcagacgccagcgggaacgcatgttccgggaggagtacgaacgtcgtagcagacagctccgcgagctctgccgcgctgtccgcgtcgacaccgtagccgagctccaggagttgctctgcgccatggtactcgccgagtgcgtctacaagagacctgtttctgagatgatgagatatatcaacaagtttaagtctgattttggtggaaatgttgtgtccctggagcgtgttcaaccatccttggatcatgtaccacatcggtaaccaaaaagctaaagcccacttagaggttcaatatttgttgtggccgttctttgcaaaaagtttgtaatcaaggactacaatcaaatacaattgagctattttttatgcaactctaatctcaagtaggtcaagtaaccatgtacaatccttgctttatctaagctcccttagataaagacacagaagggcagacttggtgcagtggtgagagctgtctcaccgagtcaccaggtagtggtttgaagcaacccctctgcatttgcaggggaaaggcttccctcagtttatcccttttctagataccagccatgtgggagcttctgccactcggtttgcctgctcttagataaagacacaaaaaatagtcctttctgtaattactgtgagtatggggcaaattatgttatgggatgtcctaaatgcgtgatctttgctggaaagcaaatagtcaatctaaaaaattacttctgctcctggacaatcctgtaggttggatctttacacaatatctatatatttatgctgattatccaatatccattccattccttattttaagtagtccaaataatgacaatctgcacatgattctgctgtattttttttatataaatccaatcactggtgaaattatgtaggtatctgttagcagaggctggtgacaccctatttgctacatttattggcacaaagcagtacaaagatattattgctgatgtgaacatattccaagggaccttatttcatgaagatactgctcatgatttagctcctgatgttgaccctgaacaaaatgatacccaaaagggtgaggaaagccatgggaaatcttaccgagaaacatcaaagaagctaagaaaaccaaaacctgcagtgcaccgaggtttcttggctcgtgctaatggaattccagcactggacctatacaatcttgcacagaaaagaaacaggaaacttgttctttgtggacactcacttggttgctgcattggctactcttgcaattttgagagttattgctaccacttcatctgaagaggataacaggcttcatgtgaagtgcatcaccttctctcagccacctgttgggaatgctgctttaagagattatgttcacaaaagaggatggcaggactacttcaaatcctattgtattccagaagacttggtaccacgcattctatctccagcttattttcaccactacaatgcccagacacctgaagcatcttttacaaataaaactgatgtgaaatctgaagaagttatggaggcaagtggggaaaggcccagaggaaacaacagggaacacctcgttctcggtgttggtccagtgcaaaagtcattttggaggctttcaaaacttgttcccttggaaggggtgcggaaaagcttaagtgcaattcaaaaacaaacaaatgtttttgggaaggcaccatcacaattggatagctatttgcaatcaaaggttgatgaatcagaagaaccacctcaatctcttgagattcaagaaagttcacaaggaattgctcttacccctttatcggataaagatggagggaacactgaagataataataggactgagaaaataaatgcatctgaagcaggggggtctaaacgctggagcagggtaccttctttgccttcatatgtgccatttggtgagctttacctattgggagattcatcagtcaatacactttcagattcagaatactccaagatgacgtcggtgcagtctgttatatcggagttaagagagcgtttgcagtcgcactcaatgaagtcctatagggctagatttcaaaaaatatatgattcatgcatgtgtgcaaatgctcccatttttactggcattgagcaattgccacaattttcacatctacaagaattaattggtctaacagctactgattctgttgaacttggagatatcgtggaccctcctgttatccgaactgctacttctatccttcctcttggatggactggactccctggtggtaaaaatgctgagccactgaaagttgatataattgggcatgacctacaaatgtgcactcttttccaggcacaaataaatggaaactggtattccacagtaatagagactctaccatcagctacttcatactcaccaaatggagaactgcaacccacattacagaaaatgcggattcttgttggacaaccactaaagcagcctccaaattacattagtggggatttcatgattcctgtgatggcaggtgctgattcaacacccgactttggatttgaatcattttttgaagataaagattgctgcaagggtttgagtggatttctaatatatgggacaagtgattttgtaactgtacgtaaagaggtccacgttaggactcggagagtgcgattgcttggattagagggggctggcaaaacatccctgcttaaagcaatgttaggacaagttaaagaaagaaatagcactgttcttgaatgcatacatgtcgatttgcatggcaagggaatatcaaatggattgtgctacatagattcgacaacggtaaacttgcaggagctacctttggaggttgggcggttcaaagaagaactgttgttaggactccatgatatcagcaggaagactgaccttgttattgcggtgcataacctagcacaccgaattccacagtatcaacggtccaatacttctcagcctcagcctgctctttcacttctcttggatgaagctaaggcgctaagcattccttggattcttgcaataaccaacaaattctctgttagtgcgcatgagcagaacagattgatcagctcagctatggaagcatatcaagtttctcctgagatgacaaaagttgttaactcttccccatttctgatgccaagtgctagaaacagtttgcagcagatcagatcagctactgggaagttgaagaaggatccagcaaatagatctggttatcttcctgtaaactttggattgtcatcatttcagaggaaggacattgttatgcatgtggagggtgttagttcccttcgtcaacttgtacatcaagtagtcctcaacaatgaagaaacagcatttgaggaacttgctcgtgagagattgttgaaggagctagcgtcagagaaagcagcgtccctgcaagtgaagcagaagccccggaaaagagatggctctgttacagctgctgctgtaggtgcatctctgggcgcgggcctgggaattgtaatggctgtgataatgggggcagcatcagcccttcgaaagccgtgattcatgtattcttttgatccattatttacttcttgatttaaggatgtctgaacaaaagcactagtgtaggcatgaaaaatgaaattttagggcagaatagttagctgataccgtagtgccacattttggctgtgtatagaatgtaggttgagccttttttttgctgatctgaattttgttgtgttactggagtatggcttggatatgttctacatcatgttttaatttagttataaatctgtatcatgtctatgaccactagccaatttactatctttttttattattttattcttttctaacttggctaaaaattatattaaaattacaaagcaggtttctgaagaatgcgtctatattgagggcaatagaggataatgagttgaggcgagaggcaagacgatc

SEQ ID NO: 45668 - DNA, 3512 bp, Zea Mays
cttgccgcaacagatcgccaaccccgacctcacgtcctcaccccacgccaatggcggccgctctggcgagccgcgtggagagttgggtgcgggaccaggcggcgcggctgcagccctgggcggcggcgctgccgcaggcgccgcggtggccctggcccccgccgcggcccgcctggccgtggcccggggaccgcagacgccagcgggaacgcatgttccgggaggagtacgaacgtcgtagcagacagctccgcgagctctgccgcgctgtccgcgtcgacaccgtagccgagctccaggagttgctctgcgccatggtactcgccgagtgcgtctacaagagacctgtttctgagatgatgagatatatcaacaagtttaagtctgattttggtggaaatgttgtgtccctggagcgtgttcaaccatccttggatcatgtaccacatcggtatctgttagcagaggctggtgacaccctatttgctacatttattggcacaaagcagtacaaagatattattgctgatgtgaacatattccaagggaccttatttcatgaagatactgctcatgatttagctcctgatgttgaccctgaacaaaatgatacccaaaagggtgaggaaagccatgggaaatcttaccgagaaacatcaaagaagctaagaaaaccaaaacctgcagtgcaccgaggtttcttggctcgtgctaatggaattccagcactggacctatacaatcttgcacagaaaagaaacaggaaacttgttctttgtggacactcacttggtggggcggttgctgcattggctactcttgcaattttgagagttattgctaccacttcatctgaagaggataacaggcttcatgtgaagtgcatcaccttctctcagccacctgttgggaatgctgctttaagagattatgttcacaaaagaggatggcaggactacttcaaatcctattgtattccagaagacttggtaccacgcattctatctccagcttattttcaccactacaatgcccagacacctgaagcatcttttacaaataaaactgatgtgaaatctgaagaagttatggaggcaagtggggaaaggcccagaggaaacaacagggaacacctcgttctcggtgttggtccagtgcaaaagtcattttggaggctttcaaaacttgttcccttggaaggggtgcggaaaagcttaagtgcaattcaaaaacaaacaaatgtttttgggaaggcaccatcacaattggatagctatttgcaatcaaaggttgatgaatcagaagaaccacctcaatctcttgagattcaagaaagttcacaaggaattgctcttacccctttatcggataaagatggagggaacactgaagataataataggactgagaaaataaatgcatctgaagcaggggggtctaaacgctggagcagggtaccttctttgccttcatatgtgccatttggtgagctttacctattgggagattcatcagtcaatacactttcagattcagaatactccaagatgacgtcggtgcagtctgttatatcggagttaagagagcgtttgcagtcgcactcaatgaagtcctatagggctagatttcaaaaaatatatgattcatgcatgtgtgcaaatgctcccatttttactggcattgagcaattgccacaattttcacatctacaagaattaattggtctaacagctactgattctgttgaacttggagatatcgtggaccctcctgttatccgaactgctacttctatccttcctcttggatggactggactccctggtggtaaaaatgctgagccactgaaagttgatataattgggcatgacctacaaatgtgcactcttttccaggcacaaataaatggaaactggtattccacagtaatagagactctaccatcagctacttcatactcaccaaatggagaactgcaacccacattacagaaaatgcggattcttgttggacaaccactaaagcagcctccaaattacattagtggggatttcatgattcctgtgatggcaggtgctgattcaacacccgactttggatttgaatcattttttgaagataaagattgctgcaagggtttgagtggatttctaatatatgggacaagtgattttgtaactgtacgtaaagaggtccacgttaggactcggagagtgcgattgcttggattagagggggctggcaaaacatccctgcttaaagcaatgttaggacaagttaaagaaagaaatagcactgttcttgaatgcatacatgtcgatttgcatggcaagggaatatcaaatggattgtgctacatagattcgacaacggtaaacttgcaggagctacctttggaggttgggcggttcaaagaagaactgttgttaggactccatgatatcagcaggaagactgaccttgttattgcggtgcataacctagcacaccgaattccacagtatcaacggtccaatacttctcagcctcagcctgctctttcacttctcttggatgaagctaaggcgctaagcattccttggattcttgcaataaccaacaaattctctgttagtgcgcatgagcagaacagattgatcagctcagctatggaagcatatcaagtttctcctgagatgacaaaagttgttaactcttccccatttctgatgccaagtgctagaaacagtttgcagcagatcagatcagctactgggaagttgaagaaggatccagcaaatagatctggttatcttcctgtaaactttggattgtcatcatttcagaggaaggacattgttatgcatgtggagggtgttagttcccttcgtcaacttgtacatcaagtagtcctcaacaatgaagaaacagcatttgaggaacttgctcgtgagagattgttgaaggagctagcgtcagagaaagcagcgtccctgcaagtgaagcagaagccccggaaaagagatggctctgttacagctgctgctgtaggtgcatctctgggcgcgggcctgggaattgtaatggctgtgataatgggggcagcatcagcccttcgaaagccgtgattcatgtattcttttgatccattatttacttcttgatttaaggatgtctgaacaaaagcactagtgtaggcatgaaaaatgaaattttagggcagaatagttagctgataccgtagtgccacattttggctgtgtatagaatgtaggttgagccttttttttgctgatctgaattttgttgtgttactggagtatggcttggatatgttctacatcatgttttaatttagttataaatctgtatcatgtctatgaccactagccaatttactatctttttttattattttattcttttctaacttggctaaaaattatattaaaattacaaagcaggtttctgaagaatgcgtctatattgagggcaatagaggataatgagttgaggcgagaggcaagacgatc

SEQ ID NO: 45669 - DNA, 1670 bp, Zea Mays
caaatctcaaatcactcgagtttgtgaaagagatgctaggcttgctcttcctgcacctgaagaaaaatgtttggttacattggaagatccaaatgttgtagagttttctcaccaaacatacataaactcagggagtgttggccaacttgagtggagtgcaaattatcctaaacatgctgtttctggtaatcatcagccaatcatcgaggaaccactgagcccagaatgtgaaactgaaaatatagaggcacatgagggtgcaattgaggatttcttttgtgaagaatctgatgaaattcctaccattaatcttaatatcgaggagttcacacaaaacttgaaggactatatgcaagcaaacaatgttgagattgaatatgctgacatgtcaaaggcattggttgccatcacgcctgatgctgcttccattccaactccaaagctcaagaatgtcaatcgtctgaggacagaacaccaagtttatgaactgccagattcacaccctcttctggaaggattcgaacagagagaaccagatgatccctgtccatatcttctttccatatggaccccaggtgaaactgcacaatcgatcgatgcccccaagacattctgtgattcaggggagacgggtagactatgtggaagttcaacatgctttagttgcaacaatatacgagaaatgcaggctcagaaagtcagaggaacacttttgataccatgccgaacagcaatgagaggaagcttcccacttaatgggacgtattttcaagttaatgaggtatttgctgaccattgctcaagtcaaaatccaattgatgtcccacgaagttggatttgggacctcccaagacgaactgtttactttggaacctcagttcctacaatattcagaggtttaacgactgaagagatacaacgatgcttttggagaggatttgtttgcgtgaggggctttgataggacagtgagggcaccaaggcccctttatgcaaggttgcattttcctgtcagcaaggttgttagaggcaaaaagcctggagcagcaagagcagaagaataatagtacattgaagaaatataggggtgctaaccagacgaggatggatagcccgaaatgagatgctgacccaataggtcgccaaatcacctccaaattctaacccaatgacttccatctgtaatgaatggcaataccttgaaaacctgtgatggagatgttttgtggcgacatgatctcttaaattagattccgtctttggtaacagcctagctgttcttgttgagtcgcatattctttattctgaagatcaatatagcaaatgggagaaaaaacatagtgcacagtcgagctgttctaattgtacctcttgtgagtggaatcagttgttgtacaacaggaagatggacctatctgtacaatggtcgtacatgttctttgatcatagtataaacaatgtaagcctcatcagccgttatttgattgtttcaaaacaaaggaaaagcattttcaattcatctgttcaaagactatttccttttccccccttctatcttgagatggaaactgactaattttttacttgtggggatctgacagtgaatatatcaaaataatatggaataatttgtctcttctataatgtaatgctggtaggggggaaaaatac

SEQ ID NO: 45670 - DNA, 6440 bp, Zea Mays
ccatcctttacttcattcccttgcaactctggcgagtgaggcagcagaaggtgaagtcagctgatatgatgtacctcatttggataacaatttgactggcaccagattttacagaaatatgcaggaggggctagggcaaaggatgcatgtacctcatggtatcaatctgtgtatcgcaacttcttccatgccctttcaggcgcaatctttcattgagcccagtaccggacaagtgaaccctcctgtaacatctgaaaacttatctgctaactcacaagctgttaatgatgctggagcagttgaaggtactgacatgaacgaaaaatcggttcaaaaacctaagaggaaaaaacataggccaaaggtcattaaagaaggacaatcagcaaagctgcagaagcctaaaactcccaagcctcccaaggaaaatgggaatcagcctactggaaaaagaaagtatgtcaggaggaagggactaagtgcaccagctgaacaaattccactatgtgctgatacacacactagagctaaaccaggagtagtccaaagatgtttggactttgatgtggaggaccagcatggacatttggatctggtaccgcaaacccaggaaacagagatacagactggtcctgcggacacacaaccatcaatatctggagttgaaagaagtaatgttcaaatatcataccattggggtggtacaagcagttctattagttcagttgacccaatagctggtatacacggattacaggcagactgcaattctaaaagagtcagttttgatctgaacaattctatagtaagtcagctgccaaccaattattctagtccaatggacagctctgaacaatttttcaattttgatttaagagaagaagttcgaacaaaccagttattgcctcatctaaccagctcggtagatcacacacgacacccctcggtcaattttgaccaatacataagcacatctcaagattgtccagaaaaatcacccagacattatcagatggtcagtagttatagaattctagaaaatatgacaacagcttctcagtataccgaaagggtgtctatggggggcaatttcaaccctgaagcttgtatgggcgaagatgcaataatcaaacaaatggcccaaagctatagacctctagaaagtccatttgtacctcccaatcataatgaaagggatatgatgaacggaaatctgaacgagtttcctgtgaagaatgattacttgaagttttctaccaatagtaactaccaaactggagcaggttttgatcattgttctccagactattcagatgttcttgcaatgggtacaaaaagagaacatgatgctatcagtggccatcagatttctcttggcattgactttattaactcaaatagaacaaggaagttctgtagtgatgaccccctttccactagctctcaaacatcttactgtcctcaatcatgcaaaaggatgaggccagaggatcatagcaatcagctccatggaactatgggtaagctttcttccgcatcagcattttctgatggtttgaacacaaataaagtttcagctatgaaccctagaattggtaccttggctgacgtacaattgttgatggcccttgagaaatcaaaagcttcacaacaaatgtttgagtttgactatgttacgtcacaaaataacatgatccatgaacgtactgggcttgctctgcaaaatattgctgacaaaggatttattgctctacctaataaacagttcccaagcttcgctgcacagaacatacctttgcctggcagtactgtgaaccaattgggagaaagtaataccttgaggaatggagtgcatcaaattcaaccttgggaaattacatataggctacatgactctagagacaatttttctttaccagggaacacacagttctcgaatggcacagtgaatccatcctcagaaaactatattcagagtaatgctattcatgaacatcaatgcttagaaaacgttgtggctaaggtgccagttttgtctgaaacacaaaatacttccactcaagagggccataaccactgcactgctgctactactgatgagcatatcagaactacaagtgatgaagttgttagatccctcacccgacgtgcaagccaaccaactacaaatgggaactacaatattaaatcttctagagtaactgcagaagcaaactgcactgagaagccaagaaaaaggggtcgtccaagaaaagtagtaaaccccaatggggagccaaaagaaagaggtactaaagggaaacaaaatgttggtcatgcagaacttatatcaccaaaaggttcatgtgctgactttttaaaaactaatggtattacttatgcttctgaatcttccactggaattactcctaggatgtcaactgtggagttgaaaagttctgaccaagataaggagattcatggaggtgccatgcctcaagctacagcagcatcagttgatcctttagatggcataattgaaaagattaagctcttaaccataaacggaccagacaagggtgtgtcagaggtacctaaaaatgctcttgttccttatgaaggtgaatttagtgcactgattgcatttgaggggaaggcaaagaaaagccgtcctcgggccaaagtgaacatcgatccagtcaccactatgatgtggaacttattaatggggccagatatgggtgatgatgccgaagggttagacaaggataaagagaagtggcttgatgaagaaagaagagtgttcagaggacgggttgattcattcattgctcgtatgcatctagttcagggggataggcgtttctctcgatggaaaggatcagtcgtggattcagtcgtgggtgtatttcttacccagaatgtttcagatcatctttctagttctgctttcatggcggttgctgccaaatttcctgttaagatagaggtccctaaaaaacctgtggctgagatgtctcatactcctgaacagaaggatagttgttctggactgtttggtgattctatcaaattgcagggcaatatatacattgaagagataagtgacattaaatcgttaattactacagaagataatgaagaaagtaataataacgaattgattggaaactctgctgggaatggagtaaactgtgcaactggaggatgccatgtctcttatagtaagtcactaactggatcccatggaaatgggctatcaggatctgtttttccaactaccggcttttcaggtgtggtagaaactgaagatggatcactggaggatgttatttcttctcaaaattctgctgtttcttcccagaattccccagattatgttgttcgtagaaccgatccaataggttctagttcgttacaaaatttcactgaagagggctgtattatgagaaatatgtccaatgggactggcatctctactgactatacattgtttctgccaattcaagatccaaaaggcatgctcggattatcagaatattgtggacttaatcctcttccagtttcaggtgtgaacaaggacatgttgcttgatctaaacagatcatatcagccattacatacttatatgccctatgatcagaatagtgagtctgatttcacaggtgtgtcatgtttgaaccatatgggtaaatcattccacacaggccctgataaagtgaatctttccagtgttacacagtctgaggctagtctttaccctattgatcctttagaacaaggcgacttttcaccactaattaaacaaaacttccaaccattacatagttcagacgaagtgccatttttcaaggagcactcttcatgtaatgattttttgaggaacaaaactgaagctcattttctggaaccacttgtctgttcaaatcctcaagaggtgtacacaacctcaacagatcaaatgggtgctgaacaatctcaatcaggatgtggccaaaagtacaatgatgccagagttcagacagcatcacatgaaaggcatcagtcttcaaccttgtgtgataaccagaactcttgttcggtggtgttgcaaggagttgcttcagactcaacacagaagttcgttgatactcaaaaggggccgtcaaaagctcgacaaaatggatcaaaagctaaggtacggggccgacctaaaaagaaaactgatgactgggacagtttacggaaaaaagtgctttctaatggtggggacaaacaaagaagtcatgatgcaagggatactgttgattgggaggcagttaggcaagcagaagtacgggaaatatctgaaaccatcagagagagaggaatgaataatatgctagcagaacggataaaggaattcttgaaccgattggtgacagaccatggaagcattgatcttgaatggctaagagatgttcaaccagacaaagcaaaggacttccttctaagcattagagggcttggactcaaaagtgttgagtgtgttcgcctcttgacactacatcatatggcttttccagtggacacaaatgttggtcggatatgtgtgaggcttggatgggtgccacttcaaccactgccagagtctcttcagttgcacctcttggaaatgtatcccatgctggagcacatacagaagtacctctggcctcgactatgcaaactagatcaacgtacattgtatgagcttcactaccaaatgattacttttggaaaggttttctgcacaaaaagtaagcctaattgcaattcatgtccaatgagagctgaatgtaagcactttgctagtgcatttgcaagtgctaggcttgctcttcctgcacctgaagaaaaatgtttggttacattggaagatccaaatgttgtagagttttctcaccaaacatacataaactcagggagtgttggccaacttgagtggagtgcaaattatcctaaacatgctgtttctggtaatcatcagccaatcatcgaggaaccactgagcccagaatgtgaaactgaaaatatagaggcacatgagggtgcaattgaggatttcttttgtgaagaatctgatgaaattcctaccattaatcttaatatcgaggagttcacacaaaacttgaaggactatatgcaagcaaacaatgttgagattgaatatgctgacatgtcaaaggcattggttgccatcacgcctgatgctgcttccattccaactccaaagctcaagaatgtcaatcgtctgaggacagaacaccaagtttatgaactgccagattcacaccctcttctggaaggattcgaacagagagaaccagatgatccctgtccatatcttctttccatatggaccccaggtgaaactgcacaatcgatcgatgcccccaagacattctgtgattcaggggagacgggtagactatgtggaagttcaacatgctttagttgcaacaatatacgagaaatgcaggctcagaaagtcagaggaacacttttgataccatgccgaacagcaatgagaggaagcttcccacttaatgggacgtattttcaagttaatgaggtatttgctgaccattgctcaagtcaaaatccaattgatgtcccacgaagttggatttgggacctcccaagacgaactgtttactttggaacctcagttcctacaatattcagaggtttaacgactgaagagatacaacgatgcttttggagaggatttgtttgcgtgaggggctttgataggacagtgagggcaccaaggcccctttatgcaaggttgcattttcctgtcagcaaggttgttagaggcaaaaagcctggagcagcaagagcagaagaataatagtacattgaagaaatataggggtgctaaccagacgaggatggatagcccgaaatgagatgctgacccaataggtcgccaaatcacctccaaattctaacccaatgacttccatctgtaatgaatggcaataccttgaaaacctgtgatggagatgttttgtggcgacatgatctcttaaattagattccgtctttggtaacagcctagctgttcttgttgagtcgcatattctttattctgaagatcaatatagcaaatgggagaaaaaacatagtgcacagtcgagctgttctaattgtacctcttgtgagtggaatcagttgttgtacaacaggaagatggacctatctgtacaatggtcgtacatgttctttgatcatagtataaacaatgtaagcctcatcagccgttatttgattgtttcaaaacaaaggaaaagcattttcaattcatctgttcaaagactatttccttttccccccttctatcttgagatggaaactgactaattttttacttgtggggatctgacagtgaatatatcaaaataatatggaataatttgtctcttctataatgtaatgctggtaggggggaaaaatac

SEQ ID NO: 45671 - DNA, 6406 bp, Zea Mays
gtgagcttctggaggggtgaagtcagctgatatgatgtacctcatttggataacaatttgactggcaccagattttacagaaatatgcaggaggggctagggcaaaggatgcatgtacctcatggtatcaatctgtgtatcgcaacttcttccatgccctttcaggcgcaatctttcattgagcccagtaccggacaagtgaaccctcctgtaacatctgaaaacttatctgctaactcacaagctgttaatgatgctggagcagttgaaggtactgacatgaacgaaaaatcggttcaaaaacctaagaggaaaaaacataggccaaaggtcattaaagaaggacaatcagcaaagctgcagaagcctaaaactcccaagcctcccaaggaaaatgggaatcagcctactggaaaaagaaagtatgtcaggaggaagggactaagtgcaccagctgaacaaattccactatgtgctgatacacacactagagctaaaccaggagtagtccaaagatgtttggactttgatgtggaggaccagcatggacatttggatctggtaccgcaaacccaggaaacagagatacagactggtcctgcggacacacaaccatcaatatctggagttgaaagaagtaatgttcaaatatcataccattggggtggtacaagcagttctattagttcagttgacccaatagctggtatacacggattacaggcagactgcaattctaaaagagtcagttttgatctgaacaattctatagtaagtcagctgccaaccaattattctagtccaatggacagctctgaacaatttttcaattttgatttaagagaagaagttcgaacaaaccagttattgcctcatctaaccagctcggtagatcacacacgacacccctcggtcaattttgaccaatacataagcacatctcaagattgtccagaaaaatcacccagacattatcagatggtcagtagttatagaattctagaaaatatgacaacagcttctcagtataccgaaagggtgtctatggggggcaatttcaaccctgaagcttgtatgggcgaagatgcaataatcaaacaaatggcccaaagctatagacctctagaaagtccatttgtacctcccaatcataatgaaagggatatgatgaacggaaatctgaacgagtttcctgtgaagaatgattacttgaagttttctaccaatagtaactaccaaactggagcaggttttgatcattgttctccagactattcagatgttcttgcaatgggtacaaaaagagaacatgatgctatcagtggccatcagatttctcttggcattgactttattaactcaaatagaacaaggaagttctgtagtgatgaccccctttccactagctctcaaacatcttactgtcctcaatcatgcaaaaggatgaggccagaggatcatagcaatcagctccatggaactatgggtaagctttcttccgcatcagcattttctgatggtttgaacacaaataaagtttcagctatgaaccctagaattggtaccttggctgacgtacaattgttgatggcccttgagaaatcaaaagcttcacaacaaatgtttgagtttgactatgttacgtcacaaaataacatgatccatgaacgtactgggcttgctctgcaaaatattgctgacaaaggatttattgctctacctaataaacagttcccaagcttcgctgcacagaacatacctttgcctggcagtactgtgaaccaattgggagaaagtaataccttgaggaatggagtgcatcaaattcaaccttgggaaattacatataggctacatgactctagagacaatttttctttaccagggaacacacagttctcgaatggcacagtgaatccatcctcagaaaactatattcagagtaatgctattcatgaacatcaatgcttagaaaacgttgtggctaaggtgccagttttgtctgaaacacaaaatacttccactcaagagggccataaccactgcactgctgctactactgatgagcatatcagaactacaagtgatgaagttgttagatccctcacccgacgtgcaagccaaccaactacaaatgggaactacaatattaaatcttctagagtaactgcagaagcaaactgcactgagaagccaagaaaaaggggtcgtccaagaaaagtagtaaaccccaatggggagccaaaagaaagaggtactaaagggaaacaaaatgttggtcatgcagaacttatatcaccaaaaggttcatgtgctgactttttaaaaactaatggtattacttatgcttctgaatcttccactggaattactcctaggatgtcaactgtggagttgaaaagttctgaccaagataaggagattcatggaggtgccatgcctcaagctacagcagcatcagttgatcctttagatggcataattgaaaagattaagctcttaaccataaacggaccagacaagggtgtgtcagaggtacctaaaaatgctcttgttccttatgaaggtgaatttagtgcactgattgcatttgaggggaaggcaaagaaaagccgtcctcgggccaaagtgaacatcgatccagtcaccactatgatgtggaacttattaatggggccagatatgggtgatgatgccgaagggttagacaaggataaagagaagtggcttgatgaagaaagaagagtgttcagaggacgggttgattcattcattgctcgtatgcatctagttcagggggataggcgtttctctcgatggaaaggatcagtcgtggattcagtcgtgggtgtatttcttacccagaatgtttcagatcatctttctagttctgctttcatggcggttgctgccaaatttcctgttaagatagaggtccctaaaaaacctgtggctgagatgtctcatactcctgaacagaaggatagttgttctggactgtttggtgattctatcaaattgcagggcaatatatacattgaagagataagtgacattaaatcgttaattactacagaagataatgaagaaagtaataataacgaattgattggaaactctgctgggaatggagtaaactgtgcaactggaggatgccatgtctcttatagtaagtcactaactggatcccatggaaatgggctatcaggatctgtttttccaactaccggcttttcaggtgtggtagaaactgaagatggatcactggaggatgttatttcttctcaaaattctgctgtttcttcccagaattccccagattatgttgttcgtagaaccgatccaataggttctagttcgttacaaaatttcactgaagagggctgtattatgagaaatatgtccaatgggactggcatctctactgactatacattgtttctgccaattcaagatccaaaaggcatgctcggattatcagaatattgtggacttaatcctcttccagtttcaggtgtgaacaaggacatgttgcttgatctaaacagatcatatcagccattacatacttatatgccctatgatcagaatagtgagtctgatttcacaggtgtgtcatgtttgaaccatatgggtaaatcattccacacaggccctgataaagtgaatctttccagtgttacacagtctgaggctagtctttaccctattgatcctttagaacaaggcgacttttcaccactaattaaacaaaacttccaaccattacatagttcagacgaagtgccatttttcaaggagcactcttcatgtaatgattttttgaggaacaaaactgaagctcattttctggaaccacttgtctgttcaaatcctcaagaggtgtacacaacctcaacagatcaaatgggtgctgaacaatctcaatcaggatgtggccaaaagtacaatgatgccagagttcagacagcatcacatgaaaggcatcagtcttcaaccttgtgtgataaccagaactcttgttcggtggtgttgcaaggagttgcttcagactcaacacagaagttcgttgatactcaaaaggggccgtcaaaagctcgacaaaatggatcaaaagctaaggtacggggccgacctaaaaagaaaactgatgactgggacagtttacggaaaaaagtgctttctaatggtggggacaaacaaagaagtcatgatgcaagggatactgttgattgggaggcagttaggcaagcagaagtacgggaaatatctgaaaccatcagagagagaggaatgaataatatgctagcagaacggataaaggaattcttgaaccgattggtgacagaccatggaagcattgatcttgaatggctaagagatgttcaaccagacaaagcaaaggacttccttctaagcattagagggcttggactcaaaagtgttgagtgtgttcgcctcttgacactacatcatatggcttttccagtggacacaaatgttggtcggatatgtgtgaggcttggatgggtgccacttcaaccactgccagagtctcttcagttgcacctcttggaaatgtatcccatgctggagcacatacagaagtacctctggcctcgactatgcaaactagatcaacgtacattgtatgagcttcactaccaaatgattacttttggaaaggttttctgcacaaaaagtaagcctaattgcaattcatgtccaatgagagctgaatgtaagcactttgctagtgcatttgcaagtgctaggcttgctcttcctgcacctgaagaaaaatgtttggttacattggaagatccaaatgttgtagagttttctcaccaaacatacataaactcagggagtgttggccaacttgagtggagtgcaaattatcctaaacatgctgtttctggtaatcatcagccaatcatcgaggaaccactgagcccagaatgtgaaactgaaaatatagaggcacatgagggtgcaattgaggatttcttttgtgaagaatctgatgaaattcctaccattaatcttaatatcgaggagttcacacaaaacttgaaggactatatgcaagcaaacaatgttgagattgaatatgctgacatgtcaaaggcattggttgccatcacgcctgatgctgcttccattccaactccaaagctcaagaatgtcaatcgtctgaggacagaacaccaagtttatgaactgccagattcacaccctcttctggaaggattcgaacagagagaaccagatgatccctgtccatatcttctttccatatggaccccaggtgaaactgcacaatcgatcgatgcccccaagacattctgtgattcaggggagacgggtagactatgtggaagttcaacatgctttagttgcaacaatatacgagaaatgcaggctcagaaagtcagaggaacacttttgataccatgccgaacagcaatgagaggaagcttcccacttaatgggacgtattttcaagttaatgaggtatttgctgaccattgctcaagtcaaaatccaattgatgtcccacgaagttggatttgggacctcccaagacgaactgtttactttggaacctcagttcctacaatattcagaggtttaacgactgaagagatacaacgatgcttttggagaggatttgtttgcgtgaggggctttgataggacagtgagggcaccaaggcccctttatgcaaggttgcattttcctgtcagcaaggttgttagaggcaaaaagcctggagcagcaagagcagaagaataatagtacattgaagaaatataggggtgctaaccagacgaggatggatagcccgaaatgagatgctgacccaataggtcgccaaatcacctccaaattctaacccaatgacttccatctgtaatgaatggcaataccttgaaaacctgtgatggagatgttttgtggcgacatgatctcttaaattagattccgtctttggtaacagcctagctgttcttgttgagtcgcatattctttattctgaagatcaatatagcaaatgggagaaaaaacatagtgcacagtcgagctgttctaattgtacctcttgtgagtggaatcagttgttgtacaacaggaagatggacctatctgtacaatggtcgtacatgttctttgatcatagtataaacaatgtaagcctcatcagccgttatttgattgtttcaaaacaaaggaaaagcattttcaattcatctgttcaaagactatttccttttccccccttctatcttgagatggaaactgactaattttttacttgtggggatctgacagtgaatatatcaaaataatatggaataatttgtctcttctataatgtaatgctggtaggggggaaaaatac

SEQ ID NO: 45672 - DNA, 6638 bp, Zea Mays
gtctctctcaccccaaggagagtcgcagcgacccagccttctccctccctctctctcctctctctctcttcttgcgccgcttttccttcgctgctccgcgcggctccggcgggcggtgcgggaggaagaggagggggcggaggggccggaagttttccggccgaggagcccagcgggaggatcgaagaggaggcactggtccggggctgtccactgcatcgggttcttcgaagttggggggaccacgggactcgaagggagcgcccgatctgctccgccggcgaggtgaagtcagctgatatgatgtacctcatttggataacaatttgactggcaccagattttacagaaatatgcaggaggggctagggcaaaggatgcatgtacctcatggtatcaatctgtgtatcgcaacttcttccatgccctttcaggcgcaatctttcattgagcccagtaccggacaagtgaaccctcctgtaacatctgaaaacttatctgctaactcacaagctgttaatgatgctggagcagttgaaggtactgacatgaacgaaaaatcggttcaaaaacctaagaggaaaaaacataggccaaaggtcattaaagaaggacaatcagcaaagctgcagaagcctaaaactcccaagcctcccaaggaaaatgggaatcagcctactggaaaaagaaagtatgtcaggaggaagggactaagtgcaccagctgaacaaattccactatgtgctgatacacacactagagctaaaccaggagtagtccaaagatgtttggactttgatgtggaggaccagcatggacatttggatctggtaccgcaaacccaggaaacagagatacagactggtcctgcggacacacaaccatcaatatctggagttgaaagaagtaatgttcaaatatcataccattggggtggtacaagcagttctattagttcagttgacccaatagctggtatacacggattacaggcagactgcaattctaaaagagtcagttttgatctgaacaattctatagtaagtcagctgccaaccaattattctagtccaatggacagctctgaacaatttttcaattttgatttaagagaagaagttcgaacaaaccagttattgcctcatctaaccagctcggtagatcacacacgacacccctcggtcaattttgaccaatacataagcacatctcaagattgtccagaaaaatcacccagacattatcagatggtcagtagttatagaattctagaaaatatgacaacagcttctcagtataccgaaagggtgtctatggggggcaatttcaaccctgaagcttgtatgggcgaagatgcaataatcaaacaaatggcccaaagctatagacctctagaaagtccatttgtacctcccaatcataatgaaagggatatgatgaacggaaatctgaacgagtttcctgtgaagaatgattacttgaagttttctaccaatagtaactaccaaactggagcaggttttgatcattgttctccagactattcagatgttcttgcaatgggtacaaaaagagaacatgatgctatcagtggccatcagatttctcttggcattgactttattaactcaaatagaacaaggaagttctgtagtgatgaccccctttccactagctctcaaacatcttactgtcctcaatcatgcaaaaggatgaggccagaggatcatagcaatcagctccatggaactatgggtaagctttcttccgcatcagcattttctgatggtttgaacacaaataaagtttcagctatgaaccctagaattggtaccttggctgacgtacaattgttgatggcccttgagaaatcaaaagcttcacaacaaatgtttgagtttgactatgttacgtcacaaaataacatgatccatgaacgtactgggcttgctctgcaaaatattgctgacaaaggatttattgctctacctaataaacagttcccaagcttcgctgcacagaacatacctttgcctggcagtactgtgaaccaattgggagaaagtaataccttgaggaatggagtgcatcaaattcaaccttgggaaattacatataggctacatgactctagagacaatttttctttaccagggaacacacagttctcgaatggcacagtgaatccatcctcagaaaactatattcagagtaatgctattcatgaacatcaatgcttagaaaacgttgtggctaaggtgccagttttgtctgaaacacaaaatacttccactcaagagggccataaccactgcactgctgctactactgatgagcatatcagaactacaagtgatgaagttgttagatccctcacccgacgtgcaagccaaccaactacaaatgggaactacaatattaaatcttctagagtaactgcagaagcaaactgcactgagaagccaagaaaaaggggtcgtccaagaaaagtagtaaaccccaatggggagccaaaagaaagaggtactaaagggaaacaaaatgttggtcatgcagaacttatatcaccaaaaggttcatgtgctgactttttaaaaactaatggtattacttatgcttctgaatcttccactggaattactcctaggatgtcaactgtggagttgaaaagttctgaccaagataaggagattcatggaggtgccatgcctcaagctacagcagcatcagttgatcctttagatggcataattgaaaagattaagctcttaaccataaacggaccagacaagggtgtgtcagaggtacctaaaaatgctcttgttccttatgaaggtgaatttagtgcactgattgcatttgaggggaaggcaaagaaaagccgtcctcgggccaaagtgaacatcgatccagtcaccactatgatgtggaacttattaatggggccagatatgggtgatgatgccgaagggttagacaaggataaagagaagtggcttgatgaagaaagaagagtgttcagaggacgggttgattcattcattgctcgtatgcatctagttcagggggataggcgtttctctcgatggaaaggatcagtcgtggattcagtcgtgggtgtatttcttacccagaatgtttcagatcatctttctagttctgctttcatggcggttgctgccaaatttcctgttaagatagaggtccctaaaaaacctgtggctgagatgtctcatactcctgaacagaaggatagttgttctggactgtttggtgattctatcaaattgcagggcaatatatacattgaagagataagtgacattaaatcgttaattactacagaagataatgaagaaagtaataataacgaattgattggaaactctgctgggaatggagtaaactgtgcaactggaggatgccatgtctcttatagtaagtcactaactggatcccatggaaatgggctatcaggatctgtttttccaactaccggcttttcaggtgtggtagaaactgaagatggatcactggaggatgttatttcttctcaaaattctgctgtttcttcccagaattccccagattatgttgttcgtagaaccgatccaataggttctagttcgttacaaaatttcactgaagagggctgtattatgagaaatatgtccaatgggactggcatctctactgactatacattgtttctgccaattcaagatccaaaaggcatgctcggattatcagaatattgtggacttaatcctcttccagtttcaggtgtgaacaaggacatgttgcttgatctaaacagatcatatcagccattacatacttatatgccctatgatcagaatagtgagtctgatttcacaggtgtgtcatgtttgaaccatatgggtaaatcattccacacaggccctgataaagtgaatctttccagtgttacacagtctgaggctagtctttaccctattgatcctttagaacaaggcgacttttcaccactaattaaacaaaacttccaaccattacatagttcagacgaagtgccatttttcaaggagcactcttcatgtaatgattttttgaggaacaaaactgaagctcattttctggaaccacttgtctgttcaaatcctcaagaggtgtacacaacctcaacagatcaaatgggtgctgaacaatctcaatcaggatgtggccaaaagtacaatgatgccagagttcagacagcatcacatgaaaggcatcagtcttcaaccttgtgtgataaccagaactcttgttcggtggtgttgcaaggagttgcttcagactcaacacagaagttcgttgatactcaaaaggggccgtcaaaagctcgacaaaatggatcaaaagctaaggtacggggccgacctaaaaagaaaactgatgactgggacagtttacggaaaaaagtgctttctaatggtggggacaaacaaagaagtcatgatgcaagggatactgttgattgggaggcagttaggcaagcagaagtacgggaaatatctgaaaccatcagagagagaggaatgaataatatgctagcagaacggataaaggaattcttgaaccgattggtgacagaccatggaagcattgatcttgaatggctaagagatgttcaaccagacaaagcaaaggacttccttctaagcattagagggcttggactcaaaagtgttgagtgtgttcgcctcttgacactacatcatatggcttttccagtggacacaaatgttggtcggatatgtgtgaggcttggatgggtgccacttcaaccactgccagagtctcttcagttgcacctcttggaaatgtatcccatgctggagcacatacagaagtacctctggcctcgactatgcaaactagatcaacgtacattgttttctgcacaaaaagtaagcctaattgcaattcatgtccaatgagagctgaatgtaagcactttgctagtgcatttgcaagtgctaggcttgctcttcctgcacctgaagaaaaatgtttggttacattggaagatccaaatgttgtagagttttctcaccaaacatacataaactcagggagtgttggccaacttgagtggagtgcaaattatcctaaacatgctgtttctggtaatcatcagccaatcatcgaggaaccactgagcccagaatgtgaaactgaaaatatagaggcacatgagggtgcaattgaggatttcttttgtgaagaatctgatgaaattcctaccattaatcttaatatcgaggagttcacacaaaacttgaaggactatatgcaagcaaacaatgttgagattgaatatgctgacatgtcaaaggcattggttgccatcacgcctgatgctgcttccattccaactccaaagctcaagaatgtcaatcgtctgaggacagaacaccaagtttatgaactgccagattcacaccctcttctggaaggattcgaacagagagaaccagatgatccctgtccatatcttctttccatatggaccccaggtgaaactgcacaatcgatcgatgcccccaagacattctgtgattcaggggagacgggtagactatgtggaagttcaacatgctttagttgcaacaatatacgagaaatgcaggctcagaaagtcagaggaacacttttgataccatgccgaacagcaatgagaggaagcttcccacttaatgggacgtattttcaagttaatgaggtatttgctgaccattgctcaagtcaaaatccaattgatgtcccacgaagttggatttgggacctcccaagacgaactgtttactttggaacctcagttcctacaatattcagaggtttaacgactgaagagatacaacgatgcttttggagaggatttgtttgcgtgaggggctttgataggacagtgagggcaccaaggcccctttatgcaaggttgcattttcctgtcagcaaggttgttagaggcaaaaagcctggagcagcaagagcagaagaataatagtacattgaagaaatataggggtgctaaccagacgaggatggatagcccgaaatgagatgctgacccaataggtcgccaaatcacctccaaattctaacccaatgacttccatctgtaatgaatggcaataccttgaaaacctgtgatggagatgttttgtggcgacatgatctcttaaattagattccgtctttggtaacagcctagctgttcttgttgagtcgcatattctttattctgaagatcaatatagcaaatgggagaaaaaacatagtgcacagtcgagctgttctaattgtacctcttgtgagtggaatcagttgttgtacaacaggaagatggacctatctgtacaatggtcgtacatgttctttgatcatagtataaacaatgtaagcctcatcagccgttatttgattgtttcaaaacaaaggaaaagcattttcaattcatctgttcaaagactatttccttttccccccttctatcttgagatggaaactgactaattttttacttgtggggatctgacagtgaatatatcaaaataatatggaataatttgtctcttctataatgtaatgctggtaggggggaaaaatac

SEQ ID NO: 45673 - DNA, 6618 bp, Zea Mays
gtctctctcaccccaaggagagtcgcagcgacccagccttctccctccctctctctcctctctctctcttcttgcgccgcttttccttcgctgctccgcgcggctccggcgggcggtgcgggaggaagaggagggggcggaggggccggaagttttccggccgaggagcccagcgggaggatcgaagaggaggcactggtccggggctgtccactgcatcgggttcttcgaagttggggggaccacgggactcgaagggagcgcccgatctgctccgccggcgaggtgaagtcagctgatatgatgtacctcatttggataacaatttgactggcaccagattttacagaaatatgcaggaggggctagggcaaaggatgcatgtacctcatggtatcaatctgtgtatcgcaacttcttccatgccctttcaggcgcaatctttcattgagcccagtaccggacaagtgaaccctcctgtaacatctgaaaacttatctgctaactcacaagctgttaatgatgctggagcagttgaaggtactgacatgaacgaaaaatcggttcaaaaacctaagaggaaaaaacataggccaaaggtcattaaagaaggacaatcagcaaagctgcagaagcctaaaactcccaagcctcccaaggaaaatgggaatcagcctactggaaaaagaaagtatgtcaggaggaagggactaagtgcaccagctgaacaaattccactatgtgctgatacacacactagagctaaaccaggagtagtccaaagatgtttggactttgatgtggaggaccagcatggacatttggatctggtaccgcaaacccaggaaacagagatacagactggtcctgcggacacacaaccatcaatatctggagttgaaagaagtaatgttcaaatatcataccattggggtggtacaagcagttctattagttcagttgacccaatagctggtatacacggattacaggcagactgcaattctaaaagagtcagttttgatctgaacaattctatagtaagtcagctgccaaccaattattctagtccaatggacagctctgaacaatttttcaattttgatttaagagaagaagttcgaacaaaccagttattgcctcatctaaccagctcggtagatcacacacgacacccctcggtcaattttgaccaatacataagcacatctcaagattgtccagaaaaatcacccagacattatcagatggtcagtagttatagaattctagaaaatatgacaacagcttctcagtataccgaaagggtgtctatggggggcaatttcaaccctgaagcttgtatgggcgaagatgcaataatcaaacaaatggcccaaagctatagacctctagaaagtccatttgtacctcccaatcataatgaaagggatatgatgaacggaaatctgaacgagtttcctgtgaagaatgattacttgaagttttctaccaatagtaactaccaaactggagcaggttttgatcattgttctccagactattcagatgttcttgcaatgggtacaaaaagagaacatgatgctatcagtggccatcagatttctcttggcattgactttattaactcaaatagaacaaggaagttctgtagtgatgaccccctttccactagctctcaaacatcttactgtcctcaatcatgcaaaaggatgaggccagaggatcatagcaatcagctccatggaactatgggtaagctttcttccgcatcagcattttctgatggtttgaacacaaataaagtttcagctatgaaccctagaattggtaccttggctgacgtacaattgttgatggcccttgagaaatcaaaagcttcacaacaaatgtttgagtttgactatgttacgtcacaaaataacatgatccatgaacgtactgggcttgctctgcaaaatattgctgacaaaggatttattgctctacctaataaacagttcccaagcttcgctgcacagaacatacctttgcctggcagtactgtgaaccaattgggagaaagtaataccttgaggaatggagtgcatcaaattcaaccttgggaaattacatataggctacatgactctagagacaatttttctttaccagggaacacacagttctcgaatggcacagtgaatccatcctcagaaaactatattcagagtaatgctattcatgaacatcaatgcttagaaaacgttgtggctaaggtgccagttttgtctgaaacacaaaatacttccactcaagagggccataaccactgcactgctgctactactgatgagcatatcagaactacaagtgatgaagttgttagatccctcacccgacgtgcaagccaaccaactacaaatgggaactacaatattaaatcttctagagtaactgcagaagcaaactgcactgagaagccaagaaaaaggggtcgtccaagaaaagtagtaaaccccaatggggagccaaaagaaagaggtactaaagggaaacaaaatgttggtcatgcagaacttatatcaccaaaaggttcatgtgctgactttttaaaaactaatggtattacttatgcttctgaatcttccactggaattactcctaggatgtcaactgtggagttgaaaagttctgaccaagataaggagattcatggaggtgccatgcctcaagctacagcagcatcagttgatcctttagatggcataattgaaaagattaagctcttaaccataaacggaccagacaagggtgtgtcagaggtacctaaaaatgctcttgttccttatgaaggtgaatttagtgcactgattgcatttgaggggaaggcaaagaaaagccgtcctcgggccaaagtgaacatcgatccagtcaccactatgatgtggaacttattaatggggccagatatgggtgatgatgccgaagggttagacaaggataaagagaagtggcttgatgaagaaagaagagtgttcagaggacgggttgattcattcattgctcgtatgcatctagttcagggggataggcgtttctctcgatggaaaggatcagtcgtggattcagtcgtgggtgtatttcttacccagaatgtttcagatcatctttctagttctgctttcatggcggttgctgccaaatttcctgttaagatagaggtccctaaaaaacctgtggctgagatgtctcatactcctgaacagaaggatagttgttctggactgtttggtgattctatcaaattgcagggcaatatatacattgaagagataagtgacattaaatcgttaattactacagaagataatgaagaaagtaataataacgaattgattggaaactctgctgggaatggagtaaactgtgcaactggaggatgccatgtctcttatagtgtggtagaaactgaagatggatcactggaggatgttatttcttctcaaaattctgctgtttcttcccagaattccccagattatgttgttcgtagaaccgatccaataggttctagttcgttacaaaatttcactgaagagggctgtattatgagaaatatgtccaatgggactggcatctctactgactatacattgtttctgccaattcaagatccaaaaggcatgctcggattatcagaatattgtggacttaatcctcttccagtttcaggtgtgaacaaggacatgttgcttgatctaaacagatcatatcagccattacatacttatatgccctatgatcagaatagtgagtctgatttcacaggtgtgtcatgtttgaaccatatgggtaaatcattccacacaggccctgataaagtgaatctttccagtgttacacagtctgaggctagtctttaccctattgatcctttagaacaaggcgacttttcaccactaattaaacaaaacttccaaccattacatagttcagacgaagtgccatttttcaaggagcactcttcatgtaatgattttttgaggaacaaaactgaagctcattttctggaaccacttgtctgttcaaatcctcaagaggtgtacacaacctcaacagatcaaatgggtgctgaacaatctcaatcaggatgtggccaaaagtacaatgatgccagagttcagacagcatcacatgaaaggcatcagtcttcaaccttgtgtgataaccagaactcttgttcggtggtgttgcaaggagttgcttcagactcaacacagaagttcgttgatactcaaaaggggccgtcaaaagctcgacaaaatggatcaaaagctaaggtacggggccgacctaaaaagaaaactgatgactgggacagtttacggaaaaaagtgctttctaatggtggggacaaacaaagaagtcatgatgcaagggatactgttgattgggaggcagttaggcaagcagaagtacgggaaatatctgaaaccatcagagagagaggaatgaataatatgctagcagaacggataaaggaattcttgaaccgattggtgacagaccatggaagcattgatcttgaatggctaagagatgttcaaccagacaaagcaaaggacttccttctaagcattagagggcttggactcaaaagtgttgagtgtgttcgcctcttgacactacatcatatggcttttccagtggacacaaatgttggtcggatatgtgtgaggcttggatgggtgccacttcaaccactgccagagtctcttcagttgcacctcttggaaataagtacctctggcctcgactatgcaaactagatcaacgtacattgtaagattagttcaatcgatacttttcgcactatatttagatggctagattcaatgacgccttccaatatgcaggttttctgcacaaaaagtaagcctaattgcaattcatgtccaatgagagctgaatgtaagcactttgctagtgcatttgcaagtgctaggcttgctcttcctgcacctgaagaaaaatgtttggttacattggaagatccaaatgttgtagagttttctcaccaaacatacataaactcagggagtgttggccaacttgagtggagtgcaaattatcctaaacatgctgtttctggtaatcatcagccaatcatcgaggaaccactgagcccagaatgtgaaactgaaaatatagaggcacatgagggtgcaattgaggatttcttttgtgaagaatctgatgaaattcctaccattaatcttaatatcgaggagttcacacaaaacttgaaggactatatgcaagcaaacaatgttgagattgaatatgctgacatgtcaaaggcattggttgccatcacgcctgatgctgcttccattccaactccaaagctcaagaatgtcaatcgtctgaggacagaacaccaagtttatgaactgccagattcacaccctcttctggaaggattcgaacagagagaaccagatgatccctgtccatatcttctttccatatggaccccaggtgaaactgcacaatcgatcgatgcccccaagacattctgtgattcaggggagacgggtagactatgtggaagttcaacatgctttagttgcaacaatatacgagaaatgcaggctcagaaagtcagaggaacacttttgataccatgccgaacagcaatgagaggaagcttcccacttaatgggacgtattttcaagttaatgaggtatttgctgaccattgctcaagtcaaaatccaattgatgtcccacgaagttggatttgggacctcccaagacgaactgtttactttggaacctcagttcctacaatattcagaggtttaacgactgaagagatacaacgatgcttttggagaggatttgtttgcgtgaggggctttgataggacagtgagggcaccaaggcccctttatgcaaggttgcattttcctgtcagcaaggttgttagaggcaaaaagcctggagcagcaagagcagaagaataatagtacattgaagaaatataggggtgctaaccagacgaggatggatagcccgaaatgagatgctgacccaataggtcgccaaatcacctccaaattctaacccaatgacttccatctgtaatgaatggcaataccttgaaaacctgtgatggagatgttttgtggcgacatgatctcttaaattagattccgtctttggtaacagcctagctgttcttgttgagtcgcatattctttattctgaagatcaatatagcaaatgggagaaaaaacatagtgcacagtcgagctgttctaattgtacctcttgtgagtggaatcagttgttgtacaacaggaagatggacctatctgtacaatggtcgtacatgttctttgatcatagtataaacaatgtaagcctcatcagccgttatttgattgtttcaaaacaaaggaaaagcattttcaattcatctgttcaaagactatttccttttccccccttctatcttgagatggaaactgactaattttttacttgtggggatctgacagtgaatatatcaaaataatatggaataatttgtctcttctataatgtaatgctggtaggggggaaaaatac

SEQ ID NO: 45674 - DNA, 6712 bp, Zea Mays
gtctctctcaccccaaggagagtcgcagcgacccagccttctccctccctctctctcctctctctctcttcttgcgccgcttttccttcgctgctccgcgcggctccggcgggcggtgcgggaggaagaggagggggcggaggggccggaagttttccggccgaggagcccagcgggaggatcgaagaggaggcactggtccggggctgtccactgcatcgggttcttcgaagttggggggaccacgggactcgaagggagcgcccgatctgctccgccggcgaggtgaagtcagctgatatgatgtacctcatttggataacaatttgactggcaccagattttacagaaatatgcaggaggggctagggcaaaggatgcatgtacctcatggtatcaatctgtgtatcgcaacttcttccatgccctttcaggcgcaatctttcattgagcccagtaccggacaagtgaaccctcctgtaacatctgaaaacttatctgctaactcacaagctgttaatgatgctggagcagttgaaggtactgacatgaacgaaaaatcggttcaaaaacctaagaggaaaaaacataggccaaaggtcattaaagaaggacaatcagcaaagctgcagaagcctaaaactcccaagcctcccaaggaaaatgggaatcagcctactggaaaaagaaagtatgtcaggaggaagggactaagtgcaccagctgaacaaattccactatgtgctgatacacacactagagctaaaccaggagtagtccaaagatgtttggactttgatgtggaggaccagcatggacatttggatctggtaccgcaaacccaggaaacagagatacagactggtcctgcggacacacaaccatcaatatctggagttgaaagaagtaatgttcaaatatcataccattggggtggtacaagcagttctattagttcagttgacccaatagctggtatacacggattacaggcagactgcaattctaaaagagtcagttttgatctgaacaattctatagtaagtcagctgccaaccaattattctagtccaatggacagctctgaacaatttttcaattttgatttaagagaagaagttcgaacaaaccagttattgcctcatctaaccagctcggtagatcacacacgacacccctcggtcaattttgaccaatacataagcacatctcaagattgtccagaaaaatcacccagacattatcagatggtcagtagttatagaattctagaaaatatgacaacagcttctcagtataccgaaagggtgtctatggggggcaatttcaaccctgaagcttgtatgggcgaagatgcaataatcaaacaaatggcccaaagctatagacctctagaaagtccatttgtacctcccaatcataatgaaagggatatgatgaacggaaatctgaacgagtttcctgtgaagaatgattacttgaagttttctaccaatagtaactaccaaactggagcaggttttgatcattgttctccagactattcagatgttcttgcaatgggtacaaaaagagaacatgatgctatcagtggccatcagatttctcttggcattgactttattaactcaaatagaacaaggaagttctgtagtgatgaccccctttccactagctctcaaacatcttactgtcctcaatcatgcaaaaggatgaggccagaggatcatagcaatcagctccatggaactatgggtaagctttcttccgcatcagcattttctgatggtttgaacacaaataaagtttcagctatgaaccctagaattggtaccttggctgacgtacaattgttgatggcccttgagaaatcaaaagcttcacaacaaatgtttgagtttgactatgttacgtcacaaaataacatgatccatgaacgtactgggcttgctctgcaaaatattgctgacaaaggatttattgctctacctaataaacagttcccaagcttcgctgcacagaacatacctttgcctggcagtactgtgaaccaattgggagaaagtaataccttgaggaatggagtgcatcaaattcaaccttgggaaattacatataggctacatgactctagagacaatttttctttaccagggaacacacagttctcgaatggcacagtgaatccatcctcagaaaactatattcagagtaatgctattcatgaacatcaatgcttagaaaacgttgtggctaaggtgccagttttgtctgaaacacaaaatacttccactcaagagggccataaccactgcactgctgctactactgatgagcatatcagaactacaagtgatgaagttgttagatccctcacccgacgtgcaagccaaccaactacaaatgggaactacaatattaaatcttctagagtaactgcagaagcaaactgcactgagaagccaagaaaaaggggtcgtccaagaaaagtagtaaaccccaatggggagccaaaagaaagaggtactaaagggaaacaaaatgttggtcatgcagaacttatatcaccaaaaggttcatgtgctgactttttaaaaactaatggtattacttatgcttctgaatcttccactggaattactcctaggatgtcaactgtggagttgaaaagttctgaccaagataaggagattcatggaggtgccatgcctcaagctacagcagcatcagttgatcctttagatggcataattgaaaagattaagctcttaaccataaacggaccagacaagggtgtgtcagaggtacctaaaaatgctcttgttccttatgaaggtgaatttagtgcactgattgcatttgaggggaaggcaaagaaaagccgtcctcgggccaaagtgaacatcgatccagtcaccactatgatgtggaacttattaatggggccagatatgggtgatgatgccgaagggttagacaaggataaagagaagtggcttgatgaagaaagaagagtgttcagaggacgggttgattcattcattgctcgtatgcatctagttcagggggataggcgtttctctcgatggaaaggatcagtcgtggattcagtcgtgggtgtatttcttacccagaatgtttcagatcatctttctagttctgctttcatggcggttgctgccaaatttcctgttaagatagaggtccctaaaaaacctgtggctgagatgtctcatactcctgaacagaaggatagttgttctggactgtttggtgattctatcaaattgcagggcaatatatacattgaagagataagtgacattaaatcgttaattactacagaagataatgaagaaagtaataataacgaattgattggaaactctgctgggaatggagtaaactgtgcaactggaggatgccatgtctcttatagtaagtcactaactggatcccatggaaatgggctatcaggatctgtttttccaactaccggcttttcaggtgtggtagaaactgaagatggatcactggaggatgttatttcttctcaaaattctgctgtttcttcccagaattccccagattatgttgttcgtagaaccgatccaataggttctagttcgttacaaaatttcactgaagagggctgtattatgagaaatatgtccaatgggactggcatctctactgactatacattgtttctgccaattcaagatccaaaaggcatgctcggattatcagaatattgtggacttaatcctcttccagtttcaggtgtgaacaaggacatgttgcttgatctaaacagatcatatcagccattacatacttatatgccctatgatcagaatagtgagtctgatttcacaggtgtgtcatgtttgaaccatatgggtaaatcattccacacaggccctgataaagtgaatctttccagtgttacacagtctgaggctagtctttaccctattgatcctttagaacaaggcgacttttcaccactaattaaacaaaacttccaaccattacatagttcagacgaagtgccatttttcaaggagcactcttcatgtaatgattttttgaggaacaaaactgaagctcattttctggaaccacttgtctgttcaaatcctcaagaggtgtacacaacctcaacagatcaaatgggtgctgaacaatctcaatcaggatgtggccaaaagtacaatgatgccagagttcagacagcatcacatgaaaggcatcagtcttcaaccttgtgtgataaccagaactcttgttcggtggtgttgcaaggagttgcttcagactcaacacagaagttcgttgatactcaaaaggggccgtcaaaagctcgacaaaatggatcaaaagctaaggtacggggccgacctaaaaagaaaactgatgactgggacagtttacggaaaaaagtgctttctaatggtggggacaaacaaagaagtcatgatgcaagggatactgttgattgggaggcagttaggcaagcagaagtacgggaaatatctgaaaccatcagagagagaggaatgaataatatgctagcagaacggataaaggaattcttgaaccgattggtgacagaccatggaagcattgatcttgaatggctaagagatgttcaaccagacaaagcaaaggacttccttctaagcattagagggcttggactcaaaagtgttgagtgtgttcgcctcttgacactacatcatatggcttttccagtggacacaaatgttggtcggatatgtgtgaggcttggatgggtgccacttcaaccactgccagagtctcttcagttgcacctcttggaaatgtatcccatgctggagcacatacagaagtacctctggcctcgactatgcaaactagatcaacgtacattgtaagattagttcaatcgatacttttcgcactatatttagatggctagattcaatgacgccttccaatatgcaggttttctgcacaaaaagtaagcctaattgcaattcatgtccaatgagagctgaatgtaagcactttgctagtgcatttgcaagtgctaggcttgctcttcctgcacctgaagaaaaatgtttggttacattggaagatccaaatgttgtagagttttctcaccaaacatacataaactcagggagtgttggccaacttgagtggagtgcaaattatcctaaacatgctgtttctggtaatcatcagccaatcatcgaggaaccactgagcccagaatgtgaaactgaaaatatagaggcacatgagggtgcaattgaggatttcttttgtgaagaatctgatgaaattcctaccattaatcttaatatcgaggagttcacacaaaacttgaaggactatatgcaagcaaacaatgttgagattgaatatgctgacatgtcaaaggcattggttgccatcacgcctgatgctgcttccattccaactccaaagctcaagaatgtcaatcgtctgaggacagaacaccaagtttatgaactgccagattcacaccctcttctggaaggattcgaacagagagaaccagatgatccctgtccatatcttctttccatatggaccccaggtgaaactgcacaatcgatcgatgcccccaagacattctgtgattcaggggagacgggtagactatgtggaagttcaacatgctttagttgcaacaatatacgagaaatgcaggctcagaaagtcagaggaacacttttgataccatgccgaacagcaatgagaggaagcttcccacttaatgggacgtattttcaagttaatgaggtatttgctgaccattgctcaagtcaaaatccaattgatgtcccacgaagttggatttgggacctcccaagacgaactgtttactttggaacctcagttcctacaatattcagaggtttaacgactgaagagatacaacgatgcttttggagaggatttgtttgcgtgaggggctttgataggacagtgagggcaccaaggcccctttatgcaaggttgcattttcctgtcagcaaggttgttagaggcaaaaagcctggagcagcaagagcagaagaataatagtacattgaagaaatataggggtgctaaccagacgaggatggatagcccgaaatgagatgctgacccaataggtcgccaaatcacctccaaattctaacccaatgacttccatctgtaatgaatggcaataccttgaaaacctgtgatggagatgttttgtggcgacatgatctcttaaattagattccgtctttggtaacagcctagctgttcttgttgagtcgcatattctttattctgaagatcaatatagcaaatgggagaaaaaacatagtgcacagtcgagctgttctaattgtacctcttgtgagtggaatcagttgttgtacaacaggaagatggacctatctgtacaatggtcgtacatgttctttgatcatagtataaacaatgtaagcctcatcagccgttatttgattgtttcaaaacaaaggaaaagcattttcaattcatctgttcaaagactatttccttttccccccttctatcttgagatggaaactgactaattttttacttgtggggatctgacagtgaatatatcaaaataatatggaataatttgtctcttctataatgtaatgctggtaggggggaaaaatac

SEQ ID NO: 45675 - DNA, 6606 bp, Zea Mays
gtgtctctctcaccccaaggagagtcgcagcgacccagccttctccctccctctctctcctctctctctcttcttgcgccgcttttccttcgctgctccgcgcggctccggcgggcggtgcgggaggaagaggagggggcggaggggccggaagttttccggccgaggagcccagcgggaggatcgaagaggaggcactggtccggggctgtccactgcatcgggttcttcgaagttggggggaccacgggactcgaagggagcgcccgatctgctccgccggcgaggtgaagtcagctgatatgatgtacctcatttggataacaatttgactggcaccagattttacagaaatatgcaggaggggctagggcaaaggatgcatgtacctcatggtatcaatctgtgtatcgcaacttcttccatgccctttcaggcgcaatctttcattgagcccagtaccggacaagtgaaccctcctgtaacatctgaaaacttatctgctaactcacaagctgttaatgatgctggagcagttgaaggtactgacatgaacgaaaaatcggttcaaaaacctaagaggaaaaaacataggccaaaggtcattaaagaaggacaatcagcaaagctgcagaagcctaaaactcccaagcctcccaaggaaaatgggaatcagcctactggaaaaagaaagtatgtcaggaggaagggactaagtgcaccagctgaacaaattccactatgtgctgatacacacactagagctaaaccaggagtagtccaaagatgtttggactttgatgtggaggaccagcatggacatttggatctggtaccgcaaacccaggaaacagagatacagactggtcctgcggacacacaaccatcaatatctggagttgaaagaagtaatgttcaaatatcataccattggggtggtacaagcagttctattagttcagttgacccaatagctggtatacacggattacaggcagactgcaattctaaaagagtcagttttgatctgaacaattctatagtaagtcagctgccaaccaattattctagtccaatggacagctctgaacaatttttcaattttgatttaagagaagaagttcgaacaaaccagttattgcctcatctaaccagctcggtagatcacacacgacacccctcggtcaattttgaccaatacataagcacatctcaagattgtccagaaaaatcacccagacattatcagatggtcagtagttatagaattctagaaaatatgacaacagcttctcagtataccgaaagggtgtctatggggggcaatttcaaccctgaagcttgtatgggcgaagatgcaataatcaaacaaatggcccaaagctatagacctctagaaagtccatttgtacctcccaatcataatgaaagggatatgatgaacggaaatctgaacgagtttcctgtgaagaatgattacttgaagttttctaccaatagtaactaccaaactggagcaggttttgatcattgttctccagactattcagatgttcttgcaatgggtacaaaaagagaacatgatgctatcagtggccatcagatttctcttggcattgactttattaactcaaatagaacaaggaagttctgtagtgatgaccccctttccactagctctcaaacatcttactgtcctcaatcatgcaaaaggatgaggccagaggatcatagcaatcagctccatggaactatgggtaagctttcttccgcatcagcattttctgatggtttgaacacaaataaagtttcagctatgaaccctagaattggtaccttggctgacgtacaattgttgatggcccttgagaaatcaaaagcttcacaacaaatgtttgagtttgactatgttacgtcacaaaataacatgatccatgaacgtactgggcttgctctgcaaaatattgctgacaaaggatttattgctctacctaataaacagttcccaagcttcgctgcacagaacatacctttgcctggcagtactgtgaaccaattgggagaaagtaataccttgaggaatggagtgcatcaaattcaaccttgggaaattacatataggctacatgactctagagacaatttttctttaccagggaacacacagttctcgaatggcacagtgaatccatcctcagaaaactatattcagagtaatgctattcatgaacatcaatgcttagaaaacgttgtggctaaggtgccagttttgtctgaaacacaaaatacttccactcaagagggccataaccactgcactgctgctactactgatgagcatatcagaactacaagtgatgaagttgttagatccctcacccgacgtgcaagccaaccaactacaaatgggaactacaatattaaatcttctagagtaactgcagaagcaaactgcactgagaagccaagaaaaaggggtcgtccaagaaaagtagtaaaccccaatggggagccaaaagaaagaggtactaaagggaaacaaaatgttggtcatgcagaacttatatcaccaaaaggttcatgtgctgactttttaaaaactaatggtattacttatgcttctgaatcttccactggaattactcctaggatgtcaactgtggagttgaaaagttctgaccaagataaggagattcatggaggtgccatgcctcaagctacagcagcatcagttgatcctttagatggcataattgaaaagattaagctcttaaccataaacggaccagacaagggtgtgtcagaggtacctaaaaatgctcttgttccttatgaaggtgaatttagtgcactgattgcatttgaggggaaggcaaagaaaagccgtcctcgggccaaagtgaacatcgatccagtcaccactatgatgtggaacttattaatggggccagatatgggtgatgatgccgaagggttagacaaggataaagagaagtggcttgatgaagaaagaagagtgttcagaggacgggttgattcattcattgctcgtatgcatctagttcagggggataggcgtttctctcgatggaaaggatcagtcgtggattcagtcgtgggtgtatttcttacccagaatgtttcagatcatctttctaggtgaaatatgcacttctggctaatttaaggcaatatatacattgaagagataagtgacattaaatcgttaattactacagaagataatgaagaaagtaataataacgaattgattggaaactctgctgggaatggagtaaactgtgcaactggaggatgccatgtctcttatagtaagtcactaactggatcccatggaaatgggctatcaggatctgtttttccaactaccggcttttcaggtgtggtagaaactgaagatggatcactggaggatgttatttcttctcaaaattctgctgtttcttcccagaattccccagattatgttgttcgtagaaccgatccaataggttctagttcgttacaaaatttcactgaagagggctgtattatgagaaatatgtccaatgggactggcatctctactgactatacattgtttctgccaattcaagatccaaaaggcatgctcggattatcagaatattgtggacttaatcctcttccagtttcaggtgtgaacaaggacatgttgcttgatctaaacagatcatatcagccattacatacttatatgccctatgatcagaatagtgagtctgatttcacaggtgtgtcatgtttgaaccatatgggtaaatcattccacacaggccctgataaagtgaatctttccagtgttacacagtctgaggctagtctttaccctattgatcctttagaacaaggcgacttttcaccactaattaaacaaaacttccaaccattacatagttcagacgaagtgccatttttcaaggagcactcttcatgtaatgattttttgaggaacaaaactgaagctcattttctggaaccacttgtctgttcaaatcctcaagaggtgtacacaacctcaacagatcaaatgggtgctgaacaatctcaatcaggatgtggccaaaagtacaatgatgccagagttcagacagcatcacatgaaaggcatcagtcttcaaccttgtgtgataaccagaactcttgttcggtggtgttgcaaggagttgcttcagactcaacacagaagttcgttgatactcaaaaggggccgtcaaaagctcgacaaaatggatcaaaagctaaggtacggggccgacctaaaaagaaaactgatgactgggacagtttacggaaaaaagtgctttctaatggtggggacaaacaaagaagtcatgatgcaagggatactgttgattgggaggcagttaggcaagcagaagtacgggaaatatctgaaaccatcagagagagaggaatgaataatatgctagcagaacggataaaggaattcttgaaccgattggtgacagaccatggaagcattgatcttgaatggctaagagatgttcaaccagacaaagcaaaggacttccttctaagcattagagggcttggactcaaaagtgttgagtgtgttcgcctcttgacactacatcatatggcttttccagtggacacaaatgttggtcggatatgtgtgaggcttggatgggtgccacttcaaccactgccagagtctcttcagttgcacctcttggaaatgtatcccatgctggagcacatacagaagtacctctggcctcgactatgcaaactagatcaacgtacattgtaagattagttcaatcgatacttttcgcactatatttagatggctagattcaatgacgccttccaatatgcaggttttctgcacaaaaagtaagcctaattgcaattcatgtccaatgagagctgaatgtaagcactttgctagtgcatttgcaagtgctaggcttgctcttcctgcacctgaagaaaaatgtttggttacattggaagatccaaatgttgtagagttttctcaccaaacatacataaactcagggagtgttggccaacttgagtggagtgcaaattatcctaaacatgctgtttctggtaatcatcagccaatcatcgaggaaccactgagcccagaatgtgaaactgaaaatatagaggcacatgagggtgcaattgaggatttcttttgtgaagaatctgatgaaattcctaccattaatcttaatatcgaggagttcacacaaaacttgaaggactatatgcaagcaaacaatgttgagattgaatatgctgacatgtcaaaggcattggttgccatcacgcctgatgctgcttccattccaactccaaagctcaagaatgtcaatcgtctgaggacagaacaccaagtttatgaactgccagattcacaccctcttctggaaggattcgaacagagagaaccagatgatccctgtccatatcttctttccatatggaccccaggtgaaactgcacaatcgatcgatgcccccaagacattctgtgattcaggggagacgggtagactatgtggaagttcaacatgctttagttgcaacaatatacgagaaatgcaggctcagaaagtcagaggaacacttttgataccatgccgaacagcaatgagaggaagcttcccacttaatgggacgtattttcaagttaatgaggtatttgctgaccattgctcaagtcaaaatccaattgatgtcccacgaagttggatttgggacctcccaagacgaactgtttactttggaacctcagttcctacaatattcagaggtttaacgactgaagagatacaacgatgcttttggagaggatttgtttgcgtgaggggctttgataggacagtgagggcaccaaggcccctttatgcaaggttgcattttcctgtcagcaaggttgttagaggcaaaaagcctggagcagcaagagcagaagaataatagtacattgaagaaatataggggtgctaaccagacgaggatggatagcccgaaatgagatgctgacccaataggtcgccaaatcacctccaaattctaacccaatgacttccatctgtaatgaatggcaataccttgaaaacctgtgatggagatgttttgtggcgacatgatctcttaaattagattccgtctttggtaacagcctagctgttcttgttgagtcgcatattctttattctgaagatcaatatagcaaatgggagaaaaaacatagtgcacagtcgagctgttctaattgtacctcttgtgagtggaatcagttgttgtacaacaggaagatggacctatctgtacaatggtcgtacatgttctttgatcatagtataaacaatgtaagcctcatcagccgttatttgattgtttcaaaacaaaggaaaagcattttcaattcatctgttcaaagactatttccttttccccccttctatcttgagatggaaactgactaattttttacttgtggggatctgacagtgaatatatcaaaataatatggaataatttgtctcttctataatgtaatgctggtaggggggaaaaatac

SEQ ID NO: 45676 - DNA, 6829 bp, Zea Mays
gtgaaacccatcgcattcgcatcgcacgcgcggcgcgccaggggagatcattcacaggggcaaggctaccactggagggggcctacgcagcagtgagaggcttctacagctcgtcgtacccactcctcttttctcactctactactagactggtgtctctctcaccccaaggagagtcgcagcgacccagccttctccctccctctctctcctctctctctcttcttgcgccgcttttccttcgctgctccgcgcggctccggcgggcggtgcgggaggaagaggagggggcggaggggccggaagttttccggccgaggagcccagcgggaggatcgaagaggaggcactggtccggggctgtccactgcatcgggttcttcgaagttggggggaccacgggactcgaagggagcgcccgatctgctccgccggcgaggtgaagtcagctgatatgatgtacctcatttggataacaatttgactggcaccagattttacagaaatatgcaggaggggctagggcaaaggatgcatgtacctcatggtatcaatctgtgtatcgcaacttcttccatgccctttcaggcgcaatctttcattgagcccagtaccggacaagtgaaccctcctgtaacatctgaaaacttatctgctaactcacaagctgttaatgatgctggagcagttgaaggtactgacatgaacgaaaaatcggttcaaaaacctaagaggaaaaaacataggccaaaggtcattaaagaaggacaatcagcaaagctgcagaagcctaaaactcccaagcctcccaaggaaaatgggaatcagcctactggaaaaagaaagtatgtcaggaggaagggactaagtgcaccagctgaacaaattccactatgtgctgatacacacactagagctaaaccaggagtagtccaaagatgtttggactttgatgtggaggaccagcatggacatttggatctggtaccgcaaacccaggaaacagagatacagactggtcctgcggacacacaaccatcaatatctggagttgaaagaagtaatgttcaaatatcataccattggggtggtacaagcagttctattagttcagttgacccaatagctggtatacacggattacaggcagactgcaattctaaaagagtcagttttgatctgaacaattctatagtaagtcagctgccaaccaattattctagtccaatggacagctctgaacaatttttcaattttgatttaagagaagaagttcgaacaaaccagttattgcctcatctaaccagctcggtagatcacacacgacacccctcggtcaattttgaccaatacataagcacatctcaagattgtccagaaaaatcacccagacattatcagatggtcagtagttatagaattctagaaaatatgacaacagcttctcagtataccgaaagggtgtctatggggggcaatttcaaccctgaagcttgtatgggcgaagatgcaataatcaaacaaatggcccaaagctatagacctctagaaagtccatttgtacctcccaatcataatgaaagggatatgatgaacggaaatctgaacgagtttcctgtgaagaatgattacttgaagttttctaccaatagtaactaccaaactggagcaggttttgatcattgttctccagactattcagatgttcttgcaatgggtacaaaaagagaacatgatgctatcagtggccatcagatttctcttggcattgactttattaactcaaatagaacaaggaagttctgtagtgatgaccccctttccactagctctcaaacatcttactgtcctcaatcatgcaaaaggatgaggccagaggatcatagcaatcagctccatggaactatgggtaagctttcttccgcatcagcattttctgatggtttgaacacaaataaagtttcagctatgaaccctagaattggtaccttggctgacgtacaattgttgatggcccttgagaaatcaaaagcttcacaacaaatgtttgagtttgactatgttacgtcacaaaataacatgatccatgaacgtactgggcttgctctgcaaaatattgctgacaaaggatttattgctctacctaataaacagttcccaagcttcgctgcacagaacatacctttgcctggcagtactgtgaaccaattgggagaaagtaataccttgaggaatggagtgcatcaaattcaaccttgggaaattacatataggctacatgactctagagacaatttttctttaccagggaacacacagttctcgaatggcacagtgaatccatcctcagaaaactatattcagagtaatgctattcatgaacatcaatgcttagaaaacgttgtggctaaggtgccagttttgtctgaaacacaaaatacttccactcaagagggccataaccactgcactgctgctactactgatgagcatatcagaactacaagtgatgaagttgttagatccctcacccgacgtgcaagccaaccaactacaaatgggaactacaatattaaatcttctagagtaactgcagaagcaaactgcactgagaagccaagaaaaaggggtcgtccaagaaaagtagtaaaccccaatggggagccaaaagaaagaggtactaaagggaaacaaaatgttggtcatgcagaacttatatcaccaaaaggttcatgtgctgactttttaaaaactaatggtattacttatgcttctgaatcttccactggaattactcctaggatgtcaactgtggagttgaaaagttctgaccaagataaggagattcatggaggtgccatgcctcaagctacagcagcatcagttgatcctttagatggcataattgaaaagattaagctcttaaccataaacggaccagacaagggtgtgtcagaggtacctaaaaatgctcttgttccttatgaaggtgaatttagtgcactgattgcatttgaggggaaggcaaagaaaagccgtcctcgggccaaagtgaacatcgatccagtcaccactatgatgtggaacttattaatggggccagatatgggtgatgatgccgaagggttagacaaggataaagagaagtggcttgatgaagaaagaagagtgttcagaggacgggttgattcattcattgctcgtatgcatctagttcagggggataggcgtttctctcgatggaaaggatcagtcgtggattcagtcgtgggtgtatttcttacccagaatgtttcagatcatctttctagttctgctttcatggcggttgctgccaaatttcctgttaagatagaggtccctaaaaaacctgtggctgagatgtctcatactcctgaacagaaggatagttgttctggactgtttggtgattctatcaaattgcagggcaatatatacattgaagagataagtgacattaaatcgttaattactacagaagataatgaagaaagtaataataacgaattgattggaaactctgctgggaatggagtaaactgtgcaactggaggatgccatgtctcttatagtaagtcactaactggatcccatggaaatgggctatcaggatctgtttttccaactaccggcttttcaggtgtggtagaaactgaagatggatcactggaggatgttatttcttctcaaaattctgctgtttcttcccagaattccccagattatgttgttcgtagaaccgatccaataggttctagttcgttacaaaatttcactgaagagggctgtattatgagaaatatgtccaatgggactggcatctctactgactatacattgtttctgccaattcaagatccaaaaggcatgctcggattatcagaatattgtggacttaatcctcttccagtttcaggtgtgaacaaggacatgttgcttgatctaaacagatcatatcagccattacatacttatatgccctatgatcagaatagtgagtctgatttcacaggtgtgtcatgtttgaaccatatgggtaaatcattccacacaggccctgataaagtgaatctttccagtgttacacagtctgaggctagtctttaccctattgatcctttagaacaaggcgacttttcaccactaattaaacaaaacttccaaccattacatagttcagacgaagtgccatttttcaaggagcactcttcatgtaatgattttttgaggaacaaaactgaagctcattttctggaaccacttgtctgttcaaatcctcaagaggtgtacacaacctcaacagatcaaatgggtgctgaacaatctcaatcaggatgtggccaaaagtacaatgatgccagagttcagacagcatcacatgaaaggcatcagtcttcaaccttgtgtgataaccagaactcttgttcggtggtgttgcaaggagttgcttcagactcaacacagaagttcgttgatactcaaaaggggccgtcaaaagctcgacaaaatggatcaaaagctaaggtacggggccgacctaaaaagaaaactgatgactgggacagtttacggaaaaaagtgctttctaatggtggggacaaacaaagaagtcatgatgcaagggatactgttgattgggaggcagttaggcaagcagaagtacgggaaatatctgaaaccatcagagagagaggaatgaataatatgctagcagaacggataaaggaattcttgaaccgattggtgacagaccatggaagcattgatcttgaatggctaagagatgttcaaccagacaaagcaaaggacttccttctaagcattagagggcttggactcaaaagtgttgagtgtgttcgcctcttgacactacatcatatggcttttccagtggacacaaatgttggtcggatatgtgtgaggcttggatgggtgccacttcaaccactgccagagtctcttcagttgcacctcttggaaatgtatcccatgctggagcacatacagaagtacctctggcctcgactatgcaaactagatcaacgtacattgtatgagcttcactaccaaatgattacttttggaaaggttttctgcacaaaaagtaagcctaattgcaattcatgtccaatgagagctgaatgtaagcactttgctagtgcatttgcaagtgctaggcttgctcttcctgcacctgaagaaaaatgtttggttacattggaagatccaaatgttgtagagttttctcaccaaacatacataaactcagggagtgttggccaacttgagtggagtgcaaattatcctaaacatgctgtttctggtaatcatcagccaatcatcgaggaaccactgagcccagaatgtgaaactgaaaatatagaggcacatgagggtgcaattgaggatttcttttgtgaagaatctgatgaaattcctaccattaatcttaatatcgaggagttcacacaaaacttgaaggactatatgcaagcaaacaatgttgagattgaatatgctgacatgtcaaaggcattggttgccatcacgcctgatgctgcttccattccaactccaaagctcaagaatgtcaatcgtctgaggacagaacaccaagtttatgaactgccagattcacaccctcttctggaaggattcgaacagagagaaccagatgatccctgtccatatcttctttccatatggaccccaggtgaaactgcacaatcgatcgatgcccccaagacattctgtgattcaggggagacgggtagactatgtggaagttcaacatgctttagttgcaacaatatacgagaaatgcaggctcagaaagtcagaggaacacttttgataccatgccgaacagcaatgagaggaagcttcccacttaatgggacgtattttcaagttaatgaggtatttgctgaccattgctcaagtcaaaatccaattgatgtcccacgaagttggatttgggacctcccaagacgaactgtttactttggaacctcagttcctacaatattcagaggtttaacgactgaagagatacaacgatgcttttggagaggatttgtttgcgtgaggggctttgataggacagtgagggcaccaaggcccctttatgcaaggttgcattttcctgtcagcaaggttgttagaggcaaaaagcctggagcagcaagagcagaagaataatagtacattgaagaaatataggggtgctaaccagacgaggatggatagcccgaaatgagatgctgacccaataggtcgccaaatcacctccaaattctaacccaatgacttccatctgtaatgaatggcaataccttgaaaacctgtgatggagatgttttgtggcgacatgatctcttaaattagattccgtctttggtaacagcctagctgttcttgttgagtcgcatattctttattctgaagatcaatatagcaaatgggagaaaaaacatagtgcacagtcgagctgttctaattgtacctcttgtgagtggaatcagttgttgtacaacaggaagatggacctatctgtacaatggtcgtacatgttctttgatcatagtataaacaatgtaagcctcatcagccgttatttgattgtttcaaaacaaaggaaaagcattttcaattcatctgttcaaagactatttccttttccccccttctatcttgagatggaaactgactaattttttacttgtggggatctgacagtgaatatatcaaaataatatggaataatttgtctcttctataatgtaatgctggtaggggggaaaaatac

SEQ ID NO: 45677 - DNA, 2667 bp, Zea Mays
atggaagtgagggatgcctgcagaaaaagatgtactccaagcaacaagctatcggcttctgaagatgatctcaggactgcggtggtgttaaccattatcagcgaccttgtgattcctccggtggagattgctgcgcttctggctccaagattgaatatcaatgaaacttcactggtcatccgcaggatctctgcaagtagtctgctactgattcttcctaatatggccaaggcagacctcctagtcagtcgttggcctctcatcagaactgcttctttttctgttatctgtaagcgttgggcaaggtttcttggcgcctcgggagtcgccttgccattcttggttgatctggagattggaggcatccctgttcatgcctgggaaactaatacggtggaacatattcttagcccctatgcttggattcatcaggtgcatcaggagaccttggcactgcaagatttgtcctgctttcgatgctctgcttggtgtactgatccgtctactattcctgcttcacgtgacttgtggattgttgagtctgttcaggttgttgagggcaatgttggagaaactatggctctgagctacccaatcactattagtttttccgttgccttccgaccgaacgattccaattcacagtctgctcttcctatggattctgtgaatgatggtgatcaaagtaatggccactatggacatgccaatcagggattgtctcaggggcttggtgcatttgggccagagaccgttcagggactagccagccaccagttaccaaccaggggacagcttgccagatatcgtgcattgtttgacacttctgaattacataaaattgctgacccacttctggattgtcttcttgctgattgggagactcgtcattcgtccatgtttcatcaatcgtccaggattttcattgatccctgctgtttggatatgacggtggacctaggaggttttgggccacaatcttcgaattggttagggatttctacagccagtcgggattggattgggctgcaattatgcccacctataaattatttgaagccatttctgactccatgtagggaccttgggtatctaagagtaaatctaagtgggttttctttgccatctgggatggtctatggtggtgcaacaacagtcaaaatcttctatcaacggcgtcgaaaaaccactgctggaaataaaattgctacaattaatgatgatgataatgtggaggctcatgctttgagattggacttggatgttgatgtgacagcggttactctgtctgaccccccctcggacgtggaaggagttgctgatactccgtctgagaccatctctagatttcacgggccattattattagagtacaatggaacagcgaggagggctgatgcagactcaactgttccactcaggcctgaggtggtagcctctgatgacagttccaggcagaattttggggattcatgtgagtcctcattggatctgtcatcttctatggaatctagaagaagatcattcatggctaagataacaatggcaccttcacagctccttgctgctcctgtcctccccaagcggtcaagaggtgccacaaaatatggtactgcgctacgacggagccaacgggttgcaggggcaggggtggaatttaacatgcaggatctggagaacagagccacaaaacaagtaatgcggactctgaaagtcatcacagagaatgcatgcatcaaccagcaagctgttaaggattatgagaatctttttcagcattccttaactcaaagtcatgttgaagcgttagcggctctctttggatggggactccggggaatctcttcccgtagtgtgtctgtttttctttctgggttgtaatctataattgttgtaatggatcctagcaaaattatatgttggaatgtgaggggtttaaattcagctgatcgtcaaaactcagtccggaatctagttctgtcctctaaagctgatgtggtctgtctccaggaaactaaaatgactgtcatttctacaagaaccattcttgcagccttgggttcggatttctgccagttctcctttctaccatcttgtggtgctagtggtggtgtgctggttgcttggaagcgacatctgggagtgactgggttgtctaggattgacagatacagcatttcaatccaattctgcaatgcgcataatcgctgctggtggttaacttgtgtttatggtcctcaaagtaacagtgataagatgttgtttcttcaagaactgagagacgtcagggctgcttgcactggaccctggttgattgctggtgacttcaatctcatctacagggcttcagataaaaataattcaaatattaacagagctatgatggggagatttagaaagttggttgaggacttgagtctcaatgaggttccactttttgggcgtaaatacacgtggtcaaatcagcaagacagtcctgttcttgtcaagcttgacagggtcctctgttcagtggagtgggaagacatatttccaaatgtccttcttcaaagtgctgcctctgaaggctccgaccattgccccctgctgcttggcattagagataataagatgggtaaaagacgtttctgttttgaagctttttggtccaaattggaaggattccag

SEQ ID NO: 45678 - DNA, 1468 bp, Zea Mays
cagccccacaacacaagctgagagaggccatcgctatggtagacgaggtcgggccgccggagaagcctgcaatggagccagcaccggccgcgaagcagatcatggtgccggagaagccagaggagatgctgagagctcagcatatgttgaccactctggtggacgaggtccggccaccggagaagccagaggagacgccggagaacacctccgcaggatgtccaactccatcctacccccgcccaagaatgttgatgtcgagcgctccgcctgttccgctcccgcgccgccaacgagcaccgccgagctcctccctggcgccacgtcccgacagacgtcggcgccgagcggctggctccaccgtgctgagttgaccaaatgggtctgatggaaagaggagcatttgctgcttcttggcttgcaaaaggcatcctgacctacatccacccagcataaaaacgtgtattggtcacatcatcaagcaaatagtgtggttggaggccatggccaacagccagagagacctagcatcgtccaagggagccctccatgggcgacacaagagggggacagccacacacacatgcaagacattgaggagaagcacaaccatgttgtgtgtcacctttcctttgattgctagttggatcattcacatattatatcggttgaatcatcttctacaccaaaaaaggcatatgttcctgcagtgataagctttccttttcactcatgttatttccttaccatgtagaataatatgtttgtgtgacaaaagtattgttttactgtgccacattacagtgtttgtcatttataccagcccgagtagatggaagaaagccttctcttggaatgtcctttgattctataaaggatgtggaagagttctataagtcatatgcacatgacgaagggttttctattcgtattggtcctcaaaatttagctattgatgaggttatcaacaagagatttatgtgttcaaggccaggttttaagaagatgaaggagacaaatggtccacctaaaaatttaaagaaccatgcactgacaagatgtggctatgatgcaaatgtatatgtgaagttgggtattgtgggggacagatatcccccgggtccatcagaaggataaaagacctcacgaaaggcccaagggccccataattcgtaaggtcatccccttgtgggcctgggagagacgaccagtgaagcggatcgacataaggctggatcggtgcaagcccagacgacccaatgacttcgagcaagtaatcacaacagtgatccgaccttcccgcgctggagccccgtacaacagaaccgagcgaggatgggtcggcggaactataggaagatagactcaatcggttcactatttcttaggtgcacattgttatcatacctgcatgtattgccccacggtcgaatatataaggcctagggggcaccccttcagaacacat

SEQ ID NO: 45679 - DNA, 1349 bp, Zea Mays
cagccccacaacacaagctgagagaggccatcgctatggtagacgaggtcgggccgccggagaagcctgcaatggagccagcaccggccgcgaagcagatcatggtgccggagaagccagaggagatgctgagagctcagcatatgttgaccactctggtggacgaggtccggccaccggagaagccagaggagacgccggagaacacctccgcaggatgtccaactccatcctacccccgcccaagaatgttgatgtcgagcgctccgcctgttccgctcccgcgccgccaacgagcaccgccgagctcctccctggcgccacgtcccgacagacgtcggcgccgagcggctggctccaccgtgctgagtgtggttggaggccatggccaacagccagagagacctagcatcgtccaagggagccctccatgggcgacacaagagggggacagccacacacacatgcaagacattgaggagaagcacaaccatgttgtgtgtcacctttcctttgattgctagttggatcattcacatattatatcggttgaatcatcttctacaccaaaaaaggcatatgttcctgcagtgataagctttccttttcactcatgttatttccttaccatgtagaataatatgtttgtgtgacaaaagtattgttttactgtgccacattacagtgtttgtcatttataccagcccgagtagatggaagaaagccttctcttggaatgtcctttgattctataaaggatgtggaagagttctataagtcatatgcacatgacgaagggttttctattcgtattggtcctcaaaatttagctattgatgaggttatcaacaagagatttatgtgttcaaggccaggttttaagaagatgaaggagacaaatggtccacctaaaaatttaaagaaccatgcactgacaagatgtggctatgatgcaaatgtatatgtgaagttgggtattgtgggggacagatatcccccgggtccatcagaaggataaaagacctcacgaaaggcccaagggccccataattcgtaaggtcatccccttgtgggcctgggagagacgaccagtgaagcggatcgacataaggctggatcggtgcaagcccagacgacccaatgacttcgagcaagtaatcacaacagtgatccgaccttcccgcgctggagccccgtacaacagaaccgagcgaggatgggtcggcggaactataggaagatagactcaatcggttcactatttcttaggtgcacattgttatcatacctgcatgtattgccccacggtcgaatatataaggcctagggggcaccccttcagaacacat

SEQ ID NO: 45680 - DNA, 1393 bp, Zea Mays
ctacgtctcgatccttccggtcgatacttttccgctccacgcgacacgatgcttccagactaaaatcggttgtttcctccacacgatcgacaatcgacggtcacgatttggcatcggtgaaccacccgactcttctagacgaatgcgaatggacgagtaaaaaacaatctgaggtcccagtcaagctgatgagtcctgcagccccacaacacaagctgagagaggccatcgctatggtagacgaggtcgggccgccggagaagcctgcaatggagccagcaccggccgcgaagcagatcatggtgccggagaagccagaggagatgctgagagctcagcatatgttgaccactctggtggacgaggtccggccaccggagaagccagaggagacgccggagaacacctccgcagtgtggttggaggccatggccaacagccagagagacctagcatcgtccaagggagccctccatgggcgacacaagagggggacagccacacacacatgcaagacattgaggagaagcacaaccatgttgtgtgtcacctttcctttgattgctagttggatcattcacatattatatcggttgaatcatcttctacaccaaaaaaggcatatgttcctgcagtgataagctttccttttcactcatgttatttccttaccatgtagaataatatgtttgtgtgacaaaagtattgttttactgtgccacattacagtgtttgtcatttataccagcccgagtagatggaagaaagccttctcttggaatgtcctttgattctataaaggatgtggaagagttctataagtcatatgcacatgacgaagggttttctattcgtattggtcctcaaaatttagctattgatgaggttatcaacaagagatttatgtgttcaaggccaggttttaagaagatgaaggagacaaatggtccacctaaaaatttaaagaaccatgcactgacaagatgtggctatgatgcaaatgtatatgtgaagttgggtattgtgggggacagatatcccccgggtccatcagaaggataaaagacctcacgaaaggcccaagggccccataattcgtaaggtcatccccttgtgggcctgggagagacgaccagtgaagcggatcgacataaggctggatcggtgcaagcccagacgacccaatgacttcgagcaagtaatcacaacagtgatccgaccttcccgcgctggagccccgtacaacagaaccgagcgaggatgggtcggcggaactataggaagatagactcaatcggttcactatttcttaggtgcacattgttatcatacctgcatgtattgccccacggtcgaatatataaggcctagggggcaccccttcagaacacat

SEQ ID NO: 45681 - DNA, 2967 bp, Zea Mays
cagccccacaacacaagctgagagaggccatcgctatggtagacgaggtcgggccgccggagaagcctgcaatggagccagcaccggccgcgaagcagatcatggtgccggagaagccagaggagatgctgagagctcagcatatgttgaccactctggtggacgaggtccggccaccggagaagccagaggagacgccggagaacacctccgcaggatgtccaactccatcctacccccgcccaagaatgttgatgtcgagcgctccgcctgttccgctcccgcgccgccaacgagcaccgccgagctcctccctggcgccacgtcccgacagacgtcggcgccgagcggctggctccaccgtgctgagttgaccaaatgggtctgatggaaagaggagcatttgctgcttcttggcttgcaaaaggcatcctgacctacatccacccagcataaaaacgtgtattggtcacatcatcaagcaaataggtgatacgatgctttatgtcttattcttacaagcatctgagtcttatggtttctttggttttcttctttcttaattcttatttgttttttgtgaagttacgtccaaaaattgacagaaggaatagctcatacacacttgataacacactttcttctttttatcagcatacttttcagtcctttctaagttctaacgttgtcactttccaaatcctgttgtcacttataaaacttgcacattgatattttatttagtatcagtacaatttatatggatgcatatgtttagatgaaacttgatatttgattttgtatcggtacaatttatatggaggcatatgtttagatgaaacttggtgaagcattgttcaatattcatcacaacttcaggaataataacaacgacaccatgtggaccattacttcgattttggcaaatctagtttcaaaacattcgagctaaacaacactaaggacaatagttcatacaacctcatgaaagaacaatgccaacatagaggtgcacaacatatgtcatactttcaatttttcattgtcctaaaaacacagcaatatgtgccatctaatactcatgatacgaaggtaagtggaagacaataaatttgtagcaagcttctatgaaatagtacacagaggtgatgaatacatttagttccatgtctcaagcactacatgtcaacctttttactaatacatttttatagcaggcaaatctagcttgcttttgtatgataggtcactaggtcagtaaagacaaattaagcattatgtgccagaacatctacctgtatagaaataccttccttcatgcaaaggaacactaaaatcataccacatatagttacttataaaaatcacttataaatgtttttgaaccacgacgccgcacgcgccctgcgcgcgccagctactagtaaattaaaatgatataagctgagcttttttagtacatgtcttctgacaatgaatttttagctatttaactagtactatcatatctagtgcggcttttatgcatcatctttaatatgattttggtgacatgtttcttttctatttatccataaactttctgtgccaatcaaaactatatataaaaggatcaaatatatggcacaacaactacaataacagttgcattgatatggtaacgacactgaataacattcataatacaaattgcacgaatagcattggaataccatacatctgatgactaattaaagcattcgattattatcttttttactttagttgtatatataatcaattggttatgccagtgacaagatggacatcagtagatacactagctataaaagttcaaaatagacttaggatctagtagcgatcttaggccctgtttggttcatttagtcactagactaaattttagtgactaaagtttagtcgctaaagtatcctgtttggttccagtgactaaacctgactaaagagcattaattgctgtgaataatgactgttttaccctattaattaatggatgtttgctataagaagaaagttgagagggcaaatagggtaaaaatactactttagtcccttttagtcaccccttggtgactaaagaactaaattttagtcatctcattttaatcatcatgtttgcttctttagggactaaaagtgactaaaatttagtcactaaactttagtcatcactaaccaaacggggccttaggttggttcgaacctcctggtctaaatcgaccaccaacttagctatcgcattatcaattttgctctcgatcacagtcagtcacttcttattttgtgtagcaccttagagcatagccttcagcgttagcttataatcacctcaatgacacatcaacatttttatagaattttaattaacataaaacacattatttttattgaaatgaaaataaaaattacataatttataaaaaaaacttatttataagttggattataggttttaaaaatagatatttttgtagaaatagatatatttttaaaaacaatctaaattgtttggacttcaaacaattaaaacatatgtggaccaaaatgtcgtgctgtcgattctataccacactatcgatcagatcgtccaacgtatcgaagccagctccaatatagttgttatcgattggcctgatcgatccatccatcagcattgggaccgacgcattcgatatcaattgcatgtcaccattggaaccacccttatatgaacaataatttaagtcgtggatctcatacgtcttaactttttgtcgctgacatcattgtcaatggagccgtgcaaaaatcattgttttatatggaggaacgtatattgtgctcacgcaggttatgtgctcatgtgagcacttttaatctggtgtgttcgttaccaatccaacgtcagtcggtcatttttcatttcaccccttccacttcagttgctatcgcacaagaaacaattcc

SEQ ID NO: 45682 - DNA, 577 bp, Zea Mays
cagccccacaacacaagctgagagaggccatcgctatggtagacgaggtcgggccgccggagaagcctgcaatggagccagcaccggccgcgaagcagatcatggtgccggagaagccagaggagatgctgagagctcagcatatgttgaccactctggtggacgaggtccggccaccggagaagccagaggagacgccggagaacacctccgcaggatgtccaactccatcctacccccgcccaagaatgttgatgtcgagcgctccgcctgttccgctcccgcgccgccaacgagcaccgccgagctcctccctggcgccacgtcccgacagacgtcggcgccgagcggctggctccaccgtgctgaggtgctcccccatgcccctaccccttaggacaagcggttgagctccgcctcgctcctagcgttcgtatctagaccgtgtggactcttctgtcctaaactactaacaatttttgtacaaataaaaacattctttgcttctctacgcgttcgggcctgtcagatagtagcatctacctatagtaatatttaatcataaaaataattaatg

SEQ ID NO: 45683 - DNA, 243 bp, Zea Mays
cttaacctcgtcttctcctaaacaaacaactatgcacccgccgcgaatattttggtgctcccactttggcttcctttaggttttgggcaaaaggagggattactgtgagaggttaacgatctctaaaaaaatatactcctcctatattctatacttgggaacagataggtagagagagaaaggatggaagagagataacgttactgtaacctaaggttgttatgaggtggaggtagagagcca

SEQ ID NO: 45684 - DNA, 8408 bp, Zea Mays
tctttccctccaataattggcacccttacccccaaaaaagggatagaaacgaaccagatgaagttaatgaaccagatgaagcatggcaattaataaaactaaagaaaataatagatgcaactcagaagagattgccaatgcaacaagtcattagctggaaaagtattaagggggtgtttgaatgcactagaactaatagttagtagctaaaaaattactagtagaattaactagctaacaaatatctagctagctattagctaatttgctaaaaatagatgtatacaactaattttagcagctagctattagctctagtgcattcaaacaccccctaaaatagacaactctatgtaactttgcctaacatactagttattaaaaaaactcagttgaagtattttctatgtcaagttattttttcaagtgataagcttgaacaacaaaagcaacaacagtctttttgtcacaagcaagttatggtaggctatagttaaaaccaacacgaaccataagtcaaggttcaagcacatggataactattttccatgcactcctattcaaggctaaatctttggttatatttcatcttttgaagtctccttttcctgtctcttcctatgtccacttcggttttcccctaccactcttcttgttatcatgccttagaatccactacgcactagtgcatctggaggtccccgttggacatgcccaaaatatttcaaccagtgttcggtgctacccctaccctatcacgtacatcatcatttcagactcgatcccttcttgtatgaccataaatccaacataacatacgtattttgcagcatttatctgatggacatgtcatcttttttagaccaatattctgcaccatacaacatagcaggcctaatcaccattatataaaacttgtttttaagcttctctggtaccctcttgttatatagaacaccaaatgtttgacgccactttatccagcctgctttgattccatggctaacaacttcattaatatccccgtctctctgtagcattgatcctaaataccgaaaggtatctttcttgtgcactacttgaccatccaaactaacatctcattctcgtgtgtagtagtgccaaagtcacatctcatatatttggttttagttctactaagtttaaaacctttaatctctagagtctcccgccacaactctagttttctatttactcatgctcgactttcatcagctagcactgcattgtccataaaaaacatacaccaagggatttatccttgtacatcccttgtgcactaagccaaaaggtaaaggctcaaagctaattcttgatgtagtcctattctaatcaggaagtcatctatgtcttcatcacttgttcgaacattggtcaccacattgttgtacatgtccttaatgagttcaacatacttaactttatgtttgtaaagtccaccacataatattctttggtattttatttttatcgtaagcttacataacattctttggtattttatcgtaagctttctctaagtcaatgaaaaccatgtgtaggtcttattctaatcccaatactgctccatcacttgtcttattaagaaaatggctttcatgtttaaccttctaagcatcaaaccaaatcgttattcctcttagaatatgctcgataactctcttccatagctttatagtatggatcatcaatttaattccttagtaattagtatgactttgaatatctcccatattcttatagatcgatatcaatatacttcttcactcgacatgcatcttgtttgaccgaaagatatggttgaacaacttggttaaccatactatagttatgttcctgaggcatctatgtcttaattgagatacctttaggacccatcaccttaccccctttcatctttttcagtgtctttctaactttaaattcttggatcctatgcacaaagcccctatcggtgtcatcagaaaagtcatctaactaaaaagttgtccctattctccccattgaataatttgtcaatattttctccatctatgtatgatctcgtcctccttcaccaagagatgccatgtttcatccttaacacacttaacttagttgaagtccttcatactcaaatgttggtaaagatccgcatatgccctaccctttgccacacttataactcatttggatatcttctttgctacattatacttatctatgttatccactcttgtcatggtataaatgtctgtagcactctttcttctcccttttggacttcatcattccaccaccaagtacctttagcttcgccttcactccctttcgttgctccacacacatttaaggctaccttccaaatacaggttaccatcttctcccacatattgtttgcgtcttcttccaactaccctctttaatggcttgttccttcaagacttttgtcatccccctttcagtttccaccactttattcttgcacgcattcacctaaaaacgaaagaccgcaaccacaagcttatgttgagagacaacacactcctaagatattacctttaccttacaatccaagcatgctcgtttatcctctcttcttctgaggacaaagtcaatctgactagagtgttggccactactatagatcactaaatgggattttctcttcctaaaaaagtgttggctatcaacaggtcaaaagctattgtaaaatacagcactttctctccctcctgattgctaccaccactcccaaaacctccattaacgacctcgaaacctgtatttgttgtacctacatgcccattgaggtttcctcctatgaaaagcttctcattaataagtatagctatgaccataccatctaagtcattctagaaaagtttcttagcactctcacctagcctacttgaggcatctgtgctaaggctgtgctcatccttagtttgacgtcggctgggatggcactctgttcaatggcctctccacttccacctccacctccacccccacctccctcccacgcccccaaccctcccacctccacccaccacccctgcccctcgccggcctccaccccggaaccggcgaccaacccagaaaactcccttggtgtccctctcgctccacatgtgggccgcctaaaggctcaacgttggagtgatactagtccagtctcatcatctggtgactcctggctggcaccccagtcctataaggaggccctgttagcatatcccttggctcccgcggctcctcccccggcaccaagtgtgaagcctgtctactcggcgaaggcggtggctgattcccttcctgtggtgcaaggccggcgggctggtccccggcatgacgacgacggatggcaagtggtgaggagtaagaggaggcagtttcgcggtgttcaactccctcgtcgagagcccccggtggttctccgaggacggtgtttcaactgcttctcctccggccacctggctgctgtctgccgtcgacccacgcgctgtttccggtgcctcaggcttgggcatcaggctgccaagtgtccaggtcgccttgaagtgcaaaggaagaagactgtgtggcaacgtttggaaaaacaacaatcgaaggtctctgtgtggcagcgcctttcagagcagcgtgaagactcgccagtggcctcgcagcgggctgatccctgtaggcgtcgctcggtgtgggtccagatcagcagacctgaggctgctgcgatgaaggaagatccccctaggatggctgatgatggggagtcacatagaagcctccgttacaaacgaaagagaagacgatccaaacatggaaaaggatcatcaaggtctgtggtcgcccctggccaggcgttatcggcctcgtcagaggatgaggtacctccgtcgactagacagacccctgttcagtgggctggcgatcaaggcgaaaggaactggggggctctttcttcctgtacccttgaattcagtgatgacatggctcgtgaagaagcaaatatgagaagagccctcttcgttacaatagtgggaaccagaccattagtgatggggcctgagatccttgaggaagttgctcacagtttcaacgtcaagttggaggatatgaagattcatcacaccaagccagaggattttcttctgattttacctgacgaagatactgcttcaagggtgcttaatggcggcaagattctaagaggacctcgattcagcctgatattcaagcggtggacgagatgctctcacgcctcatcttcgataatgtcagggctggtagacttggaaatcagagggatcccggagcatgcttgggcactttctacggcaaaaagtattctgattgactcctgcttgatagctgaagtgcaccctgacactttgctcaagcaagatctatcttcgtttgtcgtcaaagtttggtgttttaacccggagaaactccaacgtgactcagttcttcacattattgagcctgggttgcagatgtttgagaaaagatgcctcacatacaagattcaagttagcgtgctgagggcgggttcaagcatcacaccagcggaccccactccatctgtggctggcggaaaatccccaggggatgaagacggaaatggaactcaagatccccaccctcgacgtccaggtggctctcaggtccagaggaggccgttacatcttcgattgggcccacagtcgtcttcaggccgcggcaacgaggcgcctgcgcagtcatgcgccttggaggaagtagcgggagatgctgggcgagatctgcatttaacactgggcactgatatgtctccaacgtccgaggtgaggacgctgcaccttcgccaggccccgcagccgtctttgggccgcgatttcgaagcgcccgcgccgccatacgcctcgcgggagaattctggagatactctgcgtgttacgcaattaatgccgctgacgaccgaggagccccttcacgctgaagcgcttccagaggcgtctcctcacattgatggcgcaccttcacaggattttgaagtggcgggacaagtaacgatggagaagagaaacagtccccaaggttgctactctgcggtgcacgaatctggcggggtgacttcccgccttgtgattaatggacctgtaaggttcctcaggccagatccggcccgttgcctggttgggtcgctagagacatctgggcctgttcctgtctcgcctcatgagccggctgggccgctagagacatgcatttccttgcctgtctcgccccaactgtgttctgggccgctgaagacgaacaccctcatgatagtctcgccccaactagtttctggtttccctgagtcaacgtttccaagtgctggcctgcctctacagatgctgggaatggctgggaggatggcagtaacagtccgacacaacgaagcaacaaaagctctcaaggtctactttcgcagaagaactaaggcacaacccctccaaatcagtcagaatgaagagacagaggccagtataattcagacaaacaacacttctcactcggactcaagacttctgaaccaatctttatcagggaaggaagaattcctcagaaaaatcagtaaagcagctgatgaaatactgccggctccaaagcaaaccatgaatacctcatcagccccacaatcttctcaggtggctgctcctaggcgcagccgacgcattgcgggggctggggttgagtttaatatgcgagattggggtaataggtctactaaaaaggctatgagagctttgcatatcttatctgatgacaatggtactacccaggaagcactagacgcgtatgcaaagattttcaagcaacctttgtcccataaccaggtagaagctttggcggccctctttggttggacccctcctcctggacttgtttgttaggtccccggccccctggtgttctctgtagtggcttttatctgttttctatggatcctggaaaacttttaatttggaatgtgagggggatgaattcctctgttaggcaggactcaataaaagaattggtggactcctcccaggttgatgtggtgtgcttgcaagaaacaaaaatgcagaacatctctaggagaaacattctgtctatgttgggagctgatttttctgagtatgtgtacctcccatctgtgggggcaagtggtggtattttgattgcttggaggagacacattggtcacacaggacagacaaaatttcaaaatcacagtatttcggtccagttttgtggggcagaggggcaggcttggtggcttacttgtgtgtatggtcctcagggtgagggggaaaaaattcagttcctccaggaacttagagacatcagaaatgcttgtgatggtccttggatggtggctggggactttaatctcatctactgctctgcggataagaacaattccaatattaatagggcaatgatgggtcgttttcgacagacaatcaatgacattgctcttaaggaaattccattacatgggcgaaagtacacatggtccaaccagcaagcaaaccctgttttagttaaacttgatagagtgttctgctctgtgtcttgggagcaatgtttcccaaatgttctcctccagagcatggcatcacatgattctgaccattgtccgctcctgctgggtcttcaagggaacaaacctgggaagaaacgctttcattttgaggctttctggccaaaaatggaaggtttcctggaagtggtacaggctgcttggaattcggtacacaatatcaggtgtccattccaaaccctggatttgaagctaagggtaacagcaagatctcttcaaagctggagtgacaaacaggtgggccatgtgaggctgcagttagccttggcaaaagaactgcttcacaggtttgagatggcacaggacgaaagagacctctccccagctgaaaattggtttaagaactgtctcaaaaaacactcactgctgctgtcttctttcaaacgcactatggcaaggctgagatctaggatcacatggttaggagaaggtgatgcgaatacgaagttttttcacattcatgctaggcatcgcaagaggaggaattttgttgccaagttagtggatggtggtcacattctatctgagcacagtgagaaagctgcagcagtggaccttttctacaaaaatcttattgggcaggatggacagagggatataacaattgacctggcagctcttggcctacctagatacaacctggctgccttggactccccttttacagaaaaggaggtcctggaaaccatcaaagggttaccctctgacaaggccccgggaccggatggattcactggtcttttttacaaagtgtgctggaacattgtgaaaagtgatattatggcagtggtatcttcggtttggagcagaaatttcagcaatttctggaaacttaacactgcctacatcaccatggtgccaaaaagagatggggctgagcaagttaaggatttcaggccaattagcctggtccacagtattgcaaaactcattacgaaaattctcgcaaaccgacttgcaccaagactgaatgaattggtatccccaaaccaaagtgcattcattaaggggcgattcatccaggacaacttcatgttagtgcaacagacaactagactgtttcatcaacaaagattatctcggttgctcctcaagcttgacatcaccaaggcctttgactcggtctcctggccctttttaattgatgtcatgcagcagattgggtttggacagatctggagggacatggtttgtggtcttcttgcttcatccaccacacaagtcatgctcaacgggtttcctggtcaacaaattcagcatagaagggggcttagacaaggggatccgctgtcaccaatgctgttcatattggtcatggatgttcttggacacttatttataaaggcagaagaggcaggtttattgcagcagcttgcagcaagaagacaacttcacagagtatccatttatgcagatgatgtagccctcttcttacaccctacggtggatgaaatctccatcactcttgatatcttgcagctttttggcagtgcctctggtctcaaaactaatgtgcagaaatccaatgtctaccccatacagtgttcagaagaaactatcttggaagtccaaagtatgctaccgtgtgaggtcgcagtttttccttgcaagtacttgggacttcctctttccttgcacaagctgtccaagcaacagttccagccgtatgttgataaatttgctgaccaactacctaattggaaagctgatttgatgaccagagcaggcaggagaatactagtgcaacatgtgctcacaggtatgactgtgtacctggctatggcaattgata

SEQ ID NO: 45685 - DNA, 644 bp, Zea Mays
aaaagatttgtctgagggccactggaaggagctgcaactacagaatcttgatggtgcaggaatcattatcaagggaactgcaaatcgagcgggataagaacaagtctctgaccgagaggtttgaggatgtggagaggcaactcgagttggcaattaaagagcaagaagcaacggtagaactctttgcagaagaaaggaagtgccacgaccaagaggtggaaaacctgaagcggaagctcacggaggcctcttccaccattcaggatctgatggagcagctcaatgctgcccggaactgctgcaagagatgaagcagcagacgaagcaacttcaccccccagtaatacgttagtacgtgtatgtcaccagcatgctcttagcataaataatgcccagatggttgtggagctgttagcagtagcagaccagaatgctctatgtatgtttcacgtcctgttgttagatgtgtggtagcaagtgtaagatgattgaatgagactaacgtgatgaattccctaggccctcatggttcctgatttagtgtaataataattagagaggatattgagagtgaattgcaactggctttgtttgggagcaatgatactgaaggggattagagggcctaaaatctgaatagcaag

SEQ ID NO: 45686 - DNA, 2736 bp, Zea Mays
atcgctccagttcgcgctcatggcccccactgctgtggatcccggtcccagcgaccaccttctagcgccggcgccggctgccatggctggaggaggggatggcggtgatggacagatggaggtggtgttcaatgtgagcagcagcgacaccgactccgatgacctcggcgccggtggtggaaagaggtcgcggcccgtggcggggcaaggtggtggcagggatcgagaggacaagaaggccagaatcttggccgctgccgccacggtcccagccggattcctagagccgctttcgccggtgaggttactccccccgccggcgccgggaaggagcgtgacgaagcagttctggaaggccggagactacgtcggcaagccggatcacctgcttgccgtagtggcggctcagcattctgattctggaatggatcacgttcgtgtgcatcccaaatttctacattccaacgcgacaagccacaagtgggcactaggagctttcgccgagctgcttgacaactctcttgatgaagttgtgcatggagcgacatatgtgaacattgacatgatagaaagtaagaaggatggaactccaatgctgcttgttcaagacaatggtggggggatgaacccagataagatgcgtcattgtatgtccttgggttattctgcgaagagcaaagtcaagaataccattggacaatatggaaatggttttaagacaagtacgatgagacttggagctgatgtcttagtgttttcatgtagtcgtggtattgaaggaacaaggcctacacaaagcgttgggatgctatcatacaccttcctaaggagcaccaacagagatgatatcattgttcctatgattgactatgaaaaagagaatgaatggaaaaggaaggcacggacaacattgactgattggtgtatgagcttagaaacaataatacaatggtctccttattccacagaagcagaacttattcaggaggggaacaaggaactcgaattatcatatacaatctgtgggaggatgatgaaggagagctggagcttgattttgatgctgacgcaaatattagaggtgttaacagagatcagaacaagatcaagaaggcaaatcagtttccaaactccaaacacttctttacttatagacattctctaaggagttatgcatcaattttatatcttatgctcccggataacttccaaatgattttacggggaaaaaagattgaccaccataacattatcaatgatctcatgctaaagaagcaacttacttataatccaacagtgggcgatggacttccaaaggatatgcatgtggcagctaaggtgacaattggttttgttaaggatgcgagacaacatattgatattcaagggtttaatgtttaccacaagaatcgcctaataaagcctttttggagagtatggacttctgctggagttgctggccgtggtatcataggtgtactggaagtaaattttgtagaaccagctcatgacaagcaggactttgaacgcacaaattgccttgcaagactcgaagcacgattaaaccgaatgcagaagaaatattggtctgataatcgccatcgaattggctatggaaccaatgatgctagcacagattctgtaaaaaggaaaacaggactgtcgttgcgtccatttggccaaggttcctggaagtcagggtatctgcaaacgatcagaagtgatggcagatcatgttctaatacaacaaataatattatgaatgcaagcatgtcatccccagaaacttccaagcttagtggtcccaatagagagttctcttcaacaacagtgtgccagcacagagctgaaaagtctgcaaataccataagatctgaaagatcagttttgcatggcttgtcaaatacagatggtggaaagactgagactgccaacgccccatccaaatcaacttcccctatcctaaggactagtttgccaccaactcccaatgaaggaaaacgaagtgagaggattgctgccaaataccaatcgaagcaagtaaatgcaacaactaatggagacagggaatccattgttgaccctgaagctatcatcaagaagttgaaggaagaaaattcatcgctaaaggagagaatcttgatggtgcaggaatcattatcaagggaactgcaaatcgagcgggataagaacaagtctctgaccgagaggtttgaggatgtggagaggcaactcgagttggcaattaaagagcaagaagcaacggtagaactctttgcagaagaaaggaagtgccacgaccaagaggtggaaaacctgaagcggaagctcacggaggcctcttccaccattcaggatctgatggagcagctcaatgctgcccggaactgctgcaagagatgaagcagcagacgaagcaacttcaccccccagtaatacgttagtacgtgtatgtcaccagcatgctcttagcataaataatgcccagatggttgtggagctgttagcagtagcagaccagaatgctctatgtatgtttcacgtcctgttgttagatgtgtggtagcaagtgtaagatgattgaatgagactaacgtgatgaattccctaggccctcatggttcctgatttagtgtaataataattagagaggatattgagagtgaattgcaactggctttgtttgggagcaatgatactgaaggggattagagggcctaaaatctgaatagcaag

SEQ ID NO: 45687 - DNA, 2599 bp, Zea Mays
atcgctccagttcgcgctcatggcccccactgctgtggatcccggtcccagcgaccaccttctagcgccggcgccggctgccatggctggaggaggggatggcggtgatggacagatggaggtggtgttcaatgtgagcagcagcgacaccgactccgatgacctcggcgccggtggtggaaagaggtcgcggcccgtggcggggcaaggtggtggcagggatcgagaggacaagaaggccagaatcttggccgctgccgccacggtcccagccggattcctagagccgctttcgccggtgaggttactccccccgccggcgccgggaaggagcgtgacgaagcagttctggaaggccggagactacgtcggcaagccggatcacctgcttgccgtagtggcggctcagcattctgattctggaatggatcacgttcgtgtgcatcccaaatttctacattccaacgcgacaagccacaagtgggcactaggagctttcgccgagctgcttgacaactctcttgatgaagttgtgcatggagcgacatatgtgaacattgacatgatagaaagtaagaaggatggaactccaatgctgcttgttcaagacaatggtggggggatgaacccagataagatgcgtcattgtatgtccttgggttattctgcgaagagcaaagtcaagaataccattggacaatatggaaatggttttaagacaagtacgatgagacttggagctgatgtcttagtgttttcatgtagtcgtggtattgaaggaacaaggcctacacaaagcgttgggatgctatcatacaccttcctaaggagcaccaacagagatgatatcattgttcctatgattgactatgaaaaagagaatgaatggaaaaggaaggcacggacaacattgactgattggtgtatgagcttagaaacaataatacaatggtctccttattccacagaagcagaacttattcaggagtttggctcaataggggaacaaggaactcgaattatcatatacaatctgtgggaggatgatgaaggagagctggagcttgattttgatgctgacgcaaatgatattcagattagaggtgttaacagagatcagaacaagatcaagaaggcaaatcagtttccaaactccaaacacttctttacttatagacattctctaagggtggcagctaaggtgacaattggttttgttaaggatgcgagacaacatattgatattcaagggtttaatgtttaccacaagaatcgcctaataaagcctttttggagagtatggacttctgctggagttgctggccgtggtatcataggtgtactggaagtaaattttgtagaaccagctcatgacaagcaggactttgaacgcacaaattgccttgcaagactcgaagcacgattaaaccgaatgcagaagaaatattggtctgataatcgccatcgaattggctatggaaccaatgatgctagcacagattctgtaaaaaggaaaacaggactgtcgttgcgtccatttggccaaggttcctggaagtcagggtatctgcaaacgatcagaagtgatggcagatcatgttctaatacaacaaataatattatgaatgcaagcatgtcatccccagaaacttccaagcttagtggtcccaatagagagttctcttcaacaacagtgtgccagcacagagctgaaaagtctgcaaataccataagatctgaaagatcagttttgcatggcttgtcaaatacagatggtggaaagactgagactgccaacgccccatccaaatcaacttcccctatcctaaggactagtttgccaccaactcccaatgaaggaaaacgaagtgagaggattgctgccaaataccaatcgaagcaagtaaatgcaacaactaatggagacagggaatccattgttgaccctgaagctatcatcaagaagttgaaggaagaaaattcatcgctaaaggagagaatcttgatggtgcaggaatcattatcaagggaactgcaaatcgagcgggataagaacaagtctctgaccgagaggtttgaggatgtggagaggcaactcgagttggcaattaaagagcaagaagcaacggtagaactctttgcagaagaaaggaagtgccacgaccaagaggtggaaaacctgaagcggaagctcacggaggcctcttccaccattcaggatctgatggagcagctcaatgctgcccggaactgctgcaagagatgaagcagcagacgaagcaacttcaccccccagtaatacgttagtacgtgtatgtcaccagcatgctcttagcataaataatgcccagatggttgtggagctgttagcagtagcagaccagaatgctctatgtatgtttcacgtcctgttgttagatgtgtggtagcaagtgtaagatgattgaatgagactaacgtgatgaattccctaggccctcatggttcctgatttagtgtaataataattagagaggatattgagagtgaattgcaactggctttgtttgggagcaatgatactgaaggggattagagggcctaaaatctgaatagcaag

SEQ ID NO: 45688 - DNA, 2660 bp, Zea Mays
atcgctccagttcgcgctcatggcccccactgctgtggatcccggtcccagcgaccaccttctagcgccggcgccggctgccatggctggaggaggggatggcggtgatggacagatggaggtggtgttcaatgtgagcagcagcgacaccgactccgatgacctcggcgccggtggtggaaagaggtcgcggcccgtggcggggcaaggtggtggcagggatcgagaggacaagaaggccagaatcttggccgctgccgccacggtcccagccggattcctagagccgctttcgccggtgaggttactccccccgccggcgccgggaaggagcgtgacgaagcagttctggaaggccggagactacgtcggcaagccggatcacctgcttgccgtagtggcggctcagcattctgattctggaatggatcacgttcgtgtgcatcccaaatttctacattccaacgcgacaagccacaagtgggcactaggagctttcgccgagctgcttgacaactctcttgatgaagttgtgcatggagcgacatatgtgaacattgacatgatagaaagtaagaaggatggaactccaatgctgcttgttcaagacaatggtggggggatgaacccagataagatgcgtcattgtatgtccttgggttattctgcgaagagcaaagtcaagaataccattggacaatatggaaatggttttaagacaagtacgatgagacttggagctgatgtcttagtgttttcatgtagtcgtggtattgaaggaacaaggcctacacaaagcgttgggatgctatcatacaccttcctaaggagcaccaacagagatgatatcattgttcctatgattgactatgaaaaagagaatgaatggaaaaggaaggcacggacaacattgactgattggtgtatgagcttagaaacaataatacaatggtctccttattccacagaagcagaacttattcaggagtttggctcaataggggaacaaggaactcgaattatcatatacaatctgtgggaggatgatgaaggagagctggagcttgattttgatgctgacgcaaatgatattcagattagaggtgttaacagagatcagaacaagatcaagaaggcaaatcagtttccaaactccaaacacttctttacttatagacattctctaaggagttatgcatcaattttatatcttatgctcccggataacttccaaatgattttacggggaaaaaagattgaccaccataacattatcaatgatctcatgctaaagaagcaacttacttataatccaacagtgggcgatggacttccaaaggatatgcatgtggcagctaaggtgacaattggttttgttaaggatgcgagacaacatattgatattcaagggtttaatgtttaccacaagaatcgcctaataaagcctttttggagagtatggacttctgctggagttgctggccgtggtatcataggtgtactggaagtaaattttgtagaaccagctcatgacaagcaggactttgaacgcacaaattgccttgcaagactcgaagcacgattaaaccgaatgcagaagaaatattggtctgataatcgccatcgaattggctatggaaccaatgatgctagcacagattctgtaaaaaggaaaacaggactgtcgttgcgtccatttggccaaggttcctggaagtcagggtatctgcaaacgatcagaagtgatggcagatcatgttctaatacaacaaataatattatgaatgcaagcatgtcatccccagaaacttccaagcttagtggtcccaatagagagttctcttcaacaacagtgtgccagcacagagctgaaaagtctgcaaataccataagatctgaaagatcagttttgcatggcttgtcaaatacagatggtggaaagactgagactgccaacgccccatccaaatcaacttcccctatcctaaggactagtttgccaccaactcccaatgaaggaaaacgaagtgagaggattgctgccaaataccaatcgaagaatcttgatggtgcaggaatcattatcaagggaactgcaaatcgagcgggataagaacaagtctctgaccgagaggtttgaggatgtggagaggcaactcgagttggcaattaaagagcaagaagcaacggtagaactctttgcagaagaaaggaagtgccacgaccaagaggtggaaaacctgaagcggaagctcacggaggcctcttccaccattcaggatctgatggagcagctcaatgctgcccggaactgctgcaagagatgaagcagcagacgaagcaacttcaccccccagtaatacgttagtacgtgtatgtcaccagcatgctcttagcataaataatgcccagatggttgtggagctgttagcagtagcagaccagaatgctctatgtatgtttcacgtcctgttgttagatgtgtggtagcaagtgtaagatgattgaatgagactaacgtgatgaattccctaggccctcatggttcctgatttagtgtaataataattagagaggatattgagagtgaattgcaactggctttgtttgggagcaatgatactgaaggggattagagggcctaaaatctgaatagcaag

SEQ ID NO: 45689 - DNA, 2629 bp, Zea Mays
aagaaagcaccatcgctccagttcgcgctcatggcccccactgctgtggatcccggtcccagcgaccaccttctagcgccggcgccggctgccatggctggaggaggggatggcggtgatggacagatggaggtggtgttcaatgtgagcagcagcgacaccgactccgatgacctcggcgccggtggtggaaagaggtcgcggcccgtggcggggcaaggtggtggcagggatcgagaggacaagaaggccagaatcttggccgctgccgccacggtcccagccggattcctagagccgctttcgccggtgaggttactccccccgccggcgccgggaaggagcgtgacgaagcagttctggaaggccggagactacgtcggcaagccggatcacctgcttgccgtagtggcggctcagcattctggttgtgcatggagcgacatatgtgaacattgacatgatagaaagtaagaaggatggaactccaatgctgcttgttcaagacaatggtggggggatgaacccagataagatgcgtcattgtatgtccttgggttattctgcgaagagcaaagtcaagaataccattggacaatatggaaatggttttaagacaagtacgatgagacttggagctgatgtcttagtgttttcatgtagtcgtggtattgaaggaacaaggcctacacaaagcgttgggatgctatcatacaccttcctaaggagcaccaacagagatgatatcattgttcctatgattgactatgaaaaagagaatgaatggaaaaggaaggcacggacaacattgactgattggtgtatgagcttagaaacaataatacaatggtctccttattccacagaagcagaacttattcaggagtttggctcaataggggaacaaggaactcgaattatcatatacaatctgtgggaggatgatgaaggagagctggagcttgattttgatgctgacgcaaatgatattcagattagaggtgttaacagagatcagaacaagatcaagaaggcaaatcagtttccaaactccaaacacttctttacttatagacattctctaaggagttatgcatcaattttatatcttatgctcccggataacttccaaatgattttacggggaaaaaagattgaccaccataacattatcaatgatctcatgctaaagaagcaacttacttataatccaacagtgggcgatggacttccaaaggatatgcatgtggcagctaaggtgacaattggttttgttaaggatgcgagacaacatattgatattcaagggtttaatgtttaccacaagaatcgcctaataaagcctttttggagagtatggacttctgctggagttgctggccgtggtatcataggtgtactggaagtaaattttgtagaaccagctcatgacaagcaggactttgaacgcacaaattgccttgcaagactcgaagcacgattaaaccgaatgcagaagaaatattggtctgataatcgccatcgaattggctatggaaccaatgatgctagcacagattctgtaaaaaggaaaacaggttcctggaagtcagggtatctgcaaacgatcagaagtgatggcagatcatgttctaatacaacaaataatattatgaatgcaagcatgtcatccccagaaacttccaagcttagtggtcccaatagagagttctcttcaacaacagtgtgccagcacagagctgaaaagtctgcaaataccataagatctgaaagatcagttttgcatggcttgtcaaatacagatggtggaaagactgagactgccaacgccccatccaaatcaacttcccctatcctaaggactagtttgccaccaactcccaatgaaggaaaacgaagtgagaggattgctgccaaataccaatcgaagcaagtaaatgcaacaactaatggagacagggaatccattgttgaccctgaagctatcatcaagaagttgaaggaagaaaattcatcgctaaaggagagaatcttgatggtgcaggaatcattatcaagggaactgcaaatcgagcgggataagaacaagtctctgaccgagaggtttgaggatgtggagaggcaactcgagttggcaattaaagagcaagaagcaacggtagaactctttgcagaagaaaggaagtgccacgaccaagaggtggaaaacctgaagcggaagctcacggaggcctcttccaccattcaggatctgatggagcagctcaatgctgcccggaactgctgcaagagatgaagcagcagacgaagcaacttcaccccccagtaatacgttagtacgtgtatgtcaccagcatgctcttagcataaataatgcccagatggttgtggagctgttagcagtagcagaccagaatgctctatgtatgtttcacgtcctgttgttagatgtgtggtagcaagtgtaagatgattgaatgagactaacgtgatgaattccctaggccctcatggttcctgatttagtgtaataataattagagaggatattgagagtgaattgcaactggctttgtttgggagcaatgatactgaaggggattagagggcctaaaatctgaatagcaag

SEQ ID NO: 45690 - DNA, 2602 bp, Zea Mays
aaacggtggcggccttgccaagaaagcaccatcgctccagttcgcgctcatggcccccactgctgtggatcccggtcccagcgaccaccttctagcgccggcgccggctgccatggctggaggaggggatggcggtgatggacagatggaggtggtgttcaatgtgagcagcagcgacaccgactccgatgacctcggcgccggtggtggaaagaggtcgcggcccgtggcggggcaaggtggtggcagggatcgagaggacaagaaggccagaatcttggccgctgccgccacggtcccagccggattcctagagccgctttcgccggtgaggttactccccccgccggcgccgggaaggagcgtgacgaagcagttctggaaggccggagactacgtcggcaagccggatcacctgcttgccgtagtggcggctcagcattctgattctggaatggatcacgttcgtgtgcatcccaaatttctacattccaacgcgacaagccacaagtgggcactaggagctttcgccgagctgcttgacaactctcttgatgaagttgtgcatggagcgacatatgtgaacattgacatgatagaaagtaagaaggatggaactccaatgctgcttgttcaagacaatggtggggggatgaacccagataagatgcgtcattgtatgtccttgggttattctgcgaagagcaaagtcaagaataccattggacaatatggaaatggttttaagacaagtacgatgagacttggagctgatgtcttagtgttttcatgtagtcgtggtattgaaggaacaaggcctacacaaagcgttgggatgctatcatacaccttcctaaggagcaccaacagagatgatatcattgttcctatgattgactatgaaaaagagaatgaatggaaaaggaaggcacggacaacattgactgattggtgtatgagcttagaaacaataatacaatggtctccttattccacagaagcagaacttattcaggagtttggctcaataggggaacaaggaactcgaattatcatatacaatctgtgggaggatgatgaaggagagctggagcttgattttgatgctgacgcaaatgatattcagattagaggtgttaacagagatcagaacaagatcaagaaggcaaatcagtttccaaactccaaacacttctttacttatagacattctctaagggtggcagctaaggtgacaattggttttgttaaggatgcgagacaacatattgatattcaagggtttaatgtttaccacaagaatcgcctaataaagcctttttggagagtatggacttctgctggagttgctggccgtggtatcataggtgtactggaagtaaattttgtagaaccagctcatgacaagcaggactttgaacgcacaaattgccttgcaagactcgaagcacgattaaaccgaatgcagaagaaatattggtctgataatcgccatcgaattggctatggaaccaatgatgctagcacagattctgtaaaaaggaaaacaggttcctggaagtcagggtatctgcaaacgatcagaagtgatggcagatcatgttctaatacaacaaataatattatgaatgcaagcatgtcatccccagaaacttccaagcttagtggtcccaatagagagttctcttcaacaacagtgtgccagcacagagctgaaaagtctgcaaataccataagatctgaaagatcagttttgcatggcttgtcaaatacagatggtggaaagactgagactgccaacgccccatccaaatcaacttcccctatcctaaggactagtttgccaccaactcccaatgaaggaaaacgaagtgagaggattgctgccaaataccaatcgaagcaagtaaatgcaacaactaatggagacagggaatccattgttgaccctgaagctatcatcaagaagttgaaggaagaaaattcatcgctaaaggagagaatcttgatggtgcaggaatcattatcaagggaactgcaaatcgagcgggataagaacaagtctctgaccgagaggtttgaggatgtggagaggcaactcgagttggcaattaaagagcaagaagcaacggtagaactctttgcagaagaaaggaagtgccacgaccaagaggtggaaaacctgaagcggaagctcacggaggcctcttccaccattcaggatctgatggagcagctcaatgctgcccggaactgctgcaagagatgaagcagcagacgaagcaacttcaccccccagtaatacgttagtacgtgtatgtcaccagcatgctcttagcataaataatgcccagatggttgtggagctgttagcagtagcagaccagaatgctctatgtatgtttcacgtcctgttgttagatgtgtggtagcaagtgtaagatgattgaatgagactaacgtgatgaattccctaggccctcatggttcctgatttagtgtaataataattagagaggatattgagagtgaattgcaactggctttgtttgggagcaatgatactgaaggggattagagggcctaaaatctgaatagcaag

SEQ ID NO: 45691 - DNA, 2779 bp, Zea Mays
aaacggtggcggccttgccaagaaagcaccatcgctccagttcgcgctcatggcccccactgctgtggatcccggtcccagcgaccaccttctagcgccggcgccggctgccatggctggaggaggggatggcggtgatggacagatggaggtggtgttcaatgtgagcagcagcgacaccgactccgatgacctcggcgccggtggtggaaagaggtcgcggcccgtggcggggcaaggtggtggcagggatcgagaggacaagaaggccagaatcttggccgctgccgccacggtcccagccggattcctagagccgctttcgccggtgaggttactccccccgccggcgccgggaaggagcgtgacgaagcagttctggaaggccggagactacgtcggcaagccggatcacctgcttgccgtagtggcggctcagcattctgattctggaatggatcacgttcgtgtgcatcccaaatttctacattccaacgcgacaagccacaagtgggcactaggagctttcgccgagctgcttgacaactctcttgatgaagttgtgcatggagcgacatatgtgaacattgacatgatagaaagtaagaaggatggaactccaatgctgcttgttcaagacaatggtggggggatgaacccagataagatgcgtcattgtatgtccttgggttattctgcgaagagcaaagtcaagaataccattggacaatatggaaatggttttaagacaagtacgatgagacttggagctgatgtcttagtgttttcatgtagtcgtggtattgaaggaacaaggcctacacaaagcgttgggatgctatcatacaccttcctaaggagcaccaacagagatgatatcattgttcctatgattgactatgaaaaagagaatgaatggaaaaggaaggcacggacaacattgactgattggtgtatgagcttagaaacaataatacaatggtctccttattccacagaagcagaacttattcaggagtttggctcaataggggaacaaggaactcgaattatcatatacaatctgtgggaggatgatgaaggagagctggagcttgattttgatgctgacgcaaatattagaggtgttaacagagatcagaacaagatcaagaaggcaaatcagtttccaaactccaaacacttctttacttatagacattctctaaggagttatgcatcaattttatatcttatgctcccggataacttccaaatgattttacggggaaaaaagattgaccaccataacattatcaatgatctcatgctaaagaagcaacttacttataatccaacagtgggcgatggacttccaaaggatatgcatgtggcagctaaggtgacaattggttttgttaaggatgcgagacaacatattgatattcaagggtttaatgtttaccacaagaatcgcctaataaagcctttttggagagtatggacttctgctggagttgctggccgtggtatcataggtgtactggaagtaaattttgtagaaccagctcatgacaagcaggactttgaacgcacaaattgccttgcaagactcgaagcacgattaaaccgaatgcagaagaaatattggtctgataatcgccatcgaattggctatggaaccaatgatgctagcacagattctgtaaaaaggaaaacaggactgtcgttgcgtccatttggccaaggttcctggaagtcagggtatctgcaaacgatcagaagtgatggcagatcatgttctaatacaacaaataatattatgaatgcaagcatgtcatccccagaaacttccaagcttagtggtcccaatagagagttctcttcaacaacagtgtgccagcacagagctgaaaagtctgcaaataccataagatctgaaagatcagttttgcatggcttgtcaaatacagatggtggaaagactgagactgccaacgccccatccaaatcaacttcccctatcctaaggactagtttgccaccaactcccaatgaaggaaaacgaagtgagaggattgctgccaaataccaatcgaagcaagtaaatgcaacaactaatggagacagggaatccattgttgaccctgaagctatcatcaagaagttgaaggaagaaaattcatcgctaaaggagagaatcttgatggtgcaggaatcattatcaagggaactgcaaatcgagcgggataagaacaagtctctgaccgagaggtttgaggatgtggagaggcaactcgagttggcaattaaagagcaagaagcaacggtagaactctttgcagaagaaaggaagtgccacgaccaagaggtggaaaacctgaagcggaagctcacggaggcctcttccaccattcaggatctgatggagcagctcaatgctgcccggaactgctgcaagagatgaagcagcagacgaagcaacttcaccccccagtaatacgttagtacgtgtatgtcaccagcatgctcttagcataaataatgcccagatggttgtggagctgttagcagtagcagaccagaatgctctatgtatgtttcacgtcctgttgttagatgtgtggtagcaagtgtaagatgattgaatgagactaacgtgatgaattccctaggccctcatggttcctgatttagtgtaataataattagagaggatattgagagtgaattgcaactggctttgtttgggagcaatgatactgaaggggattagagggcctaaaatctgaatagcaag

SEQ ID NO: 45692 - DNA, 2285 bp, Zea Mays
aagcaccatcgctccagttcgcgctcatggcccccactgctgtggatcccggtcccagcgaccaccttctagcgccggcgccggctgccatggctggaggaggggatggcggtgatggacagatggaggtggtgttcaatgtgagcagcagcgacaccgactccgatgacctcggcgccggtggtggaaagaggtcgcggcccgtggcggggcaaggtggtggcagggatcgagaggacaagaaggccagaatcttggccgctgccgccacggtcccagccggattcctagagccgctttcgccggtgaggttactccccccgccggcgccgggaaggagcgtgacgaagcagttctggaaggccggagactacgtcggcaagccggatcacctgcttgccgtagtggcggctcagcattctgattctggaatggatcacgttcgtgtgcatcccaaatttctacattccaacgcgacaagccacaagtgggcactaggagctttcgccgagctgcttgacaactctcttgatgaagttgtgcatggagcgacatatgtgaacattgacatgatagaaagtaagaaggatggaactccaatgctgcttgttcaagacaatggtggggggatgaacccagataagatgcgtcattgtatgtccttgggttattctgcgaagagcaaagtcaagaataccattggacaatatggaaatggttttaagacaagtacgatgagacttggagctgatgtcttagtgttttcatgtagtcgtggtattgaaggaacaaggcctacacaaagcgttgggatgctatcatacaccttcctaaggagcaccaacagagatgatatcattgttcctatgattgactatgaaaaagagaatgaatggaaaaggaaggcacggacaacattgactgattggtgtatgagcttagaaacaataatacaatggtctccttattccacagaagcagaacttattcaggagtttggctcaataggggaacaaggaactcgaattatcatatacaatctgtgggaggatgatgaaggagagctggagcttgattttgatgctgacgcaaatgatattcagattagaggtgttaacagagatcagaacaagatcaagaaggcaaatcagtttccaaactccaaacacttctttacttatagacattctctaaggagttatgcatcaattttatatcttatgctcccggataacttccaaatgattttacggggaaaaaagattgaccaccataacattatcaatgatctcatgctaaagaagcaacttacttataatccaacagtgggcgatggacttccaaaggatatgcatgtggcagctaaggtgacaattggttttgttaaggatgcgagacaacatattgatattcaagggtttaatgtttaccacaagaatcgcctaataaagcctttttggagagtatggacttctgctggagttgctggccgtggtatcataggtgtactggaagtaaattttgtagaaccagctcatgacaagcaggactttgaacgcacaaattgccttgcaagactcgaagcacgattaaaccgaatgcagaagaaatattggtctgataatcgccatcgaattggctatggaaccaatgatgctagcacagattctgtaaaaaggaaaacaggactgtcgttgcgtccatttggccaaggttcctggaagtcagggtatctgcaaacgatcagaagtgatggcagatcatgttctaatacaacaaataatattatgaatgcaagcatgtcatccccagaaacttccaagcttagtggtcccaatagagagttctcttcaacaacagtgtgccagcacagagctgaaaagtctgcaaataccataagatctgaaagatcagttttgcatggcttgtcaaatacagatggtggaaagactgagactgccaacgccccatccaaatcaacttcccctatcctaaggactagtttgccaccaactcccaatgaaggaaaacgaagtgagaggattgctgccaaataccaatcgaagttatcttgggttaccattctcagtgtggaagatcactaaggctgatattattgccctcatcgacaagattgatgaccgactaccacgttggaaagctgccttgatgcaccaagctagaagagccaccatggtcaaattggtgcttattgtgatcccaatttaccgtttcattgtcttacattgtcccaaatgggtcctcaagtccattgataaaataag

SEQ ID NO: 45693 - DNA, 2357 bp, Zea Mays
aaagcaccatcgctccagttcgcgctcatggcccccactgctgtggatcccggtcccagcgaccaccttctagcgccggcgccggctgccatggctggaggaggggatggcggtgatggacagatggaggtggtgttcaatgtgagcagcagcgacaccgactccgatgacctcggcgccggtggtggaaagaggtcgcggcccgtggcggggcaaggtggtggcagggatcgagaggacaagaaggccagaatcttggccgctgccgccacggtcccagccggattcctagagccgctttcgccggtgaggttactccccccgccggcgccgggaaggagcgtgacgaagcagttctggaaggccggagactacgtcggcaagccggatcacctgcttgccgtagtggcggctcagcattctgattctggaatggatcacgttcgtgtgcatcccaaatttctacattccaacgcgacaagccacaagtgggcactaggagctttcgccgagctgcttgacaactctcttgatgaagttgtgcatggagcgacatatgtgaacattgacatgatagaaagtaagaaggatggaactccaatgctgcttgttcaagacaatggtggggggatgaacccagataagatgcgtcattgtatgtccttgggttattctgcgaagagcaaagtcaagaataccattggacaatatggaaatggttttaagacaagtacgatgagacttggagctgatgtcttagtgttttcatgtagtcgtggtattgaaggaacaaggcctacacaaagcgttgggatgctatcatacaccttcctaaggagcaccaacagagatgatatcattgttcctatgattgactatgaaaaagagaatgaatggaaaaggaaggcacggacaacattgactgattggtgtatgagcttagaaacaataatacaatggtctccttattccacagaagcagaacttattcaggagtttggctcaataggggaacaaggaactcgaattatcatatacaatctgtgggaggatgatgaaggagagctggagcttgattttgatgctgacgcaaatgatattcagattagaggtgttaacagagatcagaacaagatcaagaaggcaaatcagtttccaaactccaaacacttctttacttatagacattctctaaggagttatgcatcaattttatatcttatgctcccggataacttccaaatgattttacggggaaaaaagattgaccaccataacattatcaatgatctcatgctaaagaagcaacttacttataatccaacagtgggcgatggacttccaaaggatatgcatgtggcagctaaggtgacaattggttttgttaaggatgcgagacaacatattgatattcaagggtttaatgtttaccacaagaatcgcctaataaagcctttttggagagtatggacttctgctggagttgctggccgtggtatcataggtgtactggaagtaaattttgtagaaccagctcatgacaagcaggactttgaacgcacaaattgccttgcaagactcgaagcacgattaaaccgaatgcagaagaaatattggtctgataatcgccatcgaattggctatggaaccaatgatgctagcacagattctgtaaaaaggaaaacaggttcctggaagtcagggtatctgcaaacgatcagaagtgatggcagatcatgttctaatacaacaaataatattatgaatgcaagcatgtcatccccagaaacttccaagcttagtggtcccaatagagagttctcttcaacaacagtgtgccagcacagagctgaaaagtctgcaaataccataagatctgaaagatcagttttgcatggcttgtcaaatacagatggtggaaagactgagactgccaacgccccatccaaatcaacttcccctatcctaaggactagtttgccaccaactcccaatgaaggaaaacgaagtgagaggattgctgccaaataccaatcgaagcaagtaaatgcaacaactaatggagacagggaatccattgttgaccctgaagctatcatcaagaagttgaaggaagaaaattcatcgctaaaggagagttatcttgggttaccattctcagtgtggaagatcactaaggctgatattattgccctcatcgacaagattgatgaccgactaccacgttggaaagctgccttgatgcaccaagctagaagagccaccatggtcaaattggtgcttattgtgatcccaatttaccgtttcattgtcttacattgtcccaaatgggtcctcaagtccattgataaaataag

SEQ ID NO: 45694 - DNA, 2415 bp, Zea Mays
ccactatacaaacggtggcggccttgccaagaaagcaccatcgctccagttcgcgctcatggcccccactgctgtggatcccggtcccagcgaccaccttctagcgccggcgccggctgccatggctggaggaggggatggcggtgatggacagatggaggtggtgttcaatgtgagcagcagcgacaccgactccgatgacctcggcgccggtggtggaaagaggtcgcggcccgtggcggggcaaggtggtggcagggatcgagaggacaagaaggccagaatcttggccgctgccgccacggtcccagccggattcctagagccgctttcgccggtgaggttactccccccgccggcgccgggaaggagcgtgacgaagcagttctggaaggccggagactacgtcggcaagccggatcacctgcttgccgtagtggcggctcagcattctgattctggaatggatcacgttcgtgtgcatcccaaatttctacattccaacgcgacaagccacaagtgggcactaggagctttcgccgagctgcttgacaactctcttgatgaagttgtgcatggagcgacatatgtgaacattgacatgatagaaagtaagaaggatggaactccaatgctgcttgttcaagacaatggtggggggatgaacccagataagatgcgtcattgtatgtccttgggttattctgcgaagagcaaagtcaagaataccattggacaatatggaaatggttttaagacaagtacgatgagacttggagctgatgtcttagtgttttcatgtagtcgtggtattgaaggaacaaggcctacacaaagcgttgggatgctatcatacaccttcctaaggagcaccaacagagatgatatcattgttcctatgattgactatgaaaaagagaatgaatggaaaaggaaggcacggacaacattgactgattggtgtatgagcttagaaacaataatacaatggtctccttattccacagaagcagaacttattcaggagtttggctcaataggggaacaaggaactcgaattatcatatacaatctgtgggaggatgatgaaggagagctggagcttgattttgatgctgacgcaaatgatattcagattagaggtgttaacagagatcagaacaagatcaagaaggcaaatcagtttccaaactccaaacacttctttacttatagacattctctaaggagttatgcatcaattttatatcttatgctcccggataacttccaaatgattttacggggaaaaaagattgaccaccataacattatcaatgatctcatgctaaagaagcaacttacttataatccaacagtgggcgatggacttccaaaggatatgcatgtggcagctaaggtgacaattggttttgttaaggatgcgagacaacatattgatattcaagggtttaatgtttaccacaagaatcgcctaataaagcctttttggagagtatggacttctgctggagttgctggccgtggtatcataggtgtactggaagtaaattttgtagaaccagctcatgacaagcaggactttgaacgcacaaattgccttgcaagactcgaagcacgattaaaccgaatgcagaagaaatattggtctgataatcgccatcgaattggctatggaaccaatgatgctagcacagattctgtaaaaaggaaaacaggactgtcgttgcgtccatttggccaaggttcctggaagtcagggtatctgcaaacgatcagaagtgatggcagatcatgttctaatacaacaaataatattatgaatgcaagcatgtcatccccagaaacttccaagcttagtggtcccaatagagagttctcttcaacaacagtgtgccagcacagagctgaaaagtctgcaaataccataagatctgaaagatcagttttgcatggcttgtcaaatacagatggtggaaagactgagactgccaacgccccatccaaatcaacttcccctatcctaaggactagtttgccaccaactcccaatgaaggaaaacgaagtgagaggattgctgccaaataccaatcgaagcaagtaaatgcaacaactaatggagacagggaatccattgttgaccctgaagctatcatcaagaagttgaaggaagaaaattcatcgctaaaggagagttatcttgggttaccattctcagtgtggaagatcactaaggctgatattattgccctcatcgacaagattgatgaccgactaccacgttggaaagctgccttgatgcaccaagctagaagagccaccatggtcaaattggtgcttattgtgatcccaatttaccgtttcattgtcttacattgtcccaaatgggtcctcaagtccattgataaaataag

SEQ ID NO: 45695 - DNA, 1020 bp, Zea Mays
ttctatggcttgtttggacaacagaactcccaaagcaaatcatattctgctggcaatattaaatctatggaagatgaggtgcggcaacttcagcacgagatcattaagataaacagcaattcttacaccgttgaatcattagcacatgatactgagaaaagggtggaagctttgagcttggaggtaaaaaagatagaggatatgactgcagaacaatggatccaaattcgacaacttgaacaagcatttgtgttaaccaagatgatgacgtcaaaagttcatgagagaagtaggccatcagatacagtttataagtggcctggaaaagaaataattgttaagtatgtcaggaatatcaagcttgatggtatttatattagaggggcgtcatacgtgaggtcctgtttttcacatacatataaacagtccagaagttttgtacaagcaataagcagatgctaccatgagacttctcggttccgcaaagcaattcgtcacaggtatacatctgatattaacaagcctgatgtgttctttttgggtggtaccatttcaagatcaaacatttctcttccatataaccaattcaagattttcatctcattggcacggaagtttcattacaaggcccaaggttttatacgtgatgtgatggaatccaacaaatatagttgtggtttgtcgaacgagccagttacatttatcttggcatatcttgttgtcatttctccattgtggatcgcttggttcctttattcaacatggttcagctcaaggaagtgacaacttgttggaaaacaggaacgttgcagtcatgggttcttttttcttcttttttaggttcaaaaggtatacacgtgtgacggaagacaaatatgtggaaaatttgcaatcaccaggacttctaagaaatataactgtcggcgtttcgaccccggggttcctggactgatgagtaaattgtcgctgcgtgtcccagcctagatgggtagacgcgagatggaacacaagggggaaaaa

SEQ ID NO: 45696 - DNA, 1036 bp, Zea Mays
gttgatattgaggcatttaaggggattctacatttttttgaactcccaaagcaaatcatattctgctggcaatattaaatctatggaagatgaggtgcggcaacttcagcacgagatcattaagataaacagcaattcttacaccgttgaatcattagcacatgatactgagaaaagggtggaagctttgagcttggaggtaaaaaagatagaggatatgactgcagaacaatggatccaaattcgacaacttgaacaagcatttgtgttaaccaagatgatgacgtcaaaagttcatgagagaagtaggccatcagatacagtttataagtggcctggaaaagaaataattgttaagtatgtcaggaatatcaagcttgatggtatttatattagaggggcgtcatacgtgaggtcctgtttttcacatacatataaacagtccagaagttttgtacaagcaataagcagatgctaccatgagacttctcggttccgcaaagcaattcgtcacaggtatacatctgatattaacaagcctgatgtgttctttttgggtggtaccatttcaagatcaaacatttctcttccatataaccaattcaagattttcatctcattggcacggaagtttcattacaaggcccaaggttttatacgtgatgtgatggaatccaacaaatatagttgtggtttgtcgaacgagccagttacatttatcttggcatatcttgttgtcatttctccattgtggatcgcttggttcctttattcaacatggttcagctcaaggaagtgacaacttgttggaaaacaggaacgttgcagtcatgggttcttttttcttcttttttaggttcaaaaggtatacacgtgtgacggaagacaaatatgtggaaaatttgcaatcaccaggacttctaagaaatataactgtcggcgtttcgaccccggggttcctggactgatgagtaaattgtcgctgcgtgtcccagcctagatgggtagacgcgagatggaacacaagggggaaaaa

SEQ ID NO: 45697 - DNA, 1043 bp, Zea Mays
cgccggtggcggctgggtgcaaatagtagtgcaagaaacaacataaaaactcccaaagcaaatcatattctgctggcaatattaaatctatggaagatgaggtgcggcaacttcagcacgagatcattaagataaacagcaattcttacaccgttgaatcattagcacatgatactgagaaaagggtggaagctttgagcttggaggtaaaaaagatagaggatatgactgcagaacaatggatccaaattcgacaacttgaacaagcatttgtgttaaccaagatgatgacgtcaaaagttcatgagagaagtaggccatcagatacagtttataagtggcctggaaaagaaataattgttaagtatgtcaggaatatcaagcttgatggtatttatattagaggggcgtcatacgtgaggtcctgtttttcacatacatataaacagtccagaagttttgtacaagcaataagcagatgctaccatgagacttctcggttccgcaaagcaattcgtcacaggtatacatctgatattaacaagcctgatgtgttctttttgggtggtaccatttcaagatcaaacatttctcttccatataaccaattcaagattttcatctcattggcacggaagtttcattacaaggcccaaggttttatacgtgatgtgatggaatccaacaaatatagttgtggtttgtcgaacgagccagttacatttatcttggcatatcttgttgtcatttctccattgtggatcgcttggttcctttattcaacatggttcagctcaaggaagtgacaacttgttggaaaacaggaacgttgcagtcatgggttcttttttcttcttttttaggttcaaaaggtatacacgtgtgacggaagacaaatatgtggaaaatttgcaatcaccaggacttctaagaaatataactgtcggcgtttcgaccccggggttcctggactgatgagtaaattgtcgctgcgtgtcccagcctagatgggtagacgcgagatggaacacaagggggaaaaa

SEQ ID NO: 45698 - DNA, 1423 bp, Zea Mays
ggttttgcattggctgattgcatcccgcctccgccttaaaccctaaacaatgacctctcgcgccgccgcggaggccgccctcctccttccgctccgcctccactctgccccgctccgcctgcgcttcttctgtacctccgcctcccggctccgatgggcgtgttccgcggcggcgctgcttgccgtcgtttcgctcgtcaccgccatctgcgctatgcccgacgccggcgccggcaccaacgttgaagccgatgccggcgccttgcggttggagattgaagcgctcaggctaaaggtcgcgcggctggaatctcttctagaggcaaattcgaaggcattagacattaaggctagtatcttggaggaggacaacaaactcaatgaagcaatggaacgtgaaatccagcttttaacgaatggaccagacagaactaagaactcccaaagcaaatcatattctgctggcaatattaaatctatggaagatgaggtgcggcaacttcagcacgagatcattaagataaacagcaattcttacaccgttgaatcattagcacatgatactgagaaaagggtggaagctttgagcttggagatagaggatatgactgcagaacaatggatccaaattcgacaacttgaacaagcatttgtgttaaccaagatgatgacgtcaaaagttcatgagagaagtaggccatcagatacagtttataagtggcctggaaaagaaataattgttaagtatgtcaggaatatcaagcttgatggtatttatattagaggggcgtcatacgtgaggtcctgtttttcacatacatataaacagtccagaagttttgtacaagcaataagcagatgctaccatgagacttctcggttccgcaaagcaattcgtcacaggtatacatctgatattaacaagcctgatgtgttctttttgggtggtaccatttcaagatcaaacatttctcttccatataaccaattcaagattttcatctcattggcacggaagtttcattacaaggcccaaggttttatacgtgatgtgatggaatccaacaaatatagttgtggtttgtcgaacgagccagttacatttatcttggcatatcttgttgtcatttctccattgtggatcgcttggttcctttattcaacatggttcagctcaaggaagtgacaacttgttggaaaacaggaacgttgcagtcatgggttcttttttcttcttttttaggttcaaaaggtatacacgtgtgacggaagacaaatatgtggaaaatttgcaatcaccaggacttctaagaaatataactgtcggcgtttcgaccccggggttcctggactgatgagtaaattgtcgctgcgtgtcccagcctagatgggtagacgcgagatggaacacaagggggaaaaa

SEQ ID NO: 45699 - DNA, 1420 bp, Zea Mays
ggttttgcattggctgattgcatcccgcctccgccttaaaccctaaacaatgacctctcgcgccgccgcggaggccgccctcctccttccgctccgcctccactctgccccgctccgcctgcgcttcttctgtacctccgcctcccggctccgatgggcgtgttccgcggcggcgctgcttgccgtcgtttcgctcgtcaccgccatctgcgctatgcccgacgccggcgccggcaccaacgttgaagccgatgccggcgccttgcggttggagattgaagcgctcaggctaaaggtcgcgcggctggaggcaaattcgaaggcattagacattaaggctagtatcttggaggaggacaacaaactcaatgaagcaatggaacgtgaaatccagcttttaacgaatggaccagacagaactaagaactcccaaagcaaatcatattctgctggcaatattaaatctatggaagatgaggtgcggcaacttcagcacgagatcattaagataaacagcaattcttacaccgttgaatcattagcacatgatactgagaaaagggtggaagctttgagcttggaggtaaaaaagatagaggatatgactgcagaacaatggatccaaattcgacaacttgaacaagcatttgtgttaaccaagatgatgacgtcaaaagttcatgagagaagtaggccatcagatacagtttataagtggcctggaaaagaaataattgttaagtatgtcaggaatatcaagcttgatggtatttatattagaggggcgtcatacgtgaggtcctgtttttcacatacatataaacagtccagaagttttgtacaagcaataagcagatgctaccatgagacttctcggttccgcaaagcaattcgtcacaggtatacatctgatattaacaagcctgatgtgttctttttgggtggtaccatttcaagatcaaacatttctcttccatataaccaattcaagattttcatctcattggcacggaagtttcattacaaggcccaaggttttatacgtgatgtgatggaatccaacaaatatagttgtggtttgtcgaacgagccagttacatttatcttggcatatcttgttgtcatttctccattgtggatcgcttggttcctttattcaacatggttcagctcaaggaagtgacaacttgttggaaaacaggaacgttgcagtcatgggttcttttttcttcttttttaggttcaaaaggtatacacgtgtgacggaagacaaatatgtggaaaatttgcaatcaccaggacttctaagaaatataactgtcggcgtttcgaccccggggttcctggactgatgagtaaattgtcgctgcgtgtcccagcctagatgggtagacgcgagatggaacacaagggggaaaaa

SEQ ID NO: 45700 - DNA, 1264 bp, Zea Mays
ggttttgcattggctgattgcatcccgcctccgccttaaaccctaaacaatgacctctcgcgccgccgcggaggccgccctcctccttccgctccgcctccactctgccccgctccgcctgcgcttcttctgtacctccgcctcccggctccgatgggcgtgttccgcggcggcgctgcttgccgtcgtttcgctcgtcaccgccatctgcgctatgcccgacgccggcgccggcaccaacgttgaagccgatgccggcgccttgcggttggagattgaagcgctcaggctaaaggtcgcgcggctggaatctcttctagaggcaaattcgaaggcattagacattaaggctagtatcttggaggaggacaacaaactcaatgaagcaatggaacgtgaaatccagcttttaacgaatggaccagacagaactaagatagaggatatgactgcagaacaatggatccaaattcgacaacttgaacaagcatttgtgttaaccaagatgatgacgtcaaaagttcatgagagaagtaggccatcagatacagtttataagtggcctggaaaagaaataattgttaagtatgtcaggaatatcaagcttgatggtatttatattagaggggcgtcatacgtgaggtcctgtttttcacatacatataaacagtccagaagttttgtacaagcaataagcagatgctaccatgagacttctcggttccgcaaagcaattcgtcacaggtatacatctgatattaacaagcctgatgtgttctttttgggtggtaccatttcaagatcaaacatttctcttccatataaccaattcaagattttcatctcattggcacggaagtttcattacaaggcccaaggttttatacgtgatgtgatggaatccaacaaatatagttgtggtttgtcgaacgagccagttacatttatcttggcatatcttgttgtcatttctccattgtggatcgcttggttcctttattcaacatggttcagctcaaggaagtgacaacttgttggaaaacaggaacgttgcagtcatgggttcttttttcttcttttttaggttcaaaaggtatacacgtgtgacggaagacaaatatgtggaaaatttgcaatcaccaggacttctaagaaatataactgtcggcgtttcgaccccggggttcctggactgatgagtaaattgtcgctgcgtgtcccagcctagatgggtagacgcgagatggaacacaagggggaaaaa

SEQ ID NO: 45701 - DNA, 660 bp, Zea Mays
ggttttgcattggctgattgcatcccgcctccgccttaaaccctaaacaatgacctctcgcgccgccgcggaggccgccctcctccttccgctccgcctccactctgccccgctccgcctgcgcttcttctgtacctccgcctcccggctccgatgggcgtgttccgcggcggcgctgcttgccgtcgtttcgctcgtcaccgccatctgcgctatgcccgacgccggcgccggcaccaacgttgaagccgatgccggcgccttgcggttggagattgaagcgctcaggctaaaggtcgcgcggctggaatctcttctagaggcaaattcgaaggcattagacattaaggctagtatcttggaggaggacaacaaactcaatgaagcaatggaacgtgaaatccagcttttaacgaatggaccagacagaactaagaactcccaaagcaaatcatattctgctggcaatattaaatctatggaagatgagttgtccatggatgcacatgatccctgagtctaagtgactaaaccttacttgcctttctttatatatatattcctctcttttcccagaccatgtgcacaaaactatcactctttctgtctctctctctatatatgataattgtatccaaggtagctcatgccctatccccg

SEQ ID NO: 45702 - DNA, 512 bp, Zea Mays
gtcgcgcgtgtgcttcgggagctagataggattcgccttggggttgttagaatacgatttcttgtgactatataaatatctcagagctccctctcgtccggtcacaccaaaacatctagaaaacaccatcaccatagcagagagagggcacgttgctgccataggagaagcacccgaccgcaaccatcgtcgctcgcccacactgccagaattcgtccgacgatccattcaagaggaagcagtggacacaaggaaggcgtacggagtgattcgggggcgcaggtgttcccaaaccatcgtcgattgctcatcggagctctggattggtgggcacaccataccacgtcgtggcaagcgacttcgcaccaccaatcactgaaagatttgatcctctcaagaccatcaagaagagaagatgaatcaatggcgaaagtgatgcggatccagttttccattcccaaaacactccctgcattggagaaacacataatcttgttgggatcacatacagc

SEQ ID NO: 45703 - DNA, 593 bp, Zea Mays
gggtgttattattaattgtgatctcttacttaattgggttggtatctacttatacttagtaactgctaataaaattttaaccaactttaaaagcaatgctcagctttaaccatctcctttggtaagccttacatttcacagagctcccacctttggtgagttcatgcacattatttcccacaacttgttgagcgatgaacgtatgagagctcacccttgctgtactcacatccccccaggtcaagaacaggtaccataggatgaggcacatgacagatgctgtgatgagttcgtcagtggtcgaggtcgtcatctcctagtcaactatggttgctggatcgttgtcttcatatgatgtaattatttaactattttgtacagaactccgttatatattaatgatgtgactttcgtttctgtaccatgagtcatcataggtgtgagactttatcctagcacacatggtgaatatttcgcgcctaggttttggccccctaaaatccgggtgtgacagacgtggtatcagaggaacgttgactacaggacgtaacctagatagaactagacaaaacccttgcctacttacctttgct

SEQ ID NO: 45704 - DNA, 583 bp, Zea Mays
gtcgcgcgtgtgcttcgggagctagataggattcgccttggggttgttagaatacgatttcttgtgactatataaatatctcagagctccctctcgtccggtcacaccaaaacatctagaaaacaccatcaccatagcagagagagggcacgttgctgccataggagaagcacccgaccgcaaccatcgtcgctcgcccacactgccagaattcgtccgacgatccattcaagaggaagcagtggacacaaggaaggcgtacggagtgattcgggggcgcaggtgttcccaaaccatcgtcgattgctcatcggagctctggattggtgggcacaccataccacgtcgtggcaagcgacttcgcaccaccaatcactggtcaagaacaggtaccataggatgaggcacatgacagatgctgtgatgagttcgtcagtggtcgaggtcgtcatctcctagtcaactatggttgctggatcgttgtcttcatatgatgtaattatttaactattttgtacagaactccgttatatattaatgatgtgactttcgtttctgtaccatgagtcatcataggtgtgag

SEQ ID NO: 45705 - DNA, 648 bp, Zea Mays
caatctcatgtcgcgcgtgtgcttcgggagctagataggattcgccttggggttgttagaatacgatttcttgtgactatataaatatctcagagctccctctcgtccggtcacaccaaaacatctagaaaacaccatcaccatagcagagagagggcacgttgctgccataggagaagcacccgaccgcaaccatcgtcgctcgcccacactgccagaattcgtccgacgatccattcaagaggaagcagtggacacaaggaaggcgtacggagtgattcgggggcgcaggtgttcccaaaccatcgtcgattgctcatcggagctctggattggtgggcacaccataccacgtcgtggcaagcgacttcgcaccaccaatcactgcggtgaggtcacaggaatctgaagaccaacttggtacctgaggtctcaagtctaaggtcaagaacaggtaccataggatgaggcacatgacagatgctgtgatgagttcgtcagtggtcgaggtcgtcatctcctagtcaactatggttgctggatcgttgtcttcatatgatgtaattatttaactattttgtacagaactccgttatatattaatgatgtgactttcgtttctgtaccatgagtcatcataggtgtgag

SEQ ID NO: 45706 - DNA, 1345 bp, Zea Mays
caatctcatgtcgcgcgtgtgcttcgggagctagataggattcgccttggggttgttagaatacgatttcttgtgactatataaatatctcagagctccctctcgtccggtcacaccaaaacatctagaaaacaccatcaccatagcagagagagggcacgttgctgccataggagaagcacccgaccgcaaccatcgtcgctcgcccacactgccagaattcgtccgacgatccattcaagaggaagcagtggacacaaggaaggcgtacggagtgattcgggggcgcaggtgttcccaaaccatcgtcgattgctcatcggagctctggattggtgggcacaccataccacgtcgtggcaagcgacttcgcaccaccaatcactgcggtgaggtcacaggaatctgaagaccaacttggtacctgaggtctcaagtctaagaacatgactggatagaaagaagtgatcaagggcacaacttgtctgggacttgagattccaggtaccaacttgctcctcaggtgactcgtgacctcactgctagtcatagcaatacatacaaacattgtataggcaaaattaacttcacaccaaacatgataacaaactgcgtaataataatctacgcgtcgctacgagatcgtgggcttgagaaccactaaaatcggagttacggttaagaagatatgattttccaaagatctaggtgattaaacaataaaagatatattatatgttacttaatataaattaggtgagaaataattaacccaaatttaatccgagatataacttgattatacgttgtatttttagtcatgttataatcatggacaattaactttgattagcaagacaaataaataatcataggataaacaatataaaagtaagtaatatgttgtaaataatgttgttactgtgtagaccaatttaatacgagactaacgcaacttgaacagaccaaatctgagttaaaacgagcaatatagggattaatttatttttcggtcatttttataattaaatcgagtctagggacttatttgcaattcacagggactgctaggtaatcatcttaccgcataggtggacggcgggtttattaatatagagcattgggtctcttttgcaaaagtagatggccgaaagggtgttggcttttgtagaccgttggatcgatagtctacggtgtagattagatcgaagtctcgatcattggattgaagatcgacgatagagattttatgatagcaaatcgaatttccccctccagattgaatcggccggcccacggcctcggccgaatcagtacgcgaccgatcccgtcatagttgtcggat

SEQ ID NO: 45707 - DNA, 704 bp, Zea Mays
gtcgcgcgtgtgcttcgggagctagataggattcgccttggggttgttagaatacgatttcttgtgactatataaatatctcagagctccctctcgtccggtcacaccaaaacatctagaaaacaccatcaccatagcagagagagggcacgttgctgccataggagaagcacccgaccgcaaccatcgtcgctcgcccacactgccagaattcgtccgacgatccattcaagaggaagcagtggacacaaggaaggcgtacggagtgattcgggggcgcaggtgttcccaaaccatcgtcgattgctcatcggagctctggattggtgggcacaccataccacgtcgtggcaagcgacttcgcaccaccaatcactgcggtgaggtcacaggaatctgaagaccaacttggtacctgaggtctcaagtctaaggcaagttgtgcccttgatcagttttctctttatccaataatgttcatgttaattactgtgacatgcttaggttaattcgataggacctaataattttccctagatttgtttatcccacaccttgtttaccattgaacttttggatagttttgctattgctctacctggctttgggattaatgttacattataatcatgttccagttatgctgttattttaattattgttcatgacaagatcattatgttaattggaacatggagcttaac

SEQ ID NO: 45708 - DNA, 1174 bp, Zea Mays
ctccattatccctttctatgttttcatcgtaatacgattgttccataagcatcaacaagttaagaggtggaataaggcatgatatatggattgcactgaagaacataaagacagggaggattcacgttgctgtaactgtacttgaagaagaaaatgaaaaggtttctaatgatgaagaggaacagtgtggaatacacaaggttgacaaggctagcacaccgaggtcaagtttctcctccaggaccaaccatgaaagtgaatgttctgatgaattccggaagatgtctgatgaatttgagccagttgacatagaaggatcggaaaagcccgatgtttgggtgcatcgccctggcagttatgtcaccagtacatgggaacctcggaaaggccgtgcccggtgccaggattccagaattcaccgggagaatgattcttgtagtgatagtccaaggtcatcagtgtcaggatctcatagaagtgactccagcactgaagaacccacgagcagtaaatcgcatcgccaccttcaaaaggtcaagaagggtttgggcaagctagctggagcagtgctccaccggagcccaaaggagaatgatgacgaagcttccccatgtgtaactcctcaccaaaacattcgaccggtcggggaaagcagggtttcagtaacatatgtggtcgatcaagatccagcaggggttgacggatcggggtcgagacgagatgaccaccagcaaagccctgagagagaggagctggacagcccgagtaaaaggcatctgaggaagaaggcggtgcacatggtgaaacatgctgggaaaaccgctcataacctaaagagcatgttcagcaagaagggccttgacaagagcaaagaagaacaccgcagtgatgaggaatgcgacgaggaaggcgacgttgttgctgctagaagagtgtagaatatgcaaggcttagttctattcctttggggttgtagtatacatatagtatgtactgatgaagtgttgcacaagaggcgcttgggccatgggtctcatcggctaaatagagtattacataccacatttgacaccctctcacaaacctagacttaggtgaagcttttgatcatgaatacgttccgtttgacggtgttacactgattttcgacgactactaaagtcataatatttag

SEQ ID NO: 45709 - DNA, 2110 bp, Zea Mays
ctcaacgtagctcgacctttcacatgctgtgaatcaacgatacacaatgaggctgtggaggcggatacagtatgaggaaaggaaatgtgccaatcagagaaaggtggcttaattacgctgtggaaaagatttggccagtttgcatggagagggttgcatcccagcagttccttttacccatattcccgtggttcctagagaagttcaaaccatggacagcaaggaaagcagtaatccaaagcctttacttgggtaggaacccaccgatgtttacagatattagggtagttaaccaatcaaccgatgatgaccacttggttctagagatagggatgaattttctttcagctgacgatatggatgcaagaatggctgtgcaactaaggaagagattaggatttggcattacaacaaacatgcatataactgggatgcatgttgaaggaaaggttctggtaggggtgagatttctgcggcagtggccatttattgggcgtgtaagagtatgctttgttgagcctccatacttccaaatgacagtgaaaccgctgtttggtcatggacttgatgtaactgaactcccaggaatttctggatggcttgacaggatgctggatgttgccttcggacagacacttgtggagcccaacatgctagttattgatctggaaaagtttgcctctgaatcaacagataactggtttagtgttgatgagaagccacctatcgcatatgctcgagtggagatcctggaaggtgctgatatgaagccatctgatcctaatggactagctgatccatatgtgaaaggacaacttggaccctaccgttttcgcacaaagatccataagaaaactcttgatccaaaatggctcgaggagtttaaaataccaataacttcatgggaagcactcaatcttcttcatcttcaagtccgagataaggatcccatttttgatgacgctcttggcgattgttccataagcatcaacaagttaagaggtggaataaggcatgatatatggattgcactgaagaacataaagacagggaggattcacgttgctgtaactgtacttgaagaagaaaatgaaaaggtttctaatgatgaagaggaacagtgtggaatacacaaggttgacaaggctagcacaccgaggtcaagtttctcctccaggaccaaccatgaaagtgaatgttctgatgaattccggaagatgtctgatgaatttgagccagttgacatagaaggatcggaaaagcccgatgtttgggtgcatcgccctggcagttatgtcaccagtacatgggaacctcggaaaggccgtgcccggtgccaggattccagaattcaccgggagaatgattcttgtagtgatagtccaaggtcatcagtgtcaggatctcatagaagtgactccagcactgaagaacccacgagcagtaaatcgcatcgccaccttcaaaaggtcaagaagggtttgggcaagctagctggagcagtgctccaccggagcccaaaggagaatgatgacgaagcttccccatgtgtaactcctcaccaaaacattcgaccggtcggggaaagcagggtttcagtaacatatgtggtcgatcaagatccagcaggggttgacggatcggggtcgagacgagatgaccaccagcaaagccctgagagagaggagctggacagcccgagtaaaaggcatctgaggaagaaggcggtgcacatggtgaaacatgctgggaaaaccgctcataacctaaagagcatgttcagcaagaagggccttgacaagagcaaagaagaacaccgcagtgatgaggaatgcgacgaggaaggcgacgttgttgctgctagaagagtgtagaatatgcaaggcttagttctattcctttggggttgtagtatacatatagtatgtactgatgaagtgttgcacaagaggcgcttgggccatgggtctcatcggctaaatagagtattacataccacatttgacaccctctcacaaacctagacttaggtgaagcttttgatcatgaatacgttccgtttgacggtgttacactgattttcgacgactactaaagtcataatatttag

SEQ ID NO: 45710 - DNA, 2830 bp, Zea Mays
aaccagtgccagagttcattgcagtgccctataagtctctcaacgtagctcgacctttcacatgctgtatgtcagattcatttttggcttgctacccatctgtgtatctgcgcaccattgttaatataataaattaagtaatacccacttcaaagaaattataataaaaatttctgtgaccatcttagtaccgtggatcacaaatttcatcaaaaaaagattcctcttatagggcaaggagcatgataatccaatgcagaaactgtgttcagcacagaagatcgagcgaatacagtttttcaattatctcatctcagtaacaatatgatttttaggtgaatcaacgatacacaatgaggctgtggaggcggatacagtatgaggaaaggaaatgtgccaatcagagaaagcttctctctgatgcagagactgtcaggtggcttaattacgctgtggaaaagatttggccagtttgcatggagagggttgcatcccagcagttccttttacccatattcccgtggttcctagagaagttcaaaccatggacagcaaggaaagcagtaatccaaagcctttacttgggtaggaacccaccgatgtttacagatattagggtagttaaccaatcaaccgatgatgaccacttggtgtgtaatgtgaatatcatatgttctctctcagatactcattttgtagaccgtgaaacagctaaaatttacatgccaggttctagagatagggatgaattttctttcagctgacgatatggatgcaagaatggctgtgcaactaaggaagagattaggatttggcattacaacaaacatgcatataactgggatgcatgttgaaggaaaggttctggtaggggtgagatttctgcggcagtggccatttattgggcgtgtaagagtatgctttgttgagcctccatacttccaaatgacagtgaaaccgctgtttggtcatggacttgatgtaactgaactcccaggaatttctggatggcttgacaggatgctggatgttgccttcggacagacacttgtggaggttacattttctagaccatgaatttttaattaaaaaagcttggccacattgtgaaagttctaagttgctgcattaaactatagttttaaattgatcattgtccattgttgaacaagcaaaggcaagggacgttctatgtgtttgaatatgtaaattgctctagcctcaaacattatgcttgcctgcaatggatgagccttttgacatggcttcgggtcttggggattcattgatacattttgttggatcatgtttttaaaggatcttatacaaatagctaaataactttagaattaattgttttgcagcccaacatgctagttattgatctggaaaagtttgcctctgaatcaacagataactggtttagtgttgatgagaagccacctatcgcatatgctcgagtggagatcctggaaggtgctgatatgaagccatctgatcctaatggactagctgatccatatgtgaaaggacaacttggaccctaccgttttcgcacaaagatccataagaaaactcttgatccaaaatggctcgaggagtttaaaataccaataacttcatgggaagcactcaatcttcttcatcttcaagtccgagataaggatcccatttttgatgacgctcttggcgattgttccataagcatcaacaagttaagaggtggaataaggcatgatatatggattgcactgaagaacataaagacagggaggattcacgttgctgtaactgtacttgaagaagaaaatgaaaaggtttctaatgatgaagaggaacagtgtggaatacacaaggttgacaaggctagcacaccgaggtcaagtttctcctccaggaccaaccatgaaagtgaatgttctgatgaattccggaagatgtctgatgaatttgagccagttgacatagaaggatcggaaaagcccgatgtttgggtgcatcgccctggcagttatgtcaccagtacatgggaacctcggaaaggccgtgcccggtgccaggattccagaattcaccgggagaatgattcttgtagtgatagtccaaggtcatcagtgtcaggatctcatagaagtgactccagcactgaagaacccacgagcagtaaatcgcatcgccaccttcaaaaggtcaagaagggtttgggcaagctagctggagcagtgctccaccggagcccaaaggagaatgatgacgaagcttccccatgtgtaactcctcaccaaaacattcgaccggtcggggaaagcagggtttcagtaacatatgtggtcgatcaagatccagcaggggttgacggatcggggtcgagacgagatgaccaccagcaaagccctgagagagaggagctggacagcccgagtaaaaggcatctgaggaagaaggcggtgcacatggtgaaacatgctgggaaaaccgctcataacctaaagagcatgttcagcaagaagggccttgacaagagcaaagaagaacaccgcagtgatgaggaatgcgacgaggaaggcgacgttgttgctgctagaagagtgtagaatatgcaaggcttagttctattcctttggggttgtagtatacatatagtatgtactgatgaagtgttgcacaagaggcgcttgggccatgggtctcatcggctaaatagagtattacataccacatttgacaccctctcacaaacctagacttaggtgaagcttttgatcatgaatacgttccgtttgacggtgttacactgattttcgacgactactaaagtcataatatttag

SEQ ID NO: 45711 - DNA, 2667 bp, Zea Mays
atctgaccgccgcccatgaccgaaccgaacaaaccagcggagcgtgcggtgggtgatgataattcccacatccgctgctcggggtgcggtcggcgcgtgagaccgtgcgagagagccagagagggcacgcaggacaccaccgcggcccctgccccacgcccacatcggctcccgcgtcggccccgcgtccatccggccgcctttccgctcaccgtccgccgcttcttctcccctgtgggcccgtgacctggcctccctcccacctcgccccgccgattcagctccccttcctcgacgcaggcatcggggccactcatgcataacgttcgcacggtgttccgcttccgcccgtcttgagaaactaaaacacacagagagagcagtagcggtagcgcggacggagtgggtgcccgggccgggcaccagcggaaggaagaggttgccggcggctgtagacctcacggcgatggatatcacggaggtaacggtggtgcaccacgcagcgctcgtgctggcggcgctctgggtcgccgcggcatccggctggacgcacccggcgctcttcctcgtcgggctcctgtacatatttgcggtgaatcaacgatacacaatgaggctgtggaggcggatacagtatgaggaaaggaaatgtgccaatcagagaaaggtggcttaattacgctgtggaaaagatttggccagtttgcatggagagggttgcatcccagcagttccttttacccatattcccgtggttcctagagaagttcaaaccatggacagcaaggaaagcagtaatccaaagcctttacttgggtaggaacccaccgatgtttacagatattagggtagttaaccaatcaaccgatgatgaccacttgagatagggatgaattttctttcagctgacgatatggatgcaagaatggctgtgcaactaaggaagagattaggatttggcattacaacaaacatgcatataactgggatgcatgttgaaggaaaggttctggtaggggtgagatttctgcggcagtggccatttattgggcgtgtaagagtatgctttgttgagcctccatacttccaaatgacagtgaaaccgctgtttggtcatggacttgatgtaactgaactcccaggaatttctggatggcttgacaggatgctggatgttgccttcggacagacacttgtggagcccaacatgctagttattgatctggaaaagtttgcctctgaatcaacagataactggtttagtgttgatgagaagccacctatcgcatatgctcgagtggagatcctggaaggtgctgatatgaagccatctgatcctaatggactagctgatccatatgtgaaaggacaacttggaccctaccgttttcgcacaaagatccataagaaaactcttgatccaaaatggctcgaggagtttaaaataccaataacttcatgggaagcactcaatcttcttcatcttcaagtccgagataaggatcccatttttgatgacgctcttggcgattgttccataagcatcaacaagttaagaggtggaataaggcatgatatatggattgcactgaagaacataaagacagggaggattcacgttgctgtaactgtacttgaagaagaaaatgaaaaggtttctaatgatgaagaggaacagtgtggaatacacaaggttgacaaggctagcacaccgaggtcaagtttctcctccaggaccaaccatgaaagtgaatgttctgatgaattccggaagatgtctgatgaatttgagccagttgacatagaaggatcggaaaagcccgatgtttgggtgcatcgccctggcagttatgtcaccagtacatgggaacctcggaaaggccgtgcccggtgccaggattccagaattcaccgggagaatgattcttgtagtgatagtccaaggtcatcagtgtcaggatctcatagaagtgactccagcactgaagaacccacgagcagtaaatcgcatcgccaccttcaaaaggtcaagaagggtttgggcaagctagctggagcagtgctccaccggagcccaaaggagaatgatgacgaagcttccccatgtgtaactcctcaccaaaacattcgaccggtcggggaaagcagggtttcagtaacatatgtggtcgatcaagatccagcaggggttgacggatcggggtcgagacgagatgaccaccagcaaagccctgagagagaggagctggacagcccgagtaaaaggcatctgaggaagaaggcggtgcacatggtgaaacatgctgggaaaaccgctcataacctaaagagcatgttcagcaagaagggccttgacaagagcaaagaagaacaccgcagtgatgaggaatgcgacgaggaaggcgacgttgttgctgctagaagagtgtagaatatgcaaggcttagttctattcctttggggttgtagtatacatatagtatgtactgatgaagtgttgcacaagaggcgcttgggccatgggtctcatcggctaaatagagtattacataccacatttgacaccctctcacaaacctagacttaggtgaagcttttgatcatgaatacgttccgtttgacggtgttacactgattttcgacgactactaaagtcataatatttag

SEQ ID NO: 45712 - DNA, 2687 bp, Zea Mays
atctgaccgccgcccatgaccgaaccgaacaaaccagcggagcgtgcggtgggtgatgataattcccacatccgctgctcggggtgcggtcggcgcgtgagaccgtgcgagagagccagagagggcacgcaggacaccaccgcggcccctgccccacgcccacatcggctcccgcgtcggccccgcgtccatccggccgcctttccgctcaccgtccgccgcttcttctcccctgtgggcccgtgacctggcctccctcccacctcgccccgccgattcagctccccttcctcgacgcaggcatcggggccactcatgcataacgttcgcacggtgttccgcttccgcccgtcttgagaaactaaaacacacagagagagcagtagcggtagcgcggacggagtgggtgcccgggccgggcaccagcggaaggaagaggttgccggcggctgtagacctcacggcgatggatatcacggaggtaacggtggtgcaccacgcagcgctcgtgctggcggcgctctgggtcgccgcggcatccggctggacgcacccggcgctcttcctcgtcgggctcctgtacatatttgcggtgaatcaacgatacacaatgaggctgtggaggcggatacagtatgaggaaaggaaatgtgccaatcagagaaagcttctctctgatgcagagactgtcaggtggcttaattacgctgtggaaaagatttggccagtttgcatggagagggttgcatcccagcagttccttttacccatattcccgtggttcctagagaagttcaaaccatggacagcaaggaaagcagtaatccaaagcctttacttgggtaggaacccaccgatgtttacagatattagggtagttaaccaatcaaccgatgatgaccacttgggatgaattttctttcagctgacgatatggatgcaagaatggctgtgcaactaaggaagagattaggatttggcattacaacaaacatgcatataactgggatgcatgttgaaggaaaggttctggtaggggtgagatttctgcggcagtggccatttattgggcgtgtaagagtatgctttgttgagcctccatacttccaaatgacagtgaaaccgctgtttggtcatggacttgatgtaactgaactcccaggaatttctggatggcttgacaggatgctggatgttgccttcggacagacacttgtggagcccaacatgctagttattgatctggaaaagtttgcctctgaatcaacagataactggtttagtgttgatgagaagccacctatcgcatatgctcgagtggagatcctggaaggtgctgatatgaagccatctgatcctaatggactagctgatccatatgtgaaaggacaacttggaccctaccgttttcgcacaaagatccataagaaaactcttgatccaaaatggctcgaggagtttaaaataccaataacttcatgggaagcactcaatcttcttcatcttcaagtccgagataaggatcccatttttgatgacgctcttggcgattgttccataagcatcaacaagttaagaggtggaataaggcatgatatatggattgcactgaagaacataaagacagggaggattcacgttgctgtaactgtacttgaagaagaaaatgaaaaggtttctaatgatgaagaggaacagtgtggaatacacaaggttgacaaggctagcacaccgaggtcaagtttctcctccaggaccaaccatgaaagtgaatgttctgatgaattccggaagatgtctgatgaatttgagccagttgacatagaaggatcggaaaagcccgatgtttgggtgcatcgccctggcagttatgtcaccagtacatgggaacctcggaaaggccgtgcccggtgccaggattccagaattcaccgggagaatgattcttgtagtgatagtccaaggtcatcagtgtcaggatctcatagaagtgactccagcactgaagaacccacgagcagtaaatcgcatcgccaccttcaaaaggtcaagaagggtttgggcaagctagctggagcagtgctccaccggagcccaaaggagaatgatgacgaagcttccccatgtgtaactcctcaccaaaacattcgaccggtcggggaaagcagggtttcagtaacatatgtggtcgatcaagatccagcaggggttgacggatcggggtcgagacgagatgaccaccagcaaagccctgagagagaggagctggacagcccgagtaaaaggcatctgaggaagaaggcggtgcacatggtgaaacatgctgggaaaaccgctcataacctaaagagcatgttcagcaagaagggccttgacaagagcaaagaagaacaccgcagtgatgaggaatgcgacgaggaaggcgacgttgttgctgctagaagagtgtagaatatgcaaggcttagttctattcctttggggttgtagtatacatatagtatgtactgatgaagtgttgcacaagaggcgcttgggccatgggtctcatcggctaaatagagtattacataccacatttgacaccctctcacaaacctagacttaggtgaagcttttgatcatgaatacgttccgtttgacggtgttacactgattttcgacgactactaaagtcataatatttag

SEQ ID NO: 45713 - DNA, 2693 bp, Zea Mays
atctgaccgccgcccatgaccgaaccgaacaaaccagcggagcgtgcggtgggtgatgataattcccacatccgctgctcggggtgcggtcggcgcgtgagaccgtgcgagagagccagagagggcacgcaggacaccaccgcggcccctgccccacgcccacatcggctcccgcgtcggccccgcgtccatccggccgcctttccgctcaccgtccgccgcttcttctcccctgtgggcccgtgacctggcctccctcccacctcgccccgccgattcagctccccttcctcgacgcaggcatcggggccactcatgcataacgttcgcacggtgttccgcttccgcccgtcttgagaaactaaaacacacagagagagcagtagcggtagcgcggacggagtgggtgcccgggccgggcaccagcggaaggaagaggttgccggcggctgtagacctcacggcgatggatatcacggaggtaacggtggtgcaccacgcagcgctcgtgctggcggcgctctgggtcgccgcggcatccggctggacgcacccggcgctcttcctcgtcgggctcctgtacatatttgcggtgaatcaacgatacacaatgaggctgtggaggcggatacagtatgaggaaaggaaatgtgccaatcagagaaagcttctctctgatgcagagactgtcaggtggcttaattacgctgtggaaaagatttggccagtttgcatggagagggttgcatcccagcagttccttttacccatattcccgtggttcctagagaagttcaaaccatggacagcaaggaaagcagtaatccaaagcctttacttgggtaggaacccaccgatgtttacagatattagggtagttaaccaatcaaccgatgatgaccacttgagatagggatgaattttctttcagctgacgatatggatgcaagaatggctgtgcaactaaggaagagattaggatttggcattacaacaaacatgcatataactgggatgcatgttgaaggaaaggttctggtaggggtgagatttctgcggcagtggccatttattgggcgtgtaagagtatgctttgttgagcctccatacttccaaatgacagtgaaaccgctgtttggtcatggacttgatgtaactgaactcccaggaatttctggatggcttgacaggatgctggatgttgccttcggacagacacttgtggagcccaacatgctagttattgatctggaaaagtttgcctctgaatcaacagataactggtttagtgttgatgagaagccacctatcgcatatgctcgagtggagatcctggaaggtgctgatatgaagccatctgatcctaatggactagctgatccatatgtgaaaggacaacttggaccctaccgttttcgcacaaagatccataagaaaactcttgatccaaaatggctcgaggagtttaaaataccaataacttcatgggaagcactcaatcttcttcatcttcaagtccgagataaggatcccatttttgatgacgctcttggcgattgttccataagcatcaacaagttaagaggtggaataaggcatgatatatggattgcactgaagaacataaagacagggaggattcacgttgctgtaactgtacttgaagaagaaaatgaaaaggtttctaatgatgaagaggaacagtgtggaatacacaaggttgacaaggctagcacaccgaggtcaagtttctcctccaggaccaaccatgaaagtgaatgttctgatgaattccggaagatgtctgatgaatttgagccagttgacatagaaggatcggaaaagcccgatgtttgggtgcatcgccctggcagttatgtcaccagtacatgggaacctcggaaaggccgtgcccggtgccaggattccagaattcaccgggagaatgattcttgtagtgatagtccaaggtcatcagtgtcaggatctcatagaagtgactccagcactgaagaacccacgagcagtaaatcgcatcgccaccttcaaaaggtcaagaagggtttgggcaagctagctggagcagtgctccaccggagcccaaaggagaatgatgacgaagcttccccatgtgtaactcctcaccaaaacattcgaccggtcggggaaagcagggtttcagtaacatatgtggtcgatcaagatccagcaggggttgacggatcggggtcgagacgagatgaccaccagcaaagccctgagagagaggagctggacagcccgagtaaaaggcatctgaggaagaaggcggtgcacatggtgaaacatgctgggaaaaccgctcataacctaaagagcatgttcagcaagaagggccttgacaagagcaaagaagaacaccgcagtgatgaggaatgcgacgaggaaggcgacgttgttgctgctagaagagtgtagaatatgcaaggcttagttctattcctttggggttgtagtatacatatagtatgtactgatgaagtgttgcacaagaggcgcttgggccatgggtctcatcggctaaatagagtattacataccacatttgacaccctctcacaaacctagacttaggtgaagcttttgatcatgaatacgttccgtttgacggtgttacactgattttcgacgactactaaagtcataatatttag

SEQ ID NO: 45714 - DNA, 2695 bp, Zea Mays
atctgaccgccgcccatgaccgaaccgaacaaaccagcggagcgtgcggtgggtgatgataattcccacatccgctgctcggggtgcggtcggcgcgtgagaccgtgcgagagagccagagagggcacgcaggacaccaccgcggcccctgccccacgcccacatcggctcccgcgtcggccccgcgtccatccggccgcctttccgctcaccgtccgccgcttcttctcccctgtgggcccgtgacctggcctccctcccacctcgccccgccgattcagctccccttcctcgacgcaggcatcggggccactcatgcataacgttcgcacggtgttccgcttccgcccgtcttgagaaactaaaacacacagagagagcagtagcggtagcgcggacggagtgggtgcccgggccgggcaccagcggaaggaagaggttgccggcggctgtagacctcacggcgatggatatcacggaggtaacggtggtgcaccacgcagcgctcgtgctggcggcgctctgggtcgccgcggcatccggctggacgcacccggcgctcttcctcgtcgggctcctgtacatatttgcggtgaatcaacgatacacaatgaggctgtggaggcggatacagtatgaggaaaggaaatgtgccaatcagagaaagcttctctctgatgcagagactgtcaggtggcttaattacgctgtggaaaagatttggccagtttgcatggagagggttgcatcccagcagttccttttacccatattcccgtggttcctagagaagttcaaaccatggacagcaaggaaagcagtaatccaaagcctttacttgggtaggaacccaccgatgtttacagatattagggtagttaaccaatcaaccgatgatgaccacttggttctagagatagggatgaattttctttcagctgacgatatggatgcaagaatggctgtgcaactaaggaagagattaggatttggcattacaacaaacatgcatataactgggatgcatgttgaaggaaaggttctggtaggggtgagatttctgcggcagtggccatttattgggcgtgtaagagtatgctttgttgagcctccatacttccaaatgacagtgaaaccgctgtttggtcatggacttgatgtaactgaactcccaggaatttctggatggcttgatgctggatgttgccttcggacagacacttgtggagcccaacatgctagttattgatctggaaaagtttgcctctgaatcaacagataactggtttagtgttgatgagaagccacctatcgcatatgctcgagtggagatcctggaaggtgctgatatgaagccatctgatcctaatggactagctgatccatatgtgaaaggacaacttggaccctaccgttttcgcacaaagatccataagaaaactcttgatccaaaatggctcgaggagtttaaaataccaataacttcatgggaagcactcaatcttcttcatcttcaagtccgagataaggatcccatttttgatgacgctcttggcgattgttccataagcatcaacaagttaagaggtggaataaggcatgatatatggattgcactgaagaacataaagacagggaggattcacgttgctgtaactgtacttgaagaagaaaatgaaaaggtttctaatgatgaagaggaacagtgtggaatacacaaggttgacaaggctagcacaccgaggtcaagtttctcctccaggaccaaccatgaaagtgaatgttctgatgaattccggaagatgtctgatgaatttgagccagttgacatagaaggatcggaaaagcccgatgtttgggtgcatcgccctggcagttatgtcaccagtacatgggaacctcggaaaggccgtgcccggtgccaggattccagaattcaccgggagaatgattcttgtagtgatagtccaaggtcatcagtgtcaggatctcatagaagtgactccagcactgaagaacccacgagcagtaaatcgcatcgccaccttcaaaaggtcaagaagggtttgggcaagctagctggagcagtgctccaccggagcccaaaggagaatgatgacgaagcttccccatgtgtaactcctcaccaaaacattcgaccggtcggggaaagcagggtttcagtaacatatgtggtcgatcaagatccagcaggggttgacggatcggggtcgagacgagatgaccaccagcaaagccctgagagagaggagctggacagcccgagtaaaaggcatctgaggaagaaggcggtgcacatggtgaaacatgctgggaaaaccgctcataacctaaagagcatgttcagcaagaagggccttgacaagagcaaagaagaacaccgcagtgatgaggaatgcgacgaggaaggcgacgttgttgctgctagaagagtgtagaatatgcaaggcttagttctattcctttggggttgtagtatacatatagtatgtactgatgaagtgttgcacaagaggcgcttgggccatgggtctcatcggctaaatagagtattacataccacatttgacaccctctcacaaacctagacttaggtgaagcttttgatcatgaatacgttccgtttgacggtgttacactgattttcgacgactactaaagtcataatatttag

SEQ ID NO: 45715 - DNA, 3087 bp, Zea Mays
atctgaccgccgcccatgaccgaaccgaacaaaccagcggagcgtgcggtgggtgatgataattcccacatccgctgctcggggtgcggtcggcgcgtgagaccgtgcgagagagccagagagggcacgcaggacaccaccgcggcccctgccccacgcccacatcggctcccgcgtcggccccgcgtccatccggccgcctttccgctcaccgtccgccgcttcttctcccctgtgggcccgtgacctggcctccctcccacctcgccccgccgattcagctccccttcctcgacgcaggcatcggggccactcatgcataacgttcgcacggtgttccgcttccgcccgtcttgagaaactaaaacacacagagagagcagtagcggtagcgcggacggagtgggtgcccgggccgggcaccagcggaaggaagaggttgccggcggctgtagacctcacggcgatggatatcacggaggtaacggtggtgcaccacgcagcgctcgtgctggcggcgctctgggtcgccgcggcatccggctggacgcacccggcgctcttcctcgtcgggctcctgtacatatttgcggtgaatcaacgatacacaatgaggctgtggaggcggatacagtatgaggaaaggaaatgtgccaatcagagaaagcttctctctgatgcagagactgtcaggtggcttaattacgctgtggaaaagatttggccagtttgcatggagagggttgcatcccagcagttccttttacccatattcccgtggttcctagagaagttcaaaccatggacagcaaggaaagcagtaatccaaagcctttacttgggtaggaacccaccgatgtttacagatattagggtagttaaccaatcaaccgatgatgaccacttggtgtgtaatgtgaatatcatatgttctctctcagatactcattttgtagaccgtgaaacagctaaaatttacatgccaggttctagagatagggatgaattttctttcagctgacgatatggatgcaagaatggctgtgcaactaaggaagagattaggatttggcattacaacaaacatgcatataactgggatgcatgttgaaggaaaggttctggtaggggtgagatttctgcggcagtggccatttattgggcgtgtaagagtatgctttgttgagcctccatacttccaaatgacagtgaaaccgctgtttggtcatggacttgatgtaactgaactcccaggaatttctggatggcttgacaggatgctggatgttgccttcggacagacacttgtggaggttacattttctagaccatgaatttttaattaaaaaagcttggccacattgtgaaagttctaagttgctgcattaaactatagttttaaattgatcattgtccattgttgaacaagcaaaggcaagggacgttctatgtgtttgaatatgtaaattgctctagcctcaaacattatgcttgcctgcaatggatgagccttttgacatggcttcgggtcttggggattcattgatacattttgttggatcatgtttttaaaggatcttatacaaatagctaaataactttagaattaattgttttgcagcccaacatgctagttattgatctggaaaagtttgcctctgaatcaacagataactggtttagtgttgatgagaagccacctatcgcatatgctcgagtggagatcctggaaggtgctgatatgaagccatctgatcctaatggactagctgatccatatgtgaaaggacaacttggaccctaccgttttcgcacaaagatccataagaaaactcttgatccaaaatggctcgaggagtttaaaataccaataacttcatgggaagcactcaatcttcttcatcttcaagtccgagataaggatcccatttttgatgacgctcttggcgattgttccataagcatcaacaagttaagaggtggaataaggcatgatatatggattgcactgaagaacataaagacagggaggattcacgttgctgtaactgtacttgaagaagaaaatgaaaaggtttctaatgatgaagaggaacagtgtggaatacacaaggttgacaaggctagcacaccgaggtcaagtttctcctccaggaccaaccatgaaagtgaatgttctgatgaattccggaagatgtctgatgaatttgagccagttgacatagaaggatcggaaaagcccgatgtttgggtgcatcgccctggcagttatgtcaccagtacatgggaacctcggaaaggccgtgcccggtgccaggattccagaattcaccgggagaatgattcttgtagtgatagtccaaggtcatcagtgtcaggatctcatagaagtgactccagcactgaagaacccacgagcagtaaatcgcatcgccaccttcaaaaggtcaagaagggtttgggcaagctagctggagcagtgctccaccggagcccaaaggagaatgatgacgaagcttccccatgtgtaactcctcaccaaaacattcgaccggtcggggaaagcagggtttcagtaacatatgtggtcgatcaagatccagcaggggttgacggatcggggtcgagacgagatgaccaccagcaaagccctgagagagaggagctggacagcccgagtaaaaggcatctgaggaagaaggcggtgcacatggtgaaacatgctgggaaaaccgctcataacctaaagagcatgttcagcaagaagggccttgacaagagcaaagaagaacaccgcagtgatgaggaatgcgacgaggaaggcgacgttgttgctgctagaagagtgtagaatatgcaaggcttagttctattcctttggggttgtagtatacatatagtatgtactgatgaagtgttgcacaagaggcgcttgggccatgggtctcatcggctaaatagagtattacataccacatttgacaccctctcacaaacctagacttaggtgaagcttttgatcatgaatacgttccgtttgacggtgttacactgattttcgacgactactaaagtcataatatttag

SEQ ID NO: 45716 - DNA, 958 bp, Zea Mays
taaaataaggagatgtgataggagtcattgcattcaaaatcccctttatttatcggtgataagaaaatcactctgtcatggatggagcagcccaacaaagcagcagctacgaaagcaggggggaagaggtcacaacctagtacaaatgggaatgaccctgcaaacaagaaggggagaggaggaatgcaaaaccagctagtgaacagagcttttgaaggactgtctcatgttggaagaggcagtggaagagggcggggcaggggtggccgaggaagaggaagaggatggagtgggtaccactgagatgacctggaaattctgttcaaacctgacaagggatgagctttctgcttccaccagagagtaaactccaaggtcgatgttttattggtgtgcattactgcaacgcgttgaaatggatcaaggcacacaacagcagaaatgcgtacacagagaaaggatgctaagaaatgtctgcaagtttgtgcatctttcttattcatttaccatctcatcgtgttctttgccaccctaaccgtcgtgtcacttgcgttggctggctgtttgatgaactgggcagttcgatatctttgttctttattttattttacagtgtttgaagagacgaccaagcttgtgctgactttgtttgagttcgttttatgtttcgtccttgtactgacacagatgtattagtgatgtttaacttttatgtaacgattgatctagctgtaatataagttaagcatttaatgagatataaaaatgaaaagaaatatttggtgtcaatcaatacaaatttaacaaatcatgatttccatttgagaaaaataactgaatcagatcatccattagcagggaaccaatgaacatcctgatcaacactaatgtgtctggttcagctataaactatgaaaaaaactgtttttgagttgtctgctttgaaaaaaaaaatata

SEQ ID NO: 45717 - DNA, 1759 bp, Zea Mays
gagctgctgaaacctcaagcagaaatggagagatttataacggatttgataaagaaaagtgtgcaagatgtaactggttcagaattcgaactattcatggggttcttgcgaagcttgagcatatttggggattctgctcctagagagtcctttcaagaactaattgaaattattcaagcacaggctgatctgaattcacaattcaacgtttctgacattgaccacattgagaggtggatttcatgcatgtatatggctcttccgatcttcatgagaggagcatcagcaagcaagttcctcaattacttcgttaaacaaattgttccagcatttgagaagattcctgaagaaaagaaactggatttgctaaagactattgcttcaagttcaccatatgctgcagcacaagattcacgtcagctgcttccatctgttgttcagttactcaagaagtatatgcctgggaagaaggtggaagatatcaaccataattatgttgagtgcttgctatacacttttcatcatttggctcacaagactccaaacacaacgaacagtctatgtggttacaagattgttactgggcaaccatcagatagacttggagaggacttctcagagcattacaaagatttcacagagaggttaactggaacagaagagacggtacgagcagcctccaagcgactaactcaggggatggcagatttcaacaaggcaatatcttcagcaaaaactgacgaggaaaagactaaaattaaaggcgatcagcaaacttcaacaaggacaatgaggtcatataacaatatattggcaatgacacagtcattgcattcaaaatcccctttatttatcggtgataagaaaatcactctgtcatggatggagcagcccaacaaagcagcagctacgaaagcaggggggaagaggtcacaacctagtacaaatgggaatgaccctgcaaacaagaaggggagaggaggaatgcaaaaccagctagtgaacagagcttttgaaggactgtctcatgttggaagaggcagtggaagagggcggggcaggggtggccgaggaagaggaagaggatggagtgggtaccactgagatgacctggaaattctgttcaaacctgacaagggatgagctttctgcttccaccagagagtaaactccaaggtcgatgttttattggtgtgcattactgcaacgcgttgaaatggatcaaggcacacaacagcagaaatgcgtacacagagaaaggatgctaagaaatgtctgcaagtttgtgcatctttcttattcatttaccatctcatcgtgttctttgccaccctaaccgtcgtgtcacttgcgttggctggctgtttgatgaactgggcagttcgatatctttgttctttattttattttacagtgtttgaagagacgaccaagcttgtgctgactttgtttgagttcgttttatgtttcgtccttgtactgacacagatgtattagtgatgtttaacttttatgtaacgattgatctagctgtaatataagttaagcatttaatgagatataaaaatgaaaagaaatatttggtgtcaatcaatacaaatttaacaaatcatgatttccatttgagaaaaataactgaatcagatcatccattagcagggaaccaatgaacatcctgatcaacactaatgtgtctggttcagctataaactatgaaaaaaactgtttttgagttgtctgctttgaaaaaaaaaatata

SEQ ID NO: 45718 - DNA, 1882 bp, Zea Mays
gctggatcgagaaacctagagctatattcattacaacctttatttaagcatgtggagcaaggatcagagattcgtgagaagattatttgttttcttcgagacaaggtctttcctcttaaagcagagctgctgaaacctcaagcagaaatggagagatttataacggatttgataaagaaaagtgtgcaagatgtaactggttcagaattcgaactattcatggggttcttgcgaagcttgagcatatttggggattctgctcctagagagtcctttcaagaactaattgaaattattcaagcacaggctgatctgaattcacaattcaacgtttctgacattgaccacattgagaggtggatttcatgcatgtatatggctcttccgatcttcatgagaggagcatcagcaagcaagttcctcaattacttcgttaaacaaattgttccagcatttgagaagattcctgaagaaaagaaactggatttgctaaagactattgcttcaagttcaccatatgctgcagcacaagattcacgtcagctgcttccatctgttgttcagttactcaagaagtatatgcctgggaagaaggtggaagatatcaaccataattatgttgagtgcttgctatacacttttcatcatttggctcacaagactccaaacacaacgaacagtctatgtggttacaagattgttactgggcaaccatcagatagacttggagaggacttctcagagcattacaaagatttcacagagaggttaactggaacagaagagacggtacgagcagcctccaagcgactaactcaggggatggcagatttcaacaaggcaatatcttcagcaaaaactgacgaggaaaagactaaaattaaaggcgatcagcaaacttcaacaaggacaatgaggtcatataacaatatattggcaatgacacagtcattgcattcaaaatcccctttatttatcggtgataagaaaatcactctgtcatggatggagcagcccaacaaagcagcagctacgaaagcaggggggaagaggtcacaacctagtacaaatgggaatgaccctgcaaacaagaaggggagaggaggaatgcaaaaccagctagtgaacagagcttttgaaggactgtctcatgttggaagaggcagtggaagagggcggggcaggggtggccgaggaagaggaagaggatggagtgggtaccactgagatgacctggaaattctgttcaaacctgacaagggatgagctttctgcttccaccagagagtaaactccaaggtcgatgttttattggtgtgcattactgcaacgcgttgaaatggatcaaggcacacaacagcagaaatgcgtacacagagaaaggatgctaagaaatgtctgcaagtttgtgcatctttcttattcatttaccatctcatcgtgttctttgccaccctaaccgtcgtgtcacttgcgttggctggctgtttgatgaactgggcagttcgatatctttgttctttattttattttacagtgtttgaagagacgaccaagcttgtgctgactttgtttgagttcgttttatgtttcgtccttgtactgacacagatgtattagtgatgtttaacttttatgtaacgattgatctagctgtaatataagttaagcatttaatgagatataaaaatgaaaagaaatatttggtgtcaatcaatacaaatttaacaaatcatgatttccatttgagaaaaataactgaatcagatcatccattagcagggaaccaatgaacatcctgatcaacactaatgtgtctggttcagctataaactatgaaaaaaactgtttttgagttgtctgctttgaaaaaaaaaatata

SEQ ID NO: 45719 - DNA, 1949 bp, Zea Mays
cctttatttagtcaaagtccacgttttcacttttcagttttcacccatcccttcccagttctgtccctctcgaaccctaactccaaaaaccctcgctctcctctcatggccgccgccgcagctgacgacgcagccgaggtggagcggctttacgagctcggcgagcgcctctcctccgccaatgacaagtccgagcatgcggcggactacgaggcgattattgcagcggtgaagggacagagtgccaaggcgaagcagctcgcagcgcagcttatccccaggttcttccggagcttccctgcactcggcacgcgcgccatgtcagccatgttcgatctcgtcgatatggaggagctcgcgatcagaatacaagctattcgtggctttccacttcttggcaaagatactgaatttgtgtcaaaaattgcagatgttttgggtcagctccttacaagcgaggaaaatgttgagcgtgatgctgttcataaagcgctcatgtcccttatacggcaagatgttaaaaattcattacaacctttatttaagcatgtggagcaaggatcagagattcgtgagaagattatttgttttcttcgagacaaggtctttcctcttaaagcagagctgctgaaacctcaagcagaaatggagagatttataacggatttgataaagaaaagtgtgcaagatgtaactggttcagaattcgaactattcatggggttcttgcgaagcttgagcatatttggggattctgctcctagagagtcctttcaagaactaattgaaattattcaagcacaggctgatctgaattcacaattcaacgtttctgacattgaccacattgagaggtggatttcatgcatgtatatggctcttccgatcttcatgagaggagcatcagcaagcaagttcctcaattacttcgttaaacaaattgttccagcatttgagaagattcctgaagaaaagaaactggatttgctaaagactattgcttcaagttcaccatatgctgcagcacaagattcacgtcagctgcttccatctgttgttcagttactcaagaagtatatgcctgggaagaaggtggaagatatcaaccataattatgttgagtgcttgctatacacttttcatcatttggctcacaagactccaaacacaacgaacagtctatgtggttacaagattgttactgggcaaccatcagatagacttggagaggacttctcagagcattacaaagatttcacagagaggttaactggaacagaagagacggtacgagcagcctccaagcgactaactcaggggatggcagatttcaacaaggcaatatcttcagcaaaaactgacgaggaaaagactaaaattaaaggcgatcagcaaacttcaacaaggacaatgaggtcatataacaatatattggcaatgacacagtcattgcattcaaaatcccctttatttatcggtgataagaaaatcactctgtcatggatggagcagcccaacaaagcagcagctacgaaagcaggggggaagaggtcacaacctagtacaaatgggaatgaccctgcaaacaagaaggggagaggaggaatgcaaaaccagctagtgaacagagcttttgaaggactgtctcatgttggaagaggcagtggaagagggcggggcaggggtggccgaggaagaggaagaggatggagtgggtaccactgagatgacctggaaattctgttcaaacctgacaagggatgagctttctgcttccaccagagagtaaactccaagccctgttctcatccgggaaagcatagcagcgtcggaactcggaagctggtgaaggcgacctttgtgagttcaacctcatgattcccacgtgtcagctctgttcctcatctggccagcggcaagacggcacggaggaagtcggagaaggcgac

SEQ ID NO: 45720 - DNA, 1444 bp, Zea Mays
tcagttttcacccatcccttcccagttctgtccctctcgaaccctaactccaaaaaccctcgctctcctctcatggccgccgccgcagctgacgacgcagccgaggtggagcggctttacgagctcggcgagcgcctctcctccgccaatgacaagtccgagcatgcggcggactacgaggcgattattgcagcggtgaagggacagagtgccaaggcgaagcagctcgcagcgcagcttatccccaggttcttccggagcttccctgcactcggcacgcgcgccatgtcagccatgttcgatctcgtcgatatggaggagctcgcgatcagaatacaagctattcgtggctttccacttcttggcaaagatactgaatttgtgtcaaaaattgcagatgttttgggtcagctccttacaagcgaggaaaatgttgagcgtgatgctgttcataaagcgctcatgtcccttatacggcaagatgttaaaaattcattacaacctttatttaagcatgtggagcaaggatcagagattcgtgagaagattatttgttttcttcgagacaaggtctttcctcttaaagcagagctgctgaaacctcaagcagaaatggagagatttataacggatttgataaagaaaagtgtgcaagatgtaactggttcagaattcgaactattcatggggttcttgcgaagcttgagcatatttggggattctgctcctagagagtcctttcaagaactaattgaaattattcaagcacaggctgatctgaattcacaattcaacgtttctgacattgaccacattgagaggtggatttcatgcatgtatatggctcttccgatcttcatgagaggagcatcagcaagcaagttcctcaattacttcgttaaacaaattgttccagcatttgagaagattcctgaagaaaagaaactggatttgctaaagactattgcttcaagttcaccatatgctgcagcacaagattcacgtcagctgcttccatctgttgttcagttactcaagaagtatatgcctgggaagaaggtggaagatatcaaccataattatgttgagtgcttgctatacacttttcatcatttggctcacaagactccaaacacaacgaacagtctatgtggttacaagattgttactgggcaaccatcagatagacttggagaggacttctcagagcattacaaagatttcacagagaggttaactggaacagaagagacggtacgagcagcctccaagcgactaactcaggggatggcagatttcaacaaggcaatatcttcagcaaaaactgacgaggaaaagactaaaattaaaggcgatcagcaaacttcaacaaggacaatgaggtcatataacaatatattggcaatgacacaggctgtggctagcagatcgtgcgtgcatgtgg

SEQ ID NO: 45721 - DNA, 1378 bp, Zea Mays
ccacccaaatttgttcctctcctccatttcctcccttcgccatcatcccctcggctccgctctccttccctccccggctcaccccgccgctgccccgcgcccgtggagttcttcgatcgagtcctcggagcctggagcacctcgtccaacaatccgggaccgcacgagaagagagagagggggtggtttgacacaagtcaggcacccgtcaagattcggctcgatctgctgcgggacatggagctggacagcatcgagtgcgtgtcctactccgatggcatggaggacgacgacgacacggccgccgtcacctcgtcccagctccctcgccccttcctcaaatcctcctctaccgccggtgctgccgccgccgccgccgcggccgtcaacgtggtcgtcgtctccgaccgcgccggtgccgccgggacggtagcgggagctgggccgctggtgatatctccggccacgggcgtgcatgagcttctcgagtgccccgtctgcaccaactccatgtacccgcccatccaccagtgccaaaatggtcatactctgtgttccacctgcaaaactcgggtgcacaaccgctgcccaacttgtcgacaggagctcggtgacatcaggtgtctggcattagaaaaagtggctgaatcacttgagctcccctgcagatactactctcttggatgtccagaagtcttcccatactacagcaaactaagccatgagtcacagtgtagttttaggccatacaactgtccttatgctggttctgaatgttcagttgttggggatattccttttcttgtggcacatctacgagatgatcataaagtggacatgcactctggatgcacatttaatcaccgctatgtcaagtccaacccaagagaggttgaaaatgcaacctggatgctaactgtgtttcattgttttgggcagtacttttgcttgcactttgaggcatttcagcttgggttggcaccagtatacatggctttcctacgatttatgggtgacgaaaatgattctaggaattacagctatagccttgaggttggtgcaaatggcaggaagatgatatgggagggaacgccccgcagcatccgggacagccaccggaaggttagggacagccatgacggcctaataattcagcgcaacatggctctcttcttctcaggtggagataggaaagagctgaagctgcgcgtcacaggccgtatctggaaggagcagcagaaccctgactcgggggcctgcattcccaatttgttcagctgagctgagtaacaaggatgaatccagtggcaatgggttttatatgttcaacactggtttggtggacaaggaaatagcgagggtgattcttcttgcttct

SEQ ID NO: 45722 - DNA, 1609 bp, Zea Mays
ccacctgccgcaactgccgaccccacccaaatttgttcctctcctccatttcctcccttcgccatcatcccctcggctccgctctccttccctccccggctcaccccgccgctgccccgcgcccgtggagttcttcgatcgagtcctcggagcctggagcacctcgtccaacaatccgggaccgcacgagaagagagagagggggtggtttgacacaagtcaggcacccgtcaagattcggctcgatctgctgcgggacatggagctggacagcatcgagtgcgtgtcctactccgatggcatggaggacgacgacgacacggccgccgtcacctcgtcccagctccctcgccccttcctcaaatcctcctctaccgccggtgctgccgccgccgccgccgcggccgtcaacgtggtcgtcgtctccgaccgcgccggtgccgccgggacggtagcgggagctgggccgctggtgatatctccggccacgggcgtgcatgagcttctcgagtgccccgtctgcaccaactccatgtacccgcccatccaccagtgccaaaatggtcatactctgtgttccacctgcaaaactcgggtgcacaaccgctgcccaacttgtcgacaggagctcggtgacatcaggtgtctggcattagaaaaagtggctgaatcacttgagctcccctgcagatactactctcttggatgtccagaagtcttcccatactacagcaaactaagccatgagtcacagtgtagttttaggccatacaactgtccttatgctggttctgaatgttcagttgttggggatattccttttcttgtggcacatctacgagatgatcataaagtggacatgcactctggatgcacatttaatcaccgctatgtcaagtccaacccaagagaggttgaaaatgcaacctggatgctaactgtgtttcattgttttgggcagtacttttgcttgcactttgaggcatttcagcttgggttggcaccagtatacatggctttcctacgatttatgggtgacgaaaatgattctaggaattacagctatagccttgaggttggtgcaaatggcaggaagatgatatgggagggaacgccccgcagcatccgggacagccaccggaaggttagggacagccatgacggcctaataattcagcgcaacatggctctcttcttctcaggtggagataggaaagagctgaagctgcgcgtcacaggccgtatctggaaggagcagcagaaccctgactcgggggcctgcattcccaatttgttcagctgagctgagtaacaaggatgaatccaggataatgaaaatacagagttcctcctcctgtgggctggtgaatctcatgataagcaaatttttttctcgacgatacagatttgtgatgttatgtttgcctcggtgtattttgttgtctggaaataaactgttgcgcagtaactgcatttggttggctggtcattagcttgtcactctgagtttgacgtacatcatgtttaatgcgacagtggcaatgggttttatatgttcaacactggtttggtggacaaggaaatagcgagggtgattcttcttgcttct

SEQ ID NO: 45723 - DNA, 4076 bp, Zea Mays
cccaccaccacgcccgacctcgtccgcggtgaaggtcaaggagacggcggaggaagcctgacaaccgtgtggatggggatctcgttcaagctgtcgaaggtcggggtccgcgtgcacccggccgcgcgctcggcgtccgcggcggtggcggaaaagccgggcgcgggtgggaaggagggttcgctgtctgagtcgacacgcgaggacaaaagaaaagatgtcaatggcatcaaaattttaccagcatgctccaaagaaattttgccagatcatgaggtttctttcacattgagcctctatgagagaggttatctcatttcaaagtcagcacccatggatcctagtcagacctcaattcaggacggcaaaacactgcatccctatgatagagcatcagaaaagttgttctctgctatcgaagctgggaggctacctggcgatatttttgatgagataccaagcaagtactataatggatcagttgtttgtgagatacatgactaccgaaagcatgtgtccaaccaagcgcctgcatcatctgctgagctaggatcaccaattgtgaataaagtacgactgcgaatgacctttgaaaatgttgtaaaggacattacccttctatctgatgattcctggagttacagggattttatggaagctgaggcttgtattttgagagctctacaaccggaactttgcttagaccccacacctaaactggatcgacttcatcaggatcctgttccgcataagttgagccttggtatagggaaaaagaggaggctgaggcaaaatcctgaagttgtcacatccagtcacatgtctcatggtaaaaaggtttgcattgataggttacctgaaagtgccaaagctgatgagatgggcatcactagcagtaatgcagctcagcaggttggtggtaacattaccatccaaaatatgtcagtctcaggtggttctcagacacttagaccaaataattcttcacaagatgctgccagaacgcttttgcctcaatctggtctacagcaaaccttgtgttattctgctgctggtaatgatcatatggcaggaccacctgccaatttttctggaaccagttcatgcatttcatctcatcagagcctgattggttacagtgactctgtggctgccaacagccttctatctgtgaagagggaaatgcaggatgcctcgcttcaagatcctaagagaataaagcgaactggtggtattgatgatgtacagcagcagcagataaggcctcaaccccttggtgggcaggagatgcaatggaagaaccatcaactgcatccacaattagatgttaaggggatgcagtatgcatcttcactgagtggtcagagatatccttcttcgatgatgaacaacatgcaagatccaggatcttccttatattttagtcatcagcaaaatttgagatacgatgctaagcaagagcagatggatggttctgataagtcaaaagacaccttgcagtctatggcacctgaaacttccatgctggatcagcagcaatcccaatctcaacatttaccacaacaatcagtggcaagaaataatgttccaaacatgggacagtggcaaaatactcggttcgcagctgagaaggacttcaaaaaagaagacataattcagagaagaaagttagcacctagctctcgtgcccctactgggcctgtgattcagtctccagtgtcctcgaaatctggagagttatcaggcagttcaatgggtggccagtttggttctgctgtgacatcagctgtaacaggggtacagaaagataaatttgctgcaaattccggtactgcagttggatttccttctgtagcttccagtcctagtgattccatgcaccgaatacaacagcctgctgttgcttcctcaaagaggaaaacaaattctgtccccaaaactcaaccgccttttctttggaagtctgtcatgggagactttttaaggaagttttgggttgcacggtaccagcttttcaataagaagaagtttgataaaatatctcaaaagaaaaccattatcaatcgaaaccaaaatgtagctggttgtctcaacagttgtttccattctgaggattatatagataccacaagacctctttgtaattctatgattagtggaactataaacacatgcaagggtagggtaataaactttgtgagcacaaaagacatgtaccaaggtcattcaaggccattcccggttgattttaacgaactgtctgatgaaactgtaagaatgcaatatggagatataaaagattttgatgatccaaattcatatggttgtgtattcatattaccgacaaagcactatgctgacttgtttgcggggcagcttatttcccttatgttgcaagatggacattctaaagctgacgatgaagttgtgcgtagcaccccttttgctaacatcagtacaccctttggacctttaccaaacaacgtagtgagtgatgtaaagcaagagggaggtgtaagccaacaacttaatgccgcagcccatgcaaatgtggcacctggaacacaaatgcaacagcttcctgtcaataggatgcttccatctgcaaatggcaaccagattctagcaatgcagcaaggttatatgcaaggggcagccatgcctccaaggagccagcatcttgaccaaaatttggttcagcagccgcagcaccaacagccacaacagcaaccactgcagcaaaatgctcaagcccaggtgcagcaaccatcatctcttccactgaaccagatgcaaagacctcaggttctgcctacgagcccattatctcagatgttggggcctggctcaaatctcccaatgggctcaagtcagataggtaagaataaggctcctcccacatctttgcagcttcaaatgctacaggcacaaccccaacaacctatgtctaggaaagtgatgatggggcttggctcagccatgaacatgggcaatatggttaacaatgttgttggtcttggtggcctcggaaatgttatgggaatgggcaacgtgcggccaatatcttcccccatggcatcgatgtcaggcttaggtaacaattccaatccaatgaacatgggaatggcatccaatcttgctgcagctggacttcggccaggcatgaaccctgctgctattgccaaggtgcgtatggggttggcacagcaaagggcagcaggcatgtaccctggaatggttggaatgcctggaagcagctcatcaatccttcctagttcagctggcttgtctatgatgggccagccgctaaacagaggcaaccttggccccctccagagggccatgatgtcgtctatgggccctccaaaaatgccaggaggtaactttcagctgaatgctcaacagcaaatacacctccagcatcagttgcagcagctccaacagaacccacagcagcagctccaacagctacagcaacagcaacaaatacaacaactgcagcagcagcagcagcagcagctccaacaacagcaactgcagcagcaacaacaaatgggatctccgttaggccctcctccaagcccgcagctgagctccggtcaacagcatagctaactccccgatggagcagctgcaaggcgccattaagggaggtcctggtagtagtaaccggagtccacttcttgcctatggaaggtgtaaacactgaccaagatcactctgttctcttgtttgctgtggtaaatgaggttaaattaggtgtgttataagttataggccatagaggacagctttaaggaccagctttatgcttggatttttatgctgtacattgtagttagtaggaatggtgtgttggagctcggtaatcagttctatgcaagcattattcaattggacagttttctactcttgtagcttcatgtttaaatttaaattaaattcatcaaaattgtggacttgttacgtaaccattgtggttaccgataagtatcttcatttgttcgccaacaattttgtaacgttgtcaaattcaattttggctgtgtatatgggtctgactggatatcggcatt

SEQ ID NO: 45724 - DNA, 4170 bp, Zea Mays
cccaccccccaccaccacgcccgacctcgtccgcggtgaaggtcaaggagacggcggaggaagcctgacaaccgtgtggatggggatctcgttcaagctgtcgaaggtcggggtccgcgtgcacccggccgcgcgctcggcgtccgcggcggtggcggaaaagccgggcgcgggtgggaaggagggttcgctgtctgagtcgacacgcgaggacaaaagaaaagatgtcaatggcatcaaaattttaccagcatgctccaaagaaattttgccagatcatgaggtttctttcacattgagcctctatgagagaggttatctcatttcaaagtcagcacccatggatcctagtcagacctcaattcaggacggcaaaacactgcatccctatgatagagcatcagaaaagttgttctctgctatcgaagctgggaggctacctggcgatatttttgatgagataccaagcaagtactataatggatcagttgtttgtgagatacatgactaccgaaagcatgtgtccaaccaagcgcctgcatcatctgctgagctaggatcaccaattgtgaataaagtacgactgcgaatgacctttgaaaatgttgtaaaggacattacccttctatctgatgattcctggagttacagggattttatggaagctgaggcttgtattttgagagctctacaaccggaactttgcttagaccccacacctaaactggatcgacttcatcaggatcctgttccgcataagttgagccttggtatagggaaaaagaggaggctgaggcaaaatcctgaagttgtcacatccagtcacatgtctcatggtaaaaaggtttgcattgataggttacctgaaagtgccaaagctgatgagatgggcatcactagcagtaatgcagctcagcaggttggtggtaacattaccatccaaaatatgtcagtctcaggtggttctcagacacttagaccaaataattcttcacaagatgctgccagaacgcttttgcctcaatctggtctacagcaaaccttgtgttattctgctgctggtaatgatcatatggcaggaccacctgccaatttttctggaaccagttcatgcatttcatctcatcagagcctgattggttacagtgactctgtggctgccaacagccttctatctgtgaagagggaaatgcaggatgcctcgcttcaagatcctaagagaataaagcgaactggtggtattgatgatgtacagcagcagcagataaggcctcaaccccttggtgggcaggagatgcaatggaagaaccatcaactgcatccacaattagatgttaaggggatgcagtatgcatcttcactgagtggtcagagatatccttcttcgatgatgaacaacatgcaagatccaggatcttccttatattttagtcatcagcaaaatttgagatacgatgctaagcaagagcagatggatggttctgataagtcaaaagacaccttgcagtctatggcacctgaaacttccatgctggatcagcagcaatcccaatctcaacatttaccacaacaatcagtggcaagaaataatgttccaaacatgggacagtggcaaaatactcggttcgcagctgagaaggacttcaaaaaagaagacataattcagagaagaaagttagcacctagctctcgtgcccctactgggcctgtgattcagtctccagtgtcctcgaaatctggagagttatcaggcagttcaatgggtggccagtttggttctgctgtgacatcagctgtaacaggggtacagaaagataaatttgctgcaaattccggtactgcagttggatttccttctgtagcttccagtcctagtgattccatgcaccgaatacaacagcctgctgttgcttcctcaaagaggaaaacaaattctgtccccaaaactcaaccgcctgtgagtgctgttgggtctccagccagtgtttcaaacatgcatgcgctgctgaatgcaagcagtccatcgattgggaccacacctatgggagaccaagcaatccttgataaatttgtgaaaattgataacatttcccatcggtaccagcttttcaataagaagaagtttgataaaatatctcaaaagaaaaccattatcaatcgaaaccaaaatgtagctggttgtctcaacagttgtttccattctgaggattatatagataccacaagacctctttgtaattctatgattagtggaactataaacacatgcaagggtagggtaataaactttgtgagcacaaaagacatgtaccaaggtcattcaaggccattcccggttgattttaacgaactgtctgatgaaactgtaagaatgcaatatggagatataaaagattttgatgatccaaattcatatggttgtgtattcatattaccgacaaagcactatgctgacttgtttgcggggcagcttatttcccttatgttgcaagatggacattctaaagctgacgatgaagttgtgcgtagcaccccttttgctaacatcagtacaccctttggacctttaccaaacaacgtagtgagtgatgtaaagcaagagggaggtgtaagccaacaacttaatgccgcagcccatgcaaatgtggcacctggaacacaaatgcaacagcttcctgtcaataggatgcttccatctgcaaatggcaaccagattctagcaatgcagcaaggttatatgcaaggggcagccatgcctccaaggagccagcatcttgaccaaaatttggttcagcagccgcagcaccaacagccacaacagcaaccactgcagcaaaatgctcaagcccaggtgcagcaaccatcatctcttccactgaaccagatgcaaagacctcaggttctgcctacgagcccattatctcagatgttggggcctggctcaaatctcccaatgggctcaagtcagataggtaagaataaggctcctcccacatctttgcagcttcaaatgctacaggcacaaccccaacaacctatgtctaggaaagtgatgatggggcttggctcagccatgaacatgggcaatatggttaacaatgttgttggtcttggtggcctcggaaatgttatgggaatgggcaacgtgcggccaatatcttcccccatggcatcgatgtcaggcttaggtaacaattccaatccaatgaacatgggaatggcatccaatcttgctgcagctggacttcggccaggcatgaaccctgctgctattgccaaggtgcgtatggggttggcacagcaaagggcagcaggcatgtaccctggaatggttggaatgcctggaagcagctcatcaatccttcctagttcagctggcttgtctatgatgggccagccgctaaacagaggcaaccttggccccctccagagggccatgatgtcgtctatgggccctccaaaaatgccaggaggtaactttcagctgaatgctcaacagcaaatacacctccagcatcagttgcagcagctccaacagaacccacagcagcagctccaacagctacagcaacagcaacaaatacaacaactgcagcagcagcagcagcagcagctccaacaacagcaactgcagcagcaacaacaaatgggatctccgttaggccctcctccaagcccgcagctgagctccggtcaacagcatagctaactccccgatggagcagctgcaaggcgccattaagggaggtcctggtagtagtaaccggagtccacttcttgcctatggaaggtgtaaacactgaccaagatcactctgttctcttgtttgctgtggtaaatgaggttaaattaggtgtgttataagttataggccatagaggacagctttaaggaccagctttatgcttggatttttatgctgtacattgtagttagtaggaatggtgtgttggagctcggtaatcagttctatgcaagcattattcaattggacagttttctactcttgtagcttcatgtttaaatttaaattaaattcatcaaaattgtggacttgttacgtaaccattgtggttaccgataagtatcttcatttgttcgccaacaattttgtaacgttgtcaaattcaattttggctgtgtatatgggtctgactggatatcggcatt

SEQ ID NO: 45725 - DNA, 1730 bp, Zea Mays
cgcagttgcagcaggtccggcctgatgtagacttcggccaccgacgagcgtacctgcgtcgactctgaggaggagcgccgcctccttgagatccaggaggttgaggtggctgcggcgcgtactcgtacggtggtcgagagtgccgagctcgcgatggtcagagagattgctccctcccgaagactgctaggctagatgagcggtttgattccctcccgaagacggtcagaggtattgcagatcctgtctaatcaaccacgcccctagttggaagagaatagccatatcaaggaataactgatgaggaaaacacaacaactacagaaatatgaaagttgaggagtgttttcttaaagttgagcagtcacctcctgaaagcacatcgaatgctcttcaactagcaactgcagctcttgtcaagaaagagctgctggcccatgctgattcaaatattatacttgttgtggcatcatgcatatctgagatcacatggatcacagcaccagatgctccatatgatgacgatgcaatgaaggatgtattatctttaattgtggaggcattcaagcatctggatgacatagagagccccttctttggaaggagaacttcaattcttgatacaatcgcaaaagttcagtcctgtgtggtgatgctagatcttaaatgtgacgatttgataaatgatatgttccatcacttcttgaggactgttaagatggaacatggagtactatcactggaagctgtacagtagtcagggacgtgaaagatttgcttttccactcctatttttcacttatggatgaccttcgtcttcagaaacctcctgacggggagccatatgagataagaaaccagggggaggatttggttaacagaggagtgataacaatgaaagacattgaagaaatgaagtctggcaaagttggcagcggtgttcttaatgttggcctaccagcatatgttatccttaatgcactccttcggtctgcaaaagctgattctgtcgggctaatcttaagtgatggctctgagattacatctgacaatagacctaaaaacaccatctttgattggttctttgacccgcttatggttataaaggaacagatcaaagctgagaatctcactgacgaagaggaagagtatctgaaaatgtgtgtgttgttggctggtgatccaagtcgcctgaaaggctctctgcctcatgttccatccttgattgaacgtaaaaaggcagatatagacgcattcactcgcaggttgcaaggaatcacaaagtcgatatctagatatcctacatcaaagagccgcttcgacgtccttgtgaaggcgctcttgtcagagctggagaggacgatgggtcaatctggcaatggatcccagtcccaggcgcacaggctgcgaaactcggtagcccggatgctgagccagaaatctatgggcaagactgccaacatcagggaaaagaggaaaagaaggaactatctctaaagaatgatcgagcaggcatgtggattcttgttgctaagttgaaaagaggggctttagacatatctgatttgaatgttgatgatcgaactaaagtgtaagggcgtagcgatcaccacattgttgtctcataatcggtgttaatgaaaaataacatggtgttgcacgaaatctctactttctcttgtaagaaggattgttctatcggcataatttgatttgcatgtataatgtct

SEQ ID NO: 45726 - DNA, 911 bp, Zea Mays
atggaacccaggatttggagactccaagatgtggctgggtatggagttgccttggcagtaaaggatatctacgctgatgcctttggagaaagaaatttggactctgaccttgtggatttgatggtaaaggatggacgacaaggaaaggtgaacggcaaaggttactacatttatgagaagggtgggaagccaaagccagatcctagtgttaagcatgttatcgaggagtaccgaaagcacgcaaacacaatgcctggtggaaagcctgttactttaacggatcaagatattttggagatgattttcttcccagttgtgaatgaggcatgcagggttatggatgaaaatgttgtaattcgagcttctgatcttgatattgcttctgttcttggaatgggctttcctaaatacaggggtggtcttgtcttctgggctgacactgttggagcaccttacatacattctaagctaagcaagtgggctgaaatttatggccccttcttcaaaccatcatcatatttggaacagcgagctaagagtggtgtaccattgagcgcaccaggagcttcgcagcaaggttcggcgaggtcacgcatgtgaggtgctgtccagcattgagcagaataatgcagaatacttgcgggatgagccattgacggctgcttcgctgatcaaaacacctccgtgaacacaaacatgaggcacagaagaaatgatgaaaaataaagggattgtaacagttttggtgcctttgactgtaactggcagagtttctggggacagagtggcatggattaattgcacctgatcactctgtatgtcgctgtcatgtgtgcaatgttcaatacgtacgtaataaagaatggaaatatatgccgcaatcagtgcgtcgtcttctcgagttaatcgct

SEQ ID NO: 45727 - DNA, 1854 bp, Zea Mays
acccagcgtttgccgaggcttgtaggtctacccaaagcaattgaaatgatgctgcaagacagcaagcaatgaagatcgcaccaaacatgccacaaaaccaggcctgcctggatgtgatggaggaaggcatattatgtggaggccaagctggtgttttgaaggaggccatggttttcaaggagctggtgatagcaccaacatcaaaggctcttgtctatgttttctttgctaacgttccacgacaaaggtgccaggtgtaactgatgttcaactgaaaccaaggccaattagaaaagttgctgttattggtggtggtctgatgggatctggaattgccacatcacttcttgttagcaacatttctgttgtgctcaaggaagtaaaccctcagtttctgcaaaggggagagaaaacaatagcaggtaatcttgagggcctggtcaaaagaggttcactaacaaaggataggatgcacaaggccatggcccttctcaagggtgctttggattattcagatttcaaggatgttgatatggttattgaggctgttatcgagaagattcctttgaagcaatcaatatttgctgacattgagaaaatctgtccaaaacattgcatacttgcaacaaacacatccaccattgatttgaatgttgttggcaagaagacaaattctcaagatagaattataggggctcactttttcagccctgctcatattatgcccttgcttgaaattgttcggacggagaagacatcaccacaagctatccttgatctcatcaccattgggaagataataaagaaagtccctattgtggtcggcaactgcacaggatttgcagtcaaccttacattttttccttacacacagggttctcatcttctagttagtcttggtattgatgttttcagaattgatcgagtaataagcacctttggcatgccaatgggaccttttcaactccaagatgtggctgggtatggagttgccttggcagtaaaggatatctacgctgatgcctttggagaaagaaatttggactctgaccttgtggatttgatggtaaaggatggacgacaaggaaaggtgaacggcaaaggttactacatttatgagaagggtgggaagccaaagccagatcctagtgttaagcatgttatcgaggagtaccgaaagcacgcaaacacaatgcctggtggaaagcctgttactttaacggatcaagatattttggagatgattttcttcccagttgtgaatgaggcatgcagggttatggatgaaaatgttgtaattcgagcttctgatcttgatattgcttctgttcttggaatgggctttcctaaatacaggggtggtcttgtcttctgggctgacactgttggagcaccttacatacattctaagctaagcaagtgggctgaaatttatggccccttcttcaaaccatcatcatatttggaacagcgagctaagagtggtgtaccattgagcgcaccaggagcttcgcagcaaggttcggcgaggtcacgcatgtgaggtgctgtccagcattgagcagaataatgcagaatacttgcgggatgagccattgacggctgcttcgctgatcaaaacacctccgtgaacacaaacatgaggcacagaagaaatgatgaaaaataaagggattgtaacagttttggtgcctttgactgtaactggcagagtttctggggacagagtggcatggattaattgcacctgatcactctgtatgtcgctgtcatgtgtgcaatgttcaatacgtacgtaataaagaatggaaatatatgccgcaatcagtgcgtcgtcttctcgagttaatcgct

SEQ ID NO: 45728 - DNA, 2072 bp, Zea Mays
atcatccctggatttggagggtacccagcgtttgccgaggcttgtaggtctacccaaagcaattgaaatgatgctgcaaagtaagttcattacggcaaaggaagggaaggaacgtggtttgattgatgccctttgctctcctgatgaattgataaagacatcacgtctttgggctctggaaattgctaattgccgtaaaccttggatgaggtctcttggcagaacagataggcttggaccactctctgaagctcgtgctgtgttaaatgcagcaagacagcaagcaatgaagatcgcaccaaacatgccacaaaaccaggcctgcctggatgtgatggaggaaggcatattatgtggaggccaagctggtgttttgaaggaggccatggttttcaaggagctggtgatagcaccaacatcaaaggctcttgtctatgttttctttgctaacgttccacgacaaaggtgccaggtgtaactgatgttcaactgaaaccaaggccaattagaaaagttgctgttattggtggtggtctgatgggatctggaattgccacatcacttcttgttagcaacatttctgttgtgctcaaggaagtaaaccctcagtttctgcaaaggggagagaaaacaatagcaggtaatcttgagggcctggtcaaaagaggttcactaacaaaggataggatgcacaaggccatggcccttctcaagggtgctttggattattcagatttcaaggatgttgatatggttattgaggctgttatcgagaagattcctttgaagcaatcaatatttgctgacattgagaaaatctgtccaaaacattgcatacttgcaacaaacacatccaccattgatttgaatgttgttggcaagaagacaaattctcaagatagaattataggggctcactttttcagccctgctcatattatgcccttgcttgaaattgttcggacggagaagacatcaccacaagctatccttgatctcatcaccattgggaagataataaagaaagtccctattgtggtcggcaactgcacaggatttgcagtcaaccttacattttttccttacacacagggttctcatcttctagttagtcttggtattgatgttttcagaattgatcgagtaataagcacctttggcatgccaatgggaccttttcaactccaagatgtggctgggtatggagttgccttggcagtaaaggatatctacgctgatgcctttggagaaagaaatttggactctgaccttgtggatttgatggtaaaggatggacgacaaggaaaggtgaacggcaaaggttactacatttatgagaagggtgggaagccaaagccagatcctagtgttaagcatgttatcgaggagtaccgaaagcacgcaaacacaatgcctggtggaaagcctgttactttaacggatcaagatattttggagatgattttcttcccagttgtgaatgaggcatgcagggttatggatgaaaatgttgtaattcgagcttctgatcttgatattgcttctgttcttggaatgggctttcctaaatacaggggtggtcttgtcttctgggctgacactgttggagcaccttacatacattctaagctaagcaagtgggctgaaatttatggccccttcttcaaaccatcatcatatttggaacagcgagctaagagtggtgtaccattgagcgcaccaggagcttcgcagcaaggttcggcgaggtcacgcatgtgaggtgctgtccagcattgagcagaataatgcagaatacttgcgggatgagccattgacggctgcttcgctgatcaaaacacctccgtgaacacaaacatgaggcacagaagaaatgatgaaaaataaagggattgtaacagttttggtgcctttgactgtaactggcagagtttctggggacagagtggcatggattaattgcacctgatcactctgtatgtcgctgtcatgtgtgcaatgttcaatacgtacgtaataaagaatggaaatatatgccgcaatcagtgcgtcgtcttctcgagttaatcgct

SEQ ID NO: 45729 - DNA, 2636 bp, Zea Mays
atcagccgagtggttgtgccgtggaagctttcgtttaccgttcccatcccccgtcgtctctcctctccttcccactctcccacccgtcctccattgctcccttcctctctctcgcggagtcgctgcgatctagccaccgagcacgagcgtcctactcgccgcggaccttgctcatggccgcggggtcgatccgggtcaccatggaggtgggcgccgacggcgtcgcgctcatcaccatcgccaacccgcccgtcaacgcgctccaccccatcatcatcgcggggctcaaggacaagtacgcggaggccttgcgccgtgacgacgttaaggcaatcgtgctcactggtgctggaggcaagttctgtggaggatttgatatcaacgttttcacaaaggttcatcagactggggatgtatcacttatgccggacgtatccgtcgagcttgtgtcaaacatgatggaagagggaaaaaaaccttctgttgcagccattcaaggtcttgcattgggtggtggcctagagttgactatgctcaacttggattgccagagctaacccttggcatcatccctggatttggaggtacccagcgtttgccgaggcttgtaggtctacccaaagcaattgaaatgatgctgcaaagtaagttcattacggcaaaggaagggaaggaacgtggtttgattgatgccctttgctctcctgatgaattgataaagacatcacgtctttgggctctggaaattgctaattgccgtaaaccttggatgaggtctcttggcagaacagataggcttggaccactctctgaagctcgtgctgtgttaaatgcagcaagacagcaagcaatgaagatcgcaccaaacatgccacaaaaccaggcctgcctggatgtgatggaggaaggcatattatgtggaggccaagctggtgttttgaaggaggccatggttttcaaggagctggtgatagcaccaacatcaaaggctcttgtctatgttttctttgctaacgttccacgacaaaggtgccaggtgtaactgatgttcaactgaaaccaaggccaattagaaaagttgctgttattggtggtggtctgatgggatctggaattgccacatcacttcttgttagcaacatttctgttgtgctcaaggaagtaaaccctcagtttctgcaaaggggagagaaaacaatagcaggtaatcttgagggcctggtcaaaagaggttcactaacaaaggataggatgcacaaggccatggcccttctcaagggtgctttggattattcagatttcaaggatgttgatatggttattgaggctgttatcgagaagattcctttgaagcaatcaatatttgctgacattgagaaaatctgtccaaaacattgcatacttgcaacaaacacatccaccattgatttgaatgttgttggcaagaagacaaattctcaagatagaattataggggctcactttttcagccctgctcatattatgcccttgcttgaaattgttcggacggagaagacatcaccacaagctatccttgatctcatcaccattgggaagataataaagaaagtccctattgtggtcggcaactgcacaggatttgcagtcaaccttacattttttccttacacacagggttctcatcttctagttagtcttggtattgatgttttcagaattgatcgagtaataagcacctttggcatgccaatgggaccttttcaactccaagatgtggctgggtatggagttgccttggcagtaaaggatatctacgctgatgcctttggagaaagaaatttggactctgaccttgtggatttgatggtaaaggatggacgacaaggaaaggtgaacggcaaaggttactacatttatgagaagggtgggaagccaaagccagatcctagtgttaagcatgttatcgaggagtaccgaaagcacgcaaacacaatgcctggtggaaagcctgttactttaacggatcaagatattttggagatgattttcttcccagttgtgaatgaggcatgcagggttatggatgaaaatgttgtaattcgagcttctgatcttgatattgcttctgttcttggaatgggctttcctaaatacaggggtggtcttgtcttctgggctgacactgttggagcaccttacatacattctaagctaagcaagtgggctgaaatttatggccccttcttcaaaccatcatcatatttggaacagcgagctaagagtggtgtaccattgagcgcaccaggagcttcgcagcaaggttcggcgaggtcacgcatgtgaggtgctgtccagcattgagcagaataatgcagaatacttgcgggatgagccattgacggctgcttcgctgatcaaaacacctccgtgaacacaaacatgaggcacagaagaaatgatgaaaaataaagggattgtaacagttttggtgcctttgactgtaactggcagagtttctggggacagagtggcatggattaattgcacctgatcactctgtatgtcgctgtcatgtgtgcaatgttcaatacgtacgtaataaagaatggaaatatatgccgcaatcagtgcgtcgtcttctcgagttaatcgct

SEQ ID NO: 45730 - DNA, 2667 bp, Zea Mays
atcagccgagtggttgtgccgtggaagctttcgtttaccgttcccatcccccgtcgtctctcctctccttcccactctcccacccgtcctccattgctcccttcctctctctcgcggagtcgctgcgatctagccaccgagcacgagcgtcctactcgccgcggaccttgctcatggccgcggggtcgatccgggtcaccatggaggtgggcgccgacggcgtcgcgctcatcaccatcgccaacccgcccgtcaacgcgctccaccccatcatcatcgcggggctcaaggacaagtacgcggaggccttgcgccgtgacgacgttaaggcaatcgtgctcactggtgctggaggcaagttctgtggaggatttgatatcaacgttttcacaaaggttcatcagactggggatgtatcacttatgccggacgtatccgtcgagcttgtgtcaaacatgatggaagagggaaaaaaaccttctgttgcagccattcaaggtcttgcattgggtggtggcctagagttgactatgggttgtcatgctcggatatctactcctgaagctcaacttggattgccagagctaacccttggcatcatccctggatttggaggtacccagcgtttgccgaggcttgtaggtctacccaaagcaattgaaatgatgctgcaaagtaagttcattacggcaaaggaagggaaggaacgtggtttgattgatgccctttgctctcctgatgaattgataaagacatcacgtctttgggctctggaaattgctaattgccgtaaaccttggatgaggtctcttggcagaacagataggcttggaccactctctgaagctcgtgctgtgttaaatgcagcaagacagcaagcaatgaagatcgcaccaaacatgccacaaaaccaggcctgcctggatgtgatggaggaaggcatattatgtggaggccaagctggtgttttgaaggaggccatggttttcaaggagctggtgatagcaccaacatcaaaggctcttgtctatgttttctttgctaacgttccacgacaaaggtgccaggtgtaactgatgttcaactgaaaccaaggccaattagaaaagttgctgttattggtggtggtctgatgggatctggaattgccacatcacttcttgttagcaacatttctgttgtgctcaaggaagtaaaccctcagtttctgcaaaggggagagaaaacaatagcaggtaatcttgagggcctggtcaaaagaggttcactaacaaaggataggatgcacaaggccatggcccttctcaagggtgctttggattattcagatttcaaggatgttgatatggttattgaggctgttatcgagaagattcctttgaagcaatcaatatttgctgacattgagaaaatctgtccaaaacattgcatacttgcaacaaacacatccaccattgatttgaatgttgttggcaagaagacaaattctcaagatagaattataggggctcactttttcagccctgctcatattatgcccttgcttgaaattgttcggacggagaagacatcaccacaagctatccttgatctcatcaccattgggaagataataaagaaagtccctattgtggtcggcaactgcacaggatttgcagtcaaccttacattttttccttacacacagggttctcatcttctagttagtcttggtattgatgttttcagaattgatcgagtaataagcacctttggcatgccaatgggaccttttcaactccaagatgtggctgggtatggagttgccttggcagtaaaggatatctacgctgatgcctttggagaaagaaatttggactctgaccttgtggatttgatggtaaaggatggacgacaaggaaaggtgaacggcaaaggttactacatttatgagaagggtgggaagccaaagccagatcctagtgttaagcatgttatcgaggagtaccgaaagcacgcaaacacaatgcctggtggaaagcctgttactttaacggatcaagatattttggagatgattttcttcccagttgtgaatgaggcatgcagggttatggatgaaaatgttgtaattcgagcttctgatcttgatattgcttctgttcttggaatgggctttcctaaatacaggggtggtcttgtcttctgggctgacactgttggagcaccttacatacattctaagctaagcaagtgggctgaaatttatggccccttcttcaaaccatcatcatatttggaacagcgagctaagagtggtgtaccattgagcgcaccaggagcttcgcagcaaggttcggcgaggtcacgcatgtgaggtgctgtccagcattgagcagaataatgcagaatacttgcgggatgagccattgacggctgcttcgctgatcaaaacacctccgtgaacacaaacatgaggcacagaagaaatgatgaaaaataaagggattgtaacagttttggtgcctttgactgtaactggcagagtttctggggacagagtggcatggattaattgcacctgatcactctgtatgtcgctgtcatgtgtgcaatgttcaatacgtacgtaataaagaatggaaatatatgccgcaatcagtgcgtcgtcttctcgagttaatcgct

SEQ ID NO: 45731 - DNA, 1251 bp, Zea Mays
ctcaacttggattgccagagctaacccttggcatcatccctggatttggaggtacccagcgtttgccgaggcttgtaggtctacccaaagcaattgaaatgatgctgcaaagtaagttcattacggcaaaggaagggaaggaacgtggtttgattgatgccctttgctctcctgatgaattgataaagacatcacgtctttgggctctggaaattgctaattgccgtaaaccttggatgaggtctcttggcagaacagataggcttggaccactctctgaagctcgtgctgtgttaaatgcagcaagacagcaagcaatgaagatcgcaccaaacatgccacaaaaccaggcctgcctggatgtgatggaggaaggcatattatgtggaggccaagctggtgttttgaaggaggccatggttttcaaggagctggtgatagcaccaacatcaaaggctcttgtctatgttttctttgctaacgttccacgacaaaggtgccaggtgtaactgatgttcaactgaaaccaaggccaattagaaaagttgctgttattggtggtggtctgatgggatctggaattgccacatcacttcttgttagcaacatttctgttgtgctcaaggaagtaaaccctcagtttctgcaaaggggagagaaaacaatagcaggtaatcttgagggcctggtcaaaagaggttcactaacaaaggataggatgcacaaggccatggcccttctcaagggtgctttggattattcagatttcaaggatgttgatatggttattgaggctgttatcgagaagattcctttgaagcaatcaatatttgctgacattgagaaaatctgtccaaaacattgcatacttgcaacaaacacatccaccattgatttgaatgttgttggcaagaagacaaattctcaagatagaattataggggctcactttttcagccctgctcatattatgcccttgcttgaaattgttcggacggagaagacatcaccacaagctatccttgatctcatcaccattgggaagataataaagaaagtccctattgtggtcggcaactgcacaggatttgcagtcaaccttacattttttccttacacacagggttctcatcttctagttagtcttggtattgatgttttcagaattgatcgagtaataagcacctttggcatgccaatgggaccttttcaatgggaatcaagcatttacctggacaaagaataaaaaac

SEQ ID NO: 45732 - DNA, 204 bp, Zea Mays
cgaacctcgacggagcgcgggtgctttcgcaacggcgccggcgtcgctgagctcgacgatggcgtcgccttggtttcgccttcactcgcccagtcgccaagttagaaactaggattaggacggcgtgtgcttgcgggtatcagttcaggatgccattggcgagaaggtgctggaggcaagttctgtggaggatttgatatcaac

SEQ ID NO: 45733 - DNA, 380 bp, Zea Mays
atcagccgagtggttgtgccgtggaagctttcgtttaccgttcccatcccccgtcgtctctcctctccttcccactctcccacccgtcctccattgctcccttcctctctctcgcggagtcgctgcgatctagccaccgagcacgagcgtcctactcgccgcggaccttgctcatggccgcggggtcgatccgggtcaccatggaggtgggcgccgacggcgtcgcgctcatcaccatcgccaacccgcccgtcaacgcgctccaccccatcatcatcgcggggctcaaggacaagtacgcggaggccttgcgccgtgacgacgttaaggcaatcgtgctcactgatagcaacaccttccatttctgcaaaaacgaaaca

SEQ ID NO: 45734 - DNA, 4289 bp, Zea Mays
gctgccaccacccacctcctctctcttcacctcccattctctctctccgccccctgcttgcctgctctacccacctcataaacttccccactccttcctccatttccatccattcttctccccaggctgccgccgctggcagccgcatatgctgctgctggtgctctgctactccttcgtcaatctctgctgccgtttggcattagacggattccagtcaactccatccattttgatggttaaactatcaaagatactgccggtgctgtgaatggctgctcaagttcctcagattctttaaattctgagttcatcctcaattcggggctcttggtttaagccgttggacgattcattgtaccgcggaggattttttatggctcatgttgcctcgtgacattgtggtctgaccaaaagctgcttttacatctccttcatgggctgttcagcttccaagtgttgttcacaattgaagtgctctttgtgctcaaatgggtgcctggggcaggcacctgactccccgagggaatccaggggaaagtcaagtcgggggagagggagggtagattctagtggttcagatgattcttctggtgatgatctcggggaagatgacgatgcttttaaccatatgaatgctacaagggaatcaactgctggcatcagccgactgtcaagggtgtcgtcacagtttcttcctcccgatgcttcacgcaaggttcaggtccctttgggtaactatgacctgagatactccttcctgtctcaaagaggttactacccagaatcactggacaaggcaaatcaagatagctactgcgtacataccccatttggacctagtcctgatgaccacttattcggtgtgtttgatggccatggggaatatggagctcaatgctcgcaatttgtgaagcgaagattatgcgagaacctgctcagagataacaggtttcgtaccgatgctgtgctggctcttcattctgcttttgtggcaacgaacacacagctgcatgccgacaacttggatgactccatgagtggtactactgcagtcactatcttggtcaggggtaaaactatttacgttgcaaataccggtgattcgcgtgctgttatcgccgaaaaacaaggggatgacattgtcgctgttgacctttccatagatcaaaccccttaccggtttgatgagcttgaaagggtcaaggaatgtggtgctagggttctaacgttggaccaaatagagggcctaaagaacccagatgtgcagtgttggggtactgaagaaagtgacgatggcgatcctccaaggttatgggtgcaaaatggcatgtacccaggaactgcttttacccgtagcattggagattctgttgctgagtcaattggtgtcattgcagatcccgagatttttgtcctggatctcaattccaacaatccatttttcgttcttgctagcgatggcgtttttgagttcctttccagtcaaacagttgtcgacatggtttctaaatacaaggatcctcgagatgcatgtgcagaaattgtcgctgagtcctatcgtctttggctacagtatgaaactcgtacagatgacattacaatcatactcgtgcatattaatgggttaactgatgaatctacccagactgttacgaaggtgactttacaaccttcacaacaagtagtaggactggcaggccctgaatcgccactaatagtaagttccaacaccaataatcagcgctccaagcatgatttatcacgggcacgattgagggctcttgaaagttctctagagaatggtcaattatgggtccctccatctccatcgcatcggaagacatgggaagagcaagcgcatattgagcgggtactacatgatcatttcctatttaggaagcttactgactcacaatgtcatgttctacttgattgtatgcaacgagttgaggtgaaacctagggatatagtagtacaacagggcggtgaaggtgactgcttctatgtagttggtagtggtgagtatgaagttctggctattcaggaagaaaatggaaaggaaataaccaaggttctgcatcggtatacagctgacaagttatcttcttttggggagctagcactaatgcacaataagccgcttcaggcttcagttcgtgctgtgaccagtggaacattatgggctctaaagagggaggacttccggggtattttgatgtcagaattttcaaacataccatcattgaagttgctccgatctgtacaactgtttacaagatttacagtgcttcaactaagtcaacttgccgagtcacttgttgaagtatcttttgcagatgggcaaataatagtagataagaatgataaattctcttctctgtatatcattcaaagaggtcgtgtgagacttatattggctactgatcaaatgacttcagatacttgggatctcattagtgctgaaacaaagcaggcacaaagtagtcgggaaaatggtaattatgtgcttgatatagatgagggagggcacttcggagagtggtctctcattggtgagactattgctttcactgctattgctgttggtgatgttacttgttctactatcatgaaggagaaatttgactcaattgttgggccttttcctaaactttcgcaagctgattccaagattaaagaatctctggtaactctggagaatgttgcagatggtgatttcccttttaggagggtgaagctctcagatttggaatggaaaatgtgcatatatgctgctgattgcagtgagattggtcttgtccaagtcaggggctatgacaagatgagaactttaaaaaggttttacatcaagagagtacaagatctccataaggaagtacaagtatttgaggaaaaggaccttatgaaaagcttgagcaaatcaacttgcgtgccagaagttctgtctacttgtgctgatcagtcataccttggaatattactgaattgttgcctttgttgctcactggcttcaatacttcatacaccactaaatgagacatctgcaagattctttgcagcctcagttgttgttgctctagaagaacttcatcagaagtccattatctatagaggtgtttcggcagacattcttatgctcgacagatcaggacatctgcagctggtggattttaggtttgcaaagaagttggaaggtcaaaggacatacacaatatgtgggatcgctgactctctggcaccagagattgttcttggtaggggtcatggatttcctgctgactggtgggcacttggagttttgatctatttcatgcttcagtcagacatgccattcgggtcctggagggagagcgagctggaacctattacaaaaattgccaaaggccaccttgttatgccagtgtctttcagtgcagaagttgttgaccttataaccaagctactcgtggtcgacgaaaacgcgcgccttggaaccagtggtgctgaagctgtgaagaaacacccctggtttgatggcactgattgggagcgaatagcatctgggacttgtgcagcacctgaagaaatcactgagcgcatcaactactgtatagaaactcttaatgaggacttatccgcatctccttccgtgccgattgaagacccagatgatctcactgctccagagtggatccaggattggtgatctcaatagttgcatgactgtccaatgatgaattgttctagttgaggaaaacgtctctagtttttcaccgagcattctcatatcaaatggaagaaggtatacataagagttgatcgaactgacaagttgtacataccaaagattattccttctgtgatcatagatcagaatttgagatgccaagcaacagagactttggtctatgtttgctgcatagttcctggtaagaaggatctggatagtttgttggtgatccatgtaattatatatccaatttgtgcactcccttgctgtttcggaaatggatactggtcgggaggaaggtcaataattatcgttgtgaatacggacatttctttcatctgccactgtcaatcgatttgtacaagatcaagttttccaaatataattatgaaggttaccaaaacaagagcttgttatctcatatacacggtgcaaataacctgcgacgcgacatttggcatctggacactacacctacctaaaacaaaacttgatgcataatttaaataaaatacgtaaaatacaaaaaaatacataactcataaaaaagactacataaattatgtaaagcaaatag

SEQ ID NO: 45735 - DNA, 4792 bp, Zea Mays
ctactctgctgccaccacccacctcctctctcttcacctcccattctctctctccgccccctgcttgcctgctctacccacctcataaacttccccactccttcctccatttccatccattcttctccccaggctgccgccgctggcagccgcatatgctgctgctggtgctctgctactccttcgtcaatctctgctgccgtttggcattagacggattccagtcaactccatccattttgatggttaaactatcaaagatactgccggtgctgtgaatggctgctcaagttcctcagattctttaaattctgagttcatcctcaattcggggctcttggtttaagccgttggacgattcattgtaccgcggaggattttttatggctcatgttgcctcgtgacattgtggtctgaccaaaagctgcttttacatctccttcatgggctgttcagcttccaagtgttgttcacaattgaagtgctctttgtgctcaaatgggtgcctggggcaggcacctgactccccgagggaatccaggggaaagtcaagtcgggggagagggagggtagattctagtggttcagatgattcttctggtgatgatctcggggaagatgacgatgcttttaaccatatgaatgctacaagggaatcaactgctggcatcagccgactgtcaagggtgtcgtcacagtttcttcctcccgatgcttcacgcaaggttcaggtccctttgggtaactatgacctgagatactccttcctgtctcaaagaggttactacccagaatcactggacaaggcaaatcaagatagctactgcgtacataccccatttggacctagtcctgatgaccacttattcggtgtgtttgatggccatggggaatatggagctcaatgctcgcaatttgtgaagcgaagattatgcgagaacctgctcagagataacaggtttcgtaccgatgctgtgctggctcttcattctgcttttgtggcaacgaacacacagctgcatgccgacaacttggatgactccatgagtggtactactgcagtcactatcttggtcaggggtaaaactatttacgttgcaaataccggtgattcgcgtgctgttatcgccgaaaaacaaggggatgacattgtcgctgttgacctttccatagatcaaaccccttaccggtttgatgagcttgaaagggtcaaggaatgtggtgctagggttctaacgttggaccaaatagagggcctaaagaacccagatgtgcagtgttggggtactgaagaaagtgacgatggcgatcctccaaggttatgggtgcaaaatggcatgtacccaggaactgcttttacccgtagcattggagattctgttgctgagtcaattggtgtcattgcagatcccgagatttttgtcctggatctcaattccaacaatccatttttcgttcttgctagcgatggcgtttttgagttcctttccagtcaaacagttgtcgacatggtttctaaatacaaggatcctcgagatgcatgtgcagaaattgtcgctgagtcctatcgtctttggctacagtatgaaactcgtacagatgacattacaatcatactcgtgcatattaatgggttaactgataaggaatctacccagactgttacgaaggtgactttacaaccttcacaacaagtagtaggactggcaggccctgaatcgccactaatagtaagttccaacaccaataatcagcgctccaagcatgatttatcacgggcacgattgagggctcttgaaagttctctagagaatggtcaattatgggtccctccatctccatcgcatcggaagacatgggaagagcaagcgcatattgagcgggtactacatgatcatttcctatttaggaagcttactgactcacaatgtcatgttctacttgattgtatgcaacgagttgaggtgaaacctagggatatagtagtacaacagggcggtgaaggtgactgcttctatgtagttggtagtggtgagtatgaagttctggctattcaggaagaaaatggaaaggaaataaccaaggttctgcatcggtatacagctgacaagttatcttcttttggggagctagcactaatgcacaataagccgcttcaggcttcagttcgtgctgtgaccagtggaacattatgggctctaaagagggaggacttccggggtattttgatgtcagaattttcaaacataccatcattgaagttgctccgatctgtacaactgtttacaagatttacagtgcttcaactaagtcaacttgccgagtcacttgttgaagtatcttttgcagatgggcaaataatagtagataagaatgataaattctcttctctgtatatcattcaaagaggtcgtgtgagacttatattggctactgatcaaatgacttcagatacttgggatctcattagtgctgaaacaaagcaggcacaaagtagtcgggaaaatggtaattatgtgcttgatatagatgagggagggcacttcggagagtggtctctcattggtgagactattgctttcactgctattgctgttggtgatgttacttgttctactatcatgaaggagaaatttgactcaattgttgggccttttcctaaactttcgcaagctgattccaagattaaagaatctctggtaactctggagaatgttgcagatggtgatttcccttttaggagggtgaagctctcagatttggaatggaaaatgtgcatatatgctgctgattgcagtgagattggtcttgtccaagtcaggggctatgacaagatgagaactttaaaaaggttttacatcaagagagtacaagatctccataaggaagtacaagtatttgaggaaaaggaccttatgaaaagcttgagcaaatcaacttgcgtgccagaagttctgtctacttgtgctgatcagtcataccttggaatattactgaattgttgcctttgttgctcactggcttcaatacttcatacaccactaaatgagacatctgcaagattctttgcagcctcagttgttgttgctctagaagaacttcatcagaagtccattatctatagaggtgtttcggcagacattcttatgctcgacagatcaggacatctgcagctggtggattttaggtttgcaaagaagttggaaggtcaaaggacatacacaatatgtgggatcgctgactctctggcaccagagattgttcttggtaggggtcatggatttcctgctgactggtaagtggttattgacccctttcgtttatatgcattccatatcactggatcaactatgtgtcttgagttcttatcaaagacaaagttgtggttaccgattatctttctaatgtgtccctaagaattttaaagcagtgtgcagtatttcctatcagtttcgtatgcgaacaatgaaaatgccatttttccttgtgacctctgtatatggaacaatactgtctatgcactgcatagcatttttacagatgcgcaaacattgaaatgctgtttacagacattgccatttccaaatctacctgacattctcagaacagactgaaacatgcaaactgcagtagaaaccttcttcccaacaaaaataaatggaggtatccaccccaaaagaaaaaaaataacgtaatctgagctgacagagtgacagtacaatatctttttcggacatggaagacttgattggaaattatgacaggtccctttgattttgtatgatcaggtgggcacttggagttttgatctatttcatgcttcagtcagacatgccattcgggtcctggagggagagcgagctggaacctattacaaaaattgccaaaggccaccttgttatgccagtgtctttcagtgcagaagttgttgaccttataaccaagctactcgtggtcgacgaaaacgcgcgccttggaaccagtggtgctgaagctgtgaagaaacacccctggtttgatggcactgattgggagcgaatagcatctgggacttgtgcagcacctgaagaaatcactgagcgcatcaactactgtatagaaactcttaatgaggacttatccgcatctccttccgtgccgattgaagacccagatgatctcactgctccagagtggatccaggattggtgatctcaatagttgcatgactgtccaatgatgaattgttctagttgaggaaaacgtctctagtttttcaccgagcattctcatatcaaatggaagaaggtatacataagagttgatcgaactgacaagttgtacataccaaagattattccttctgtgatcatagatcagaatttgagatgccaagcaacagagactttggtctatgtttgctgcatagttcctggtaagaaggatctggatagtttgttggtgatccatgtaattatatatccaatttgtgcactcccttgctgtttcggaaatggatactggtcgggaggaaggtcaataattatcgttgtgaatacggacatttctttcatctgccactgtcaatcgatttgtacaagatcaagttttccaaatataattatgaaggttaccaaaacaagagcttgttatctcatatacacggtgcaaataacctgcgacgcgacatttggcatctggacactacacctacctaaaacaaaacttgatgcataatttaaataaaatacgtaaaatacaaaaaaatacataactcataaaaaagactacataaattatgtaaagcaaatag

SEQ ID NO: 45736 - DNA, 4246 bp, Zea Mays
gcggctactctgctgccaccacccacctcctctctcttcacctcccattctctctctccgccccctgcttgcctgctctacccacctcataaacttccccactccttcctccatttccatccattcttctccccaggctgccgccgctggcagccgcatatgctgctgctggtgctctgctactccttcgtcaatctctgctgccgtttggcattagacggattccagtcaactccatccattttgatggttaaactatcaaagatactgccggtgctgtgaatggctgctcaagttcctcagattctttaaattctgagttcatcctcaattcggggctcttggtttaagccgttggacgattcattgtaccgcggaggattttttatggctcatgttgcctcgtgacattgtggtctgaccaaaagctgcttttacatctccttcatgggctgttcagcttccaagtgttgttcacaattgaagtgctctttgtgctcaaatgggtgcctggggcaggcacctgactccccgagggaatccaggggaaagtcaagtcgggggagagggagggtagattctagtggttcagatgattcttctggtgatgatctcggggaagatgacgatgcttttaaccatatgaatgctacaagggaatcaactgctggcatcagccgactgtcaagggtgtcgtcacagtttcttcctcccgatgcttcacgcaaggttcaggtccctttgggtaactatgacctgagatactccttcctgtctcaaagaggttactacccagaatcactggacaaggcaaatcaagatagctactgcgtacataccccatttggacctagtcctgatgaccacttattcggtgtgtttgatggccatggggaatatggagctcaatgctcgcaatttgtgaagcgaagattatgcgagaacctgctcagagataacaggtttcgtaccgatgctgtgctggctcttcattctgcttttgtggcaacgaacacacagctgcatgccgacaacttggatgactccatgagtggtactactgcagtcactatcttggtcaggggtaaaactatttacgttgcaaataccggtgattcgcgtgctgttatcgccgaaaaacaaggggatgacattgtcgctgttgacctttccatagatcaaaccccttaccggtttgatgagcttgaaagggtcaaggaatgtggtgctagggttctaacgttggaccaaatagagggcctaaagaacccagatgtgcagtgttggggtactgaagaaagtgacgatggcgatcctccaaggttatgggtgcaaaatggcatgtacccaggaactgcttttacccgtagcattggagattctgttgctgagtcaattggtgtcattgcagatcccgagatttttgtcctggatctcaattccaacaatccatttttcgttcttgctagcgatggcgtttttgagttcctttccagtcaaacagttgtcgacatggtttctaaatacaaggatcctcgagatgcatgtgcagaaattgtcgctgagtcctatcgtctttggctacagaatctacccagactgttacgaaggtgactttacaaccttcacaacaagtagtaggactggcaggccctgaatcgccactaatagtaagttccaacaccaataatcagcgctccaagcatgatttatcacgggcacgattgagggctcttgaaagttctctagagaatggtcaattatgggtccctccatctccatcgcatcggaagacatgggaagagcaagcgcatattgagcgggtactacatgatcatttcctatttaggaagcttactgactcacaatgtcatgttctacttgattgtatgcaacgagttgaggtgaaacctagggatatagtagtacaacagggcggtgaaggtgactgcttctatgtagttggtagtggtgagtatgaagttctggctattcaggaagaaaatggaaaggaaataaccaaggttctgcatcggtatacagctgacaagttatcttcttttggggagctagcactaatgcacaataagccgcttcaggcttcagttcgtgctgtgaccagtggaacattatgggctctaaagagggaggacttccggggtattttgatgtcagaattttcaaacataccatcattgaagttgctccgatctgtacaactgtttacaagatttacagtgcttcaactaagtcaacttgccgagtcacttgttgaagtatcttttgcagatgggcaaataatagtagataagaatgataaattctcttctctgtatatcattcaaagaggtcgtgtgagacttatattggctactgatcaaatgacttcagatacttgggatctcattagtgctgaaacaaagcaggcacaaagtagtcgggaaaatggtaattatgtgcttgatatagatgagggagggcacttcggagagtggtctctcattggtgagactattgctttcactgctattgctgttggtgatgttacttgttctactatcatgaaggagaaatttgactcaattgttgggccttttcctaaactttcgcaagctgattccaagattaaagaatctctggtaactctggagaatgttgcagatggtgatttcccttttaggagggtgaagctctcagatttggtacggggaatggaaaatgtgcatatatgctgctgattgcagtgagattggtcttgtccaagtcaggggctatgacaagatgagaactttaaaaaggttttacatcaagagagtacaagatctccataaggaagtacaagtatttgaggaaaaggaccttatgaaaagcttgagcaaatcaacttgcgtgccagaagttctgtctacttgtgctgatcagtcataccttggaatattactgaattgttgcctttgttgctcactggcttcaatacttcatacaccactaaatgagacatctgcaagattctttgcagcctcagttgttgttgctctagaagaacttcatcagaagtccattatctatagaggtgtttcggcagacattcttatgctcgacagatcaggacatctgcagctggtggattttaggtttgcaaagaagttggaaggtcaaaggacatacacaatatgtgggatcgctgactctctggcaccagagattgttcttggtaggggtcatggatttcctgctgactggtgggcacttggagttttgatctatttcatgcttcagtcagacatgccattcgggtcctggagggagagcgagctggaacctattacaaaaattgccaaaggccaccttgttatgccagtgtctttcagtgcagaagttgttgaccttataaccaagctactcgtggtcgacgaaaacgcgcgccttggaaccagtggtgctgaagctgtgaagaaacacccctggtttgatggcactgattgggagcgaatagcatctgggacttgtgcagcacctgaagaaatcactgagcgcatcaactactgtatagaaactcttaatgaggacttatccgcatctccttccgtgccgattgaagacccagatgatctcactgctccagagtggatccaggattggtgatctcaatagttgcatgactgtccaatgatgaattgttctagttgaggaaaacgtctctagtttttcaccgagcattctcatatcaaatggaagaaggtatacataagagttgatcgaactgacaagttgtacataccaaagattattccttctgtgatcatagatcagaatttgagatgccaagcaacagagactttggtctatgtttgctgcatagttcctggtaagaaggatctggatagtttgttggtgatccatgtaattatatatccaatttgtgcactcccttgctgtttcggaaatggatactggtcgggaggaaggtcaataattatcgttgtgaatacggacatttctttcatctgccactgtcaatcgatttgtacaagatcaagttttccaaatataattatgaaggttaccaaaacaagagcttgttatctcatatacacggtgcaaataacctgcgacgcgacatttggcatctggacactacacctacctaaaacaaaacttgatgcataatttaaataaaatacgtaaaatacaaaaaaatacataactcataaaaaagactacataaattatgtaaagcaaatag

SEQ ID NO: 45737 - DNA, 4347 bp, Zea Mays
ccgattccgacttgccctcaccttgtagcctaaacttgcggctactctgctgccaccacccacctcctctctcttcacctcccattctctctctccgccccctgcttgcctgctctacccacctcataaacttccccactccttcctccatttccatccattcttctccccaggctgccgccgctggcagccgcatatgctgctgctggtgctctgctactccttcgtcaatctctgctgccgtttggcattagacggattccagtcaactccatccattttgatggttaaactatcaaagatactgccggtgctgtgaatggctgctcaagttcctcagattctttaaattctgagttcatcctcaattcggggctcttggtttaagccgttggacgattcattgtaccgcggaggattttttatggctcatgttgcctcgtgacattgtggtctgaccaaaagctgcttttacatctccttcatgggctgttcagcttccaagtgttgttcacaattgaagtgctctttgtgctcaaatgggtgcctggggcaggcacctgactccccgagggaatccaggggaaagtcaagtcgggggagagggagggtagattctagtggttcagatgattcttctggtgatgatctcggggaagatgacgatgcttttaaccatatgaatgctacaagggaatcaactgctggcatcagccgactgtcaagggtgtcgtcacagtttcttcctcccgatgcttcacgcaaggttcaggtccctttgggtaactatgacctgagatactccttcctgtctcaaagaggttactacccagaatcactggacaaggcaaatcaagatagctactgcgtacataccccatttggacctagtcctgatgaccacttattcggtgtgtttgatggccatggggaatatggagctcaatgctcgcaatttgtgaagcgaagattatgcgagaacctgctcagagataacaggtttcgtaccgatgctgtgctggctcttcattctgcttttgtggcaacgaacacacagctgcatgccgacaacttggatgactccatgagtggtactactgcagtcactatcttggtcaggggtaaaactatttacgttgcaaataccggtgattcgcgtgctgttatcgccgaaaaacaaggggatgacattgtcgctgttgacctttccatagatcaaaccccttaccggtttgatgagcttgaaagggtcaaggaatgtggtgctagggttctaacgttggaccaaatagagggcctaaagaacccagatgtgcagtgttggggtactgaagaaagtgacgatggcgatcctccaaggttatgggtgcaaaatggcatgtacccaggaactgcttttacccgtagcattggagattctgttgctgagtcaattggtgtcattgcagatcccgagatttttgtcctggatctcaattccaacaatccatttttcgttcttgctagcgatggcgtttttgagttcctttccagtcaaacagttgtcgacatggtttctaaatacaaggatcctcgagatgcatgtgcagaaattgtcgctgagtcctatcgtctttggctacagtatgaaactcgtacagatgacattacaatcatactcgtgcatattaatgggttaactgataaggaatctacccagactgttacgaaggtgactttacaaccttcacaacaagtagtaggactggcaggccctgaatcgccactaatagtaagttccaacaccaataatcagcgctccaagcatgatttatcacgggcacgattgagggctcttgaaagttctctagagaatggtcaattatgggtccctccatctccatcgcatcggaagacatgggaagagcaagcgcatattgagcgggtactacatgatcatttcctatttaggaagcttactgactcacaatgtcatgttctacttgattgtatgcaacgagttgaggtgaaacctagggatatagtagtacaacagggcggtgaaggtgactgcttctatgtagttggtagtggtgagtatgaagttctggctattcaggaagaaaatggaaaggaaataaccaaggttctgcatcggtatacagctgacaagttatcttcttttggggagctagcactaatgcacaataagccgcttcaggcttcagttcgtgctgtgaccagtggaacattatgggctctaaagagggaggacttccggggtattttgatgtcagaattttcaaacataccatcattgaagttgctccgatctgtacaactgtttacaagatttacagtgcttcaactaagtcaacttgccgagtcacttgttgaagtatcttttgcagatgggcaaataatagtagataagaatgataaattctcttctctgtatatcattcaaagaggtcgtgtgagacttatattggctactgatcaaatgacttcagatacttgggatctcattagtgctgaaacaaagcaggcacaaagtagtcgggaaaatggtaattatgtgcttgatatagatgagggagggcacttcggagagtggtctctcattggtgagactattgctttcactgctattgctgttggtgatgttacttgttctactatcatgaaggagaaatttgactcaattgttgggccttttcctaaactttcgcaagctgattccaagattaaagaatctctggtaactctggagaatgttgcagatggtgatttcccttttaggagggtgaagctctcagatttggtacggggaatggaaaatgtgcatatatgctgctgattgcagtgagattggtcttgtccaagtcaggggctatgacaagatgagaactttaaaaaggttttacatcaagagagtacaagatctccataaggaagtacaagtatttgaggaaaaggaccttatgaaaagcttgagcaaatcaacttgcgtgccagaagttctgtctacttgtgctgatcagtcataccttggaatattactgaattgttgcctttgttgctcactggcttcaatacttcatacaccactaaatgagacatctgcaagattctttgcagcctcagttgttgttgctctagaagaacttcatcagaagtccattatctatagaggtgtttcggcagacattcttatgctcgacagatcaggacatctgcagctggtggattttaggtttgcaaagaagttggaaggtcaaaggacatacacaatatgtgggatcgctgactctctggcaccagagattgttcttggtaggggtcatggatttcctgctgactggtgggcacttggagttttgatctatttcatgcttcagtcagacatgccattcgggtcctggagggagagcgagctggaacctattacaaaaattgccaaaggccaccttgttatgccagtgtctttcagtgcagaagttgttgaccttataaccaagctactcgtggtcgacgaaaacgcgcgccttggaaccagtggtgctgaagctgtgaagaaacacccctggtttgatggcactgattgggagcgaatagcatctgggacttgtgcagcacctgaagaaatcactgagcgcatcaactactgtatagaaactcttaatgaggacttatccgcatctccttccgtgccgattgaagacccagatgatctcactgctccagagtggatccaggattggtgatctcaatagttgcatgactgtccaatgatgaattgttctagttgaggaaaacgtctctagtttttcaccgagcattctcatatcaaatggaagaaggtatacataagagttgatcgaactgacaagttgtacataccaaagattattccttctgtgatcatagatcagaatttgagatgccaagcaacagagactttggtctatgtttgctgcatagttcctggtaagaaggatctggatagtttgttggtgatccatgtaattatatatccaatttgtgcactcccttgctgtttcggaaatggatactggtcgggaggaaggtcaataattatcgttgtgaatacggacatttctttcatctgccactgtcaatcgatttgtacaagatcaagttttccaaatataattatgaaggttaccaaaacaagagcttgttatctcatatacacggtgcaaataacctgcgacgcgacatttggcatctggacactacacctacctaaaacaaaacttgatgcataatttaaataaaatacgtaaaatacaaaaaaatacataactcataaaaaagactacataaattatgtaaagcaaatag

SEQ ID NO: 45738 - DNA, 4340 bp, Zea Mays
ccgattccgacttgccctcaccttgtagcctaaacttgcggctactctgctgccaccacccacctcctctctcttcacctcccattctctctctccgccccctgcttgcctgctctacccacctcataaacttccccactccttcctccatttccatccattcttctccccaggctgccgccgctggcagccgcatatgctgctgctggtgctctgctactccttcgtcaatctctgctgccgtttggcattagacggattccagtcaactccatccattttgatggttaaactatcaaagatactgccggtgctgtgaatggctgctcaagttcctcagattctttaaattctgagttcatcctcaattcggggctcttggtttaagccgttggacgattcattgtaccgcggaggattttttatggctcatgttgcctcgtgacattgtggtctgaccaaaagctgcttttacatctccttcatgggctgttcagcttccaagtgttgttcacaattgaagtgctctttgtgctcaaatgggtgcctggggcaggcacctgactccccgagggaatccaggggaaagtcaagtcgggggagagggagggtagattctagtggttcagatgattcttctggtgatgatctcggggaagatgacgatgcttttaaccatatgaatgctacaagggaatcaactgctggcatcagccgactgtcaagggtgtcgtcacagtttcttcctcccgatgcttcacgcaaggttcaggtccctttgggtaactatgacctgagatactccttcctgtctcaaagaggttactacccagaatcactggacaaggcaaatcaagatagctactgcgtacataccccatttggacctagtcctgatgaccacttattcggtgtgtttgatggccatggggaatatggagctcaatgctcgcaatttgtgaagcgaagattatgcgagaacctgctcagagataacaggtttcgtaccgatgctgtgctggctcttcattctgcttttgtggcaacgaacacacagctgcatgccgacaacttggatgactccatgagtggtactactgcagtcactatcttggtcaggggtaaaactatttacgttgcaaataccggtgattcgcgtgctgttatcgccgaaaaacaaggggatgacattgtcgctgttgacctttccatagatcaaaccccttaccggtttgatgagcttgaaagggtcaaggaatgtggtgctagggttctaacgttggaccaaatagagggcctaaagaacccagatgtgcagtgttggggtactgaagaaagtgacgatggcgatcctccaaggttatgggtgcaaaatggcatgtacccaggaactgcttttacccgtagcattggagattctgttgctgagtcaattggtgtcattgcagatcccgagatttttgtcctggatctcaattccaacaatccatttttcgttcttgctagcgatggcgtttttgagttcctttccagtcaaacagttgtcgacatggtttctaaatacaaggatcctcgagatgcatgtgcagaaattgtcgctgagtcctatcgtctttggctacagtatgaaactcgtacagatgacattacaatcatactcgtgcatattaatgggttaactgataaggaatctacccagactgttacgaaggtgactttacaaccttcacaacaagtagtaggactggcaggccctgaatcgccactaatagtaagttccaacaccaataatcagcgctccaagcatgatttatcacgggcacgattgagggctcttgaaagttctctagagaatggtcaattatgggtccctccatctccatcgcatcggaagacatgggaagagcaagcgcatattgagcgggtactacatgatcatttcctatttaggaagcttactgactcacaatgtcatgttctacttgattgtatgcaacgagttgaggtgaaacctagggatatagtagtacaacagggcggtgaaggtgactgcttctatgtagttggtagtggtgagtatgaagttctggctattcaggaagaaaatggaaaggaaataaccaaggttctgcatcggtatacagctgacaagttatcttcttttggggagctagcactaatgcacaataagccgcttcaggcttcagttcgtgctgtgaccagtggaacattatgggctctaaagagggaggacttccggggtattttgatgtcagaattttcaaacataccatcattgaagttgctccgatctgtacaactgtttacaagatttacagtgcttcaactaagtcaacttgccgagtcacttgttgaagtatcttttgcagatgggcaaataatagtagataagaatgataaattctcttctctgtatatcattcaaagaggtcgtgtgagacttatattggctactgatcaaatgacttcagatacttgggatctcattagtgctgaaacaaagcaggcacaaagtagtcgggaaaatggtaattatgtgcttgatatagatgagggagggcacttcggagagtggtctctcattggtgagactattgctttcactgctattgctgttggtgatgttacttgttctactatcatgaaggagaaatttgactcaattgttgggccttttcctaaactttcgcaagctgattccaagattaaagaatctctggtaactctggagaatgttgcagatggtgatttcccttttaggagggtgaagctctcagatttggaatggaaaatgtgcatatatgctgctgattgcagtgagattggtcttgtccaagtcaggggctatgacaagatgagaactttaaaaaggttttacatcaagagagtacaagatctccataaggaagtacaagtatttgaggaaaaggaccttatgaaaagcttgagcaaatcaacttgcgtgccagaagttctgtctacttgtgctgatcagtcataccttggaatattactgaattgttgcctttgttgctcactggcttcaatacttcatacaccactaaatgagacatctgcaagattctttgcagcctcagttgttgttgctctagaagaacttcatcagaagtccattatctatagaggtgtttcggcagacattcttatgctcgacagatcaggacatctgcagctggtggattttaggtttgcaaagaagttggaaggtcaaaggacatacacaatatgtgggatcgctgactctctggcaccagagattgttcttggtaggggtcatggatttcctgctgactggtgggcacttggagttttgatctatttcatgcttcagtcagacatgccattcgggtcctggagggagagcgagctggaacctattacaaaaattgccaaaggccaccttgttatgccagtgtctttcagtgcagaagttgttgaccttataaccaagctactcgtggtcgacgaaaacgcgcgccttggaaccagtggtgctgaagctgtgaagaaacacccctggtttgatggcactgattgggagcgaatagcatctgggacttgtgcagcacctgaagaaatcactgagcgcatcaactactgtatagaaactcttaatgaggacttatccgcatctccttccgtgccgattgaagacccagatgatctcactgctccagagtggatccaggattggtgatctcaatagttgcatgactgtccaatgatgaattgttctagttgaggaaaacgtctctagtttttcaccgagcattctcatatcaaatggaagaaggtatacataagagttgatcgaactgacaagttgtacataccaaagattattccttctgtgatcatagatcagaatttgagatgccaagcaacagagactttggtctatgtttgctgcatagttcctggtaagaaggatctggatagtttgttggtgatccatgtaattatatatccaatttgtgcactcccttgctgtttcggaaatggatactggtcgggaggaaggtcaataattatcgttgtgaatacggacatttctttcatctgccactgtcaatcgatttgtacaagatcaagttttccaaatataattatgaaggttaccaaaacaagagcttgttatctcatatacacggtgcaaataacctgcgacgcgacatttggcatctggacactacacctacctaaaacaaaacttgatgcataatttaaataaaatacgtaaaatacaaaaaaatacataactcataaaaaagactacataaattatgtaaagcaaatag

SEQ ID NO: 45739 - DNA, 2357 bp, Zea Mays
gctgccaccacccacctcctctctcttcacctcccattctctctctccgccccctgcttgcctgctctacccacctcataaacttccccactccttcctccatttccatccattcttctccccaggctgccgccgctggcagccgcatatgctgctgctggtgctctgctactccttcgtcaatctctgctgccgtttctaaatacaaggatcctcgagatgcatgtgcagaaattgtcgctgagtcctatcgtctttggctacagtatgaaactcgtacagatgacattacaatcatactcgtgcatattaatgggttaactgataaggaatctacccagactgttacgaaggtgactttacaaccttcacaacaagtagtaggactggcaggccctgaatcgccactaatagtaagttccaacaccaataatcagcgctccaagcatgatttatcacgggcacgattgagggctcttgaaagttctctagagaatggtcaattatgggtccctccatctccatcgcatcggaagacatgggaagagcaagcgcatattgagcgggtactacatgatcatttcctatttaggaagcttactgactcacaatgtcatgttctacttgattgtatgcaacgagttgaggtgaaacctagggatatagtagtacaacagggcggtgaaggtgactgcttctatgtagttggtagtggtgagtatgaagttctggctattcaggaagaaaatggaaaggaaataaccaaggttctgcatcggtatacagctgacaagttatcttcttttggggagctagcactaatgcacaataagccgcttcaggcttcagttcgtgctgtgaccagtggaacattatgggctctaaagagggaggacttccggggtattttgatgtcagaattttcaaacataccatcattgaagttgctccgatctgtacaactgtttacaagatttacagtgcttcaactaagtcaacttgccgagtcacttgttgaagtatcttttgcagatgggcaaataatagtagataagaatgataaattctcttctctgtatatcattcaaagaggtcgtgtgagacttatattggctactgatcaaatgacttcagatacttgggatctcattagtgctgaaacaaagcaggcacaaagtagtcgggaaaatggtaattatgtgcttgatatagatgagggagggcacttcggagagtggtctctcattggtgagactattgctttcactgctattgctgttggtgatgttacttgttctactatcatgaaggagaaatttgactcaattgttgggccttttcctaaactttcgcaagctgattccaagattaaagaatctctggtaactctggagaatgttgcagatggtgatttcccttttaggagggtgaagctctcagatttggaatggaaaatgtgcatatatgctgctgattgcagtgagattggtcttgtccaagtcaggggctatgacaagatgagaactttaaaaaggttttacatcaagagagtacaagatctccataaggaagtacaagtatttgaggaaaaggaccttatgaaaagcttgagcaaatcaacttgcgtgccagaagttctgtctacttgtgctgatcagtcataccttggaatattactgaattgttgcctttgttgctcactggcttcaatacttcatacaccactaaatgagacatctgcaagattctttgcagcctcagttgttgttgctctagaagaacttcatcagaagtccattatctatagaggtgtttcggcagacattcttatgctcgacagatcaggacatctgcagctggtggattttaggtttgcaaagaagttggaaggtcaaaggacatacacaatatgtgggatcgctgactctctggcaccagagattgttcttggtaggggtcatggatttcctgctgactggtaagtggttattgacccctttcgtttatatgcattccatatcactggatcaactatgtgtcttgagttcttatcaaagacaaagttgtggttaccgattatctttctaatgtgtccctaagaattttaaagcagtgtgcagtatttcctatcagtttcgtatgcgaacaatgaaaatgccatttttccttgtgacctctgtatatggaacaatactgtctatgcactgcatagcatttttacagatgcgcaaacattgaaatgctgtttacagacattgccatttccaaatctacctgacattctcagaacagactgaaacatgcaaactgcagtagaaaccttcttcccaacaaaaataaatggaggtatccacccc

SEQ ID NO: 45740 - DNA, 2364 bp, Zea Mays
gctgccaccacccacctcctctctcttcacctcccattctctctctccgccccctgcttgcctgctctacccacctcataaacttccccactccttcctccatttccatccattcttctccccaggctgccgccgctggcagccgcatatgctgctgctggtgctctgctactccttcgtcaatctctgctgccgtttctaaatacaaggatcctcgagatgcatgtgcagaaattgtcgctgagtcctatcgtctttggctacagtatgaaactcgtacagatgacattacaatcatactcgtgcatattaatgggttaactgataaggaatctacccagactgttacgaaggtgactttacaaccttcacaacaagtagtaggactggcaggccctgaatcgccactaatagtaagttccaacaccaataatcagcgctccaagcatgatttatcacgggcacgattgagggctcttgaaagttctctagagaatggtcaattatgggtccctccatctccatcgcatcggaagacatgggaagagcaagcgcatattgagcgggtactacatgatcatttcctatttaggaagcttactgactcacaatgtcatgttctacttgattgtatgcaacgagttgaggtgaaacctagggatatagtagtacaacagggcggtgaaggtgactgcttctatgtagttggtagtggtgagtatgaagttctggctattcaggaagaaaatggaaaggaaataaccaaggttctgcatcggtatacagctgacaagttatcttcttttggggagctagcactaatgcacaataagccgcttcaggcttcagttcgtgctgtgaccagtggaacattatgggctctaaagagggaggacttccggggtattttgatgtcagaattttcaaacataccatcattgaagttgctccgatctgtacaactgtttacaagatttacagtgcttcaactaagtcaacttgccgagtcacttgttgaagtatcttttgcagatgggcaaataatagtagataagaatgataaattctcttctctgtatatcattcaaagaggtcgtgtgagacttatattggctactgatcaaatgacttcagatacttgggatctcattagtgctgaaacaaagcaggcacaaagtagtcgggaaaatggtaattatgtgcttgatatagatgagggagggcacttcggagagtggtctctcattggtgagactattgctttcactgctattgctgttggtgatgttacttgttctactatcatgaaggagaaatttgactcaattgttgggccttttcctaaactttcgcaagctgattccaagattaaagaatctctggtaactctggagaatgttgcagatggtgatttcccttttaggagggtgaagctctcagatttggtacggggaatggaaaatgtgcatatatgctgctgattgcagtgagattggtcttgtccaagtcaggggctatgacaagatgagaactttaaaaaggttttacatcaagagagtacaagatctccataaggaagtacaagtatttgaggaaaaggaccttatgaaaagcttgagcaaatcaacttgcgtgccagaagttctgtctacttgtgctgatcagtcataccttggaatattactgaattgttgcctttgttgctcactggcttcaatacttcatacaccactaaatgagacatctgcaagattctttgcagcctcagttgttgttgctctagaagaacttcatcagaagtccattatctatagaggtgtttcggcagacattcttatgctcgacagatcaggacatctgcagctggtggattttaggtttgcaaagaagttggaaggtcaaaggacatacacaatatgtgggatcgctgactctctggcaccagagattgttcttggtaggggtcatggatttcctgctgactggtaagtggttattgacccctttcgtttatatgcattccatatcactggatcaactatgtgtcttgagttcttatcaaagacaaagttgtggttaccgattatctttctaatgtgtccctaagaattttaaagcagtgtgcagtatttcctatcagtttcgtatgcgaacaatgaaaatgccatttttccttgtgacctctgtatatggaacaatactgtctatgcactgcatagcatttttacagatgcgcaaacattgaaatgctgtttacagacattgccatttccaaatctacctgacattctcagaacagactgaaacatgcaaactgcagtagaaaccttcttcccaacaaaaataaatggaggtatccacccc

SEQ ID NO: 45741 - DNA, 3681 bp, Zea Mays
ctactctgctgccaccacccacctcctctctcttcacctcccattctctctctccgccccctgcttgcctgctctacccacctcataaacttccccactccttcctccatttccatccattcttctccccaggctgccgccgctggcagccgcatatgctgctgctggtgctctgctactccttcgtcaatctctgctgccgtttggcattagacggattccagtcaactccatccattttgatggttaaactatcaaagatactgccggtgctgtgaatggctgctcaagttcctcagattctttaaattctgagttcatcctcaattcggggctcttggtttaagccgttggacgattcattgtaccgcggaggattttttatggctcatgttgcctcgtgacattgtggtctgaccaaaagctgcttttacatctccttcatgggctgttcagcttccaagtgttgttcacaattgaagtgctctttgtgctcaaatgggtgcctggggcaggcacctgactccccgagggaatccaggggaaagtcaagtcgggggagagggagggtagattctagtggttcagatgattcttctggtgatgatctcggggaagatgacgatgcttttaaccatatgaatgctacaagggaatcaactgctggcatcagccgactgtcaagggtgtcgtcacagtttcttcctcccgatgcttcacgcaaggttcaggtccctttgggtaactatgacctgagatactccttcctgtctcaaagaggttactacccagaatcactggacaaggcaaatcaagatagctactgcgtacataccccatttggacctagtcctgatgaccacttattcggtgtgtttgatggccatggggaatatggagctcaatgctcgcaatttgtgaagcgaagattatgcgagaacctgctcagagataacaggtttcgtaccgatgctgtgctggctcttcattctgcttttgtggcaacgaacacacagctgcatgccgacaacttggatgactccatgagtggtactactgcagtcactatcttggtcaggggtaaaactatttacgttgcaaataccggtgattcgcgtgctgttatcgccgaaaaacaaggggatgacattgtcgctgttgacctttccatagatcaaaccccttaccggtttgatgagcttgaaagggtcaaggaatgtggtgctagggttctaacgttggaccaaatagagggcctaaagaacccagatgtgcagtgttggggtactgaagaaagtgacgatggcgatcctccaaggttatgggtgcaaaatggcatgtacccaggaactgcttttacccgtagcattggagattctgttgctgagtcaattggtgtcattgcagatcccgagatttttgtcctggatctcaattccaacaatccatttttcgttcttgctagcgatggcgtttttgagttcctttccagtcaaacagttgtcgacatggtttctaaatacaaggatcctcgagatgcatgtgcagaaattgtcgctgagtcctatcgtctttggctacagtatgaaactcgtacagatgacattacaatcatactcgtgcatattaatgggttaactgataaggaatctacccagactgttacgaaggtgactttacaaccttcacaacaagtagtaggactggcaggccctgaatcgccactaatagtaagttccaacaccaataatcagcgctccaagcatgatttatcacgggcacgattgagggctcttgaaagttctctagagaatggtcaattatgggtccctccatctccatcgcatcggaagacatgggaagagcaagcgcatattgagcgggtactacatgatcatttcctatttaggaagcttactgactcacaatgtcatgttctacttgattgtatgcaacgagttgaggtgaaacctagggatatagtagtacaacagggcggtgaaggtgactgcttctatgtagttggtagtggtgagtatgaagttctggctattcaggaagaaaatggaaaggaaataaccaaggttctgcatcggtatacagctgacaagttatcttcttttggggagctagcactaatgcacaataagccgcttcaggcttcagttcgtgctgtgaccagtggaacattatgggctctaaagagggaggacttccggggtattttgatgtcagaattttcaaacataccatcattgaagttgctccgatctgtacaactgtttacaagatttacagtgcttcaactaagtcaacttgccgagtcacttgttgaagtatcttttgcagatgggcaaataatagtagataagaatgataaattctcttctctgtatatcattcaaagaggtcgtgtgagacttatattggctactgatcaaatgacttcagatacttgggatctcattagtgctgaaacaaagcaggcacaaagtagtcgggaaaatggtaattatgtgcttgatatagatgagggagggcacttcggagagtggtctctcattggtgagactattgctttcactgctattgctgttggtgatgttacttgttctactatcatgaaggagaaatttgactcaattgttgggccttttcctaaactttcgcaagctgattccaagattaaagaatctctggtaactctggagaatgttgcagatggtgatttcccttttaggagggtgaagctctcagatttggtacggggaatggaaaatgtgcatatatgctgctgattgcagtgagattggtcttgtccaagtcaggggctatgacaagatgagaactttaaaaaggttttacatcaagagagtacaagatctccataaggaagtacaagtatttgaggaaaaggaccttatgaaaagcttgagcaaatcaacttgcgtgccagaagttctgtctacttgtgctgatcagtcataccttggaatattactgaattgttgcctttgttgctcactggcttcaatacttcatacaccactaaatgagacatctgcaagattctttgcagcctcagttgttgttgctctagaagaacttcatcagaagtccattatctatagaggtgtttcggcagacattcttatgctcgacagatcaggacatctgcagctggtggattttaggtttgcaaagaagttggaaggtcaaaggacatacacaatatgtgggatcgctgactctctggcaccagagattgttcttggtaggggtcatggatttcctgctgactggtaagtggttattgacccctttcgtttatatgcattccatatcactggatcaactatgtgtcttgagttcttatcaaagacaaagttgtggttaccgattatctttctaatgtgtccctaagaattttaaagcagtgtgcagtatttcctatcagtttcgtatgcgaacaatgaaaatgccatttttccttgtgacctctgtatatggaacaatactgtctatgcactgcatagcatttttacagatgcgcaaacattgaaatgctgtttacagacattgccatttccaaatctacctgacattctcagaacagactgaaacatgcaaactgcagtagaaaccttcttcccaacaaaaataaatggaggtatccacccc

SEQ ID NO: 45742 - DNA, 3426 bp, Zea Mays
gtagcctaaacttgcggctactctgctgccaccacccacctcctctctcttcacctcccattctctctctccgccccctgcttgcctgctctacccacctcataaacttccccactccttcctccatttccatccattcttctccccaggctgccgccgctggcagccgcatatgctgctgctggtgctctgctactccttcgtcaatctctgctgccgtttggcattagacggattccagtcaactccatccattttgatggttaaactatcaaagatactgccggtgctgtgaatggctgctcaagttcctcagattctttaaattctgagttcatcctcaattcggggctcttggtttaagccgttggacgattcattgtaccgcggaggattttttatggctcatgttgcctcgtgacattgtggtctgaccaaaagctgcttttacatctccttcatgggctgttcagcttccaagtgttgttcacaattgaagtgctctttgtgctcaaatgggtgcctggggcaggcacctgactccccgagggaatccaggggaaagtcaagtcgggggagagggagggtagattctagtggttcagatgattcttctggtgatgatctcggggaagatgacgatgcttttaaccatatgaatgctacaagggaatcaactgctggcatcagccgactgtcaagggtgtcgtcacagtttcttcctcccgatgcttcacgcaaggttcaggtccctttgggtaactatgacctgagatactccttcctgtctcaaagaggttactacccagaatcactggacaaggcaaatcaagatagctactgcgtacataccccatttggacctagtcctgatgaccacttattcggtgtgtttgatggccatggggaatatggagctcaatgctcgcaatttgtgaagcgaagattatgcgagaacctgctcagagataacaggtttcgtaccgatgctgtgctggctcttcattctgcttttgtggcaacgaacacacagctgcatgccgacaacttggatgactccatgagtggtactactgcagtcactatcttggtcaggggtaaaactatttacgttgcaaataccggtgattcgcgtgctgttatcgccgaaaaacaaggggatgacattgtcgctgttgacctttccatagatcaaaccccttaccggtttgatgagcttgaaagggtcaaggaatgtggtgctagggttctaacgttggaccaaatagagggcctaaagaacccagatgtgcagtgttggggtactgaagaaagtgacgatggcgatcctccaaggttatgggtgcaaaatggcatgtacccaggaactgcttttacccgtagcattggagattctgttgctgagtcaattggtgtcattgcagatcccgagatttttgtcctggatctcaattccaacaatccatttttcgttcttgctagcgatggcgtttttgagttcctttccagtcaaacagttgtcgacatggtttctaaatacaaggatcctcgagatgcatgtgcagaaattgtcgctgagtcctatcgtctttggctacagtatgaaactcgtacagatgacattacaatcatactcgtgcatattaatgggttaactgataaggaatctacccagactgttacgaaggtgactttacaaccttcacaacaagtagtaggactggcaggccctgaatcgccactaatagtaagttccaacaccaataatcagcgctccaagcatgatttatcacgggcacgattgagggctcttgaaagttctctagagaatggtcaattatgggtccctccatctccatcgcatcggaagacatgggaagagcaagcgcatattgagcgggtactacatgatcatttcctatttaggaagcttactgactcacaatgtcatgttctacttgattgtatgcaacgagttgaggtgaaacctagggatatagtagtacaacagggcggtgaaggtgactgcttctatgtagttggtagtggtgagtatgaagttctggctattcaggaagaaaatggaaaggaaataaccaaggttctgcatcggtatacagctgacaagttatcttcttttggggagctagcactaatgcacaataagccgcttcaggcttcagttcgtgctgtgaccagtggaacattatgggctctaaagagggaggacttccggggtattttgatgtcagaattttcaaacataccatcattgaagttgctccgatctgtacaactgtttacaagatttacagtgcttcaactaagtcaacttgccgagtcacttgttgaagtatcttttgcagatgggcaaataatagtagataagaatgataaattctcttctctgtatatcattcaaagaggtcgtgtgagacttatattggctactgatcaaatgacttcagatacttgggatctcattagtgctgaaacaaagcaggcacaaagtagtcgggaaaatggtaattatgtgcttgatatagatgagggagggcacttcggagagtggtctctcattggtgagactattgctttcactgctattgctgttggtgatgttacttgttctactatcatgaaggagaaatttgactcaattgttgggccttttcctaaactttcgcaagctgattccaagattaaagaatctctggtaactctggagaatgttgcagatggtgatttcccttttaggagggtgaagctctcagatttggtacggggaatggaaaatgtgcatatatgctgctgattgcagtgagattggtcttgtccaagtcaggggctatgacaagatgagaactttaaaaaggttttacatcaagagagtacaagatctccataaggaagtacaagtatttgaggaaaaggaccttatgaaaagcttgagcaaatcaacttgcgtgccagaagttctgtctacttgtgctgatcagtcataccttggaatattactgaattgttgcctttgttgctcactggcttcaatacttcatacaccactaaatgagacatctgcaagattctttgcagcctcagttgttgttgctctagaagaacttcatcagaagtccattatctatagaggtgtttcggcagacattcttatgctcgacagatcaggacatctgcagctggtggattttaggtttgcaaagaagttggaaggtcaaaggacatacacaatatgtgggatcgctgactctctggcaccagagattgttcttggtaggggtcatggatttcctgctgactgagacattgccatttccaaatctacctgacattctcagaacagactgaaacatgcaaactgcagtagaaaccttcttcccaacaaaaataaatggaggtatccacccc

SEQ ID NO: 45743 - DNA, 3049 bp, Zea Mays
gctgccaccacccacctcctctctcttcacctcccattctctctctccgccccctgcttgcctgctctacccacctcataaacttccccactccttcctccatttccatccattcttctccccaggctgccgccgctggcagccgcatatgctgctgctggtgctctgctactccttcgtcaatctctgctgccgtttggcattagacggattccagtcaactccatccattttgatggttaaactatcaaagatactgccggtgctgtgaatggctgctcaagttcctcagattctttaaattctgagttcatcctcaattcggggctcttggtttaagccgttggacgattcattgtaccgcggaggattttttatggctcatgttgcctcgtgacattgtggtctgaccaaaagctgcttttacatctccttcatgggctgttcagcttccaagtgttgttcacaattgaagtgctctttgtgctcaaatgggtgcctggggcaggcacctgactccccgagggaatccaggggaaagtcaagtcgggggagagggagggtagattctagtggttcagatgattcttctggtgatgatctcggggaagatgacgatgcttttaaccatatgaatgctacaagggaatcaactgctggcatcagccgactgtcaagggtgtcgtcacagtttcttcctcccgatgcttcacgcaaggttcaggtccctttgggtaactatgacctgagatactccttcctgtctcaaagaggttactacccagaatcactggacaaggcaaatcaagatagctactgcgtacataccccatttggacctagtcctgatgaccacttattcggtgtgtttgatggccatggggaatatggagctcaatgctcgcaatttgtgaagcgaagattatgcgagaacctgctcagagataacaggtttcgtaccgatgctgtgctggctcttcattctgcttttgtggcaacgaacacacagctgcatgccgacaacttggatgactccatgagtggtactactgcagtcactatcttggtcaggggtaaaactatttacgttgcaaataccggtgattcgcgtgctgttatcgccgaaaaacaaggggatgacattgtcgctgttgacctttccatagatcaaaccccttaccggtttgatgagcttgaaagggtcaaggaatgtggtgctagggttctaacgttggaccaaatagagggcctaaagaacccagatgtgcagtgttggggtactgaagaaagtgacgatggcgatcctccaaggttatgggtgcaaaatggcatgtacccaggaactgcttttacccgtagcattggagattctgttgctgagtcaattggtgtcattgcagatcccgagatttttgtcctggatctcaattccaacaatccatttttcgttcttgctagcgatggcgtttttgagttcctttccagtcaaacagttgtcgacatggtttctaaatacaaggatcctcgagatgcatgtgcagaaattgtcgctgagtcctatcgtctttggctacagtatgaaactcgtacagatgacattacaatcatactcgtgcatattaatgggttaactgatgaatctacccagactgttacgaaggtgactttacaaccttcacaacaagtagtaggactggcaggccctgaatcgccactaatagtaagttccaacaccaataatcagcgctccaagcatgatttatcacgggcacgattgagggctcttgaaagttctctagagaatggtcaattatgggtccctccatctccatcgcatcggaagacatgggaagagcaagtaaggcgcatattgagcgggtactacatgatcatttcctatttaggaagcttactgactcacaatgtcatgttctacttgattgtatgcaacgagttgaggtgaaacctagggatatagtagtacaacagggcggtgaaggtgactgcttctatgtagttggtagtggtgagtatgaagttctggctattcaggaagaaaatggaaaggaaataaccaaggttctgcatcggtatacagctgacaagttatcttcttttggggagctagcactaatgcacaataagccgcttcaggcttcagttcgtgctgtgaccagtggaacattatgggctctaaagagggaggacttccggggtattttgatgtcagaattttcaaacataccatcattgaagttgctccgatctgtacaactgtttacaagatttacagtgcttcaactaagtcaacttgccgagtcacttgttgaagtatcttttgcagatgggcaaataatagtagataagaatgataaattctcttctctgtatatcattcaaagaggtcgtgtgagacttatattggctactgatcaaatgacttcagatacttgggatctcattagtgctgaaacaaagcaggcacaaagtagtcgggaaaatggtaattatgtgcttgatatagatgagggagggcacttcggagagtggtctctcattggtgagactattgctttcactgctattgctgttggtgatgttacttgttctactatcatgaaggagaaatttgactcaattgttgggccttttcctaaactttcgcaagctgattccaagattaaagaatctctggtaactctggagaatgttgcagatggtgatttcccttttaggagggtgaagctctcagatttggaatggaaaatgtgcatatatgctgctgattgcagtgagattggtcttgtccaagtcaggggctatgaagagaatttttacaatggtttgaaaaaatgtggaccatccatcaatataaattgaatggtgcaaacacgagaggtaccaatagaaaagtactcggaagtactaaaacagtagggatgataccaaaatgtgtgggagcagtaccaaaatagttaagacaaaaaccagatttttattatttaatagtctattgaaaaccctaaccctaaccctaacaggggttggg

SEQ ID NO: 45744 - DNA, 2942 bp, Zea Mays
cttgcggctactctgctgccaccacccacctcctctctcttcacctcccattctctctctccgccccctgcttgcctgctctacccacctcataaacttccccactccttcctccatttccatccattcttctccccaggctgccgccgctggcagccgcatatgctgctgctggtgctctgctactccttcgtcaatctctgctgccgtttggcattagacggattccagtcaactccatccattttgatggttaaactatcaaagatactgccggtgctgtgaatggctgctcaagttcctcagattctttaaattctgagttcatcctcaattcggggctcttggtttaagccgttggacgattcattgtaccgcggaggattttttatggctcatgttgcctcgtgacattgtggtctgaccaaaagctgcttttacatctccttcatgggctgttcagcttccaagtgttgttcacaattgaagtgctctttgtgctcaaatgggtgcctggggcaggcacctgactccccgagggaatccaggggaaagtcaagtcgggggagagggagggtagattctagtggttcagatgattcttctggtgatgatctcggggaagatgacgatgcttttaaccatatgaatgctacaagggaatcaactgctggcatcagccgactgtcaagggtgtcgtcacagtttcttcctcccgatgcttcacgcaaggttcaggtccctttgggtaactatgacctgagatactccttcctgtctcaaagaggttactacccagaatcactggacaaggcaaatcaagatagctactgcgtacataccccatttggacctagtcctgatgaccacttattcggtgtgtttgatggccatggggaatatggagctcaatgctcgcaatttgtgaagcgaagattatgcgagaacctgctcagagataacaggtttcgtaccgatgctgtgctggctcttcattctgcttttgtggcaacgaacacacagctgcatgccgacaacttggatgactccatgagtggtactactgcagtcactatcttggtcaggggtaaaactatttacgttgcaaataccggtgattcgcgtgctgttatcgccgaaaaacaaggggatgacattgtcgctgttgacctttccatagatcaaaccccttaccggtttgatgagcttgaaagggtcaaggaatgtggtgctagggttctaacgttggaccaaatagagggcctaaagaacccagatgtgcagtgttggggtactgaagaaagtgacgatggcgatcctccaaggttatgggtgcaaaatggcatgtacccaggaactgcttttacccgtagcattggagattctgttgctgagtcaattggtgtcattgcagatcccgagatttttgtcctggatctcaattccaacaatccatttttcgttcttgctagcgatggcgtttttgagttcctttccagtcaaacagttgtcgacatggtttctaaatacaaggatcctcgagatgcatgtgcagaaattgtcgctgagtcctatcgtctttggctacagtatgaaactcgtacagatgacattacaatcatactcgtgcatattaatgggttaactgataaggaatctacccagactgttacgaaggtgactttacaaccttcacaacaagtagtaggactggcaggccctgaatcgccactaatagtaagttccaacaccaataatcagcgctccaagcatgatttatcacgggcacgattgagggctcttgaaagttctctagagaatggtcaattatgggtccctccatctccatcgcatcggaagacatgggaagagcaagcgcatattgagcgggtactacatgatcatttcctatttaggaagcttactgactcacaatgtcatgttctacttgattgtatgcaacgagttgaggtgaaacctagggatatagtagtacaacagggcggtgaaggtgactgcttctatgtagttggtagtggtgagtatgaagttctggctattcaggaagaaaatggaaaggaaataaccaaggttctgcatcggtatacagctgacaagttatcttcttttggggagctagcactaatgcacaataagccgcttcaggcttcagttcgtgctgtgaccagtggaacattatgggctctaaagagggaggacttccggggtattttgatgtcagaattttcaaacataccatcattgaagttgctccgatctgtacaactgtttacaagatttacagtgcttcaactaagtcaacttgccgagtcacttgttgaagtatcttttgcagatgggcaaataatagtagataagaatgataaattctcttctctgtatatcattcaaagaggtcgtgtgagacttatattggctactgatcaaatgacttcagatacttgggatctcattagtgctgaaacaaagcaggcacaaagtagtcgggaaaatggagaaatttgactcaattgttgggccttttcctaaactttcgcaagctgattccaagattaaagaatctctggtaactctggagaatgttgcagatggtgatttcccttttaggagggtgaagctctcagatttggaatggaaaatgtgcatatatgctgctgattgcagtgagattggtcttgtccaagtcaggggctatgaagagaatttttacaatggtttgaaaaaatgtggaccatccatcaatataaattgaatggtgcaaacacgagaggtaccaatagaaaagtactcggaagtactaaaacagtagggatgataccaaaatgtgtgggagcagtaccaaaatagttaagacaaaaaccagatttttattatttaatagtctattgaaaaccctaaccctaaccctaacaggggttggg

SEQ ID NO: 45745 - DNA, 1754 bp, Zea Mays
aaacttgcggctactctgctgccaccacccacctcctctctcttcacctcccattctctctctccgccccctgcttgcctgctctacccacctcataaacttccccactccttcctccatttccatccattcttctccccaggctgccgccgctggcagccgcatatgctgctgctggtgctctgctactccttcgtcaatctctgctgccgtttctaaatacaaggatcctcgagatgcatgtgcagaaattgtcgctgagtcctatcgtctttggctacagtatgaaactcgtacagatgacattacaatcatactcgtgcatattaatgggttaactgataaggaatctacccagactgttacgaaggtgactttacaaccttcacaacaagtagtaggactggcaggccctgaatcgccactaatagtaagttccaacaccaataatcagcgctccaagcatgatttatcacgggcacgattgagggctcttgaaagttctctagagaatggtcaattatgggtccctccatctccatcgcatcggaagacatgggaagagcaagcgcatattgagcgggtactacatgatcatttcctatttaggaagcttactgactcacaatgtcatgttctacttgattgtatgcaacgagttgaggtgaaacctagggatatagtagtacaacagggcggtgaaggtgactgcttctatgtagttggtagtggtgagtatgaagttctggctattcaggaagaaaatggaaaggaaataaccaaggttctgcatcggtatacagctgacaagttatcttcttttggggagctagcactaatgcacaataagccgcttcaggcttcagttcgtgctgtgaccagtggaacattatgggctctaaagagggaggacttccggggtattttgatgtcagaattttcaaacataccatcattgaagttgctccgatctgtacaactgtttacaagatttacagtgcttcaactaagtcaacttgccgagtcacttgttgaagtatcttttgcagatgggcaaataatagtagataagaatgataaattctcttctctgtatatcattcaaagaggtcgtgtgagacttatattggctactgatcaaatgacttcagatacttgggatctcattagtgctgaaacaaagcaggcacaaagtagtcgggaaaatggtaattatgtgcttgatatagatgagggagggcacttcggagagtggtctctcattggtgagactattgctttcactgctattgctgttggtgatgttacttgttctactatcatgaaggagaaatttgactcaattgttgggccttttcctaaactttcgcaagctgattccaagattaaagaatctctggtaactctggagaatgttgcagatggtgatttcccttttaggagggtgaagctctcagatttggaatggaaaatgtgcatatatgctgctgattgcagtgagattggtcttgtccaagtcaggggctatgaagagaatttttacaatggtttgaaaaaatgtggaccatccatcaatataaattgaatggtgcaaacacgagaggtaccaatagaaaagtactcggaagtactaaaacagtagggatgataccaaaatgtgtgggagcagtaccaaaatagttaagacaaaaaccagatttttattatttaatagtctattgaaaaccctaaccctaaccctaacaggggttggg

SEQ ID NO: 45746 - DNA, 3073 bp, Zea Mays
ctaaacttgcggctactctgctgccaccacccacctcctctctcttcacctcccattctctctctccgccccctgcttgcctgctctacccacctcataaacttccccactccttcctccatttccatccattcttctccccaggctgccgccgctggcagccgcatatgctgctgctggtgctctgctactccttcgtcaatctctgctgccgtttggcattagacggattccagtcaactccatccattttgatggttaaactatcaaagatactgccggtgctgtgaatggctgctcaagttcctcagattctttaaattctgagttcatcctcaattcggggctcttggtttaagccgttggacgattcattgtaccgcggaggattttttatggctcatgttgcctcgtgacattgtggtctgaccaaaagctgcttttacatctccttcatgggctgttcagcttccaagtgttgttcacaattgaagtgctctttgtgctcaaatgggtgcctggggcaggcacctgactccccgagggaatccaggggaaagtcaagtcgggggagagggagggtagattctagtggttcagatgattcttctggtgatgatctcggggaagatgacgatgcttttaaccatatgaatgctacaagggaatcaactgctggcatcagccgactgtcaagggtgtcgtcacagtttcttcctcccgatgcttcacgcaaggttcaggtccctttgggtaactatgacctgagatactccttcctgtctcaaagaggttactacccagaatcactggacaaggcaaatcaagatagctactgcgtacataccccatttggacctagtcctgatgaccacttattcggtgtgtttgatggccatggggaatatggagctcaatgctcgcaatttgtgaagcgaagattatgcgagaacctgctcagagataacaggtttcgtaccgatgctgtgctggctcttcattctgcttttgtggcaacgaacacacagctgcatgccgacaacttggatgactccatgagtggtactactgcagtcactatcttggtcaggggtaaaactatttacgttgcaaataccggtgattcgcgtgctgttatcgccgaaaaacaaggggatgacattgtcgctgttgacctttccatagatcaaaccccttaccggtttgatgagcttgaaagggtcaaggaatgtggtgctagggttctaacgttggaccaaatagagggcctaaagaacccagatgtgcagtgttggggtactgaagaaagtgacgatggcgatcctccaaggttatgggtgcaaaatggcatgtacccaggaactgcttttacccgtagcattggagattctgttgctgagtcaattggtgtcattgcagatcccgagatttttgtcctggatctcaattccaacaatccatttttcgttcttgctagcgatggcgtttttgagttcctttccagtcaaacagttgtcgacatggtttctaaatacaaggatcctcgagatgcatgtgcagaaattgtcgctgagtcctatcgtctttggctacagtatgaaactcgtacagatgacattacaatcatactcgtgcatattaatgggttaactgataaggaatctacccagactgttacgaaggtgactttacaaccttcacaacaagtagtaggactggcaggccctgaatcgccactaatagtaagttccaacaccaataatcagcgctccaagcatgatttatcacgggcacgattgagggctcttgaaagttctctagagaatggtcaattatgggtccctccatctccatcgcatcggaagacatgggaagagcaagcgcatattgagcgggtactacatgatcatttcctatttaggaagcttactgactcacaatgtcatgttctacttgattgtatgcaacgagttgaggtgaaacctagggatatagtagtacaacagggcggtgaaggtgactgcttctatgtagttggtagtggtgagtatgaagttctggctattcaggaagaaaatggaaaggaaataaccaaggttctgcatcggtatacagctgacaagttatcttcttttggggagctagcactaatgcacaataagccgcttcaggcttcagttcgtgctgtgaccagtggaacattatgggctctaaagagggaggacttccggggtattttgatgtcagaattttcaaacataccatcattgaagttgctccgatctgtacaactgtttacaagatttacagtgcttcaactaagtcaacttgccgagtcacttgttgaagtatcttttgcagatgggcaaataatagtagataagaatgataaattctcttctctgtatatcattcaaagaggtcgtgtgagacttatattggctactgatcaaatgacttcagatacttgggatctcattagtgctgaaacaaagcaggcacaaagtagtcgggaaaatggtaattatgtgcttgatatagatgagggagggcacttcggagagtggtctctcattggtgagactattgctttcactgctattgctgttggtgatgttacttgttctactatcatgaaggagaaatttgactcaattgttgggccttttcctaaactttcgcaagctgattccaagattaaagaatctctggtaactctggagaatgttgcagatggtgatttcccttttaggagggtgaagctctcagatttggtacggggaatggaaaatgtgcatatatgctgctgattgcagtgagattggtcttgtccaagtcaggggctatgaagagaatttttacaatggtttgaaaaaatgtggaccatccatcaatataaattgaatggtgcaaacacgagaggtaccaatagaaaagtactcggaagtactaaaacagtagggatgataccaaaatgtgtgggagcagtaccaaaatagttaagacaaaaaccagatttttattatttaatagtctattgaaaaccctaaccctaaccctaacaggggttggg

SEQ ID NO: 45747 - DNA, 2891 bp, Zea Mays
cttcaacccgccactttgcccactctcctcttccttctttgctacccatttcgtcgcagtagtcggcagtcgaaaccctagtcccctcgctttccttccactcgccgtcgcggcgccgatagagccagagctgaaaggcgtaggaaaagctggtggaggaggggatggaccggatcgtaggcagcaagtacaagctgggtcgcaagatcggaagcggttccttcggggagatctacctcgcgacgcacgtcgacacctacgagatcgtcgccgtcaagattgaaagcagcaaaaccaatcatccacagttgctatatgaggccaaactgtacaatgctcttcaaggagggagtatgcgtttgagtacatacaaatcttactttgctgattgttataccattatctgtgttgaattgttgctattttgaatccatgtagctggtatcgcaaacataaaatggtgcggcattgacggcgatgaaaacattcttgttattgatttactcggaccaagccttgaagatctgtttgtttattgtggccggagattctcactgaagacggtcttgatgctagcggaccagatgataacaagaatagaatttatgcattctaaaggctatctgcacagagacatcaagcctgataacttcctcatgggccttggtcgaaaagctaaccaggtttatgtaattgacttcgggcttgcaaagagatatcgtgattcagccaccaaccgccatataccttatagagaaaataaaaacttgactggcacagctcgctatgctagccgtaatactcatcttgggattgttttgttgccagagcaaagccgcagagatgatttggaatcgatcggatacgttcttctgtatttccttaggggaagtcttccttggcagggcttgaaagcagccacaaagaaacagaagtatgacaaaataagtgagaagaagctttcgactcctattgaggctctatgtaaatcccatcctgtggaatttgcttcctatttccactactgccattctctgacatttgatcagcgtcccgattatagtttcttgaggcatgtctttcgagaattgtttgagcgcgaaggctatcaatttgattatgtgtatgactggactttgttgaagtgtaagcaatcccagaaggctaaggttcagcaaggatgctctcatgatgcaggcgtaagcagccgtccagttgcaacaaacgtggacaagcaccaagttggtgttgcacgcccaattaatgcttcaggtctgcttgaagcagaacaacgcccggcaatcagaatgcaattaaacagccgttccaataatctgcatcctgagagattgggagtgtctgctagtcataataatgtactgctgcaatccacgtcacttgacaatgctgatgctccaatggaccacgcgacacattcaaaagcacaggggtccattgatccacacactcgtggaagttatagtccagggccctctaaccgcacttaaccttttgcattgttcgtaaaagcttgcgggtccatgcagtaaacaattggatcctttacaaacctaataatggtgacacattctatgcataatgaaaatttggggtttcacctggatagctttcattttaattacgggctgcagcagtgcgacaatgtgcattctacttggattgagttacaactttttaacttgtataagcttccattgtgttgaacacaaaattacaccatgcaaaacatcgcgaagaggtatctgggaagtttatgattggttagcatgcacattcaatgacatatgcatgcatcagttaggacaacgcctcttcgctaaaagtgaatatccgaccagtattgacctgcagtttccagtgtcttgacaccaaatcgccatacaaaaactacagagtggtggtatacgggaagttcatggttggttagcatacaccctctttgctgaaaggctgtcatattctacttggattggccgcagcttgcaatgtatgacaccaaatagcaccatacaaagactatgaagaggtctgggaagcttatgattgggtagcatccatgtatctataactgtgaccgcaactttgaagaaacacatgctgtggctcatggcctcgagataaaaaaaggttaaattgcaatcgacaacaatctggttgggcagagaatcctgttcgcagagtgtttgagctcatttgttccttggcaaagtcgatgtcgttgacgaacacctgcattacgaattacgatatatgaacaccgtaggaagtttgtcgaaaagcgaagggaatcatccttctctatagtccaaaaacgtcggtgcattggatagtaccgatttcactcatcagggtccaggatggatgtgacatgcattggtgtggattgatccctggcaagggcaatggctcacaactcagcatcatgttgtgtccagagaagcatctcagctgcagggacctagcgcgaagaaaaccagattgcacacctgggcatatgcaattccccttgtcatactcggtgtcggtgacaccatagttgtaggtatgctccagcgttccaggcctctcaaacttgtagccgtcacccgtcagggcccacaccacgaaggcgatgacgctcttgctgccctctttatgagatctcaattgtaaccgatcgacggggaagttctaggtttgccaacagcactgctcgacgacgaaatgcgattccgcgggcccgtattcgaggaacgcgtcggtttacttctcctcagccttaggtatatatgcccatcttgctgagcagcttcatcgcccaggcacccggtttagaacatgcattaatttgtataatctgtttcagctcagacttcagagcggactgtgac

SEQ ID NO: 45748 - DNA, 2452 bp, Zea Mays
gaagccttcaacccgccactttgcccactctcctcttccttctttgctacccatttcgtcgcagtagtcggcagtcgaaaccctagtcccctcgctttccttccactcgccgtcgcggcgccgatagagccagagctgaaaggcgtaggaaaagctggtggaggaggggatggaccggatcgtaggcagcaagtacaagctgggtcgcaagatcggaagcggttccttcggggagatctacctcgcgacgcacgtcgacacctacgagatcgtcgccgtcaagattgaaagcagcaaaaccaatcatccacagttgctatatgaggccaaactgtacaatgctcttcaaggagggactggtatcgcaaacataaaatggtgcggcattgacggcgatgaaaacattcttgttattgatttactcggaccaagccttgaagatctgtttgtttattgtggccggagattctcactgaagacggtcttgatgctagcggaccagatgataacaagaatagaatttatgcattctaaaggctatctgcacagagacatcaagcctgataacttcctcatgggccttggtcgaaaagctaaccaggtttatgtaattgacttcgggcttgcaaagagatatcgtgattcagccaccaaccgccatataccttatagagaaaataaaaacttgactggcacagctcgctatgctagccgtaatactcatcttgggattgttttgttgccagagcaaagccgcagagatgatttggaatcgatcggatacgttcttctgtatttccttaggggaagtcttccttggcagggcttgaaagcagccacaaagaaacagaagtatgacaaaataagtgagaagaagctttcgactcctattgaggctctatgtaaatcccatcctgtggaatttgcttcctatttccactactgccattctctgacatttgatcagcgtcccgattatagtttcttgaggcatgtctttcgagaattgtttgagcgcgaaggctatcaatttgattatgtgtatgactggactttgttgaagtgtaagcaatcccagaaggctaaggttcagcaaggatgctctcatgatgcaggcgtaagcagccgtccagttgcaacaaacgtggacaagcaccaagttggtgttgcacgcccaattaatgcttcaggtctgcttgaagcagaacaacgcccggcaatcagaatgcaattaaacagccgttccaataatctgcatcctgagagattgcttccattgtgttgaacacaaaattacaccatgcaaaacatcgcgaagaggtatctgggaagtttatgattggttagcatgcacattcaatgacatatgcatgcatcagttaggacaacgcctcttcgctaaaagtgaatatccgaccagtattgacctgcagtttccagtgtcttgacaccaaatcgccatacaaaaactacagagtggtggtatacgggaagttcatggttggttagcatacaccctctttgctgaaaggctgtcatattctacttggattggccgcagcttgcaatgtatgacaccaaatagcaccatacaaagactatgaagaggtctgggaagcttatgattgggtagcatccatgtatctataactgtgaccgcaactttgaagaaacacatgctgtggctcatggcctcgagataaaaaaaggttaaattgcaatcgacaacaatctggttgggcagagaatcctgttcgcagagtgtttgagctcatttgttccttggcaaagtcgatgtcgttgacgaacacctgcattacgaattacgatatatgaacaccgtaggaagtttgtcgaaaagcgaagggaatcatccttctctatagtccaaaaacgtcggtgcattggatagtaccgatttcactcatcagggtccaggatggatgtgacatgcattggtgtggattgatccctggcaagggcaatggctcacaactcagcatcatgttgtgtccagagaagcatctcagctgcagggacctagcgcgaagaaaaccagattgcacacctgggcatatgcaattccccttgtcatactcggtgtcggtgacaccatagttgtaggtatgctccagcgttccaggcctctcaaacttgtagccgtcacccgtcagggcccacaccacgaaggcgatgacgctcttgctgccctctttatgagatctcaattgtaaccgatcgacggggaagttctaggtttgccaacagcactgctcgacgacgaaatgcgattccgcgggcccgtattcgaggaacgcgtcggtttacttctcctcagccttaggtatatatgcccatcttgctgagcagcttcatcgcccaggcacccggtttagaacatgcattaatttgtataatctgtttcagctcagacttcagagcggactgtgac

SEQ ID NO: 45749 - DNA, 2664 bp, Zea Mays
atccgtttccgaccttctagaagccttcaacccgccactttgcccactctcctcttccttctttgctacccatttcgtcgcagtagtcggcagtcgaaaccctagtcccctcgctttccttccactcgccgtcgcggcgccgatagagccagagctgaaaggcgtaggaaaagctggtggaggaggggatggaccggatcgtaggcagcaagtacaagctgggtcgcaagatcggaagcggttccttcggggagatctacctcgcgacgcacgtcgacacctacgagatcgtcgccgtcaagattgaaagcagcaaaaccaatcatccacagttgctatatgaggccaaactgtacaatgctcttcaaggagggactggtatcgcaaacataaaatggtgcggcattgacggcgatgaaaacattcttgttattgatttactcggaccaagccttgaagatctgtttgtttattgtggccggagattctcactgaagacggtcttgatgctagcggaccagatgataacaagaatagaatttatgcattctaaaggctatctgcacagagacatcaagcctgataacttcctcatgggccttggtcgaaaagctaaccaggtttatgtaattgacttcgggcttgcaaagagatatcgtgattcagccaccaaccgccatataccttatagagaaaataaaaacttgactggcacagctcgctatgctagccgtaatactcatcttgggattgagcaaagccgcagagatgatttggaatcgatcggatacgttcttctgtatttccttaggggaagtcttccttggcagggcttgaaagcagccacaaagaaacagaagtatgacaaaataagtgagaagaagctttcgactcctattgaggctctatgtaaatcccatcctgtggaatttgcttcctatttccactactgccattctctgacatttgatcagcgtcccgattatagtttcttgaggcatgtctttcgagaattgtttgagcgcgaaggctatcaatttgattatgtgtatgactggactttgttgaagtgtaagcaatcccagaaggctaaggttcagcaaggatgctctcatgatgcaggcgtaagcagccgtccagttgcaacaaacgtggacaagcaccaagttggtgttgcacgcccaattaatgcttcaggtctgcttgaagcagaacaacgcccggcaatcagaatgcaattaaacagccgttccaataatctgcatcctgagagattgggagtgtctgctagtcataataatgtactgctgcaatccacgtcacttgacaatgctgatgctccaatggaccacgcgacacattcaaaagcacaggggtccattgatccacacactcgtggaagttatagtccagggccctctaaccgcacttaaccttttgcattgttcgtaaaagcttgcgggtccatgcagtaaacaattgcttccattgtgttgaacacaaaattacaccatgcaaaacatcgcgaagaggtatctgggaagtttatgattggttagcatgcacattcaatgacatatgcatgcatcagttaggacaacgcctcttcgctaaaagtgaatatccgaccagtattgacctgcagtttccagtgtcttgacaccaaatcgccatacaaaaactacagagtggtggtatacgggaagttcatggttggttagcatacaccctctttgctgaaaggctgtcatattctacttggattggccgcagcttgcaatgtatgacaccaaatagcaccatacaaagactatgaagaggtctgggaagcttatgattgggtagcatccatgtatctataactgtgaccgcaactttgaagaaacacatgctgtggctcatggcctcgagataaaaaaaggttaaattgcaatcgacaacaatctggttgggcagagaatcctgttcgcagagtgtttgagctcatttgttccttggcaaagtcgatgtcgttgacgaacacctgcattacgaattacgatatatgaacaccgtaggaagtttgtcgaaaagcgaagggaatcatccttctctatagtccaaaaacgtcggtgcattggatagtaccgatttcactcatcagggtccaggatggatgtgacatgcattggtgtggattgatccctggcaagggcaatggctcacaactcagcatcatgttgtgtccagagaagcatctcagctgcagggacctagcgcgaagaaaaccagattgcacacctgggcatatgcaattccccttgtcatactcggtgtcggtgacaccatagttgtaggtatgctccagcgttccaggcctctcaaacttgtagccgtcacccgtcagggcccacaccacgaaggcgatgacgctcttgctgccctctttatgagatctcaattgtaaccgatcgacggggaagttctaggtttgccaacagcactgctcgacgacgaaatgcgattccgcgggcccgtattcgaggaacgcgtcggtttacttctcctcagccttaggtatatatgcccatcttgctgagcagcttcatcgcccaggcacccggtttagaacatgcattaatttgtataatctgtttcagctcagacttcagagcggactgtgac

SEQ ID NO: 45750 - DNA, 2857 bp, Zea Mays
ctttttttttctcaccgtcgcgtcttgcgctgcaaaatctaatccgtttccgaccttctagaagccttcaacccgccactttgcccactctcctcttccttctttgctacccatttcgtcgcagtagtcggcagtcgaaaccctagtcccctcgctttccttccactcgccgtcgcggcgccgatagagccagagctgaaaggcgtaggaaaagctggtggaggaggggatggaccggatcgtaggcagcaagtacaagctgggtcgcaagatcggaagcggttccttcggggagatctacctcgcgacgcacgtcgacacctacgagatcgtcgccgtcaagattgaaagcagcaaaaccaatcatccacagttgctatatgaggccaaactgtacaatgctcttcaaggagggactggtatcgcaaacataaaatggtgcggcattgacggcgatgaaaacattcttgttattgatttactcggaccaagccttgaagatctgtttgtttattgtggccggagattctcactgaagacggtcttgatgctagcggaccagatgataacaagaatagaatttatgcattctaaaggctatctgcacagagacatcaagcctgataacttcctcatgggccttggtcgaaaagctaaccaggtttatgtaattgacttcgggcttgcaaagagatatcgtgattcagccaccaaccgccatataccttatagagaaaataaaaacttgactggcacagctcgctatgctagccgtaatactcatcttgggattgagcaaagccgcagagatgatttggaatcgatcggatacgttcttctgtatttccttaggggaagtcttccttggcagggcttgaaagcagccacaaagaaacagaagtatgacaaaataagtgagaagaagctttcgactcctattgaggctctatgtaaatcccatcctgtggaatttgcttcctatttccactactgccattctctgacatttgatcagcgtcccgattatagtttcttgaggcatgtctttcgagaattgtttgagcgcgaaggctatcaatttgattatgtgtatgactggactttgttgaagtgtaagcaatcccagaaggctaaggttcagcaaggatgctctcatgatgcaggcgtaagcagccgtccagttgcaacaaacgtggacaagcaccaagttggtgttgcacgcccaattaatgcttcaggtctgcttgaagcagaacaacgcccggcaatcagaatgcaattaaacagccgttccaataatctgcatcctgagagattgggagtgtctgctagtcataataatgtactgctgcaatccacgtcacttgacaatgctgatgctccaatggaccacgcgacacattcaaaagcacaggggtccattgatccacacactcgtggaagttatagtccagggccctctaaccgcacttaaccttttgcattgttcgtaaaagcttgcgggtccatgcagtaaacaattggatcctttacaaacctaataatggtgacacattctatgcataatgaaaatttggggtttcacctggatagctttcattttaattacgggctgcagcagtgcgacaatgtgcattctacttggattgagttacaactttttaacttgtataagcttccattgtgttgaacacaaaattacaccatgcaaaacatcgcgaagaggtatctgggaagtttatgattggttagcatgcacattcaatgacatatgcatgcatcagttaggacaacgcctcttcgctaaaagtgaatatccgaccagtattgacctgcagtttccagtgtcttgacaccaaatcgccatacaaaaactacagagtggtggtatacgggaagttcatggttggttagcatacaccctctttgctgaaaggctgtcatattctacttggattggccgcagcttgcaatgtatgacaccaaatagcaccatacaaagactatgaagaggtctgggaagcttatgattgggtagcatccatgtatctataactgtgaccgcaactttgaagaaacacatgctgtggctcatggcctcgagataaaaaaaggttaaattgcaatcgacaacaatctggttgggcagagaatcctgttcgcagagtgtttgagctcatttgttccttggcaaagtcgatgtcgttgacgaacacctgcattacgaattacgatatatgaacaccgtaggaagtttgtcgaaaagcgaagggaatcatccttctctatagtccaaaaacgtcggtgcattggatagtaccgatttcactcatcagggtccaggatggatgtgacatgcattggtgtggattgatccctggcaagggcaatggctcacaactcagcatcatgttgtgtccagagaagcatctcagctgcagggacctagcgcgaagaaaaccagattgcacacctgggcatatgcaattccccttgtcatactcggtgtcggtgacaccatagttgtaggtatgctccagcgttccaggcctctcaaacttgtagccgtcacccgtcagggcccacaccacgaaggcgatgacgctcttgctgccctctttatgagatctcaattgtaaccgatcgacggggaagttctaggtttgccaacagcactgctcgacgacgaaatgcgattccgcgggcccgtattcgaggaacgcgtcggtttacttctcctcagccttaggtatatatgcccatcttgctgagcagcttcatcgcccaggcacccggtttagaacatgcattaatttgtataatctgtttcagctcagacttcagagcggactgtgac

SEQ ID NO: 45751 - DNA, 2878 bp, Zea Mays
ccgacattactttttttttctcaccgtcgcgtcttgcgctgcaaaatctaatccgtttccgaccttctagaagccttcaacccgccactttgcccactctcctcttccttctttgctacccatttcgtcgcagtagtcggcagtcgaaaccctagtcccctcgctttccttccactcgccgtcgcggcgccgatagagccagagctgaaaggcgtaggaaaagctggtggaggaggggatggaccggatcgtaggcagcaagtacaagctgggtcgcaagatcggaagcggttccttcggggagatctacctcgcgacgcacgtcgacacctacgagatcgtcgccgtcaagattgaaagcagcaaaaccaatcatccacagttgctatatgaggccaaactgtacaatgctcttcaaggagggactggtatcgcaaacataaaatggtgcggcattgacggcgatgaaaacattcttgttattgatttactcggaccaagccttgaagatctgtttgtttattgtggccggagattctcactgaagacggtcttgatgctagcggaccagatggtttatgtaattgacttcgggcttgcaaagagatatcgtgattcagccaccaaccgccatataccttatagagaaaataaaaacttgactggcacagctcgctatgctagccgtaatactcatcttgggattgagcaaagccgcagagatgatttggaatcgatcggatacgttcttctgtatttccttaggggaagtcttccttggcagggcttgaaagcagccacaaagaaacagaagtatgacaaaataagtgagaagaagctttcgactcctattgaggctctatgtaaatcccatcctgtggaatttgcttcctatttccactactgccattctctgacatttgatcagcgtcccgattatagtttcttgaggcatgtctttcgagaattgtttgagcgcgaaggctatcaatttgattatgtgtatgactggactttgttgaagtgtaagcaatcccagaaggctaaggttcagcaaggatgctctgcgtaagcagccgtccagttgcaacaaacgtggacaagcaccaagttggtgttgcacgcccaattaatgcttcaggtctgcttgaagcagaacaacgcccggcaatcagaatgcaattaaacagccgttccaataatctgcatcctgagagattgggagtgtctgctagtcataataatgtactgctgcaatccacgtcacttgacaatgctgatgctccaatggaccacgcgacacattcaaaagcacaggggtccattgatccacacactcgtggaagttatagtccagggccctctaaccgcacttaaccttttgcattgttcgtaaaagcttgcgggtccatgcagtaaacaattggttgcctgatgtagtttcatggatgcattctggacaaacatccaatgcttcttagttgcatgaggccattgctggaaatagctgtcggatttttatgaggacttctgtattgcttgaggatcctttacaaacctaataatggtgacacattctatgcataatgaaaatttggggtttcacctggatagctttcattttaattacgggctgcagcagtgcgacaatgtgcattctacttggattgagttacaactttttaacttgtataagcttccattgtgttgaacacaaaattacaccatgcaaaacatcgcgaagaggtatctgggaagtttatgattggttagcatgcacattcaatgacatatgcatgcatcagttaggacaacgcctcttcgctaaaagtgaatatccgaccagtattgacctgcagtttccagtgtcttgacaccaaatcgccatacaaaaactacagagtggtggtatacgggaagttcatggttggttagcatacaccctctttgctgaaaggctgtcatattctacttggattggccgcagcttgcaatgtatgacaccaaatagcaccatacaaagactatgaagaggtctgggaagcttatgattgggtagcatccatgtatctataactgtgaccgcaactttgaagaaacacatgctgtggctcatggcctcgagataaaaaaaggttaaattgcaatcgacaacaatctggttgggcagagaatcctgttcgcagagtgtttgagctcatttgttccttggcaaagtcgatgtcgttgacgaacacctgcattacgaattacgatatatgaacaccgtaggaagtttgtcgaaaagcgaagggaatcatccttctctatagtccaaaaacgtcggtgcattggatagtaccgatttcactcatcagggtccaggatggatgtgacatgcattggtgtggattgatccctggcaagggcaatggctcacaactcagcatcatgttgtgtccagagaagcatctcagctgcagggacctagcgcgaagaaaaccagattgcacacctgggcatatgcaattccccttgtcatactcggtgtcggtgacaccatagttgtaggtatgctccagcgttccaggcctctcaaacttgtagccgtcacccgtcagggcccacaccacgaaggcgatgacgctcttgctgccctctttatgagatctcaattgtaaccgatcgacggggaagttctaggtttgccaacagcactgctcgacgacgaaatgcgattccgcgggcccgtattcgaggaacgcgtcggtttacttctcctcagccttaggtatatatgcccatcttgctgagcagcttcatcgcccaggcacccggtttagaacatgcattaatttgtataatctgtttcagctcagacttcagagcggactgtgac

SEQ ID NO: 45752 - DNA, 2174 bp, Zea Mays
aacccgccactttgcccactctcctcttccttctttgctacccatttcgtcgcagtagtcggcagtcgaaaccctagtcccctcgctttccttccactcgccgtcgcggcgccgatagagccagagctgaaaggcgtaggaaaagctggtggaggaggggatggaccggatcgtaggcagcaagtacaagctgggtcgcaagatcggaagcggttccttcggggagatctacctcgcgacgcacgtcgacacctacgagatcgtcgccgtcaagattgaaagcagcaaaaccaatcatccacagttgctatatgaggccaaactgtacaatgctcttcaaggagggactggtatcgcaaacataaaatggtgcggcattgacggcgatgaaaacattcttgttattgatttactcggaccaagccttgaagatctgtttgtttattgtggccggagattctcactgaagacggtcttgatgctagcggaccagatgataacaagaatagaatttatgcattctaaaggctatctgcacagagacatcaagcctgataacttcctcatgggccttggtcgaaaagctaaccaggtttatgtaattgacttcgggcttgcaaagagatatcgtgattcagccaccaaccgccatataccttatagagaaaataaaaacttgactggcacagctcgctatgctagccgtaatactcatcttgggattgtcttccttggcagggcttgaaagcagccacaaagaaacagaagtatgacaaaataagtgagaagaagctttcgactcctattgaggctctatgtaaatcccatcctgtggaatttgcttcctatttccactactgccattctctgacatttgatcagcgtcccgattatagtttcttgaggcatgtctttcgagaattgtttgagcgcgaaggctatcaatttgattatgtgtatgactggactttgttgaagtgtaagcaatcccagaaggctaaggttcagcaaggatgctctcatgatgcaggcgtaagcagccgtccagttgcaacaaacgtggacaagcaccaagttggtgttgcacgcccaattaatgcttcaggtctgcttgaagcagaacaacgcccggcaatcagaatgcaattaaacagccgttccaataatctgcatcctgagagattgggagtgtctgctagtcataataatgtactgctgcaatccacgtcacttgacaatgctgatgctccaatggaccacgcgacacattcaaaagcacaggggtccattgatccacacactcgtggaagttatagtccagggccctctaaccgcacttaaccttttgcattgttcgtaaaagcttgcgggtccatgcagtaaacaattgcttccattgtgttgaacacaaaattacaccatgcaaaacatcgcgaagaggtatctgggaagtttatgattggttagcatgcacattcaatgacatatgcatgcatcagttaggacaacgcctcttcgctaaaagtgaatatccgaccagtattgacctgcagtttccagtgtcttgacaccaaatcgccatacaaaaactacagagtggtggtatacgggaagttcatggttggttagcatacaccctctttgctgaaaggctgtcatattctacttggattggccgcagcttgcaatgtatgacaccaaatagcaccatacaaagactatgaagaggtctgggaagcttatgattgggtagcatccatgtatctataactgtgaccgcaactttgaagaaacacatgctgtggctcatggcctcgagataaaaaaaggttaaattgcaatcgacaacaatctggttgggcagaggtaaatatcatgccgtgctcctgtcatagacatggttgcctgtattttatttgaatgagggttgaatagcttataacattgtgaggaagtcctaccacatattgatttttcatgttggtgttttttttgttggcattctctctccagttgtcataaaaacaatgaactgtacataatttcttagaagggctgttcttaagtgttgaggtggaatgagatgatttacttgataaaagtgtacatatttaggtatccctcatttttctgattgcatcaatatctttcaatgatataacgctggttccgaa

SEQ ID NO: 45753 - DNA, 2433 bp, Zea Mays
cgacattactttttttttctcaccgtcgcgtcttgcgctgcaaaatctaatccgtttccgaccttctagaagccttcaacccgccactttgcccactctcctcttccttctttgctacccatttcgtcgcagtagtcggcagtcgaaaccctagtcccctcgctttccttccactcgccgtcgcggcgccgatagagccagagctgaaaggcgtaggaaaagctggtggaggaggggatggaccggatcgtaggcagcaagtacaagctgggtcgcaagatcggaagcggttccttcggggagatctacctcgcgacgcacgtcgacacctacgagatcgtcgccgtcaagattgaaagcagcaaaaccaatcatccacagttgctatatgaggccaaactgtacaatgctcttcaaggagggactggtatcgcaaacataaaatggtgcggcattgacggcgatgaaaacattcttgttattgatttactcggaccaagccttgaagatctgtttgtttattgtggccggagattctcactgaagacggtcttgatgctagcggaccagatgataacaagaatagaatttatgcattctaaaggctatctgcacagagacatcaagcctgataacttcctcatgggccttggtcgaaaagctaaccaggtttatgtaattgacttcgggcttgcaaagagatatcgtgattcagccaccaaccgccatataccttatagagaaaataaaaacttgactggcacagctcgctatgctagccgtaatactcatcttgggattgagcaaagccgcagagatgatttggaatcgatcggatacgttcttctgtatttccttaggggaagtcttccttggcagggcttgaaagcagccacaaagaaacagaagtatgacaaaataagtgagaagaagctttcgactcctattgaggctctatgtaaatcccatcctgtggaatttgcttcctatttccactactgccattctctgacatttgatcagcgtcccgattatagtttcttgaggcatgtctttcgagaattgtttgagcgcgaaggctatcaatttgattatgtgtatgactggactttgttgaagtgtaagcaatcccagaaggctaaggttcagcaaggatgctctcatgatgcaggcgtaagcagccgtccagttgcaacaaacgtggacaagcaccaagttggtgttgcacgcccaattaatgcttcaggtctgcttgaagcagaacaacgcccggcaatcagaatgcaattaaacagccgttccaataatctgcatcctgagagattgggagtgtctgctagtcataataatgtactgctgcaatccacgtcacttgacaatgctgatgctccaatggaccacgcgacacattcaaaagcacaggggtccattgatccacacactcgtggaagttatagtccagggccctctaaccgcacttaaccttttgcattgttcgtaaaagcttgcgggtccatgcagtaaacaattggttgcctgatgtagtttcatggatgcattctggacaaacatccaatgcttcttagttgcatgaggccattgctggaaatagctgtcggatttttatgaggacttctgtattgcttgagcttccattgtgttgaacacaaaattacaccatgcaaaacatcgcgaagaggtatctgggaagtttatgattggttagcatgcacattcaatgacatatgcatgcatcagttaggacaacgcctcttcgctaaaagtgaatatccgaccagtattgacctgcagtttccagtgtcttgacaccaaatcgccatacaaaaactacagagtggtggtatacgggaagttcatggttggttagcatacaccctctttgctgaaaggctgtcatattctacttggattggccgcagcttgcaatgtatgacaccaaatagcaccatacaaagactatgaagaggtctgggaagcttatgattgggtagcatccatgtatctataactgtgaccgcaactttgaagaaacacatgctgtggctcatggcctcgagataaaaaaaggttaaattgcaatcgacaacaatctggttgggcagaggtaaatatcatgccgtgctcctgtcatagacatggttgcctgtattttatttgaatgagggttgaatagcttataacattgtgaggaagtcctaccacatattgatttttcatgttggtgttttttttgttggcattctctctccagttgtcataaaaacaatgaactgtacataatttcttagaagggctgttcttaagtgttgaggtggaatgagatgatttacttgataaaagtgtacatatttaggtatccctcatttttctgattgcatcaatatctttcaatgatataacgctggttccgaa

SEQ ID NO: 45754 - DNA, 2328 bp, Zea Mays
ccgacattactttttttttctcaccgtcgcgtcttgcgctgcaaaatctaatccgtttccgaccttctagaagccttcaacccgccactttgcccactctcctcttccttctttgctacccatttcgtcgcagtagtcggcagtcgaaaccctagtcccctcgctttccttccactcgccgtcgcggcgccgatagagccagagctgaaaggcgtaggaaaagctggtggaggaggggatggaccggatcgtaggcagcaagtacaagctgggtcgcaagatcggaagcggttccttcggggagatctacctcgcgacgcacgtcgacacctacgagatcgtcgccgtcaagattgaaagcagcaaaaccaatcatccacagttgctatatgaggccaaactgtacaatgctcttcaaggagggactggtatcgcaaacataaaatggtgcggcattgacggcgatgaaaacattcttgttattgatttactcggaccaagccttgaagatctgtttgtttattgtggccggagattctcactgaagacggtcttgatgctagcggaccagatgataacaagaatagaatttatgcattctaaaggctatctgcacagagacatcaagcctgataacttcctcatgggccttggtcgaaaagctaaccaggtttatgtaattgacttcgggcttgcaaagagatatcgtgattcagccaccaaccgccatataccttatagagaaaataaaaacttgactggcacagctcgctatgctagccgtaatactcatcttgggattgttttgttgccagagcaaagccgcagagatgatttggaatcgatcggatacgttcttctgtatttccttaggggaagtcttccttggcagggcttgaaagcagccacaaagaaacagaagtatgacaaaataagtgagaagaagctttcgactcctattgaggctctatgtaaatcccatcctgtggaatttgcttcctatttccactactgccattctctgacatttgatcagcgtcccgattatagtttcttgaggcatgtctttcgagaattgtttgagcgcgaaggctatcaatttgattatgtgtatgactggactttgttgaagtgtaagcaatcccagaaggctaaggttcagcaaggatgctctcatgatgcaggcgtaagcagccgtccagttgcaacaaacgtggacaagcaccaagttggtgttgcacgcccaattaatgcttcaggtctgcttgaagcagaacaacgcccggcaatcagaatgcaattaaacagccgttccaataatctgcatcctgagagattgggagtgtctgctagtcataataatgtactgctgcaatccacgtcacttgacaatgctgatgctccaatggaccacgcgacacattcaaaagcacaggggtccattgatccacacactcgtggaagttatagtccagggccctctaaccgcacttaaccttttgcattgttcgtaaaagcttgcgggtccatgcagtaaacaattgcttccattgtgttgaacacaaaattacaccatgcaaaacatcgcgaagaggtatctgggaagtttatgattggttagcatgcacattcaatgacatatgcatgcatcagttaggacaacgcctcttcgctaaaagtgaatatccgaccagtattgacctgcagtttccagtgtcttgacaccaaatcgccatacaaaaactacagagtggtggtatacgggaagttcatggttggttagcatacaccctctttgctgaaaggctgtcatattctacttggattggccgcagcttgcaatgtatgacaccaaatagcaccatacaaagactatgaagaggtctgggaagcttatgattgggtagcatccatgtatctataactgtgaccgcaactttgaagaaacacatgctgtggctcatggcctcgagataaaaaaaggttaaattgcaatcgacaacaatctggttgggcagaggtaaatatcatgccgtgctcctgtcatagacatggttgcctgtattttatttgaatgagggttgaatagcttataacattgtgaggaagtcctaccacatattgatttttcatgttggtgttttttttgttggcattctctctccagttgtcataaaaacaatgaactgtacataatttcttagaagggctgttcttaagtgttgaggtggaatgagatgatttacttgataaaagtgtacatatttaggtatccctcatttttctgattgcatcaatatctttcaatgatataacgctggttccgaa

SEQ ID NO: 45755 - DNA, 1379 bp, Zea Mays
aacccgccactttgcccactctcctcttccttctttgctacccatttcgtcgcagtagtcggcagtcgaaaccctagtcccctcgctttccttccactcgccgtcgcggcgccgatagagccagagctgaaaggcgtaggaaaagctggtggaggaggggatggaccggatcgtaggcagcaagtacaagctgggtcgcaagatcggaagcggttccttcggggagatctacctcgcgacgcacgtcgacacctacgagatcgtcgccgtcaagattgaaagcagcaaaaccaatcatccacagttgctatatgaggccaaactgtacaatgctcttcaaggagggactggtatcgcaaacataaaatggtgcggcattgacggcgatgaaaacattcttgttattgatttactcggaccaagccttgaagatctgtttgtttattgtggccggagattctcactgaagacggtcttgatgctagcggaccagatggtttatgtaattgacttcgggcttgcaaagagatatcgtgattcagccaccaaccgccatataccttatagagaaaataaaaacttgactggcacagctcgctatgctagccgtaatactcatcttgggattgagcaaagccgcagagatgatttggaatcgatcggatacgttcttctgtatttccttaggggaagtcttccttggcagggcttgaaagcagccacaaagaaacagaagtatgacaaaataagtgagaagaagctttcgactcctattgaggctctatgtaaatcccatcctgtggaatttgcttcctatttccactactgccattctctgacatttgatcagcgtcccgattatagtttcttgaggcatgtctttcgagaattgtttgagcgcgaaggctatcaatttgattatgtgtatgactggactttgttgaagtgtaagcaatcccagaaggctaaggttcagcaaggatgctctcatgatgcaggcgtaagcagccgtccagttgcaacaaacgtggacaagcaccaagttggtgttgcacgcccaattaatgcttcaggtctgcttgaagcagaacaacgcccggcaatcagaatgcaattaaacagccgttccaataatctgcatcctgagagattgggagtgtctgctagtcataataatgtactgctgcaatccacgtcacttgacaatgctgatgctccaatggaccacgcgacacattcaaaagcacaggggtccattgatccacacactcgtggaagttatagtccagggccctctaaccgcacttaaccttttgcattgttcgtaaaagcttgcgggtccatgcagtaaacaattggttgcctgatgtagtttcatg

SEQ ID NO: 45756 - DNA, 765 bp, Zea Mays
gtcagacaattttcaccaaacttagccgcgaagatgaggccacccatatgttgtcgacctcgctggatctttgtcatgttgctttctacagatacatcatgattggcacaaatgtgtgtttctcatcttgtcagcaatccccttttacctgtggtttttatttaaacaattgatgtctgcggttgtattgtgagccaagacctatttgttatcaacttggtaattgttaagaagggtgagaaaatctgcctggtttgactgacactgagaagccaaggatgaggggtcccaagagggcctccaagatgaggaagcttttcaacctttccaaggatgatgtacacaagcaagaaggtgagcaaggcacctaagattcagtggcttatgaccccgtgacccttcagaggaagcgcgctagaatcactgataagaagaagaagatcgctaaggagtctgaggctgccgagtaccaaaatcttcttgccagaggctaaaggaaaaaagagaccgctgcaacgagagcttggcaaagatgaggtctaagccttctgtcgctgccacctctgcttaagaatatttagtgctttgagatgttttcaaggcctatcttgttacagcttaagcaccttatgatgccctagttgtgttgcaactgccctgtaattgacagatttgtatttgatgctcaggatgtagagagtaggttcctaattatgaccatgtactaaattatatatctgtgtctaagttatagtacaaacaaaa

SEQ ID NO: 45757 - DNA, 753 bp, Zea Mays
gtcagacaattttcaccaaacttagccgcgaagatgaggccacccatatgttgtcgacctcgctggatctttgtcatgttgctttctacagatacatcatgattggcacaaatgtgtgtttctcatcttgtcagcaatccccttttacctgtggtttttatttaaacaattgatgtctgcggttgtattgtgagccaagacctatttgttatcaacttggtaattgttaagaagggtgagaaaatctgcctggtttgactgacactgagaagccaaggatgaggggtcccaagagggcctccaagatgaggaagcttttcaacctttccaaggatgatgtacacaagtacgtgaacacatacaggacattcactaccaagaacggcaagaagaggaagcgcgctagaatcactgataagaagaagaagatcgctaaggagtctgaggctgccgagtaccaaaatcttcttgccagaggctaaaggaaaaaagagaccgctgcaacgagagcttggcaaagatgaggtctaagccttctgtcgctgccacctctgcttaagaatatttagtgctttgagatgttttcaaggcctatcttgttacagcttaagcaccttatgatgccctagttgtgttgcaactgccctgtaattgacagatttgtatttgatgctcaggatgtagagagtaggttcctaattatgaccatgtactaaattatatatctgtgtctaagttatagtacaaacaaaa

SEQ ID NO: 45758 - DNA, 203 bp, Zea Mays
ttcatgcttttgttggttttcaagtttgggcaactgatgttggaataagctgcttattgtttctcttcttgtattgaagaataggtatgggactgcattactgggtcttgcctatatatgccgaagggcgatgatcaaatttcagtgaggcatattcaggtatgggactacattactaggtcttgcctatatacgtcgggtgg

SEQ ID NO: 45759 - DNA, 614 bp, Zea Mays
ggcagttccaaccacctcgctgtgtcccttgaccctccacccataaaccggaatcggagccagacacagagaacagagaagtcgccgttggtgccgaagagaagatggagccatcttggtcgactcatgcgtacatcgctgctccaccttcggaggtttgccatggacgatctctagggttcgcgtaacgtatccgtggtggttgcgggagtgatgggctgttggggtggctgggattcatcaccggagactcagagccgcgccacagcataggcggcaccactagcgtcctcgcttcagcgagcatccgtcgtaggagctcggcggcgctgcctagggttgttcgtgatagggagaggagcgtcaatcgtagaccccggatgaaacggtggagattggatctcatgggcacggttcggggatgggtgccgtcgatcgcgtagcatacagttctgattaaaagtagagtaagaattcggttacgcccctttggatcaatgtaattgaattccattctaagctaattcggttttatgtaaattatatttgtatactaagctaattcggttttatggaaattatatttgtatactattattagtaatattttggag

SEQ ID NO: 45760 - DNA, 295 bp, Zea Mays
gcacgatactgtcatatgtttgcttctgagatttcactgcatcaacagatgctggtttgttagaaattggaatgatgtagctattaaattcttgcctaatccatcacaagcaatgtctcaaagaactttggattcctgacatttgaatcacctgtcgactcctgttttggaaaataccagtgcttaaattttgagaatctttttgcaactaagcgctatgatgtagccatttttgttagacaaatgttaccactgtccgctgctttcattgacaagatttatgccgtacttaacg

SEQ ID NO: 45761 - DNA, 2183 bp, Zea Mays
tgcgtgtcacccccgtgttggcctggcagcacgacctcatcacggcacggcgtccttaagcttcccttccggccttcccccacctcccacccgcgatctccgcgaccgcaagcagctcggcaggcaggcctccaccgctccaccacctccactcggtctacgtgctccgtcaccaaacccacccgggccaacgccgaagcaaccccccctccgtcctccccagatccggcgccgcctccgccctcacttacactagcacgcacggcggacacgtcgcctcccccgcgcgatctgatgcaggcgcacgcggtggccagcggcgatgcggtggaagcttaactcctccgtctacaagcgcgtgccgtccagggaaaccgccatggaacccgacgtcgagacgccaatgagaatgacggacggcggcggcagcggcgcggggccgtcgtggcgcatgtcgttgccgcatgtctgtgtcgccacgctcacctcgttcctctttggataccactccggggtggtgaacgagcccttggaggtcatctccgctgaccttggcttcgccggcaacactcttgctgaagggctcgtggtgagtatctgtttgggaggagcttttgttgggtgcctcttcagcggctccatcgcagatggtattgggcgacgccgtgcgttccagctcagtgcgctgcctatgattattggtgctgccataagtgctctctccaatagtttggagggtatgctccttggaagatttttggtaggaacagggatgggattgggtccaccagtagcttcactttatataacggaggtttctccttctacagtgaggggtacatatggtagctttgttcagattgcaacctgccttggaattatagtatcactactcattggtacacctgtcaaagatattgatagatggtggagagtgtgtttctgggttgccgttatcccagcaactttacaagctctcggtatggagttttgtgctgagagccctcagtggctttataagtgtggaaaaataagtgaagcagagatgcaatttgaaaagcttttaggtccccttcatgtaaaatctgccatggcagaactttctagatatgaaagagtagatgatggagaaagtgtcaagtactcagagttgttctatggtcgccacttcaatgttgtttttattggcacaacgctctttgctttacaacagttatccggcataaattctgtgttctatttctcatcaactgtattcagaagtgtgggggtgccctctaaccttgccaacatatgcatggggatttctaatctatcaggatcaattgtagcaatgcttctaatggacaagctaggtagaaaagtgcttctttcagggagttttcttgggatggcttttgcaatggggcttcaggctgttggagcaaaccgtcagtatcttggttctgcatgtgtatatctttcagttggtggcattctgttgtttgtcttgtcattttcactaggagcaggccctgtcccaggacttcttttgcctgagattttccctaataaaatccgagctaaggctatggctctctgcatgtctgtacattggatcgtgaacttctttgttagtttgatgttcttgcgtcttctggagcaacttggtccacagcttctctacacaatattttcgtcagtctgtgtggtagcctcaatatttgtgaggcgccatgtgttggagacgaagggaaagactttacaagagatagaggtttcactcctgcaaccacaataaaggtacatatttgacgtggctggaaccttgggcaggctgtttgctgaacagaaacaagctggccctgcagaagttgattcctgaagtcatcggcaacgccctacaaatggtctcagggaagttccagatatgcgcctgcgacagctagggcggtgtttccatagagcatcatgtactgaagttatgcctgtatcgcccgccctagataggatattttcatacttgtgttgtcatctgttctatctatgagtcgtaatatcagaaaaaaaaggtactactgttttaccgttgatgagcacagttgaaaaaaggaactatcatcttcattttacatgtatgtactcagtaaccatactccgaataataacactgcatggagattccttgttagacggtaaaaaga

SEQ ID NO: 45762 - DNA, 2137 bp, Zea Mays
tgcgtgtcacccccgtgttggcctggcagcacgacctcatcacggcacggcgtccttaagcttcccttccggccttcccccacctcccacccgcgatctccgcgaccgcaagcagctcggcaggcaggcctccaccgctccaccacctccactcggtctacgtgctccgtcaccaaacccacccgggccaacgccgaagcaaccccccctccgtcctccccagatccggcgccgcctccgccctcacttacactagcacgcacggcggacacgtcgcctcccccgcgcgatctgatgcaggcgcacgcggtggccagcggcgatgcggtggaagcttaactcctccgtctacaagcgcgtgccgtccagggaaaccgccatggaacccgacgtcgagacgccaatgagaatgacggacggcggcggcagcggcgcggggccgtcgtggcgcatgtcgttgccgcatgtctgtgtcgccacgctcacctcgttcctctttggataccactccggggtggtgaacgagcccttggaggtcatctccgctgaccttggcttcgccggcaacactcttgctgaagggctcgtggtgagtatctgtttgggaggagcttttgttgggtgcctcttcagcggctccatcgcagatggtattgggcgacgccgtgcgttccagctcagtgcgctgcctatgattattggtgctgccataagtgctctctccaatagtttggagggtatgctccttggaagatttttggtaggaacagggatgggattgggtccaccagtagcttcactttatataacggaggtttctccttctacagtgaggggtacatatggtagctttgttcagattgcaacctgccttggaattatagtatcactactcattggtacacctgtcaaagatattgatagatggtggagagtgtgtttctgggttgccgttatcccagcaactttacaagctctcggtatggagttttgtgctgagagccctcagtggctttataagtgtggaaaaataagtgaagcagagatgcaatttgaaaagcttttaggtccccttcatgtaaaatctgccatggcagaactttctagatatgaaagagtagatgatggagaaagtgtcaagtactcagagttgttctatggtcgccacttcaatttatccggcataaattctgtgttctatttctcatcaactgtattcagaagtgtgggggtgccctctaaccttgccaacatatgcatggggatttctaatctatcaggatcaattgtagcaatgcttctaatggacaagctaggtagaaaagtgcttctttcagggagttttcttgggatggcttttgcaatggggcttcaggctgttggagcaaaccgtcagtatcttggttctgcatgtgtatatctttcagttggtggcattctgttgtttgtcttgtcattttcactaggagcaggccctgtcccaggacttcttttgcctgagattttccctaataaaatccgagctaaggctatggctctctgcatgtctgtacattggatcgtgaacttctttgttagtttgatgttcttgcgtcttctggagcaacttggtccacagcttctctacacaatattttcgtcagtctgtgtggtagcctcaatatttgtgaggcgccatgtgttggagacgaagggaaagactttacaagagatagaggtttcactcctgcaaccacaataaaggtacatatttgacgtggctggaaccttgggcaggctgtttgctgaacagaaacaagctggccctgcagaagttgattcctgaagtcatcggcaacgccctacaaatggtctcagggaagttccagatatgcgcctgcgacagctagggcggtgtttccatagagcatcatgtactgaagttatgcctgtatcgcccgccctagataggatattttcatacttgtgttgtcatctgttctatctatgagtcgtaatatcagaaaaaaaaggtactactgttttaccgttgatgagcacagttgaaaaaaggaactatcatcttcattttacatgtatgtactcagtaaccatactccgaataataacactgcatggagattccttgttagacggt

SEQ ID NO: 45763 - DNA, 2138 bp, Zea Mays
tgcgtgtcacccccgtgttggcctggcagcacgacctcatcacggcacggcgtccttaagcttcccttccggccttcccccacctcccacccgcgatctccgcgaccgcaagcagctcggcaggcaggcctccaccgctccaccacctccactcggtctacgtgctccgtcaccaaacccacccgggccaacgccgaagcaaccccccctccgtcctccccagatccggcgccgcctccgccctcacttacactagcacgcacggcggacacgtcgcctcccccgcgcgatctgatgcaggcgcacgcggtggccagcggcgatgcggtggaagcttaactcctccgtctacaagcgcgtgccgtccagggaaaccgccatggaacccgacgtcgagacgccaatgagaatgacggacggcggcggcagcggcgcggggccgtcgtggcgcatgtcgttgccgcatgtctgtgtcgccacgctcacctcgttcctctttggataccactccggggtggtgaacgagcccttggaggtcatctccgctgaccttggcttcgccggcaacactcttgctgaagggctcgtggtgagtatctgtttgggaggagcttttgttgggtgcctcttcagcggctccatcgcagatggtattgggcgacgccgtgcgttccagctcagtgcgctgcctatgattattggtgctgccataagtgctctctccaatagtttggagggtatgctccttggaagatttttggtaggaacagggatgggattgggtccaccagtagcttcactttatataacggaggtttctccttctacagtgaggggtacatatggtagctttgttcagattgcaacctgccttggaattatagtatcactactcattggtacacctgtcaaagatattgatagatggtggagagtgtgtttctgggttgccgttatcccagcaactttacaagctctcggtatggagttttgtgctgagagccctcagtggctttataagtgtggaaaaataagtgaagcagagatgcaatttgaaaagcttttaggtccccttcatgtaaaatctgccatggcagaactttctagatatgaaagagtagatgatggagaaagtgtcaagtactcagagttgttctatggtcgccacttcaatgttatccggcataaattctgtgttctatttctcatcaactgtattcagaagtgtgggggtgccctctaaccttgccaacatatgcatggggatttctaatctatcaggatcaattgtagcaatgcttctaatggacaagctaggtagaaaagtgcttctttcagggagttttcttgggatggcttttgcaatggggcttcaggctgttggagcaaaccgtcagtatcttggttctgcatgtgtatatctttcagttggtggcattctgttgtttgtcttgtcattttcactaggagcaggccctgtcccaggacttcttttgcctgagattttccctaataaaatccgagctaaggctatggctctctgcatgtctgtacattggatcgtgaacttctttgttagtttgatgttcttgcgtcttctggagcaacttggtccacagcttctctacacaatattttcgtcagtctgtgtggtagcctcaatatttgtgaggcgccatgtgttggagacgaagggaaagactttacaagagatagaggtttcactcctgcaaccacaataaaggtacatatttgacgtggctggaaccttgggcaggctgtttgctgaacagaaacaagctggccctgcagaagttgattcctgaagtcatcggcaacgccctacaaatggtctcagggaagttccagatatgcgcctgcgacagctagggcggtgtttccatagagcatcatgtactgaagttatgcctgtatcgcccgccctagataggatattttcatacttgtgttgtcatctgttctatctatgagtcgtaatatcagaaaaaaaaggtactactgttttaccgttgatgagcacagttgaaaaaaggaactatcatcttcattttacatgtatgtactcagtaaccatactccgaataataacactgcatggagattccttgttagacggt

SEQ ID NO: 45764 - DNA, 2079 bp, Zea Mays
tgcgtgtcacccccgtgttggcctggcagcacgacctcatcacggcacggcgtccttaagcttcccttccggccttcccccacctcccacccgcgatctccgcgaccgcaagcagctcggcaggcaggcctccaccgctccaccacctccactcggtctacgtgctccgtcaccaaacccacccgggccaacgccgaagcaaccccccctccgtcctccccagatccggcgccgcctccgccctcacttacactagcacgcacggcggacacgtcgcctcccccgcgcgatctgatgcaggcgcacgcggtggccagcggcgatgcggtggaagcttaactcctccgtctacaagcgcgtgccgtccagggaaaccgccatggaacccgacgtcgagacgccaagttcgtgccgcatgtttcccccggttcctcttaccaccggttaatttatgggtggtgaacgagcccttggaggtcatctccgctgaccttggcttcgccggcaacactcttgctgaagggctcgtggtgagtatctgtttgggaggagcttttgttgggtgcctcttcagcggctccatcgcagatggtattgggcgacgccgtgcgttccagctcagtgcgctgcctatgattattggtgctgccataagtgctctctccaatagtttggagggtatgctccttggaagatttttggtaggaacagggatgggattgggtccaccagtagcttcactttatataacggaggtttctccttctacagtgaggggtacatatggtagctttgttcagattgcaacctgccttggaattatagtatcactactcattggtacacctgtcaaagatattgatagatggtggagagtgtgtttctgggttgccgttatcccagcaactttacaagctctcggtatggagttttgtgctgagagccctcagtggctttataagtgtggaaaaataagtgaagcagagatgcaatttgaaaagcttttaggtccccttcatgtaaaatctgccatggcagaactttctagatatgaaagagtagatgatggagaaagtgtcaagtactcagagttgttctatggtcgccacttcaatgttatccggcataaattctgtgttctatttctcatcaactgtattcagaagtgtgggggtgccctctaaccttgccaacatatgcatggggatttctaatctatcaggatcaattgtagcaatgcttctaatggacaagctaggtagaaaagtgcttctttcagggagttttcttgggatggcttttgcaatggggcttcaggctgttggagcaaaccgtcagtatcttggttctgcatgtgtatatctttcagttggtggcattctgttgtttgtcttgtcattttcactaggagcaggccctgtcccaggacttcttttgcctgagattttccctaataaaatccgagctaaggctatggctctctgcatgtctgtacattggatcgtgaacttctttgttagtttgatgttcttgcgtcttctggagcaacttggtccacagcttctctacacaatattttcgtcagtctgtgtggtagcctcaatatttgtgaggcgccatgtgttggagacgaagggaaagactttacaagagatagaggtttcactcctgcaaccacaataaaggtacatatttgacgtggctggaaccttgggcaggctgtttgctgaacagaaacaagctggccctgcagaagttgattcctgaagtcatcggcaacgccctacaaatggtctcagggaagttccagatatgcgcctgcgacagctagggcggtgtttccatagagcatcatgtactgaagttatgcctgtatcgcccgccctagataggatattttcatacttgtgttgtcatctgttctatctatgagtcgtaatatcagaaaaaaaaggtactactgttttaccgttgatgagcacagttgaaaaaaggaactatcatcttcattttacatgtatgtactcagtaaccatactccgaataataacactgcatggagattccttgttagacggt

SEQ ID NO: 45765 - DNA, 885 bp, Zea Mays
ctccctcactagactcgaccctcgccggccgtcctgctagagatgtggttccgtacggagtgacttcggctagtgtatcactgatgactctaaatatgccaggcaagggttacacgagtagagttcgttgtcgggagcagcagcgacgaacgacaatagtatctatgcttggaaggaaatcaacggctagagcaactgttgtcccagaccccgactataggttaccaatcgctatacttgggattgctagtgcttttgcatatgccgacaatcttctcgctgctgcacctgtaggactgctggggcttcttcttttgttccagactacaagagtgaggttcgtctttgataacgaggccctggaggtgaaggttggagagcagctgcaggagtcaggtgaaaatgtattcgtcggcggcaagaaccgttggaagtactcaacgttcgtaaactgggagctgtggtggccacagtttcctgtcttggtttacttcaaggagacccaaacgaagcccgaaggacagatccacttcttccctgtgatattcgatggtcgacaattgtacgatgtgatggtggagcgtgctgggccctcgaagacgagtggccctaaatagttgcagctgatcttcctaccgtcgttttgctccctcgggctccctcacatttaaattgtaaaaatggtaaaattatatacaaacggggttcgattccaaccacggttcttagctttaaacccatcttcatacgtacctaaccaacaaaaacacacatctatgtgttttatattttatattttgtatttaaacataaatataaatataaatcgtaacaatatatatatatatatatatatatattgttaggatcgtaggtgggaaaaag

SEQ ID NO: 45766 - DNA, 943 bp, Zea Mays
ccaagatctcctcctccctcactagactcgaccctcgccggccgtcctggcaagggttacacgagtagagttcgttgtcgggagcagcagcgacgaacgacaatagtatctatgcttggaaggaaatcaacggctagagcaactgttgtcccagaccccgactataggttaccaatcgctatacttgggattgctagtgcttttgcatatgccgacaatcttctcgctgctgcacctgtaggactgctggggcttcttcttttgttccagactacaagagtgaggttcgtctttgataacgaggccctggaggtgaaggttggagagcagctgcaggagtcaggtgaaaatgtattcgtcggcggcaagaaccgttggaagtacgcaggcggcctgttgatccttcacacgtcctttttttcagttttgtgtatcatcatgataacttgataagagggggtttacgatctaataacccaaggcatgcataggtactcaacgttcgtaaactgggagctgtggtggccacagtttcctgtcttggtttacttcaaggagacccaaacgaagcccgaaggacagatccacttcttccctgtgatattcgatggtcgacaattgtacgatgtgatggtggagcgtgctgggccctcgaagacgagtggccctaaatagttgcagctgatcttcctaccgtcgttttgctccctcgggctccctcacatttaaattgtaaaaatggtaaaattatatacaaacggggttcgattccaaccacggttcttagctttaaacccatcttcatacgtacctaaccaacaaaaacacacatctatgtgttttatattttatattttgtatttaaacataaatataaatataaatcgtaacaatatatatatatatatatatatatattgttaggatcgtaggtgggaaaaag

SEQ ID NO: 45767 - DNA, 618 bp, Zea Mays
cccacccgacctctctctctcatcccttctcttccctctctcttctctctaccacgacgcgccaaggatcaagcgcacgcgacgcccgacgcccgacgccccgactgcctcgacccgccagcgcccaggaagacccgacgccgccaacgcccaggaagactcgaccgaaccctaacttcttgccgccgccacctcctcttactcgcatgccaccgtcgctcccctgggcgcaaacccgctgtcgctcagcccggcgcacgggatcgggcggtccggggacgccggcagtacacacccgtcgtcggtttccgcaggtggcgcgccctgatgtcacgcggtatgttccaatgtttgtggagatagagtacgatccgaactgctagtacacatctgttctaattgaagagcaactggaggctcttggaagagcaatagttgctggcaagacaggcaattgaaaatgagaattgatcttttttatgggcgaagtgttgaagatggctttggtgaaggaaatgtcttgttagcatcaagtaagtggcgacatcacaacccctacaagcttgtgccttaaaacaagaggatacaagaagttggagtgctttttgtgaagacttt

SEQ ID NO: 45768 - DNA, 599 bp, Zea Mays
ttctcccacccgacctctctctctcatcccttctcttccctctctcttctctctaccacgacgcgccaaggatcaagcgcacgcgacgcccgacgcccgacgccccgactgcctcgacccgccagcgcccaggaagacccgacgccgccaacgcccaggaagactcgaccgaaccctaacttcttgccgccgccacctcctcttactcgcatgccaccgtcgctcccctgggcgcaaacccgctgtcgctcagcccggcgcacgggatcgggcggtccggggacgccggcagtacacacccgtcgtcggtttccgcaggtatgttccaatgtttgtggagatagagtacgatccgaactgctagtacacatctgttctaattgaagagcaactggaggctcttggaagagcaatagttgctggcaagacaggcaattgaaaatgagaattgatcttttttatgggcgaagtgttgaagatggctttggtgaaggaaatgtcttgttagcatcaagtaagtggcgacatcacaacccctacaagcttgtgccttaaaacaagaggatacaagaagttggagtgctttttgtgaagacttt

SEQ ID NO: 45769 - DNA, 1197 bp, Zea Mays
gttaatttgttcttgcattttgcaatcactttaacaaatcaaaaacttctctttaaacctaacctacagtgaaatctcggctgcagtagtagacagttgatagatggagtatagttggaatgattctatgtacgggtatgcttgtacatgtactaacttttctggaatcaagctgagtagagaatagcagcactacaaattaacagtccatttgaatccatttttttattttttattttcagccttgatgatgagcccccgcttagcttattagcaatggtagtacatcatgattctcactctgaagctgttattgactaggagttgacgacgataaaatgtacgagttagcttagcaatgggcatatggctgcaaccacgactattgatggtcacaattggatgtatccacttacatttggatttatagatggtgaaactgatgacaattgggtgtggttcatgaggcaacttcacagggaaataggagatcttacttcgcttgctgtttgtacagatacatgcaaagggttagaaaatgaagaaaaggttgtgtttcctcgggctgaccatacgaaattctttagacatcttatgcagaattttattaagagacaagcgtagggagatgattatggtgttgtgggaaaaaaggagaagaattggagacaacttactggcaagatcttacctgcagttttacagctattttcccccaagttcaaggttctgttttccatgttgaagatggtgtttttcagttgaagatattatccatgatgatggcgctatttttccccaagttgaaggtgctatccaagttgaaggtgctgtccataatggaagagctattttccccatgttgaagctgatgttgtccatgttcaagctgatgtccaaatccagtcacgacccaagactacaactaagaagttcctatcgaagaagttcacaccaaggaagctgaagaggatgtgacaacgcttaaatgaaccttgataggatgtccaaattgaactatatttggatgttaactaagccagtgttagaagtaaggaacaattggatctataccattaaaagatccaaactttagatatataccatggaccccacatgtcattgactcatgtggacccacatgtaagtgagatagtaatggtatggatccaaagtggtgatcttttaatggtatga

SEQ ID NO: 45770 - DNA, 2944 bp, Zea Mays
ccggaccccactggtacaccgacgcgcacggacgctccccattatggccagctgcccagctacgcgtacggcgtaccacaccaccagtgcagcaccacactgactggacacagtagagcagagtagaagagtcctcgagcggccatcaccaattccccaagctatcttttttttttatgagcaagcaccaggcattccattgccagtttgccactacaagtagttgcagcagcagctaatcagtcagcaactaggcaccaaaccatcacttcactcccacctctctgcgccctgcacctgcacataggtactacgatcaccacacgcgcaccaagcccaagaaccgtgcgcgcgccatggccgagaagccgcctctgtcggccaagcctcccctgccgtccaagccgaggcctaaggcggcgtcggcggcaaggccgacaacgacgacgccggcccccggcagcaggccggccgcgtcgcccttcaagaagcccacgctcgcgccgccgcaggtgctcccgctcaagccgccgccggcgcaccagtaccgccagcagcagcagcagcagcacccggcgcccccgggcggtgcccggaagccgcgggcgtaccgccagcagcagccgcacccgcaccgccgcggccgcgggtgctcgtgccgccgcgcgtgctgcctggccacgggcctcgcgctgctcgcgctctgcctggcgctggccgccgcctgcctggcctacctctactaccggccgcgcgcgccgtcgttccacctgcagccgctggcccccgtgcgcctccgcctcggcagcaacgcctccaccgtggacgccaccgtcggcgcccgcgtcgtgtcgtggaaccccaacgagcgggtcgagttccggtacggcgacggcgagggccgcgtcgcgctggccgaccccgacggcgacgtcgcgctcgggtgggcccccgtgcggggctttgcccacgcgccgcgccgcgtcgccgccgtcgcgttcgtggccaccgccaggggcgtcgtgctcgacgacgccgtcgcggcgcgcgtgcgcgacaggtaccggcggcggcggcaggggttcagggtggtcgtggacgcccacgtcggcgtccgcgtcggggcgctgcgcacggggatggtgccgctcaggctgctgtgcgatgacggcgtgatggcgccgcgcgctgtggggtcgtccgatggggccgtggtggggcccatgaccaagtgccaggtgctcctgttcagagtaagatggtttagcctgaactgagggaaaatctggagcaaggcagctatagctgaccatcgagctgatacccagaggcgccggagctgcagacgccgtaaattatctgcatgtgtttgccgacaagatgaaggtgattgatttgctacggactttttgattggtgatggatgcatggtctgaagactccgaagcacacgtagaaaacaaagtttgtaactgtatattacactccaggtcccaattcttttgattgtgtggtgtatacattaatacatagcaggaatggaaagaacgatgggtgtgttcctgtcagtcgaaagttgaaacacatacaattgtttctccattgccttaaaactagtattgagatgacgactctgatctgaatttgagcaatctgccaccaaggtttaaagcagcagcaacaacaacagtcttctaattccaaataagttggagtaggctagaattgaaacctaaccataatttacggttcagacacaatgggtagctcttttttttgtgtgaaattgatttagtactacttgtatatcttcagagatgaggtgaggagagttcctgttctggctgtacatagatattaagatatatttaagtatagaacatgaaccattggctggtcgaaagtcacatgttattcatgcgatatcaaactgccaatgttcagaaacaaggtaaatgtttttgttaaaaaagaaattaagtaaatggtgcttacacatgatgtttcgcatttcaccattcaaacattccaatgtcacaagcatgagtaccgacaacaaaaagccccgcatgaaccttcagatgattggtatagtatcatcagagcacacatagcaaaaaggtttccggtgaaaaatacccacgcaatccaatttggaaaactgctccgacaaaacttcaatactgatttcctggttcatgtttttattagaagccttccttcaaggcataaactctgctacggaaagacggtggcaatttgtttattgccgcatcaatttcctgcaaacagaatagccataactaatgagatttagattttcggggcagacactgttcttgctaaaaagaaagtcgtcagagaaggtcaagagaataactagcttactcacaaacaatgcaaaacaaacaggccaaatttccaagactactgcaaaaggagcaaaaacaactgattttttcttcatgatgtttacaacttcagagtagaaacgagatgtgcatgttggtaaagttgtttttgggaaaaacaaacttgaatagcaacatggaagtgaagcatcttaagtatgaatggaattaggatagtttggccacatagaagtagtcaaaatggaattaaataatcgaaaaccaaaaattgcaggcagccatagcatttcaatggatcgaactgaaaaaatggttaggtatcagcccacctctgtagtataacgagcagaaaagtggatcagtagaatagctttgttttgaagcttgtcggcctgacttgttatctgtgtttccaagggtagatacaatttgacattttgaaagttgaataaacaagtttgggatacctcaaataaaaacttaaatcagatacctcaaataaatgtgtgtgcccatattctcttgcatgctcaactgaaattgagtcgtctagaaaggtactctgaattgac

SEQ ID NO: 45771 - DNA, 1730 bp, Zea Mays
ggtaccaccacgtccaaaacgtttggagcccttttcctaatcttgctgctaccgcgcgctccctctccccggccatttctctcatttcgccctccctccgccggctagggttactgccaccgccttccacccctccccgactgcccgtgggtggaggaggctggttggcgtgcagggtacctcggcggcggagatggagccggacttctcgaccgtgggcgggcccagctttgagttcgctttcaacgaggccaacttctccgaccgggaattgcggatcgaggtcgtcgcgggggattacgacgcgccggggtccactggcggcggttccggaggaggtggcctcgccgactgggcgcgccatcggaagcgccgacgcgaggagctcttcaaggagaaagaatctacaacctacatgtcagaccaaactaattttaatgaagtcgaagcagaagagtgtgatgcatatgaagaaaatcaagaggaacctgtagcaatgatggaaggatctccacctgatgttgatcaagatggtgatgatgagcaaggtattgatccatcttgggctgctgtggttacgccggttttacgagtcaagacaatttatatcagttcggcgattcttgctgcgaagagtcctttctttttcaagcttttctcaaacggcatgaaagaatcggaccagagacatgcaacccttagaattactgactcaggttccaagatgaagtgatgaacatccctcgtgctggaatcgaagccatcttgtcaagtaatgacctccaggtggcatctgaagataccatctatgacttcttactcagatgggcccgtgcacaatacccgaaatcagaagagagacgtgaggtccttagttctcggctgctccctcttgtgcgattcagtcatatgacgtgtaggaagctgcggaaggtcctagcctgcacagatatagaccacgagcaagcaaccaagtgtgtcaccgaggctcttctgttcaaagctgatgcaccacaccggcaacgagctcttgcagcggacgcaataacctgccggaaattcgccgagcgggcttacaagtacagaccactcaaagttgttgagtttgatcggccctacccacagtgcatagcatacttggatctcaagcgcgacgagtgctctcgactctttcctgcagggcggatatactcgcaagcgttccaccttgcagggcagggtttcttcctctcggctcactgtaacatggagcagcaaagcgcgttctactgcttcgggctcttcctggggatgcaagagaagggctccacgagtgtgacagtggactacgagttcgctgcaaggacgagaccatccggcgagtttgtgagcaagtacaagggtaactacacattcaccggtggaaaggctgttggatacaggaatctctttgcaatcccatggcagaagttcttggccgatgacagcctcttcttcgtggatgggatgctgcatctgagagccgagcttacgataaagcaaccctagagcaatggtctctgtatagtggtagttgttacgacagatgaaaaagatatcggatgggaaacctcacgagttccagttcgctgcaagtttccagatttgccggtatctcactgccaatgagcttgtttgcctccgtaacggcgcagggtgtataatggcttatttattcctagtatatacaaatacaagttgatgagatgcgt

SEQ ID NO: 45772 - DNA, 426 bp, Zea Mays
ggtaccaccacgtccaaaacgtttggagcccttttcctaatcttgctgctaccgcgcgctccctctccccggccatttctctcatttcgccctccctccgccggctagggttactgccaccgccttccacccctccccgactgcccgtgggtggaggaggctggttggcgtgcagggtacctcggcggcggagatggagccggacttctcgaccgtgggcgggcccagctttgagttcgctttcaacgaggccaacttctccgaccgggaattgcggatcgaggtcgtcgcgggggattacgacgcgccggggtccactggcggcggttccggaggaggtggcctcgccgactgggcgcgccatcggaagcgccgacgcgaggagctcttcaaggagaaaggaggtcaggacttcaggagcatatg

SEQ ID NO: 45773 - DNA, 2477 bp, Zea Mays
aaaggagataaaaagtccccaaaccgaggcgggagaaaaggcgcgaggagcgaaacaaaccaaaaaaggccgctcacaggtcacgacatgctggccagtgggcccaccacgcactctgactgcccggcggaaaacctttctcgtcctcttctgtcgtctcacctctctctctctctctctctctcacacacacacacacacacagtctcccctcaccagcaaaaggacaagcagaccctcctccggtcctcccactcttccctgtccctctgccagctcaaccctctaccatggactaggaggccctagccttcgccgcgtgcatgtctgctcgggtgcagggacataggcatggaaccgcccgcccccgcagcgccacgaggggccgagcgcgccgaggctgtcgctgcggagccggcttccggggccggggccagagtcgaggtgcaacagacggggcccgagggctccgtgaaggcgagccgcggggggcgggaggtgccgctgcggctgcgcctcgggagggcccgtcggcgggcgggacctgtcacaccgacgccgtcgtggaagatggaggacgacggagtccgggaggggccgtccgcgcttgcgcctgcggccgcttccgccgcggcgaggaggagctcggcctcggcgcgccagctcggcgccagtctctgggagatccacgacgtggcgcgggaggtacgccggagcaggcgacggggtgggagggccatcgccgccggtcgggagcacggcggcggcggagaactggaccagccacagagttcaggtggcattcgtaggcatgttgcagactcgtcgatgaaacatcataagttcgatcaagaaagaagccatagaatacaacctttttctcctgcaagttatacaagctcagttggggattccaatgtgaatctaactagaagtccgactcgttctttgggcatcatgggtagatctatgggggaaggctatagccttaaaacatcaacagaactattgaaggttctaaatcgaatttggagtcttgaagaacagcacactgctaacttgtcagtggttaatggattgaaactggagttacagcaggctcagacacatattcaagaactcctgcaagagagacggcagtacagacacgaagtttcatcactgatgcgacaactctctgaaaacaaacttgttagaaaaaacaaggatcacatgaaggttgacacagctgtgcgttccctgcaaggtgaactagaggatgagaagcgtctgaggaggcattctgaggacctactcaggaagttgggcatggagttgtctgaaataaagtcagcgtttctcaagtcagtcaaggaccttgagaaggagaagaaaggaaatcgcctcttagaagatctttgtgaccagtttgcaatgggcatcaggaattacgaagaggaactcagagtggtaaagcaaagaaatgtcaagaattatgagctcaaatttgataattcggtgctccatatgtcagaactatggcttgatgaacgaatgcaaatgcaaaatacagatgtcaatggggaattggctcataaaaccacaataacagaaaggctcagcggtgaaatacaggcctttcttctttctaaaaaagcaggtagctctatgaataatgaaaaacatatgaatgataatactagattacgacgtcaatcacttgagtctgtccatttgaatggagccaccagtgctccccagtttgctgaagatgatgacgactctattgctagtgatttgaattgctttgaactgaatatgcacgggcatatgggatcccgcagaagtggcacaggagccatgaatgtgcataaaagaagatcagagcatcctcatgttatatctgctgaaggtttatgcatgtccagtgtgccagtttatttacagaaaggcattgcaaggcccagtagcagcaaattgcagcctgccagtaaaataccagaaatcagctcacaaagcaatgccagaatcactccagcagaagagcagaatggaagcacaggcacccaaattattcaagggtccaacaatgggtcaacgatgaacaacccagatgcacatcatgttgattacctggggcaggaatcctttgatcatttctcccgaacaagtctcttttgtgaaggcactacttcgggggatctgggtaatgtcgggagccccacgcggcaactgaaataccaatccacatctttggaccccgagataacggaatgctcacctgaacagccagtaggtgtgatggagaacaccctgaaggcaaaattacttcaagcaaggctagaggggcgacatgcccgattaaaggcatcaggtggctcctcaactagtaggagaaagtgagagtgctgcagattccggggtttgactgtttgaagcccacacgaagaaatcaaaggatgacgaagccgaggctgaagctaaggagtaaaaaggcg

SEQ ID NO: 45774 - DNA, 1527 bp, Zea Mays
aatcttaccgcctttcctgtcgttgaaaggttagattggtcaggatctcgtattagctactgcgttattcactggatgttggcaatggggtcagaagagtgggagctctatccttcttccgacataggttcgcaggtcatagaatacagacctgtgtctgaagacagcgatgacgatcagaatggggatgtggcagtgtcgctggatgttgttctccctgatgatcttctggagaaggttctttccttcttgcctgttgcaagtatcataagatctgggtctgtttgcaaaaggtggcatgagattgtgcatgcccggaggcacgcatggagcaaaatagtgcctcagaagccgtggtacttcatgtttacctgtagtgaggatgcagtttctggttttgcctatgacccgagcctccgcaaatggtatggatttgatttcccttgcattgagaagagcaactggtctacatcctcatctgctggcttggtgtgcctgatggacagtgagaccaggcgccgcattgtggtgtgcaaccccatcactaaggactggaagaggcttcttgatgctcctgggggcaaaacagctggttacagtgctctcgcgttttctgtggacataaggtctcaccattacactgtggctgttgcaagaagcaaccaggttccatcggagtattatcactgggagcttaccatccatttgtacgagtcagtctctggtagttggatgactcccttcactggagtattggttgggtggagaggtggcgacgagtgtgtcatctgtgatggagtcctctactatttgctgtacttcacaggaattctggtgaacaacaatgagcaccgccattgtctcgtaatgtatgatctcacagcaagacctaaccacacttctctgatcagcatggctattccagtgccatgtgttcttacatgtggcagattgatgaacctgagcaagaagcttgtgctggttggtggcattggcaagcaagataggcctgggatcatcaagggaatcggcatttgggagctccataacaaagagtggcgtgaggttgctcggatgccacacaagttttttcaaggatttggcgagtttgatgatgtttttgcaagctgtggggcagatgatcttatctatatccagagctatgggtcgccagctcttctcaccttcgaagtaaaccacaagtcatggaagtggtccgtgaagagccctgtttcgaagaggtttccgctgcagctattcactggattctctttcgagccaaggctggacgttgctctctagtttcttgactgtccacctccaccagaatttttgcattacattttgcctgattctggactggccagagtcaggaggtgcttgcactgcagccatttgaacacagaaaatgttcgtttttatagctctactcttttctttgttgggtctattgggtatattaattgaaatggtcagttaacttcccatcatttttgttgacttggactactgaattatgggggtgtt

SEQ ID NO: 45775 - DNA, 1879 bp, Zea Mays
ctctccctcactctctcgttccacgagtatcagtctagccgagcactcatcagtcatcactcatcagccccctcttcctctaaagctgaaccgatcctccctctccctccctcgctctgtccatcttattattaattttttttttttgcttgaagcaagcaccttcccctttctctgtcttgcctccttatatacgccattgtggcgctgcgctagacgcgacgcccatgaggggcctgacctaatgtagcgttaggagaaagcctactgttccatctctttcttggagtacgagggcacgaaggcctaaccccctcgcccccaccagattcggggaattcgcgcctcatccgatcgtcaccggccgccgaagcgcaagaaacagcggccgggttaggactctggaggatacggcggctcggcggattcaggaagtgaggatattttcttggatttctgttcttgattgaggagaggatctcgtattagctactgcgttattcactggatgttggcaatggggtcagaagagtgggagctctatccttcttccgacataggttcgcaggtcatagaatacagacctgtgtctgaagacagcgatgacgatcagaatggggatgtggcagtgtcgctggatgttgttctccctgatgatcttctggagaaggttctttccttcttgcctgttgcaagtatcataagatctgggtctgtttgcaaaaggtggcatgagattgtgcatgcccggaggcacgcatggagcaaaatagtgcctcagaagccgtggtacttcatgtttacctgtagtgaggatgcagtttctggttttgcctatgacccgagcctccgcaaatgtgagaccaggcgccgcattgtggtgtgcaaccccatcactaaggactggaagaggcttcttgatgctcctgggggcaaaacagctggttacagtgctctcgcgttttctgtggacataaggtctcaccattacactgtggctgttgcaagaagcaaccaggttccatcggagtattatcactgggagcttaccatccatttgtacgagtcagtctctggtagttggatgactcccttcactggagtattggttgggtggagaggtggcgacgagtgtgtcatctgtgatggagtcctctactatttgctgtacttcacaggaattctggtgaacaacaatgagcaccgccattgtctcgtaatgtatgatctcacagcaagacctaaccacacttctctgatcagcatggctattccagtgccatgtgttcttacatgtggcagattgatgaacctgagcaagaagcttgtgctggttggtggcattggcaagcaagataggcctgggatcatcaagggaatcggcatttgggagctccataacaaagagtggcgtgaggttgctcggatgccacacaagttttttcaaggatttggcgagtttgatgatgtttttgcaagctgtggggcagatgatcttatctatatccagagctatgggtcgccagctcttctcaccttcgaagtaaaccacaagtcatggaagtggtccgtgaagagccctgtttcgaagaggtttccgctgcagctattcactggattctctttcgagccaaggctggacgttgctctctagtttcttgactgtccacctccaccagaatttttgcattacattttgcctgattctggactggccagagtcaggaggtgcttgcactgcagccatttgaacacagaaaatgttcgtttttatagctctactcttttctttgttgggtctattgggtatattaattgaaatggtcagttaacttcccatcatttttgttgacttggactactgaattatgggggtgtt

SEQ ID NO: 45776 - DNA, 1153 bp, Zea Mays
cctccgcttccgctcccgtccttcctcccctcaccgggacccccagacagcgcgcgccggcgcaatgcggtgggacgcgtcggaagcagaggtagcccttgagcggatctgggaactccatgaccgcctcagcgacgccatcctcgccgcctcccgcgcgcacctcttcctgctcgctccccagcctcctcccgtgccgtccgcgccacccgtcaaaggggcccaccgagtcagcggcggtaggaacggctgcgtcttcgtcaagggcggaggagaggcgctggccgccgccgcggagtccgtgtccgaggtcaggagcctgcacgccatccgctctgcgctcgaggacgtcgaggaccacctcgagtttttacacactgttcaatcacgacatcaggcagagcgagattctgcaattgctagactggagcaaagccgtctagtccttgctacgaggttagcagaacatcaagggaagaagcatagaatcatcgatgaggtcttggcatttgttggtgaagtgagtgacaagagtcaatttatctcatttgaagatgtttgtgctacccatagccgatcagaggatgatgcagaggacaacaggggcaacggttcaaggattatgtcaaacatgttatctagcagtttgtctttagccaagaattcatttcgactggacaagattggtggtgctctcggtaacgctgcaatgtttgcagtaagtgtgcttgctttcttccagctgcatcaaattacatttggaagtaaaactccagccatggaatacaggaagagaatcgagtacagtattcaaccaaggagctcacaatcgaatgggaaaggaaaacttctggaggtttacctagcaagaggctgaagaattattagatcattctgtttggctgtacagagttttaaccaaagttcgtttttgtcggttttattagggcgctgatcattctttacaatggactggaccctgttccaggcaattagggaacttactgtctgattcttataaatagagtttgaagggaattgcgtattctatctcaaattgtgaatggctttgtgcttagagatggtcagatggattgtttgtaaaccatgttcaagctaacttgaactgccgttatgcactactttcttgcca

SEQ ID NO: 45777 - DNA, 1128 bp, Zea Mays
aacatatgcccgtcgctccccctccccttcgtttctctttccctccgcttccgctcccgtccttcctcccctcaccgggacccccagacagcgcgcgccggcgcaatgcggtgggacgcgtcggaagcagaggtagcccttgagcggatctgggaactccatgaccgcctcagcgacgccatcctcgccgcctcccgcgcgcacctcttcctgctcgctccccagcctcctcccgtgccgtccgcgccacccgtcaaaggggcccaccgagtcagcggcggtaggaacggctgcgtcttcgtcaagggcggaggagaggcgctggccgccgccgcggagtccgtgtccgagactgttcaatcacgacatcaggcagagcgagattctgcaattgctagactggagcaaagccgtctagtccttgctacgaggttagcagaacatcaagggaagaagcatagaatcatcgatgaggtcttggcatttgttggtgaagtgagtgacaagagtcaatttatctcatttgaagatgtttgtgctacccatagccgatcagaggatgatgcagaggacaacaggggcaacggttcaaggattatgtcaaacatgttatctagcagtttgtctttagccaagaattcatttcgactggacaagattggtggtgctctcggtaacgctgcaatgtttgcagtaagtgtgcttgctttcttccagctgcatcaaattacatttggaagtaaaactccagccatggaatacaggaagagaatcgagtacagtattcaaccaaggagctcacaatcgaatgggaaaggaaaacttctggaggtttacctagcaagaggctgaagaattattagatcattctgtttggctgtacagagttttaaccaaagttcgtttttgtcggttttattagggcgctgatcattctttacaatggactggaccctgttccaggcaattagggaacttactgtctgattcttataaatagagtttgaagggaattgcgtattctatctcaaattgtgaatggctttgtgcttagagatggtcagatggattgtttgtaaaccatgttcaagctaacttgaactgccgttatgcactactttcttgcca

SEQ ID NO: 45778 - DNA, 443 bp, Zea Mays
ggccgtcctgcgcattggaaagggaatctcaccaaggccctaaactggctccaccgtggttcccttgcacgacgccctgcggcgggtccgccgaacacagcgtcaaaatggacccacatgtcatcgaaggcacatcaatcgacctggggattgcgtacatccttatgctggttgccctagtgctcacctacctgatccacccgcttgacgcgtcctccccctacaagctcttctgatccctgcgcctttccgtttggtcatgcggttaagggcgcgataggattttgagttaggcaacgtgcttaggtgaggctgggaggtttaggatgatgattgcggtcatctggtcttgcttggtatgatgtattggaggctcgaagctgttggtgttctgattggttttgtatcggacggactccatgatctttgtgctcaaaaaaaaa

SEQ ID NO: 45779 - DNA, 477 bp, Zea Mays
tttggagttagtctcaccggccacccggccgtcctgcgcattggaaagggaatctcaccaaggccctaaactggctccaccgtggttcccttgcacgacgccctgcggcgggtccgccgaacacagcgtcaaaatggacccacatgtcatcgaaggcacatcaatcgacctggggattgcgtacatccttatgctggttgccctagtgctcacctacctgatccacccgcttgacgcgtcctccccctacaagctcttctgatccctgcgcctttccgtttggtcatgcggttaagggcgcgataggattttgagttaggcaacgtgcttaggtgaggctgggaggtttaggatgatgattgcggtcatctggtcttgcttggtatgatgtattggaggctcgaagctgttggtgttctgattggttttgtatcggacggactccatgatctttgtgctcagtccctcaaaaaaaaa

SEQ ID NO: 45780 - DNA, 403 bp, Zea Mays
gcgcattggaaagggaatctcaccaaggccctaaactggctccaccgtggttcccttgcacgacgccctgcggcgggtccgccgaacacagcgtcaaaatggacccacatgtcatcgaaggcacatcaatcgacctggggattgcgtacatccttatgctggttgccctagtgctcacctacctgatccacccgcttgacgcgtcctccccctacaagctcttctgatccctgcgcctttccgtttggtcatgcggttaagggcgcgataggattttgagttaggcaacgtgcttaggtgaggctgggaggtttaggatgatgattgcggtcatctggtcttgcttggtatgatgtattggaggctcgaagctgttggtgttctgattggttttgtaaaaaat

SEQ ID NO: 45781 - DNA, 309 bp, Zea Mays
atgcctccgtccaccccctccaccgcggctgcctgcgccaggattttcccgaactccaccttggctggtaacggcagttccactgcatccatccaccgggcccgcaaggcccaggaccacctaaatcgcaccccgcctcacctccaaaaccgtctcaaatcggcgccgttcccgggcgcacggacggcgaatcgggccacggggaggcgcgggacctctgattcgcgcgagatctggggtgatcggctcggggcgcaggcggcagcggcggcgctgcggaggcaggaggagtgggaaggggacatctag

SEQ ID NO: 45782 - DNA, 1029 bp, Zea Mays
ccgccccctgtaatgctgttggcaagctcaacaagacgctatgagcaatttcctttagcacgaaacaatggacttccaagattttcaagagtaaaaatgtcatgcttgggaacaaaccaaagtaaccatcattctgataccgtcagatcttcatcccctagttgtggagataccagaaagatccaccctgtagtcaaaatgtgtggcatcacatcagctagagatgcagaaatggctgtaaaagcaggagctgagcttataggcatgatactatggcccaactctaaacgctctgtctcgttattggaggcaaaagaaatatcaagagttgcgcaatcttatggcgctgaatcagttggtgtctttgtggatgataatgaagagagaattctacgggtgtctgattcatgtgaccttaactttgtccagtggaaagggattcaactggcagaagttccagatgccatctgtcaaaagcaagaatggatggctattagctggagggcttcatgcagataatgtttgtgaagccttttctgctctgaaaccagatggtgttgatgttagcagcggcatatgtggtcgagatggtatccgaaaagatgcagacaggattaattccttcataagtaatgtgaaatccctaaatttcctatcgtaaggtcatttgcttgtcgagagcttagtttttttttcatttgctcacgtgtggaatccctgaattgctgcaacctgaaggcaagctgtcaaaattgctcttggggctgagggcaaaagagtgattgaatttttgaagtgtgaacatatgtatccggtttattgtggagtgtggcaaactcgttactgcaacctgatggcaagatgttcaaattgcgcttgagaatagggattacatttttgaatgtgagtattgtgtttgtttctagtgcaataagtgtgttttgtatgcatatccagttcaaatgcaaaaataaaaacacattgtaccgttgacaaaattgctgcagtaaaagctggagaatttttatt

SEQ ID NO: 45783 - DNA, 1186 bp, Zea Mays
ctttacttgtaatgctgttggcaagctcaacaagacgctatgagcaatttcctttagcacgaaacaatggacttccaagattttcaagagtaaaaatgtcatgcttgggaacaaaccaaagtaaccatcattctgataccgtcagatcttcatcccctagttgtggagataccagaaagatccaccctgtagtcaaaatgtgtggcatcacatcagctagagatgcagaaatggctgtaaaagcaggagctgagcttataggcatgatactatggcccaactctaaacgctctgtctcgttattggaggcaaaagaaatatcaagagttgcgcaatcttatggcgctgaatcagttggtgtctttgtggatgataatgaagagagaattctacgggtgtctgattcatgtgaccttaactttgtccagcttcatggtgatgaatctcgtgcattggttcatactctttcaaagaataatcgtatcatttatgtactaaatgctgatgacgatggaaaactaatcaacattcctgatattgaatacgaacttgattggtacttagtggacagtgcaaagggcggaagtggaaagggattcaactggcagaagttccagatgccatctgtcaaaagcaagaatggatggctattagctggagggcttcatgcagataatgtttgtgaagccttttctgctctgaaaccagatggtgttgatgttagcagcggcatatgtggtcgagatggtatccgaaaagatgcagacaggattaattccttcataagtaatgtgaaatccctaaatttcctatcgtaaggtcatttgcttgtcgagagcttagtttttttttcatttgctcacgtgtggaatccctgaattgctgcaacctgaaggcaagctgtcaaaattgctcttggggctgagggcaaaagagtgattgaatttttgaagtgtgaacatatgtatccggtttattgtggagtgtggcaaactcgttactgcaacctgatggcaagatgttcaaattgcgcttgagaatagggattacatttttgaatgtgagtattgtgtttgtttctagtgcaataagtgtgttttgtatgcatatccagttcaaatgcaaaaataaaaacacattgtaccgttgacaaaattgctgcagtaaaagctggagaatttttatt

SEQ ID NO: 45784 - DNA, 1150 bp, Zea Mays
cttcccctttcctgctctgcgaaaccgagcacgaaccctaacttaagttatgtggctatttgaagtgtgtccatggccactaacttcgaatttttttttgccaaaaaaatgagtctcgtgtcctttacttgtaatgctgttggcaagctcaacaagacgctatgagcaatttcctttagcacgaaacaatggacttccaagattttcaagagtaaaaatgtcatgcttgggaacaaaccaaagtaaccatcattctgataccgtcagatcttcatcccctagttgtggagataccagaaagatccaccctgtagtcaaaatgtgtggcatcacatcagctagagatgcagaaatggctgtaaaagcaggagctgagcttataggcatgatactatggcccaactctaaacgctctgtctcgttattggaggcaaaagaaatatcaagagttgcgcaatcttatggcgctgaatcagttggtgtctttgtggatgataatgaagagagaattctacgggtgtctgattcatgtgaccttaactttgtccagtggaaagggattcaactggcagaagttccagatgccatctgtcaaaagcaagaatggatggctattagctggagggcttcatgcagataatgtttgtgaagccttttctgctctgaaaccagatggtgttgatgttagcagcggcatatgtggtcgagatggtatccgaaaagatgcagacaggattaattccttcataagtaatgtgaaatccctaaatttcctatcgtaaggtcatttgcttgtcgagagcttagtttttttttcatttgctcacgtgtggaatccctgaattgctgcaacctgaaggcaagctgtcaaaattgctcttggggctgagggcaaaagagtgattgaatttttgaagtgtgaacatatgtatccggtttattgtggagtgtggcaaactcgttactgcaacctgatggcaagatgttcaaattgcgcttgagaatagggattacatttttgaatgtgagtattgtgtttgtttctagtgcaataagtgtgttttgtatgcatatccagttcaaatgcaaaaataaaaacacattgtaccgttgacaaaattgctgcagtaaaagctggagaatttttatt

SEQ ID NO: 45785 - DNA, 1202 bp, Zea Mays
atttcttgcatttacgcgtgctgtctctctctctctccctctcgtagtcgtgcggccaccgggtgactgccggcgccgccctaagccaggtgccgtcttcgttgggtccctcggttgcgacgagcacccaccagtaatgctgttggcaagctcaacaagacgctatgagcaatttcctttagcacgaaacaatggacttccaagattttcaagagtaaaaatgtcatgcttgggaacaaaccaaagtaaccatcattctgataccgtcagatcttcatcccctagttgtggagataccagaaagatccaccctgtagtcaaaatgtgtggcatcacatcagctagagatgcagaaatggctgtaaaagcaggagctgagcttataggcatgatactatggcccaactctaaacgctctgtctcgttattggaggcaaaagaaatatcaagagttgcgcaatcttatggcgctgaatcagttggtgtctttgtggatgataatgaagagagaattctacgggtgtctgattcatgtgaccttaactttgtccagcttcatggtgatgaatctcgtgcattggttcatactctttcaaagaataatcgtatcatttatgtactaaatgctgatgacgatggaaaactaatcaacattcctgatattgaatacgaacttgattggtacttagtggacagtgcaaagggcggaagtggaaagggattcaactggcagaagttccagatgccatctgtcaaaagcaagaatggatggctattagctggagggcttcatgcagataatgtttgtgaagccttttctgctctgaaaccagatggtgttgatgttagcagcggcatatgtggtcgagatggtatccgaaaagatgcagacaggattaattccttcataagcaagctgtcaaaattgctcttggggctgagggcaaaagagtgattgaatttttgaagtgtgaacatatgtatccggtttattgtggagtgtggcaaactcgttactgcaacctgatggcaagatgttcaaattgcgcttgagaatagggattacatttttgaatgtgagtattgtgtttgtttctagtgcaataagtgtgttttgtatgcatatccagttcaaatgcaaaaataaaaacacattgtaccgttgacaaaattgctgcagtaaaagctggagaatttttatt

SEQ ID NO: 45786 - DNA, 1708 bp, Zea Mays
gttttgatgctttctgggccaagaagatgatgtgtcaaacaccacttcatgttgctgctggctacaataatacagaaatagtcaagttcttgcttaaccagcaaggtacagaaacagttgatctggaggcaaagaacatgtatggggagactcctctgcatatggcagtgaagaacagttcttgtggatcaacaaatctactccttgaacatggtgcacacatagaagccaaagccaataatggcatgacaccattgcatttagctgtctggcatgcaattcaagctggagacttcagcacagttagcgtgttactaagctacaaccctgattgctttgtgaaagatgatgtactacttgattcacagaggagctggtagcgagaagctgctgaaactcctcactcatcatatggaagagcaaagaaaacggaaagctctcatgtcatgcctcgaagggaaagcaatgtcagagtttgaagaggcaatgtcacaaattgttggattgcaggagctaaaaatgcaattgcgccgatgggcacgaggaatgttttttgatgagaagcgacgggctatgggcttggggattgctaaaaggagagctccccatatggcatttcttggcaatccaggaactggcaaaactatggttgctcgaattcttggaaagctcctccacatggttggaattctccctactgacaaagtaactgaagttcagcgaactgatcttgttggagaatttgtggggcatactggaccaaagactaggaggaagatacatgatgcagagggaggtattctcttcgtggatgaagcttacaggttgataccaatgcaaaaatccgatgacaaggattatggtttagaagccttggaggagataatgtctgtaatggacagtggcaagatagttgtcgtatttgctgggtactgtgagccaatgaagcgagtcatcgcctcgaatgatggcttctgcaggcgggtcacgaaattcttctatttcgatgatttcagtacgacagaactagcagagatcctacatatgaagatgaagagtccaagtgactgtagcttgctttacgggtttaagctgcacccaagctgcagcattgaagccattggagagctgattgccagggagatcactgaagagcagaggaagcagatgaatggaggccttgtagacacgctgctcatcaatgcccgcgagaacctggattcgcggcttgatttcagctgcaacgatgccgatactatgatcacgatcacgttggaagacctggaggcagggcttcgtcagatttccagacaacgtcacctgcagtgacatgtaaatttaggagaattttttctcgatgatctcatgcttgtctccaagggcgaagttatggctgtatcgtctcatccaacgtttttggctattctgactgtgttgtatctagtcgttgctatatagcagtaaaatgcatgtggtatatacaattatacatcatgccctaacattatttgacatctgtggaatagccagtaccacatacggatttcagtacgtgcataatcaattcagatttgacggttgaagtgattgaatttgaatcctaactaaaccttgacgaccgatttttctttttacgaatccattcctttacatcactccattgtcatctgatgacattcactttcaaaaaaaaaaaaaggagagagaa

SEQ ID NO: 45787 - DNA, 2131 bp, Zea Mays
ctcgccgtcgcctcctctttttttccccctcctcgacggctcctcctcacaggctcacagcctcacactcacgcggagagcgctcgcgcgggcgcacacgcggaggggacgttcacaggagggggagggaggagatgccggggagccagaacggggggccgaggcctcggccggtcaaagtcgagaccatccacgatcttgcgcgcgccggcgacctcgccggcgtccagaggaagctgctggagaacccctccctcctcaatgacaaaaatcccgtgatgtgtcaaacaccacttcatgttgctgctggctacaataatacagaaatagtcaagttcttgcttaaccagcaaggtacagaaacagttgatctggaggcaaagaacatgtatggggagactcctctgcatatggcagtgaagaacagttcttgtggatcaacaaatctactccttgaacatggtgcacacatagaagccaaagccaataatggcatgacaccattgcatttagctgtctggcatgcaattcaagctggagacttcagcacagttagcgtgttactaagctacaaccctgattgctttgtgaaagatgatgtactacttgattcacagcaaaatgcccttaaatcatattccaggaggagctggtagcgagaagctgctgaaactcctcactcatcatatggaagagcaaagaaaacggaaagctctcatgtcatgcctcgaagggaaagcaatgtcagagtttgaagaggcaatgtcacaaattgttggattgcaggagctaaaaatgcaattgcgccgatgggcacgaggaatgttttttgatgagaagcgacgggctatgggcttggggattgctaaaaggagagctccccatatggcatttcttggcaatccaggaactggcaaaactatggttgctcgaattcttggaaagctcctccacatggttggaattctccctactgacaaagtaactgaagttcagcgaactgatcttgttggagaatttgtggggcatactggaccaaagactaggaggaaggtattaatcctctcttttcttttcatcagaaaggctccgtcagctgcacaaatttcagtttcagggaaattgcgaaacaagttctgaacttatttctattctgtgttctaccttacgcatacattgttaccgtgaccacgacaacagatacatgatgcagagggaggtattctcttcgtggatgaagcttacaggttgataccaatgcaaaaatccgatgacaaggattatggtttagaagccttggaggagataatgtctgtaatggacagtggcaagatagttgtcgtatttgctgggtactgtgagccaatgaagcgagtcatcgcctcgaatgatggcttctgcaggcgggtcacgaaattcttctatttcgatgatttcagtacgacagaactagcagagatcctacatatgaagatgaagagtccaagtgactgtagcttgctttacgggtttaagctgcacccaagctgcagcattgaagccattggagagctgattgccagggagatcactgaagagcagaggaagcagatgaatggaggccttgtagacacgctgctcatcaatgcccgcgagaacctggattcgcggcttgatttcagctgcaacgatgccgatactatgatcacgatcacgttggaagacctggaggcagggcttcgtcagatttccagacaacgtcacctgcagtgacatgtaaatttaggagaattttttctcgatgatctcatgcttgtctccaagggcgaagttatggctgtatcgtctcatccaacgtttttggctattctgactgtgttgtatctagtcgttgctatatagcagtaaaatgcatgtggtatatacaattatacatcatgccctaacattatttgacatctgtggaatagccagtaccacatacggatttcagtacgtgcataatcaattcagatttgacggttgaagtgattgaatttgaatcctaactaaaccttgacgaccgatttttctttttacgaatccattcctttacatcactccattgtcatctgatgacattcactttcaaaaaaaaaaaaaggagagagaa

SEQ ID NO: 45788 - DNA, 2114 bp, Zea Mays
ctcgccgtcgcctcctctttttttccccctcctcgacggctcctcctcacaggctcacagcctcacactcacgcggagagcgctcgcgcgggcgcacacgcggaggggacgttcacaggagggggagggaggagatgccggggagccagaacggggggccgaggcctcggccggtcaaagtcgagaccatccacgatcttgcgcgcgccggcgacctcgccggcgtccagaggaagctgctggagaacccctccctcctcaatgacaaaaatcccgtgatgtgtcaaacaccacttcatgttgctgctggctacaataatacagaaatagtcaagttcttgcttaaccagcaaggtacagaaacagttgatctggaggcaaagaacatgtatggggagactcctctgcatatggcagtgaagaacagttcttgtggatcaacaaatctactccttgaacatggtgcacacatagaagccaaagccaataatggcatgacaccattgcatttagctgtctggcatgcaattcaagctggagacttcagcacagttagcgtgttactaagctacaaccctgattgctttgtgaaagatgatgcaaaatgcccttaaatcatattccaggaggagctggtagcgagaagctgctgaaactcctcactcatcatatggaagagcaaagaaaacggaaagctctcatgtcatgcctcgaagggaaagcaatgtcagagtttgaagaggcaatgtcacaaattgttggattgcaggagctaaaaatgcaattgcgccgatgggcacgaggaatgttttttgatgagaagcgacgggctatgggcttggggattgctaaaaggagagctccccatatggcatttcttggcaatccaggaactggcaaaactatggttgctcgaattcttggaaagctcctccacatggttggaattctccctactgacaaagtaactgaagttcagcgaactgatcttgttggagaatttgtggggcatactggaccaaagactaggaggaaggtattaatcctctcttttcttttcatcagaaaggctccgtcagctgcacaaatttcagtttcagggaaattgcgaaacaagttctgaacttatttctattctgtgttctaccttacgcatacattgttaccgtgaccacgacaacagatacatgatgcagagggaggtattctcttcgtggatgaagcttacaggttgataccaatgcaaaaatccgatgacaaggattatggtttagaagccttggaggagataatgtctgtaatggacagtggcaagatagttgtcgtatttgctgggtactgtgagccaatgaagcgagtcatcgcctcgaatgatggcttctgcaggcgggtcacgaaattcttctatttcgatgatttcagtacgacagaactagcagagatcctacatatgaagatgaagagtccaagtgactgtagcttgctttacgggtttaagctgcacccaagctgcagcattgaagccattggagagctgattgccagggagatcactgaagagcagaggaagcagatgaatggaggccttgtagacacgctgctcatcaatgcccgcgagaacctggattcgcggcttgatttcagctgcaacgatgccgatactatgatcacgatcacgttggaagacctggaggcagggcttcgtcagatttccagacaacgtcacctgcagtgacatgtaaatttaggagaattttttctcgatgatctcatgcttgtctccaagggcgaagttatggctgtatcgtctcatccaacgtttttggctattctgactgtgttgtatctagtcgttgctatatagcagtaaaatgcatgtggtatatacaattatacatcatgccctaacattatttgacatctgtggaatagccagtaccacatacggatttcagtacgtgcataatcaattcagatttgacggttgaagtgattgaatttgaatcctaactaaaccttgacgaccgatttttctttttacgaatccattcctttacatcactccattgtcatctgatgacattcactttcaaaaaaaaaaaaaggagagagaa

SEQ ID NO: 45789 - DNA, 1958 bp, Zea Mays
ctcgccgtcgcctcctctttttttccccctcctcgacggctcctcctcacaggctcacagcctcacactcacgcggagagcgctcgcgcgggcgcacacgcggaggggacgttcacaggagggggagggaggagatgccggggagccagaacggggggccgaggcctcggccggtcaaagtcgagaccatccacgatcttgcgcgcgccggcgacctcgccggcgtccagaggaagctgctggagaacccctccctcctcaatgacaaaaatcccgtgatgtgtcaaacaccacttcatgttgctgctggctacaataatacagaaatagtcaagttcttgcttaaccagcaaggtacagaaacagttgatctggaggcaaagaacatgtatggggagactcctctgcatatggcagtgaagaacagttcttgtggatcaacaaatctactccttgaacatggtgcacacatagaagccaaagccaataatggcatgacaccattgcatttagctgtctggcatgcaattcaagctggagacttcagcacagttagcgtgttactaagctacaaccctgattgctttgtgaaagatgatgaaggcaaaatgcccttaaatcatattccaggaggagctggtagcgagaagctgctgaaactcctcactcatcatatggaagagcaaagaaaacggaaagctctcatgtcatgcctcgaagggaaagcaatgtcagagtttgaagaggcaatgtcacaaattgttggattgcaggagctaaaaatgcaattgcgccgatgggcacgaggaatgttttttgatgagaagcgacgggctatgggcttggggattgctaaaaggagagctccccatatggcatttcttggcaatccaggaactggcaaaactatggttgctcgaattcttggaaagctcctccacatggttggaattctccctactgacaaagtaactgaagttcagcgaactgatcttgttggagaatttgtggggcatactggaccaaagactaggaggaagagggaggtattctcttcgtggatgaagcttacaggttgataccaatgcaaaaatccgatgacaaggattatggtttagaagccttggaggagataatgtctgtaatggacagtggcaagatagttgtcgtatttgctgggtactgtgagccaatgaagcgagtcatcgcctcgaatgatggcttctgcaggcgggtcacgaaattcttctatttcgatgatttcagtacgacagaactagcagagatcctacatatgaagatgaagagtccaagtgactgtagcttgctttacgggtttaagctgcacccaagctgcagcattgaagccattggagagctgattgccagggagatcactgaagagcagaggaagcagatgaatggaggccttgtagacacgctgctcatcaatgcccgcgagaacctggattcgcggcttgatttcagctgcaacgatgccgatactatgatcacgatcacgttggaagacctggaggcagggcttcgtcagatttccagacaacgtcacctgcagtgacatgtaaatttaggagaattttttctcgatgatctcatgcttgtctccaagggcgaagttatggctgtatcgtctcatccaacgtttttggctattctgactgtgttgtatctagtcgttgctatatagcagtaaaatgcatgtggtatatacaattatacatcatgccctaacattatttgacatctgtggaatagccagtaccacatacggatttcagtacgtgcataatcaattcagatttgacggttgaagtgattgaatttgaatcctaactaaaccttgacgaccgatttttctttttacgaatccattcctttacatcactccattgtcatctgatgacattcactttcaaaaaaaaaaaaaggagagagaa

SEQ ID NO: 45790 - DNA, 2124 bp, Zea Mays
gaaagccctggtcccgtcctcttcagggcctcgccgtcgcctcctctttttttccccctcctcgacggctcctcctcacaggctcacagcctcacactcacgcggagagcgctcgcgcgggcgcacacgcggaggggacgttcacaggagggggagggaggagatgccggggagccagaacggggggccgaggcctcggccggtcaaagtcgagaccatccacgatcttgcgcgcgccggcgacctcgccggcgtccagaggaagctgctggagaacccctccctcctcaatgacaaaaatcccgtgatgtgtcaaacaccacttcatgttgctgctggctacaataatacagaaatagtcaagttcttgcttaaccagcaaggtacagaaacagttgatctggaggcaaagaacatgtatggggagactcctctgcatatggcagtgaagaacagttcttgtggatcaacaaatctactccttgaacatggtgcacacatagaagccaaagccaataatggcatgacaccattgcatttagctgtctggcatgcaattcaagctggagacttcagcacagtttgttataacatctttccatcaggaaggcaaaatgcccttaaatcatattccaggaggagctggtagcgagaagctgctgaaactcctcactcatcatatggaagagcaaagaaaacggaaagctctcatgtcatgcctcgaagggaaagcaatgtcagagtttgaagaggcaatgtcacaaattgttggattgcaggagctaaaaatgcaattgcgccgatgggcacgaggaatgttttttgatgagaagcgacgggctatgggcttggggattgctaaaaggagagctccccatatggcatttcttggcaatccaggaactggcaaaactatggttgctcgaattcttggaaagctcctccacatggttggaattctccctactgacaaagtaactgaagttcagcgaactgatcttgttggagaatttgtggggcatactggaccaaagactaggaggaaggtattaatcctctcttttcttttcatcagaaaggctccgtcagctgcacaaatttcagtttcagggaaattgcgaaacaagttctgaacttatttctattctgtgttctaccttacgcatacattgttaccgtgaccacgacaacagatacatgatgcagagggaggtattctcttcgtggatgaagcttacaggttgataccaatgcaaaaatccgatgacaaggattatggtttagaagccttggaggagataatgtctgtaatggacagtggcaagatagttgtcgtatttgctgggtactgtgagccaatgaagcgagtcatcgcctcgaatgatggcttctgcaggcgggtcacgaaattcttctatttcgatgatttcagtacgacagaactagcagagatcctacatatgaagatgaagagtccaagtgactgtagcttgctttacgggtttaagctgcacccaagctgcagcattgaagccattggagagctgattgccagggagatcactgaagagcagaggaagcagatgaatggaggccttgtagacacgctgctcatcaatgcccgcgagaacctggattcgcggcttgatttcagctgcaacgatgccgatactatgatcacgatcacgttggaagacctggaggcagggcttcgtcagatttccagacaacgtcacctgcagtgacatgtaaatttaggagaattttttctcgatgatctcatgcttgtctccaagggcgaagttatggctgtatcgtctcatccaacgtttttggctattctgactgtgttgtatctagtcgttgctatatagcagtaaaatgcatgtggtatatacaattatacatcatgccctaacattatttgacatctgtggaatagccagtaccacatacggatttcagtacgtgcataatcaattcagatttgacggttgaagtgattgaatttgaatcctaactaaaccttgacgaccgatttttctttttacgaatccattcctttacatcactccattgtcatctgatgacattcactttcaaaaaaaaaaaaaggagagagaa

SEQ ID NO: 45791 - DNA, 3041 bp, Zea Mays
ttcgtctctttctcctttcagtcctcggcgaactcgactcaaaccctaagcccctctccttgccatcccgacccatggatcgcgagcgctcctcacggcgccctcgcgacgacgatgtgcaccaccggtctcgcgaacgggacgacgaccgacaccgccgccgcagtcgccacgacaccgacggtcaccacaggtatgagggcggagacgaggatcgccgccgccgccaccgccaccgcgacaaggacggtagcggaggcggcgaggatgaccgccgtcaccgcaaccatcatgacaatgacgacagccgtagccacagctaccgcgacggcggtgacgacgatcgccgccgcgggaaacggcggtccgtttccccgtccgagtccccgccaccttcggtgaagcgggatcgctcgtctagccgcccgcgggagtccgttgagcgtcgcgactccaccgaccgcgagccgcggtcgtcgtcgcggaagcggaaggaccacgagggcggtggcgacggggatgagcccgttcgcgaagggggcaagcgggccagggcctccgtggacctgcctccgtccaaggaggagaggcctagacgggagcgcaggaggtttgaggatgtcgatgagaacgggaagaatggtgatatgggtaaatggggcaaggaaatctcatctcatgagctgcagaaggaggagttatcaattaatggtggtttacagagctacgatgcacctaatgctggttctcagcaaccactcagtgctgtttctgtgccatcttctgttcccattccttcaaagatggaagtgcaatgtctgctgctagcaaaagtagtaacctatctcttgatgctttagccaaagcaaaaaaagctttgcaactgaagaaggaactgtcagaaaaactcaagaaattacctatgcttaataataaactcgctacagctgttactgctacacaagtttctaaagaagcagcaaaaacttctgtatcagctgtagatgcacaacacttttctaaaggagaagcaaaacttactgatgtttctagtctgccaactagtagcatctccggaacgccagccattggtggtgtgattggtattccaggtcttacacacatacccaatctcgattctgtgaagagagcccaagagcttgctgctaagatggggttccgccaagatccacaatttgctcctgttatcaacttcttccctggtacatccactgaagttactgtggcacaaagacctgcaaaggctcctgttcttcgccttgattctcatggtagggaaattgatgagcagggaaatgttatcagcatgacaaagccaacgaatctgagtactctgaaggtaacttttcatagtctactatagagctttctgtatagttttatgattttatccatgattttctttggtatggtgacttgtactatctgtttttaccttggttaggtcaatataaacaagcagaagaaagaagcttttcaaataatcaagccggacttggattctcttgcaaaatcaagtgttcattttgatgaaaggatgggcataaaccaaaagaagctcctccgtcctaaaaggccaggatttcagtttgttgaagagggtaaactctctaggcaggctgaattgcaaaaaattaagggatgcaaaaattttactttctgccacatatgaggatatctctgtggaggagattaatatggacaagatcaccatatatgttgaacatccagaaccatatgatccacctgctgaacctgcaccaccaccgccccagccactgaagttgactaagaaggagcagaagaagttgagaacacaaaggcgtcttgctaaggaaaaagataggcaagaaatgattaggcaaggcctcttggagccacccaagcccaaggtcaaaatgagcaatcttatgaaagtactaggctctgaagctgtgcaagatcccacacggttggagatggaaataagaactgctgctgcagagcgtgagcaggctcacgttgaccgtaacattgcccgcaagctcacaccatctgagcgccgcgagaagaaagaacggaagctttttgatgatcctactaacacaatagagactatagtttgtgtttacaagataagagacctgtcccatccacaaacacgcttcaaagtcgatgtgaatgctcaagagaataaactaacaggtgctgtggtcatcactgatagtatcagtgttgtggttgttgaaggggggaagaagtcaatcaaaagatataataagctcatgctaaaccgtatagactggcctgctgctgttggtggtgatgaagacacagaaatggaagctgacaagccagtgaatagctgtgtattggtctggcagggtagtgtggcaaaacccaccttccacaggttcactgtacataactgccggagtgaggctgcagctaagaaggttttcgttgatgtttctgttcctcactactgggaccttgctgtcaatttctcagaagattcttcctgagcaaagcacctgttcagaaccttggtagcttctgctgacctttgctggctacatgctagagatgtgtggccagtgttatagcacttgtcatgatggtaagtcctgttatcacgagtttctacaccaatgggcacatctgctgaaccgaggaatgcctgctgttggcctgttgtcaatctgttgtgaagatgtcatttcagtgatgtttattgctggattttcctatggtctagaaatgtgttgtgagcaactgttgaattttgcagcgtacatttggaataaatccattgcaacaaatgtctatgcgtgttttagtattgttgcggagcgaattgttgtgaaacaagtgtcttcttaaatagataccccttcgtgtgtgtgcgcgtgagtggcattatgaagactataatagccactagtaaatgttttaggtggttaccgtagccactaaaagtgcaatttctatgatcagacataattctttatttctattattctatttatattttataattt

SEQ ID NO: 45792 - DNA, 3166 bp, Zea Mays
atttttttgaagtagtatgactgtatgagttggagaaaaaattgctattctaaaacaaacaccaatttcgtctctttctcctttcagtcctcggcgaactcgactcaaaccctaagcccctctccttgccatcccgacccatggatcgcgagcgctcctcacggcgccctcgcgacgacgatgtgcaccaccggtctcgcgaacgggacgacgaccgacaccgccgccgcagtcgccacgacaccgacggtcaccacaggtatgagggcggagacgaggatcgccgccgccgccaccgccaccgcgacaaggacggtagcggaggcggcgaggatgaccgccgtcaccgcaaccatcatgacaatgacgacagccgtagccacagctaccgcgacggcggtgacgacgatcgccgccgcgggaaacggcggtccgtttccccgtccgagtccccgccaccttcggtgaagcgggatcgctcgtctagccgcccgcgggagtccgttgagcgtcgcgactccaccgaccgcgagccgcggtcgtcgtcgcggaagcggaaggaccacgagggcggtggcgacggggatgagcccgttcgcgaagggggcaagcgggccagggcctccgtggacctgcctccgtccaaggaggagaggcctagacgggagcgcaggaggtttgaggatgtcgatgagaacgggaagaatggtgatatgggtaaatggggcaaggaaatctcatctcatgagctgcagaaggaggagttatcaattaatggtggtttacagagctacgatgcacctaatgctggttctcagcaaccactcagtgctgtttctgtgccatcttctgttcccattccttcaaagatggaagtgcaatgtctgctgctagcaaaagtagtaacctatctcttgatgctttagccaaagcaaaaaaagctttgcaactgaagaaggaactgtcagaaaaactcaagaaattacctatgcttaataataaactcgctacagctgttactgctacacaagtttctaaagaagcagcaaaaacttctgtatcagctgtagatgcacaacacttttctaaaggagaagcaaaacttactgatgtttctagtctgccaactagtagcatctccggaacgccagccattggtggtgtgattggtattccaggtcttacacacatacccaatctcgattctgtgaagagagcccaagagcttgctgctaagatggggttccgccaagatccacaatttgctcctgttatcaacttcttccctggtacatccactgaagttactgtggcacaaagacctgcaaaggctcctgttcttcgccttgattctcatggtagggaaattgatgagcagggaaatgttatcagcatgacaaagccaacgaatctgagtactctgaaggtcaatataaacaagcagaagaaagaagcttttcaaataatcaagccggacttggattctcttgcaaaatcaagtgttcattttgatgaaaggatgggcataaaccaaaagaagctcctccgtcctaaaaggccaggatttcagtttgttgaagagggtaaactctctaggcaggctgaattgcaaaaaattaagagtcaatttggtgaagcacaagctaaagagcttaaagtaaagcaagcccagcttgctaaggcaaaggcagaagtagacattaatccaaactttattgaggttgctcctggtgtgagagctccaaaacaaaagcagaatgaagatatccctgaaattgagccatgggatgcaaaaattttactttctgccacatatgaggatatctctgtggaggagattaatatggacaagatcaccatatatgttgaacatccagaaccatatgatccacctgctgaacctgcaccaccaccgccccagccactgaagttgactaagaaggagcagaagaagttgagaacacaaaggcgtcttgctaaggaaaaagataggcaagaaatgattaggcaaggcctcttggagccacccaagcccaaggtcaaaatgagcaatcttatgaaagtactaggctctgaagctgtgcaagatcccacacggttggagatggaaataagaactgctgctgcagagcgtgagcaggctcacgttgaccgtaacattgcccgcaagctcacaccatctgagcgccgcgagaagaaagaacggaagctttttgatgatcctactaacacaatagagactatagtttgtgtttacaagataagagacctgtcccatccacaaacacgcttcaaagtcgatgtgaatgctcaagagaataaactaacaggtgctgtggtcatcactgatagtatcagtgttgtggttgttgaaggggggaagaagtcaatcaaaagatataataagctcatgctaaaccgtatagactggcctgctgctgttggtggtgatgaagacacagaaatggaagctgacaagccagtgaatagctgtgtattggtctggcagggtagtgtggcaaaacccaccttccacaggttcactgtacataactgccggagtgaggctgcagctaagaaggttttcgttgatgtttctgttcctcactactgggaccttgctgtcaatttctcagaagattcttcctgagcaaagcacctgttcagaaccttggtagcttctgctgacctttgctggctacatgctagagatgtgtggccagtgttatagcacttgtcatgatggtaagtcctgttatcacgagtttctacaccaatgggcacatctgctgaaccgaggaatgcctgctgttggcctgttgtcaatctgttgtgaagatgtcatttcagtgatgtttattgctggattttcctatggtctagaaatgtgttgtgagcaactgttgaattttgcagcgtacatttggaataaatccattgcaacaaatgtctatgcgtgttttagtattgttgcggagcgaattgttgtgaaacaagtgtcttcttaaatagataccccttcgtgtgtgtgcgcgtgagtggcattatgaagactataatagccactagtaaatgttttaggtggttaccgtagccactaaaagtgcaatttctatgatcagacataattctttatttctattattctatttatattttataattt

SEQ ID NO: 45793 - DNA, 2594 bp, Zea Mays
ctctttttggcagtaatttcgcgccaaatcttgtttcttcacagcctgccgccaaacaaagaagaactcaggatcagatacttcttcagataaatctgatactgctgagcatgtgaagtaccttgaagtgctcgagagtttaccagataagaaaggagtagcgtctgaagctagctgtgctgttcgagaagcagagaccaataaaatcgaagctgggtcagaagagaggtttgtacccagctgctgcaccatgaagcttgaacctgcactcggagatgacagcagggaagtccgggaggcaaaataccggcgcattcgtcatgaagggaaaggagaagcaaagcagccagcgacagcaagagacagatcaccaaggcctgtggttaacagcatcccttctaatgctgaccctgtagaagggccatttgagtgccatatgagaccgggattcatatacgctaacggcgagaagggccatctgagtgacaggaattttgatgatcctagcaccagagtcagtggcctggagaaagatcgtactgagcttctgcggatgcttgatgagttgcgggacaaggtacagagatcctgcgagattgctgacaagtcaagtgtgaatgcttcgacaaatagaatggttaatcctacaagctcctgcattcctcatgagcgtctgagtcgattgcggtatggttcacctcagctgcaacggaatgggtctcagcactcaccttctttgaatgggcagacacctggtgttcctcctgcttttccttcattatctgtacagcaagatctccatggatacggggaatcggttgcacacacgggagctcctatctacccagctgccccatatccatggagaaacttcgataattatttccaaggacattatgatcctgaccctctgatctcttatcaccatgatggcttctaccatcagcctgcttgctcttgcttacattgttaccatcgtgaattcttacctgttcgaagggcaccctatcttatgaacaatcctagcttgtaccatgcagaaggcccagtgatgtttggtgcacagaactacaatacaagaggcatgaatggtatgatgcgacgcagtcacatgagggccaccctgagtaaaaaacctgcacagacttgtgaaccgattgtcaatggcgctccttttactatttgctacaattgctatgaagtgctgcagcttcccaagaactctctcttgttgggaaaagatgagtataagctgcgttgtgggtcatgctcacatgcaattgtggtcagacttgatggaagcaggcttgatgtttcagcacctacaccagtttcacacttatcacctggaagtaagaactactacaacaatggccaagcaaacaatggacaaaatgctgatgagagacttcttccatcctatagtttttctgcaggcagtcattgctctcaagaaaaagatttaccctcgaactcaagcgaaccagacaaaacgcaatgcatatcttctgccagcatttccgaggatgataatagcccagctagatcgaattcacagaagaactcctctggttctagagacgttcctcatgatgctgaagtggttatccgcgttccaactttacctcttcgtgatcattttggatattctccatcagatagggtggttgatgggccaggcaaaggaagcagaagcacccggtccgaacatgaaaagggtgtgttaactgaaagttttaagccaaacaaagtgaaatgtgtacctgtagcaagcgtgctagacccgtcggacgacgagtatgatgatcctgagcacagtcaagatccaggtggtggggcacaatacgtcgaccacctgcgggccacgaaatcgggtgattcctttttctccagcctcataaagaagagctttaaaatcaatggtggaatgggcaatggcagagcaaatgttttcatcaatggctatcccatttctgaccgagctgtcaggaaggcggagaagattgctggaccagtctacccgggtgaatactggtatgactaccgtgctggattctggggtgttatgggacagccctgccttggcatcatacccccatatgttgcggaattcaactatcccatgcctaagaactgtgctggaggaaatactggtgtgttcatcaatggccgagaacttcaccagaaggacatggacttacttgtgggtcgagggcttcccgattctcctgatagatcatacagagttgagatttctggtaaagtatccgacgaagtatctggtgaagagctttattgccttggcaaactcgcaccaacggtggagaagatgaagcgcgggttcgggatgcgagtcccaaggatcattcagtgaagttggttcacatcgagaagcagaggctctgaaagttgtgtgccactacgcctttgtggtatccattgctaatgtaaccctgcctggaatacttgcatctgtcgcagtggttgttttgatcgagtgtgtcttggtgtggccatgtaattttgtctgtacaacatgccggataggtttgcttggggtttaataaaaatgggtgggtccaattctgtgaatc

SEQ ID NO: 45794 - DNA, 3339 bp, Zea Mays
ggttgtgcgcacacctggtcgttctcggtttcctctcctgcggttctgcccagtcctcacggcttcctttttcttccgggccactctccgccctcttccttgctgcgctcgcccttcctgcgcattgctcctctgttccccccgtcggtccgttcctgagcgcagccgcttcgcgtccccttgattccacccactgcctaatatgcgtccgtcgcggcggcggcggttggtgctgtgagcgactagcggcgggacaaggggaagggattccgtcgtgctgtgcgaaggcctcaggagccgccggcattgtgcatggagggtgaggaggacggttccggctccgcggtgcagcgcccgcctccgcagcagcagcagatacgggtggtgcgctgccccaagtgcgacaagctcctgcctgagctgcccaattactccgtctacgtctgcggcggttgcggcgccacgctccaggcaaagaagaactcaggatcagatacttcttcagataaatctgatactgctgagcatgtgaagtaccttgaagtgctcgagagtttaccagataagaaaggagtagcgtctgaagctagctgtgctgttcgagaagcagagaccaataaaatcgaagctgggtcagaagagaggtttgtacccagctgctgcaccatgaagcttgaacctgcactcggagatgacagcagggaagtccgggaggcaaaataccggcgcattcgtcatgaagggaaaggagaagcaaagcagccagcgacagcaagagacagatcaccaaggcctgtggttaacagcatcccttctaatgctgaccctgtagaagggccatttgagtgccatatgagaccgggattcatatacgctaacggcgagaagggccatctgagtgacaggaattttgatgatcctagcaccagagtcagtggcctggagaaagatcgtactgagcttctgcggatgcttgatgagttgcgggacaaggtacagagatcctgcgagattgctgacaagtcaagtgtgaatgcttcgacaaatagaatggttaatcctacaagctcctgcattcctcatgagcgtctgagtcgattgcggtatggttcacctcagctgcaacggaatgggtctcagcactcaccttctttgaatgggcagacacctggtgttcctcctgcttttccttcattatctgtacagcaagatctccatggatacggggaatcggttgcacacacgggagctcctatctacccagctgccccatatccatggagaaacttcgataattatttccaaggacattatgatcctgaccctctgatctcttatcaccatgatggcttctaccatcagcctgcttgctcttgcttacattgttaccatcgtgaattcttacctgttcgaagggcaccctatcttatgaacaatcctagcttgtaccatgcagaaggcccagtgatgtttggtgcacagaactacaatacaagaggcatgaatggtatgatgcgacgcagtcacatgagggccaccctgagtaaaaaacctgcacagacttgtgaaccgattgtcaatggcgctccttttactatttgctacaattgctatgaagtgctgcagcttcccaagaactctctcttgttgggaaaagatgagtataagctgcgttgtgggtcatgctcacatgcaattgtggtcagacttgatggaagcaggcttgatgtttcagcacctacaccagtttcacacttatcacctggaagtaagaactactacaacaatggccaagcaaacaatggacaaaatgctgatgagagacttcttccatcctatagtttttctgcaggcagtcattgctctcaagaaaaagatttaccctcgaactcaagcgaaccagacaaaacgcaatgcatatcttctgccagcatttccgaggatgataatagcccagctagatcgaattcacagaagaactcctctggttctagagacgttcctcatgatgctgaagtggttatccgcgttccaactttacctcttcgtgatcattttggatattctccatcagatagggtggttgatgggccaggcaaaggaagcagaagcacccggtccgaacatgaaaagggtgtgttaactgaaagttttaagccaaacaaagtgaaatgtgtacctgtagcaagcgtgctagacccgtcggacgacgagtatgatgatcctgagcacagtcaagatccaggtggtggggcacaatacgtcgaccacctgcgggccacgaaatcgggtgattcctttttctccagcctcataaagaagagctttaaaatcaatggtggaatgggcaatggcagagcaaatgttttcatcaatggctatcccatttctgaccgagctgtcaggaaggcggagaagattgctggaccagtctacccgggtgaatactggtatgactaccgtgctggattctggggtgttatgggacagccctgccttggcatcatacccccatatgttgcggaattcaactatcccatgcctaagaactgtgctggaggaaatactggtgtgttcatcaatggccgagaacttcaccagaaggacatggacttacttgtgggtcgagggcttcccgattctcctgatagatcatacagagttgagatttctggtaaagtatccgacgaagtatctggtgaagagctttattgccttggcaaactcgcaccaacgtaagtaacttaaaagaagcttcagattcttcagtttttgtctgtttggagttcccttctcgtgtaagtgagcgctgttcaatttctggcgaagctgtatcactgcatgaggccatgtgctattgctcatactcagttgattactcttatatgacttaaccgacactaatttcatagatcatctagtagggttaacaaaataagcaagcacaggggttcttgtatgtttctacctgtttcagttagtaaaattcatagacatgatgctcagtatagggctgggtatatttgatccaatttcatattttgcaattgccattggaaaacagggtggagaagatgaagcgcgggttcgggatgcgagtcccaaggatcattcagtgaagttggttcacatcgagaagcagaggctctgaaagttgtgtgccactacgcctttgtggtatccattgctaatgtaaccctgcctggaatacttgcatctgtcgcagtggttgttttgatcgagtgtgtcttggtgtggccatgtaattttgtctgtacaacatgccggataggtttgcttggggtttaataaaaatgggtgggtccaattctgtgaatc

SEQ ID NO: 45795 - DNA, 2774 bp, Zea Mays
cttcgtcccacacggtcacgaccctcacctgaccacctcggcgctcaacaaaaaaccagctcgagagacagagagcgagaggaaagacagcagccgaagttggaggagaccccaaggcagtcgcaaaggaagggagggagctttgctggcccgggcatttgggagacccaccccgcgcgggagtaaaagagaagagaaagagaaagcgagagaagaaaaggcggcgcctcatcacgcaaagaagaactcaggatcagatacttcttcagataaatctgatactgctgagcatgtgaagtaccttgaagtgctcgagagtttaccagataagaaaggagtagcgtctgaagctagctgtgctgttcgagaagcagagaccaataaaatcgaagctgggtcagaagagaggtttgtacccagctgctgcaccatgaagcttgaacctgcactcggagatgacagcagggaagtccgggaggcaaaataccggcgcattcgtcatgaagggaaaggagaagcaaagcagccagcgacagcaagagacagatcaccaaggcctgtggttaacagcatcccttctaatgctgaccctgtagaagggccatttgagtgccatatgagaccgggattcatatacgctaacggcgagaagggccatctgagtgacaggaattttgatgatcctagcaccagagtcagtggcctggagaaagatcgtactgagcttctgcggatgcttgatgagttgcgggacaaggtacagagatcctgcgagattgctgacaagtcaagtgtgaatgcttcgacaaatagaatggttaatcctacaagctcctgcattcctcatgagcgtctgagtcgattgcggtatggttcacctcagctgcaacggaatgggtctcagcactcaccttctttgaatgggcagacacctggtgttcctcctgcttttccttcattatctgtacagcaagatctccatggatacggggaatcggttgcacacacgggagctcctatctacccagctgccccatatccatggagaaacttcgataattatttccaaggacattatgatcctgaccctctgatctcttatcaccatgatggcttctaccatcagcctgcttgctcttgcttacattgttaccatcgtgaattcttacctgttcgaagggcaccctatcttatgaacaatcctagcttgtaccatgcagaaggcccagtgatgtttggtgcacagaactacaatacaagaggcatgaatggtatgatgcgacgcagtcacatgagggccaccctgagtaaaaaacctgcacagacttgtgaaccgattgtcaatggcgctccttttactatttgctacaattgctatgaagtgctgcagcttcccaagaactctctcttgttgggaaaagatgagtataagctgcgttgtgggtcatgctcacatgcaattgtggtcagacttgatggaagcaggcttgatgtttcagcacctacaccagtttcacacttatcacctggaagtaagaactactacaacaatggccaagcaaacaatggacaaaatgctgatgagagacttcttccatcctatagtttttctgcaggcagtcattgctctcaagaaaaagatttaccctcgaactcaagcgaaccagacaaaacgcaatgcatatcttctgccagcatttccgaggatgataatagcccagctagatcgaattcacagaagaactcctctggttctagagacgttcctcatgatgctgaagtggttatccgcgttccaactttacctcttcgtgatcattttggatattctccatcagatagggtggttgatgggccaggcaaaggaagcagaagcacccggtccgaacatgaaaagggtgtgttaactgaaagttttaagccaaacaaagtgaaatgtgtacctgtagcaagcgtgctagacccgtcggacgacgagtatgatgatcctgagcacagtcaagatccaggtggtggggcacaatacgtcgaccacctgcgggccacgaaatcgggtgattcctttttctccagcctcataaagaagagctttaaaatcaatggtggaatgggcaatggcagagcaaatgttttcatcaatggctatcccatttctgaccgagctgtcaggaaggcggagaagattgctggaccagtctacccgggtgaatactggtatgactaccgtgctggattctggggtgttatgggacagccctgccttggcatcatacccccatatgttgcggaattcaactatcccatgcctaagaactgtgctggaggaaatactggtgtgttcatcaatggccgagaacttcaccagaaggacatggacttacttgtgggtcgagggcttcccgattctcctgatagatcatacagagttgagatttctggtaaagtatccgacgaagtatctggtgaagagctttattgccttggcaaactcgcaccaacggtggagaagatgaagcgcgggttcgggatgcgagtcccaaggatcattcagtgaagttggttcacatcgagaagcagaggctctgaaagttgtgtgccactacgcctttgtggtatccattgctaatgtaaccctgcctggaatacttgcatctgtcgcagtggttgttttgatcgagtgtgtcttggtgtggccatgtaattttgtctgtacaacatgccggataggtttgcttggggtttaataaaaatgggtgggtccaattctgtgaatc

SEQ ID NO: 45796 - DNA, 1090 bp, Zea Mays
gcaaatagtaaaagacaccgtatcttatgataaaaaggcaagcagccatggctgtgactgtgagtggacggatcgctcgaatgaggcagctctagaaccggttcatgaggcccttgatccaggccaggacaccgctctcctcttcttcaacatctgcctgcttcttggcctcctcggcgtggcggtggacgatgtggtggaagaagcgggaacggcgtccatggccgtggccgtggccgaatctcctcctcatgatcgccttcctgaaccgccggaccatctcttccatttgctcatcctcctcgtcgtcgctgtcctcgtcgtgctcatcagcgtggcggagccgcttcctcgccgccatattcttctcctcgtcctcgtccctcctcctcctcctcctcgtgttggacgtggtggagacggtggcggcgcatgtcgtggtggaagtggaagcggaaccacctccgcagcatctcgtgcttccacgccctgactgccgccgcgctctcgtcgtcgtgcccgtcggcgtcggcgaacggcgacggctgctcgcttgtaatagccacctccccctctccgtcgctgtccgggagagagcgatccgggtccggctcggccacgggcatctcctcccccgcctccctggccacctctgcggatgcgggcaagatggcaaggtggctcactgcctgctcgcgcctcgcgccgtggccagaacaagggaacttgtgcgacgcgtcacggtagatcccgtggtggcgtttcaaccagaggtggtggtggtggtggagccggtgagaaggcaggcggaggagttcgaacccatgctgctgctgctccgccgggatggcctcctcttcagtggcgctggcggtgcccgcctcagcgtggaccgtggggtcggatagcacgttgtcgtcgctgacggccacggcggcggttgattcgggctcggtgtcgtgctctgctgcgactgcgagggcaccgcagtgcgcgacggcgaggagggagaggacgaggaggaggagcgcggcggtggctgacagtcgagccatggttgcgtgctcgggaagcgaacgcggtgactagg

SEQ ID NO: 45797 - DNA, 1932 bp, Zea Mays
acaaggcacatccctcttcactctctcctccgtcgtcccgtcactcgtcagtcctcgctctcttcactcgctgaaaggcaggctggtggagtggaagcgcttcactccccttcgtgccaccccagcccatcgccttccactggactcatctgcttggcactcctcgccccgtgcttggattcttgcacttggtgcttcccttctcctacctcacatcacccgcccagatccaatccacacgagatttgcgacgctccggcctcccggcacgaagcctttctagggatcgccactcgccacacgccggccggggcgaaaaaagctcttcttggagcccttctgcttggcctctccctctcttctctcccggcgtcgtgcgcgggcctggccccggccaagcaccggccggaggtgatatccatcgccgacttcggcggcgtgggcgacgggcggacgctgaacacgtgggcgttccgcaaggccgtgtaccgcatccagcaccagcggcggcgcggcggcacgacactgcacgtgccggccggcacctggctcgccggcagcttcaacctcaccagccacatgacgctcttcctcgccagaggcgccgtgctcaaggccacgcaggacacgaggggatggccgctggtggagccgctgccgtcgtacggccggggcagggagctgccgggaccacggtacgccagcttcatccacggcgacggcctccgcgacgtcgtcattacaggtgacaggggagtcatcgacgggcagggtgaggtgtggtggaacatgtggaggaggcggacccttgagcacaccaggccaaaccttgtggagttcatgcattccaccggcattcacatctccaacatcgtcctcaagaactcacccttctggaacatccatcctgtttactgcgacaacgtggtcgtaaccaacatgatgatcttggcaccacgtgactccccaaacacagacggagtcgatccagactccagctccaacgtgtgcatcgaggactcgtacatatccaccggcgacgacctggtggccatcaagagcgggtgggacgagtacgggatcgcgtacgggcggccgagcgccggcgtcacggtccggcgcgtgaggggctcgtcccccttcagcggcatcgccatcggcagcgaggcctccggcggggtgcgcgacgtcctggtggaggactgcgccatcttcgacagcggctacggcatccacatcaagaccaacgtcggccggggcggctacatccgcaacgtcaccgtcgacggcgtgcgcctgaccggcgtgcgcagcggcgtccgcatcgccggcgacgtcggcgaccaccccgacgcgcacttcagccagctcgccgtgcccacggtcgacgccgtgcgcatcagcaacgtgtggggcgtcaacgtccagcagcccgggtcactggaggggatccgggcctcgcccttcacccgcatatgcctctccaacgtcaagctcttcgggtggcggagcgacgccgcctggaagtgcagggacgtgcgcggcgctgcgctcggggtgcagccgtcgccctgcgccgagctcgccaccagcttcgcgtccgcacggtcctcatgcagctagttagtgtagtgatgcctagctaattaatttctgaattctgatgatgggtgtgcttttaagtttgggctttgttttacttattctatggcaccgatgtctgtctgtctgtctttgcttgctcaatcacttactttaggcttccactgctaaagtgctaatcgttcagaaaaccttaccactgcaaataattttgtactccctacattctaaattataaaatatcttagtatttatagatacattaatgtagctataaatttaaaacaactaagatgttttataaattgaaacgaaggaactaatactctt

SEQ ID NO: 45798 - DNA, 2534 bp, Zea Mays
aaaactggctctcttcacaaggcacatccctcttcactctctcctccgtcgtcccgtcactcgtcagtcctcgctctcttcactcgctgaaaggcaggctggtggagtggaagcgcttcactccccttcgtgccaccccagcccatcgccttccactggactcatctgcttggcactcctcgccccgtgcttggattcttgcacttggtgcttcccttctcctacctcacatcacccgcccagatccaatccacacgagatttgcgacgctccggcctcccggcacgaagcctttctagggatcgccactcgccacacgccggccggggcgaaaaaagctcttcttggagcccttctgcttggcctctccctctcttctctcccggcgtcattgtcgccgctgcctgcgagcaacaacaattatggccgccgcgacgtcgcgcgggccagcgtcggtcgccatctgtgcgctcgccgtgctccacgcaatggctgcgctgtgcgactccgccaccgcggcggcggcgacgtgcgcgggcctggccccggccaagcaccggccggaggtgatatccatcgccgacttcggcggcgtgggcgacgggcggacgctgaacacgtgggcgttccgcaaggccgtgtaccgcatccagcaccagcggcggcgcggcggcacgacactgcacgtgccggccggcacctggctcgccggcagcttcaacctcaccagccacatgacgctcttcctcgccagaggcgccgtgctcaaggccacgcaggacacgaggggatggccgctggtggagccgctgccgtcgtacggccggggcagggagctgccgggaccacggtacgccagcttcatccacggcgacggcctccgcgacgtcgtcattacaggtgagctgagcctcgccttcccttgctcggctaggcttcctcctctgcctactgctctgtcaatatgttgcttactactgtgtgcccgtgagtatcctctatctatctgggaggacaaaaaggctgacatgcacaaggtctccttcctcgtcggagaagactgaatcctgcacaaacatatatttgccatactactgccatagtgcgtaccacgcgtccactccaaaaggttcacaaggcagcacgggactttgtataaattacttactactggatcacaatcacaacacacttttgtcagtgctttgcttaaactaaattctgaggcccataccatactcctagctagatactagctggtaccagcagacagcagagcctgaattgttaattccattcactatcctctgggatcgtgatctcgtccctttccttgggcattgttaggtgacaggggagtcatcgacgggcagggtgaggtgtggtggaacatgtggaggaggcggacccttgagcacaccaggccaaaccttgtggagttcatgcattccaccggcattcacatctccaacatcgtcctcaagaactcacccttctggaacatccatcctgtttactgcgacaacgtggtcgtaaccaacatgatgatcttggcaccacgtgactccccaaacacagacggagtcgatccagactccagctccaacgtgtgcatcgaggactcgtacatatccaccggcgacgacctggtggccatcaagagcgggtgggacgagtacgggatcgcgtacgggcggccgagcgccggcgtcacggtccggcgcgtgaggggctcgtcccccttcagcggcatcgccatcggcagcgaggcctccggcggggtgcgcgacgtcctggtggaggactgcgccatcttcgacagcggctacggcatccacatcaagaccaacgtcggccggggcggctacatccgcaacgtcaccgtcgacggcgtgcgcctgaccggcgtgcgcagcggcgtccgcatcgccggcgacgtcggcgaccaccccgacgcgcacttcagccagctcgccgtgcccacggtcgacgccgtgcgcatcagcaacgtgtggggcgtcaacgtccagcagcccgggtcactggaggggatccgggcctcgcccttcacccgcatatgcctctccaacgtcaagctcttcgggtggcggagcgacgccgcctggaagtgcagggacgtgcgcggcgctgcgctcggggtgcagccgtcgccctgcgccgagctcgccaccagcttcgcgtccgcacggtcctcatgcagctagttagtgtagtgatgcctagctaattaatttctgaattctgatgatgggtgtgcttttaagtttgggctttgttttacttattctatggcaccgatgtctgtctgtctgtctttgcttgctcaatcacttactttaggcttccactgctaaagtgctaatcgttcagaaaaccttaccactgcaaataattttgtactccctacattctaaattataaaatatcttagtatttatagatacattaatgtagctataaatttaaaacaactaagatgttttataaattgaaacgaaggaactaatactctt

SEQ ID NO: 45799 - DNA, 1495 bp, Zea Mays
cggggacctgtttattccttcgtctgttacattgaaagtctggtccctggtgaggcggttcgaccagccacagctcttcaagcccttcgtgagccggtgtgagatgaaggggaacatcgagatcggtagcgtcagggaggtcaacgtcaagtccgggctgccggccacaagaagcacggagaggctcgagctgttagacgacgacgagcgcattctcagcgtcaggttcgttggaggcgatcacaggctgcaggtatgctctgttcttcatctatctatattctgtgctgcccatgcgagatattttgcccaccacctcaaatgcgtcctggagttcctctgccagatgcatcttgatgtgctgccctgcgacgatgccatcctcgagtgatagccccccaacaaactcttgtcgtctatctaaccagaaaacaagcagcggttgttgttgttgttatgtaccgggtgatgtttgcatgctctcaactccaagcatggcactgacttgccatcctttgaccttacatgccaagttcatcgcatgagcacctgtcactcgctgtcgcttgtcgtgctccgtccgtttgccctcactcgtcatcagccagcgatagcaacaagtggcccatggtcacaactcacatgcgttgcacctggataatggacgatggacgccacctggatataagtttatccggccctgacccccttgggttggttgcaagaacgccagcgtgtgtgaaagctgacgactagtctaattcatcgatctgctgcatctcaccttccttttcctttgcccgcagaactactcctccatcctcaccgtccacccggaggtcatcgacggccggccagggacgctcgtcatcgagtccttcgtcgtcgacgtccccgacggcaacaccaaggacgagacctgctacttcgtggaggcgctgctcaagtgcaacctccggtcactcgcggaggtgtccgagggccaggtcatcatggaccagacggagccccttgaccggtgaataatgagtcggaccattatattgcattgcattctgtgtacgcgtagacctgttctccaatgcatggagcccctaggttcttggaaaactgctatgccgcgttcaaagtcaagttctttttccccctccttgcgattgtgtttttctgttcttctccggcgttgtatgtcgcggagggagaagtgcagagtatgatgtgcttgatgaaaattgaaagaaaaaaaaaagaatttagaactgtgaggccctgggacatcttcattctcagatcaatatgtggacttgagggtttaatttctctgtaattagattgctccatcttgattcctttctttcctccgtgtgtgtatgtgtgtgttttgtaaatacatgtcccaagtgtgtacttagggtacgtttagttggattgacaggacgggacgagatgagacgatctctcaaataaggttgtttggttcaggatcaaaggttag

SEQ ID NO: 45800 - DNA, 963 bp, Zea Mays
actacttgaatagcaagcaaccggggacctgtttattccttcgtctgttacattgaaagtctggtccctggtgaggcggttcgaccagccacagctcttcaagcccttcgtgagccggtgtgagatgaaggggaacatcgagatcggtagcgtcagggaggtcaacgtcaagtccgggctgccggccacaagaagcacggagaggctcgagctgttagacgacgacgagcgcattctcagcgtcaggttcgttggaggcgatcacaggctgcagaactactcctccatcctcaccgtccacccggaggtcatcgacggccggccagggacgctcgtcatcgagtccttcgtcgtcgacgtccccgacggcaacaccaaggacgagacctgctacttcgtggaggcgctgctcaagtgcaacctccggtcactcgcggaggtgtccgagggccaggtcatcatggaccagacggagccccttgaccggtgaataatgagtcggaccattatattgcattgcattctgtgtacgcgtagacctgttctccaatgcatggagcccctaggttcttggaaaactgctatgccgcgttcaaagtcaagttctttttccccctccttgcgattgtgtttttctgttcttctccggcgttgtatgtcgcggagggagaagtgcagagtatgatgtgcttgatgaaaattgaaagaaaaaaaaaagaatttagaactgtgaggccctgggacatcttcattctcagatcaatatgtggacttgagggtttaatttctctgtaattagattgctccatcttgattcctttctttcctccgtgtgtgtatgtgtgtgttttgtaaatacatgtcccaagtgtgtacttagggtacgtttagttggattgacaggacgggacgagatgagacgatctctcaaataaggttgtttggttcaggatcaaaggttag

SEQ ID NO: 45801 - DNA, 1518 bp, Zea Mays
cttggactccactccttttggacgtggttcagcttcagcacaagatcagatgcaaaactagtctggtccctggtgaggcggttcgaccagccacagctcttcaagcccttcgtgagccggtgtgagatgaaggggaacatcgagatcggtagcgtcagggaggtcaacgtcaagtccgggctgccggccacaagaagcacggagaggctcgagctgttagacgacgacgagcgcattctcagcgtcaggttcgttggaggcgatcacaggctgcaggtatgctctgttcttcatctatctatattctgtgctgcccatgcgagatattttgcccaccacctcaaatgcgtcctggagttcctctgccagatgcatcttgatgtgctgccctgcgacgatgccatcctcgagtgatagccccccaacaaactcttgtcgtctatctaaccagaaaacaagcagcggttgttgttgttgttatgtaccgggtgatgtttgcatgctctcaactccaagcatggcactgacttgccatcctttgaccttacatgccaagttcatcgcatgagcacctgtcactcgctgtcgcttgtcgtgctccgtccgtttgccctcactcgtcatcagccagcgatagcaacaagtggcccatggtcacaactcacatgcgttgcacctggataatggacgatggacgccacctggatataagtttatccggccctgacccccttgggttggttgcaagaacgccagcgtgtgtgaaagctgacgactagtctaattcatcgatctgctgcatctcaccttccttttcctttgcccgcagaactactcctccatcctcaccgtccacccggaggtcatcgacggccggccagggacgctcgtcatcgagtccttcgtcgtcgacgtccccgacggcaacaccaaggacgagacctgctacttcgtggaggcgctgctcaagtgcaacctccggtcactcgcggaggtgtccgagggccaggtcatcatggaccagacggagccccttgaccggtgaataatgagtcggaccattatattgcattgcattctgtgtacgcgtagacctgttctccaatgcatggagcccctaggttcttggaaaactgctatgccgcgttcaaagtcaagttctttttccccctccttgcgattgtgtttttctgttcttctccggcgttgtatgtcgcggagggagaagtgcagagtatgatgtgcttgatgaaaattgaaagaaaaaaaaaagaatttagaactgtgaggccctgggacatcttcattctcagatcaatatgtggacttgagggtttaatttctctgtaattagattgctccatcttgattcctttctttcctccgtgtgtgtatgtgtgtgttttgtaaatacatgtcccaagtgtgtacttagggtacgtttagttggattgacaggacgggacgagatgagacgatctctcaaataaggttgtttggttcaggatcaaaggttag

SEQ ID NO: 45802 - DNA, 1238 bp, Zea Mays
tgtgatttgagggtagatataggttggaaccagactctgacaccgactacggagccaatccctcctgctggttcgatccaaaccctaccaaatcgatggccgacggcggcaactgcgggccgggcggcggcaatgcatcggcgccggtgtgcagtttcgtgaggaaaccacccaagaacatccggaagcgccccgccgcgcccgcggggtctgatgacgacgacgacggcggcggcggcgccctcgccgccgcgcgctccaagaaggggccaccgtcctcaaccgctggcaagctcgttttctccaccgcaggtgcttcctccgaggcgccgcggttccagtacgaatcgtcccggacgatccagtccacggacacccgcgcaactgccacgctcgagacggagacggagtttgaccgcgacgcgcgctccatccgcgagagacagctcaagcaggccgaggagtccctcaagaagaacccctccgctgttgctgcttccgcctccgcctccaccgctggagaggtgtacaaggggatccacggctacacggactacaaggctgggttccgacgggagcacacggtatctagcgagaaggccggcggttcgcatggtccgctccgggcgtccgcgcacattcgcctctcccagcggtttgactaccagcccgacatctgcaaggactacaaggagacggggtactgtggttacggcgattcctgcaaattcatgcacgaccgaggggattacaaatccgggtggcagctcgagaaggaatatgaggaggctgagaaggcccgcaagcgacgaattgccatgggtggtggtggtgagagtgatgatgaggcagcagatgacgaggatgaggaggaggcgctgccctttgcctgcttcatttgtcgggagccattcgttgatccagtggtcaccaaatgcaagcactacttttgtgaacattgcgctttgaagcaccactcgaagaacaagaagtgctacgtctgcaacaaaccgacgctgggcatcttcaacgctgcacaggagatccgcaagaagatggcacaggacaagaagcagcagcagcaggagtaggagagctcaaaacacaccgttgctaatttagctgtgttgtacaacgatgattggtgcgataactagagtccggtatttttcgccatcagataaaagagaccaagttttgaacgatcacaatgaatgcattcagatccaaaaaaaaat

SEQ ID NO: 45803 - DNA, 1553 bp, Zea Mays
cacatctgtagtaagtaacaaaaagcacaaggggcatttgcatgtttcagtgttcaggccaattagtcccttatactgcaggcaacacaaaacacaatgcaaaactgcacacaaatgcagcattctaaccggttcacatgccccgttccgcaccacgacatgcaagtgccgacaggttacattacttgaagcctctcaaaccacacgcacatacattacctctcccatccgccgctggcgtagccgccgtcgtgcgccaggggcacggcccccaccgcgcggcgctgcggctgcacctgccccgtctccgcggcggcggcagcagaggcacagtcagaggagtccagcatcatccttcccgtgactgcccggaatccgcgccagccgtgtccgtgccgaggagtcacgcgtacatccgcctcgtggccacacaggatcctgggcccccggcgcctgcccgcagacgccgccgcactcaggaccagcgccctcaggaggctaccgatgcataccatctcatggctgctggctctaccactcgcttgcccagatgccgcggacgcgccccgaggtgagatccgctggttttaatggcttcggatctggggaaagggagggcagggagggggaagcggccggagggaacgtgatggccggtgccagattgcgccgcctgcctcctccccgctagaaaaaggcaccgaactattattattattatcaactaggtgagtgcccgtgcgttgcaacggggacatatgatattacaataattaataaactcaatcacataatcaaaaagcagtctgcttggatttaaaatcacgctagtacaagaatacatttgtaaatgataaatgttgtggtttgtcatccttatctcctaaatcttctttgatgcatctcaataaaatttcatgcttttactgcataaaacaatagcaaacatgaggtacctataggccatcatggttagtaacaaaatatcaacgatctagagtgagaagtcatcaaatgatatataaaaattgaacacatatatagcttaaagtctagagcatagacgaatttacctcatgcctttcaacaggcaacctatatcagcacaatatcaccagttttaggatcactttgtgtaattttctccttgcgaacattgtgctaacttattccattccatgatacacacataaccaaaagggcacctaacacagtaacacaagtgggtgtaaaattcaatggaatgaatggaatgcatagctatttctctgaaatgatacatggtgttgtacttgtatctaataaccagcaaggatatctttcattttgttgactgacatgattggctcattcccatatatccgtgttaccatctaaacaaagctcttgtatttgtccaagaactcctcctgcaagtgttgagcagattaggcaaccaacttaaatggaacttgtataggtgccgtttggttcagcttctggacggattctggccgccagaagctgaagcggctaccaaacgcgcagcttctccagccgcttttctgcgccgc

SEQ ID NO: 45804 - DNA, 1928 bp, Zea Mays
cgctgccaccgtcttgtcgagctccggccacagccgtagacaccacaactacccatgcacccacggcgttgccttggaccctgcatgtagatgttggtcgcgatctgcagtccgcgacgatcttgagcatctgatggctggggtttataaatggaaactggcatcttataaacagatggaacgtacgaaagttgcatcagagaggttgtcattaagatctaatagcaccaagcatcacgatactgtacatcttggtcttggtcattttgggaaggatggcaatctcatttgtcgttcacttaagtcaatattaaaaccaaaggcaagacagtatgctattgtcaagttatactctttgcctcagaagaagcacaaaagtggtccatcatcgtcaaatgaagttgatgcaatcattgctgatgaggatgctaatttgaagaacagggcagactctttgcaggtatcaagagtaatcaaaatactcccaacgaggtttacaaggagtacttgatatttgatgaaaaaagtctcctggacatgcatacagatgatcaagcgtctggtttctgtttgacaaacttattggctggtgttaatattgcagttctgttatttgaaatagcaagtccagtgaaaaattctgaaaatgaatatttatccctccctttgttgtatggtgccaagataaacaacttaatactttcaggggagtggtggagactactaacaccaatgtgcctgcactctggtttcttacatatagcccttggttgttgggcattgcttatatttggacctcgagtatgcagggcatatggtcaaaggacattttttctgatatacatacttggaggaatctgtggtaatttgagcagttttgttcacactcctgagataaccgtttgtggcacaggcccagtattttctttaattggagcatggctggtatatcagggtcaaaacaagcaagtcattgacaaggacgtttcagaaagtatgttctggcaggctgtgatagctgcagctttgagcttcttattgagcatttttgggagaattgacaactgggcacatcttggggcgaccatttctggaattttctttggttatctgacatgcccaagtgtagaatttgacaattctgcaaagaacggtcaaaaggaagccgtggctcttattaggcaacaagctcatccatgcaaatccgctgcagtctttttcataaccatacttgcgtttgctgtactcgccttcgcttatgggacacaattcaacaatatggatctggaataggcaaatagctaagtgttgtcatggttcacttcatatatatatatatgcatgcatgtagcccgacagctatatattccggaatgtgaatgagcccgagatgtaagaaaacgttgtacactatagatcagttctatgcgtaaccaggttggaatttttccattccgtatcatgtatacactacaatagtgaatagtctagtacagttggtttttggattggctagagcttatcagtgtctgtaagcaggtgaagccacggacggcataactatttgtacactcggtttgcataagaaccgactgcacatctgcatttgcaccgtcggttgcaagttgtgatagactcggcgggaagttttatgtaatataaaataaagtataggtgaagtacatgtttttagtataaatttttatcctgtaattttatagttattgaattttatgactaagagttggtaatcgtgctagtagtgttttatcttggatcactgcatatgtccccttgatgcagtttttggttgtaatccgagcggtttgagttcgtttgaggaaaccccaatacaaaatcttagttttgtctgtattttcagatatgtgattgatttataaatctgattgagttcaaaatttgtgtag

SEQ ID NO: 45805 - DNA, 1987 bp, Zea Mays
atggagattggagaccttgtccaggaaccttcaaattcctcccctggccctatctctccatccgcgcgctctgctctccctgcccgcaccccgcagatcccgaatggccatgcctaccgccgcctgcaggtcggggccggatgcactgcaagctgcggccccgagcaccgggctgaactgaagaggcatctgatggctggggtttataaatggaaactggcatcttataaacagatggaacgtacgaaagttgcatcagagaggttgtcattaagatctaatagcaccaagcatcacgatactgtacatcttggtcttggtcattttgggaaggatggcaatctcatttgtcgttcacttaagtcaatattaaaaccaaaggcaagacagtatgctattgtcaagttatactctttgcctcagaagaagcacaaaagtggtccatcatcgtcaaatgaagttgatgcaatcattgctgatgaggatgctaatttgaagaacagggcagactctttgcaggtatcaagagtaatcaaaatactcccaacgaggtttacaaggagtacttgatatttgatgaaaaaagtctcctggacatgcatacagatgatcaagcgtctggtttctgtttgacaaacttattggctggtgttaatattgcagttctgttatttgaaatagcaagtccagtgaaaaattctgaaaatgaatatttatccctccctttgttgtatggtgccaagataaacaacttaatactttcaggggagtggtggagactactaacaccaatgtgcctgcactctggtttcttacatatagcccttggttgttgggcattgcttatatttggacctcgagtatgcagggcatatggtcaaaggacattttttctgatatacatacttggaggaatctgtggtaatttgagcagttttgttcacactcctgagataaccgtttgtggcacaggcccagtattttctttaattggagcatggctggtatatcagggtcaaaacaagcaagtcattgacaaggacgtttcagaaagtatgttctggcaggctgtgatagctgcagctttgagcttcttattgagcatttttgggagaattgacaactgggcacatcttggggcgaccatttctggaattttctttggttatctgacatgcccaagtgtagaatttgacaattctgcaaagaacggtcaaaaggaagccgtggctcttattaggcaacaagctcatccatgcaaatccgctgcagtctttttcataaccatacttgcgtttgctgtactcgccttcgcttatgggacacaattcaacaatatggatctggaataggcaaatagctaagtgttgtcatggttcacttcatatatatatatatgcatgcatgtagcccgacagctatatattccggaatgtgaatgagcccgagatgtaagaaaacgttgtacactatagatcagttctatgcgtaaccaggttggaatttttccattccgtatcatgtatacactacaatagtgaatagtctagtacagttggtttttggattggctagagcttatcagtgtctgtaagcaggtgaagccacggacggcataactatttgtacactcggtttgcataagaaccgactgcacatctgcatttgcaccgtcggttgcaagttgtgatagactcggcgggaagttttatgtaatataaaataaagtataggtgaagtacatgtttttagtataaatttttatcctgtaattttatagttattgaattttatgactaagagttggtaatcgtgctagtagtgttttatcttggatcactgcatatgtccccttgatgcagtttttggttgtaatccgagcggtttgagttcgtttgaggaaaccccaatacaaaatcttagttttgtctgtattttcagatatgtgattgatttataaatctgattgagttcaaaatttgtgtag

SEQ ID NO: 45806 - DNA, 2216 bp, Zea Mays
cttaactccaaccccgtggtccatggagattggagaccttgtccaggaaccttcaaattcctcccctggccctatctctccatccgcgcgctctgctctccctgcccgcaccccgcagatcccgaatggccatgcctaccgccgcctgcaggtcggggccggatgcactgcaagctgcggccccgagcaccgggctgaactgaagaggtgtcgaggtcgccattaatcctcaacaaccagctgccaccaacgctatatgctcaccatcgccagcaacttggtggcatctgatggctggggtttataaatggaaactggcatcttataaacagatggaacgtacgaaagttgcatcagagaggttgtcattaagatctaatagcaccaagcatcacgatactgtacatcttggtcttggtcattttgggaaggatggcaatctcatttgtcgttcacttaagtcaatattaaaaccaaaggcaagacagtatgctattgtcaaggtacataataaagatgttgacgagggttgcagctccaaagacaatgagattatttctagtccatctgataggaaagaaggaagtcagctgagggcactggaatcttatttttctaaattcaatccctctcagcagttatactctttgcctcagaagaagcacaaaagtggtccatcatcgtcaaatgaagttgatgcaatcattgctgatgaggatgctaatttgaagaacagggcagactctttgcaggtacagattgacagaggacacacaggtatcaagagtaatcaaaatactcccaacgaggtttacaaggagtacttgatatttgatgaaaaaagtctcctggacatgcatacagatgatcaagcgtctggtttctgtttgacttctgttatttgaaatagcaagtccagtgaaaaattctgaaaatgaatatttatccctccctttgttgtatggtgccaagataaacaacttaatactttcaggggagtggtggagactactaacaccaatgtgcctgcactctggtttcttacatatagcccttggttgttgggcattgcttatatttggacctcgagtatgcagggcatatggtcaaaggacattttttctgatatacatacttggaggaatctgtggtaatttgagcagttttgttcacactcctgagataaccgtttgtggcacaggcccagtattttctttaattggagcatggctggtatatcagggtcaaaacaagcaagtcattgacaaggacgtttcagaaagtatgttctggcaggctgtgatagctgcagctttgagcttcttattgagcatttttgggagaattgacaactgggcacatcttggggcgaccatttctggaattttctttggttatctgacatgcccaagtgtagaatttgacaattctgcaaagaacggtcaaaaggaagccgtggctcttattaggcaacaagctcatccatgcaaatccgctgcagtctttttcataaccatacttgcgtttgctgtactcgccttcgcttatgggacacaattcaacaatatggatctggaataggcaaatagctaagtgttgtcatggttcacttcatatatatatatatgcatgcatgtagcccgacagctatatattccggaatgtgaatgagcccgagatgtaagaaaacgttgtacactatagatcagttctatgcgtaaccaggttggaatttttccattccgtatcatgtatacactacaatagtgaatagtctagtacagttggtttttggattggctagagcttatcagtgtctgtaagcaggtgaagccacggacggcataactatttgtacactcggtttgcataagaaccgactgcacatctgcatttgcaccgtcggttgcaagttgtgatagactcggcgggaagttttatgtaatataaaataaagtataggtgaagtacatgtttttagtataaatttttatcctgtaattttatagttattgaattttatgactaagagttggtaatcgtgctagtagtgttttatcttggatcactgcatatgtccccttgatgcagtttttggttgtaatccgagcggtttgagttcgtttgaggaaaccccaatacaaaatcttagttttgtctgtattttcagatatgtgattgatttataaatctgattgagttcaaaatttgtgtag

SEQ ID NO: 45807 - DNA, 2193 bp, Zea Mays
cgcagcatccttatcccctcgcttaactccaaccccgtggtccatggagattggagaccttgtccaggaaccttcaaattcctcccctggccctatctctccatccgcgcgctctgctctccctgcccgcaccccgcagatcccgaatggccatgcctaccgccgcctgcaggtcggggccggatgcactgcaagctgcggccccgagcaccgggctgaactgaagaggtgtcgaggtcgccattaatcctcaacaaccagctgccaccaacgctatatgctcaccatcgccagcaacttggtggcatctgatggctggggtttataaatggaaactggcatcttataaacagatggaacgtacgaaagttgcatcagagaggttgtcattaagatctaatagcaccaagcatcacgatactgtacatcttggtcttggtcattttgggaaggatggcaatctcatttgtcgttcacttaagtcaatattaaaaccaaaggcaagacagtatgctattgtcaaggtacataataaagatgttgacgagggttgcagctccaaagacaatgagattatttctagtccatctgataggaaagaaggaagtcagctgagggcactggaatcttatttttctaaattcaatccctctcagcagttatactctttgcctcagaagaagcacaaaagtggtccatcatcgtcaaatgaagttgatgcaatcattgctgatgaggatgctaatttgaagaacagggcagactctttgcaggtacagattgacagaggacacacaggtatcaagagtaatcaaaatactcccaacgaggtttacaaggagtacttgatatttgatgaaaaaagtctcctggacatgcatacagatgatcaagcgtctggtttctgtttgacaaacttattggctggtgttaatattgcagttctgttatttgaaatagcaagtccagtgaaaaattctgaaaatgaatatttatccctccctttgttgtatggtgccaagataaacaacttaatactttcaggggagtggtggagactactaacaccaatgtgcctgcactctggtttcttacatatagcccttggttgttgggcattgcttatatttggacctcgagtatgcagggcatatggtcaaaggacattttttctgatatacatacttggaggaatctgtggtaatttgagcagttttgttcacactcctgagataaccgtttgtggcacaggcccagtattttctttaattggagcatggctggtatatcagggtcaaaacaagcaagtcattgacaaggacgtttcagaaaggcacatcttggggcgaccatttctggaattttctttggttatctgacatgcccaagtgtagaatttgacaattctgcaaagaacggtcaaaaggaagccgtggctcttattaggcaacaagctcatccatgcaaatccgctgcagtctttttcataaccatacttgcgtttgctgtactcgccttcgcttatgggacacaattcaacaatatggatctggaataggcaaatagctaagtgttgtcatggttcacttcatatatatatatatgcatgcatgtagcccgacagctatatattccggaatgtgaatgagcccgagatgtaagaaaacgttgtacactatagatcagttctatgcgtaaccaggttggaatttttccattccgtatcatgtatacactacaatagtgaatagtctagtacagttggtttttggattggctagagcttatcagtgtctgtaagcaggtgaagccacggacggcataactatttgtacactcggtttgcataagaaccgactgcacatctgcatttgcaccgtcggttgcaagttgtgatagactcggcgggaagttttatgtaatataaaataaagtataggtgaagtacatgtttttagtataaatttttatcctgtaattttatagttattgaattttatgactaagagttggtaatcgtgctagtagtgttttatcttggatcactgcatatgtccccttgatgcagtttttggttgtaatccgagcggtttgagttcgtttgaggaaaccccaatacaaaatcttagttttgtctgtattttcagatatgtgattgatttataaatctgattgagttcaaaatttgtgtag

SEQ ID NO: 45808 - DNA, 2269 bp, Zea Mays
ggccgcagcatccttatcccctcgcttaactccaaccccgtggtccatggagattggagaccttgtccaggaaccttcaaattcctcccctggccctatctctccatccgcgcgctctgctctccctgcccgcaccccgcagatcccgaatggccatgcctaccgccgcctgcaggtcggggccggatgcactgcaagctgcggccccgagcaccgggctgaactgaagaggtgtcgaggtcgccattaatcctcaacaaccagctgccaccaacgctatatgctcaccatcgccagcaacttggtggcatctgatggctggggtttataaatggaaactggcatcttataaacagatggaacgtacgaaagttgcatcagagaggttgtcattaagatctaatagcaccaagcatcacgatactgtacatcttggtcttggtcattttgggaaggatggcaatctcatttgtcgttcacttaagtcaatattaaaaccaaaggcaagacagtatgctattgtcaaggtacataataaagatgttgacgagggttgcagctccaaagacaatgagattatttctagtccatctgataggaaagaaggaagtcagctgagggcactggaatcttatttttctaaattcaatccctctcagcagttatactctttgcctcagaagaagcacaaaagtggtccatcatcgtcaaatgaagttgatgcaatcattgctgatgaggatgctaatttgaagaacagggcagactctttgcaggtacagattgacagaggacacacaggtatcaagagtaatcaaaatactcccaacgaggtttacaaggagtacttgatatttgatgaaaaaagtctcctggacatgcatacagatgatcaagcgtctggtttctgtttgacaaacttattggctggtgttaatattgcagttctgttatttgaaatagcaagtccagtgaaaaattctgaaaatgaatatttatccctccctttgttgtatggtgccaagataaacaacttaatactttcaggggagtggtggagactactaacaccaatgtgcctgcactctggtttcttacatatagcccttggttgttgggcattgcttatatttggacctcgagtatgcagggcatatggtcaaaggacattttttctgatatacatacttggaggaatctgtggtaatttgagcagttttgttcacactcctgagataaccgtttgtggcacaggcccagtattttctttaattggagcatggctggtatatcagggtcaaaacaagcaagtcattgacaaggacgtttcagaaagtatgttctggcaggctgtgatagctgcagctttgagcttcttattgagcatttttgggagaattgacaactgggcacatcttggggcgaccatttctggaattttctttggttatctgacatgcccaagtgtagaatttgacaattctgcaaagaacggtcaaaaggaagccgtggctcttattaggcaacaagctcatccatgcaaatccgctgcagtctttttcataaccatacttgcgtttgctgtactcgccttcgcttatgggacacaattcaacaatatggatctggaataggcaaatagctaagtgttgtcatggttcacttcatatatatatatatgcatgcatgtagcccgacagctatatattccggaatgtgaatgagcccgagatgtaagaaaacgttgtacactatagatcagttctatgcgtaaccaggttggaatttttccattccgtatcatgtatacactacaatagtgaatagtctagtacagttggtttttggattggctagagcttatcagtgtctgtaagcaggtgaagccacggacggcataactatttgtacactcggtttgcataagaaccgactgcacatctgcatttgcaccgtcggttgcaagttgtgatagactcggcgggaagttttatgtaatataaaataaagtataggtgaagtacatgtttttagtataaatttttatcctgtaattttatagttattgaattttatgactaagagttggtaatcgtgctagtagtgttttatcttggatcactgcatatgtccccttgatgcagtttttggttgtaatccgagcggtttgagttcgtttgaggaaaccccaatacaaaatcttagttttgtctgtattttcagatatgtgattgatttataaatctgattgagttcaaaatttgtgtag

SEQ ID NO: 45809 - DNA, 2201 bp, Zea Mays
ggccgcagcatccttatcccctcgcttaactccaaccccgtggtccatggagattggagaccttgtccaggaaccttcaaattcctcccctggccctatctctccatccgcgcgctctgctctccctgcccgcaccccgcagatcccgaatggccatgcctaccgccgcctgcaggtcggggccggatgcactgcaagctgcggccccgagcaccgggctgaactgaagaggtgtcgaggtcgccattaatcctcaacaaccagctgccaccaacgctatatgctcaccatcgccagcaacttggtggcatctgatggctggggtttataaatggaaactggcatcttataaacagatggaacgtacgaaagttgcatcagagaggttgtcattaagatctaatagcaccaagcatcacgatactgtacatcttggtcttggtcattttgggaaggatggcaatctcatttgtcgttcacttaagtcaatattaaaaccaaaggcaagacagtatgctattgtcaaggtacataataaagatgttgacgagggttgcagctccaaagacaatgagattatttctagtccatctgataggaaagaaggaagtcagctgagggcactggaatcttatttttctaaattcaatccctctcagcagttatactctttgcctcagaagaagcacaaaagtggtccatcatcgtcaaatgaagttgatgcaatcattgctgatgaggatgctaatttgaagaacagggcagactctttgcaggtacagattgacagaggacacacaggtatcaagagtaatcaaaatactcccaacgaggtttacaaggagtacttgatatttgatgaaaaaagtctcctggacatgcatacagatgatcaagcgtctggtttctgtttgacaaacttattggctggtgttaatattgcagttctgttatttgaaatagcaagtccagtgaaaaattctgaaaatgaatatttatccctccctttgttgtatggtgccaagataaacaacttaatactttcaggggagtggtggagactactaacaccaatgtgcctgggcatatggtcaaaggacattttttctgatatacatacttggaggaatctgtggtaatttgagcagttttgttcacactcctgagataaccgtttgtggcacaggcccagtattttctttaattggagcatggctggtatatcagggtcaaaacaagcaagtcattgacaaggacgtttcagaaagtatgttctggcaggctgtgatagctgcagctttgagcttcttattgagcatttttgggagaattgacaactgggcacatcttggggcgaccatttctggaattttctttggttatctgacatgcccaagtgtagaatttgacaattctgcaaagaacggtcaaaaggaagccgtggctcttattaggcaacaagctcatccatgcaaatccgctgcagtctttttcataaccatacttgcgtttgctgtactcgccttcgcttatgggacacaattcaacaatatggatctggaataggcaaatagctaagtgttgtcatggttcacttcatatatatatatatgcatgcatgtagcccgacagctatatattccggaatgtgaatgagcccgagatgtaagaaaacgttgtacactatagatcagttctatgcgtaaccaggttggaatttttccattccgtatcatgtatacactacaatagtgaatagtctagtacagttggtttttggattggctagagcttatcagtgtctgtaagcaggtgaagccacggacggcataactatttgtacactcggtttgcataagaaccgactgcacatctgcatttgcaccgtcggttgcaagttgtgatagactcggcgggaagttttatgtaatataaaataaagtataggtgaagtacatgtttttagtataaatttttatcctgtaattttatagttattgaattttatgactaagagttggtaatcgtgctagtagtgttttatcttggatcactgcatatgtccccttgatgcagtttttggttgtaatccgagcggtttgagttcgtttgaggaaaccccaatacaaaatcttagttttgtctgtattttcagatatgtgattgatttataaatctgattgagttcaaaatttgtgtag

SEQ ID NO: 45810 - DNA, 3042 bp, Zea Mays
cggcctccgacttcggaggtctgacggccgcagcatccttatcccctcgcttaactccaaccccgtggtccatggagattggagaccttgtccaggaaccttcaaattcctcccctggccctatctctccatccgcgcgctctgctctccctgcccgcaccccgcagatcccgaatggccatgcctaccgccgcctgcaggtcggggccggatgcactgcaagctgcggccccgagcaccgggctgaactgaagaggcatctgatggctggggtttataaatggaaactggcatcttataaacagatggaacgtacgaaagttgcatcagagaggttgtcattaagatctaatagcaccaagcatcacgatactgtacatcttggtcttggtcattttgggaaggatggcaatctcatttgtcgttcacttaagtcaatattaaaaccaaaggcaagacagtatgctattgtcaaggtacataataaagatgttgacgagggttgcagctccaaagacaatgagattatttctagtccatctgataggaaagaaggaagtcagctgagggcactggaatcttatttttctaaattcaatccctctcagcagttatactctttgcctcagaagaagcacaaaagtggtccatcatcgtcaaatgaagttgatgcaatcattgctgatgaggatgctaatttgaagaacagggcagactctttgcaggtacagattgacagaggacacacaggtatcaagagtaatcaaaatactcccaacgaggtttacaaggagtacttgatatttgatgaaaaaagtctcctggacatgcatacagatgatcaagcgtctggtttctgtttgacgtaagtatgtcttaccacttccagtacaagttggaactgccagattgggcatgtaattcctttattatttggtgatattcagaaatatagtttcgttatcatagatacggtgattctagtaccaccatctcctgctattgatattaatgtggaattcatgtgaagaacagaaaatggatatatttgtcacctcctgttttatgtgaacaatgatttctcacatcaaagttacaggaaaacaaaacttgtttaactgtgggcttttccttttatttagataacagaagaaagttgtagccttcatgaaagtgacattagtccaaattatgacaagatatgattagcactaccaaatccacaaccacatgtgcaaaaaaaacatcggataggagttgaacactattcctcaattctaaagataaaaagacatcaatgagaggcaaaaaaaaattgcataacgggagaatccagattacggcaagcgtaaatcaactgctccttctgtttgtcacatattcacattgctacaactttgcccccagtatgggagtatgggactagcaaaaaagattttgaactcgctagcttctgctttaaaaaggtttcaatatccaatttctcatttcccaactttctctagtattgacattgtcctaaaaatttgggcaagtttttaaaattgtgatattagtaaaaaataacaacttgcaatggccataaaactgggacaacaaaactgggagaaaacgcccagttaaaaagatcaaaccacactgtccaatgcaccagcttatttgcgtcccttgttcttttgcacacttcagcataagtaataaatattttcatattgccacgttttcttcgctaactcttgaattgtgtaaaaatgcagaaacttattggctggtgttaatattgcagttctgttatttgaaatagcaagtccagtgaaaaattctgaaaatgaatatttatccctccctttgttgtatggtgccaagataaacaacttaatactttcaggggagtggtggagactactaacaccaatgtgcctgggcatatggtcaaaggacattttttctgatatacatacttggaggaatctgtggtaatttgagcagttttgttcacactcctgagataaccgtttgtggcacaggcccagtattttctttaattggagcatggctggtatatcagggtcaaaacaagcaagtcattgacaaggacgtttcagaaagtatgttctggcaggctgtgatagctgcagctttgagcttcttattgagcatttttgggagaattgacaactgggcacatcttggggcgaccatttctggaattttctttggttatctgacatgcccaagtgtagaatttgacaattctgcaaagaacggtcaaaaggaagccgtggctcttattaggcaacaagctcatccatgcaaatccgctgcagtctttttcataaccatacttgcgtttgctgtactcgccttcgcttatgggacacaattcaacaatatggatctggaataggcaaatagctaagtgttgtcatggttcacttcatatatatatatatgcatgcatgtagcccgacagctatatattccggaatgtgaatgagcccgagatgtaagaaaacgttgtacactatagatcagttctatgcgtaaccaggttggaatttttccattccgtatcatgtatacactacaatagtgaatagtctagtacagttggtttttggattggctagagcttatcagtgtctgtaagcaggtgaagccacggacggcataactatttgtacactcggtttgcataagaaccgactgcacatctgcatttgcaccgtcggttgcaagttgtgatagactcggcgggaagttttatgtaatataaaataaagtataggtgaagtacatgtttttagtataaatttttatcctgtaattttatagttattgaattttatgactaagagttggtaatcgtgctagtagtgttttatcttggatcactgcatatgtccccttgatgcagtttttggttgtaatccgagcggtttgagttcgtttgaggaaaccccaatacaaaatcttagttttgtctgtattttcagatatgtgattgatttataaatctgattgagttcaaaatttgtgtag

SEQ ID NO: 45811 - DNA, 2206 bp, Zea Mays
gaaaaagaaaggtctgacggcctccgacttcggaggtctgacggccgcagcatccttatcccctcgcttaactccaaccccgtggtccatggagattggagaccttgtccaggaaccttcaaattcctcccctggccctatctctccatccgcgcgctctgctctccctgcccgcaccccgcagatcccgaatggccatgcctaccgccgcctgcaggtcggggccggatgcactgcaagctgcggccccgagcaccgggctgaactgaagaggcatctgatggctggggtttataaatggaaactggcatcttataaacagatggaacgtacgaaagttgcatcagagaggttgtcattaagatctaatagcaccaagcatcacgatactgtacatcttggtcttggtcattttgggaaggatggcaatctcatttgtcgttcacttaagtcaatattaaaaccaaaggcaagacagtatgctattgtcaaggtacataataaagatgttgacgagggttgcagctccaaagacaatgagattatttctagtccatctgataggaaagaaggaagtcagctgagggcactggaatcttatttttctaaattcaatccctctcagcagttatactctttgcctcagaagaagcacaaaagtggtccatcatcgtcaaatgaagttgatgcaatcattgctgatgaggatgctaatttgaagaacagggcagactctttgcaggtacagattgacagaggacacacaggtatcaagagtaatcaaaatactcccaacgaggtttacaaggagtacttgatatttgatgaaaaaagtctcctggacatgcatacagatgatcaagcgtctggtttctgtttgacttctgttatttgaaatagcaagtccagtgaaaaattctgaaaatgaatatttatccctccctttgttgtatggtgccaagataaacaacttaatactttcaggggagtggtggagactactaacaccaatgtgcctgcactctggtttcttacatatagcccttggttgttgggcattgcttatatttggacctcgagtatgcagggcatatggtcaaaggacattttttctgatatacatacttggaggaatctgtggtaatttgagcagttttgttcacactcctgagataaccgtttgtggcacaggcccagtattttctttaattggagcatggctggtatatcagggtcaaaacaagcaagtcattgacaaggacgtttcagaaagtatgttctggcaggctgtgatagctgcagctttgagcttcttattgagcatttttgggagaattgacaactgggcacatcttggggcgaccatttctggaattttctttggttatctgacatgcccaagtgtagaatttgacaattctgcaaagaacggtcaaaaggaagccgtggctcttattaggcaacaagctcatccatgcaaatccgctgcagtctttttcataaccatacttgcgtttgctgtactcgccttcgcttatgggacacaattcaacaatatggatctggaataggcaaatagctaagtgttgtcatggttcacttcatatatatatatatgcatgcatgtagcccgacagctatatattccggaatgtgaatgagcccgagatgtaagaaaacgttgtacactatagatcagttctatgcgtaaccaggttggaatttttccattccgtatcatgtatacactacaatagtgaatagtctagtacagttggtttttggattggctagagcttatcagtgtctgtaagcaggtgaagccacggacggcataactatttgtacactcggtttgcataagaaccgactgcacatctgcatttgcaccgtcggttgcaagttgtgatagactcggcgggaagttttatgtaatataaaataaagtataggtgaagtacatgtttttagtataaatttttatcctgtaattttatagttattgaattttatgactaagagttggtaatcgtgctagtagtgttttatcttggatcactgcatatgtccccttgatgcagtttttggttgtaatccgagcggtttgagttcgtttgaggaaaccccaatacaaaatcttagttttgtctgtattttcagatatgtgattgatttataaatctgattgagttcaaaatttgtgtag

SEQ ID NO: 45812 - DNA, 1342 bp, Zea Mays
cttaactccaaccccgtggtccatggagattggagaccttgtccaggaaccttcaaattcctcccctggccctatctctccatccgcgcgctctgctctccctgcccgcaccccgcagatcccgaatggccatgcctaccgccgcctgcaggtcggggccggatgcactgcaagctgcggccccgagcaccgggctgaactgaagaggtgtcgaggtcgccattaatcctcaacaaccagctgccaccaacgctatatgctcaccatcgccagcaacttggtggcatctgatggctggggtttataaatggaaactggcatcttataaacagatggaacgtacgaaagttgcatcagagaggttgtcattaagatctaatagcaccaagcatcacgatactgtacatcttggtcttggtcattttgggaaggatggcaatctcatttgtcgttcacttaagtcaatattaaaaccaaaggcaagacagtatgctattgtcaaggtacataataaagatgttgacgagggttgcagctccaaagacaatgagattatttctagtccatctgataggaaagaaggaagtcagctgagggcactggaatcttatttttctaaattcaatccctctcagcagttatactctttgcctcagaagaagcacaaaagtggtccatcatcgtcaaatgaagttgatgcaatcattgctgatgaggatgctaatttgaagaacagggcagactctttgcaggtacagattgacagaggacacacaggtatcaagagtaatcaaaatactcccaacgaggtttacaaggagtacttgatatttgatgaaaaaagtctcctggacatgcatacagatgatcaagcgtctggtttctgtttgacgtaagtatgtcttaccacttccagtacaagttggaactgccagattgggcatgtaattcctttattatttggtgatattcagaaatatagtttcgttatcatagatacggtgattctagtaccaccatctcctgctattgatattaatgtggaattcatgtgaagaacagaaaatggatatatttgtcacctcctgttttatgtgaacaatgatttctcacatcaaagttacaggaaaacaaaacttgtttaactgtgggcttttccttttatttagataacagaagaaagttgtagccttcatgaaagtgacattagtccaaattatgacaagatatgattagcactaccaaatccacaaccacatgtgcaaaaaaaacatcggataggagttgaacactattcctcaattctaaagataaaaagacatcaatgagaggcaaaaaaaaa

SEQ ID NO: 45813 - DNA, 1747 bp, Zea Mays
ctttgatgacgatatgggagattacctgtgtttttaaaggtgtgggcaatatcaaatcaaactgtgcacttatggaggcttcaattccaagttttgaaagcatgtacagccaatattatgtggcatgaaagagatggaaaccagtcagacggccaacttggggattcatcaggagctgggaccagagatcagtcaaaatcccatgggaaatcatgttaacccagaaaaggaaactaatgaaattccaggatctgaggttaaccaagagcttgtggaaatatgccagggcgcagtggtggaaactgatacgatccaagaaaatcaagctgttccagaggcaggcttagaggttaatgaagagactgtggaaacatgccaggaaacagctgcagaatctgatgttaacctagagaagcaaacttctgatccaggtgttatttaccgctgcagaaaatgccggagaatgcttgcaacacaagaatttgttgttacccatgaagtaggtgcaggtggcaaaagcttcagagcaggcaaacggtctaatgtgcatgaggatgatgagaaaccagaatgtccatgcatcttcgtggagcccatgaagtggatgcaaactgtggaagaaggatatgttgcgaaaaagctcttttgcatgggatgtaaagctcgtctgggacagttcaattgggctggtatgcagtgcagctgcggagcctgggtgattccagcatttcagctgaccaaaagtaagatcgaccaatgctcaatgtaacaccagtgcaattaggcgaagttttgacccccttagcagtgtcgttacaacatatatatgtgactaggaaacagtatcatgtagacatgtataggcactgtggtcatttggtctgctgtttagtctgctgctgctgattggcacgtgggttccaccaagctgcaacaactgatactaggaagcattaggtgggctttcagtttgctggtttgttttgccatgctactttagagcaactctaatagattagctaaaaaggctagtcaaatttatagatttagctactctctcaaatcgtttttacagaaaaaagtgtaggttaatccaacagcatcggtaaacctaatggagataaacctaatggagagtgaagcagtctatccaaaaacaaaaacagagagcgaagatgtagggatagagagctactaaatttaaagagccatttacagagtctattggatacacttttcttctaatattagctaaatttacctttagaaaaccatatacctagtctcttggagttgtgaggtgatctattgttctagtctcttggagttgtgaggtgatctattgttcggagggagatgggtatgatatgatcaatctaatgagtgggtctatttcctcgagatggataatgcaattctgatctgctggtaagttgttatgaggttaccttccataatgctggcccgctgttgtatgaattatgagcatacgcatgttatgctgacgtcagcttcttcttcttctttccctgtcagctttgacttagttgtctccgacagtcttcctatctcaatctccattctataaacattcctatctcaatctccattctataaacagtacaatttatagtgtaaaataatgttttgtatggttatgtttatgctccgccgagcacgactttagagtgacatggacgtctggtatcttgaaataagcctgttttggtggcagtggagatcacag

SEQ ID NO: 45814 - DNA, 1415 bp, Zea Mays
ctactgtccagtgactttgatgacgatatgggagattacctgtgtttttaaaggtgtgggcaatatcaaatcaaactgtgcacttatggaggcttcaattccaagttttgaaagcatgaaaatgccggagaatgcttgcaacacaagaatttgttgttacccatgaagtaggtgcaggtggcaaaagcttcagagcaggcaaacggtctaatgtgcatgaggatgatgagaaaccagaatgtccatgcatcttcgtggagcccatgaagtggatgcaaactgtggaagaaggatatgttgcgaaaaagctcttttgcatgggatgtaaagctcgtctgggacagttcaattgggctggtatgcagtgcagctgcggagcctgggtgattccagcatttcagctgaccaaaagtaagatcgaccaatgctcaatgtaacaccagtgcaattaggcgaagttttgacccccttagcagtgtcgttacaacatatatatgtgactaggaaacagtatcatgtagacatgtataggcactgtggtcatttggtctgctgtttagtctgctgctgctgattggcacgtgggttccaccaagctgcaacaactgatactaggaagcattaggtgggctttcagtttgctggtttgttttgccatgctactttagagcaactctaatagattagctaaaaaggctagtcaaatttatagatttagctactctctcaaatcgtttttacagaaaaaagtgtaggttaatccaacagcatcggtaaacctaatggagataaacctaatggagagtgaagcagtctatccaaaaacaaaaacagagagcgaagatgtagggatagagagctactaaatttaaagagccatttacagagtctattggatacacttttcttctaatattagctaaatttacctttagaaaaccatatacctagtctcttggagttgtgaggtgatctattgttctagtctcttggagttgtgaggtgatctattgttcggagggagatgggtatgatatgatcaatctaatgagtgggtctatttcctcgagatggataatgcaattctgatctgctggtaagttgttatgaggttaccttccataatgctggcccgctgttgtatgaattatgagcatacgcatgttatgctgacgtcagcttcttcttcttctttccctgtcagctttgacttagttgtctccgacagtcttcctatctcaatctccattctataaacattcctatctcaatctccattctataaacagtacaatttatagtgtaaaataatgttttgtatggttatgtttatgctccgccgagcacgactttagagtgacatggacgtctggtatcttgaaataagcctgttttggtggcagtggagatcacag

SEQ ID NO: 45815 - DNA, 1970 bp, Zea Mays
aatttaaaaactaaaataaaataaaatagatggattaaaaattcgtcaataaaaatcaaacacgctgacatgtggtaccaacctttaatgggctatgccttagtgggccctcggtcaaccacctacgggcacatcacatgactcaacacgcacgcctgaggctgcctccagcagtccagccgcgtctcccgctctcgtcttttctttcggcgacgagccgcagactaggcaaccgctgccgccctaggtcaggtgcccaggtatccatcggacgacccttccccgtcgacagcaagcaccaggtgtgggcaatatcaaatcaaactgtgcacttatggaggcttcaattccaagttttgaaagcatgtcagacggccaacttggggattcatcaggagctgggaccagagatcagtcaaaatcccatgggaaatcatgttaacccagaaaaggaaactaatgaaattccaggatctgaggttaaccaagagcttgtggaaatatgccagggcgcagtggtggaaactgatacgatccaagaaaatcaagctgttccagaggcaggcttagaggttaatgaagagactgtggaaacatgccaggaaacagctgcagaatctgatgttaacctagagaagcaaacttctgatccaggtgttatttaccgctgcagaaaatgccggagaatgcttgcaacacaagaatttgttgttacccatgaagtaggtgcaggtggcaaaagcttcagagcaggcaaacggtctaatgtgcatgaggatgatgagaaaccagaatgtccatgcatcttcgtggagcccatgaagtggatgcaaactgtggaagaaggatatgttgcgaaaaagctcttttgcatgggatgtaaagctcgtctgggacagttcaattgggctggtatgcagtgcagctgcggagcctgggtgattccagcatttcagctgaccaaaagtaagatcgaccaatgctcaatgtaacaccagtgcaattaggcgaagttttgacccccttagcagtgtcgttacaacatatatatgtgactaggaaacagtatcatgtagacatgtataggcactgtggtcatttggtctgctgtttagtctgctgctgctgattggcacgtgggttccaccaagctgcaacaactgatactaggaagcattaggtgggctttcagtttgctggtttgttttgccatgctactttagagcaactctaatagattagctaaaaaggctagtcaaatttatagatttagctactctctcaaatcgtttttacagaaaaaagtgtaggttaatccaacagcatcggtaaacctaatggagataaacctaatggagagtgaagcagtctatccaaaaacaaaaacagagagcgaagatgtagggatagagagctactaaatttaaagagccatttacagagtctattggatacacttttcttctaatattagctaaatttacctttagaaaaccatatacctagtctcttggagttgtgaggtgatctattgttctagtctcttggagttgtgaggtgatctattgttcggagggagatgggtatgatatgatcaatctaatgagtgggtctatttcctcgagatggataatgcaattctgatctgctggtaagttgttatgaggttaccttccataatgctggcccgctgttgtatgaattatgagcatacgcatgttatgctgacgtcagcttcttcttcttctttccctgtcagctttgacttagttgtctccgacagtcttcctatctcaatctccattctataaacattcctatctcaatctccattctataaacagtacaatttatagtgtaaaataatgttttgtatggttatgtttatgctccgccgagcacgactttagagtgacatggacgtctggtatcttgaaataagcctgttttggtggcagtggagatcacag

SEQ ID NO: 45816 - DNA, 2010 bp, Zea Mays
aatttaaaaactaaaataaaataaaatagatggattaaaaattcgtcaataaaaatcaaacacgctgacatgtggtaccaacctttaatgggctatgccttagtgggccctcggtcaaccacctacgggcacatcacatgactcaacacgcacgcctgaggctgcctccagcagtccagccgcgtctcccgctctcgtcttttctttcggcgacgagccgcagactaggcaaccgctgccgccctaggtcaggtgcccaggtatccatcggacgacccttccccgtcgacagcaagcaccaggtgtgggcaatatcaaatcaaactgtgcacttatggaggcttcaattccaagttttgaaagcatgtacagccaatattatgtggcatgaaagagatggaaaccagtcagacggccaacttggggattcatcaggagctgggaccagagatcagtcaaaatcccatgggaaatcatgttaacccagaaaaggaaactaatgaaattccaggatctgaggttaaccaagagcttgtggaaatatgccagggcgcagtggtggaaactgatacgatccaagaaaatcaagctgttccagaggcaggcttagaggttaatgaagagactgtggaaacatgccaggaaacagctgcagaatctgatgttaacctagagaagcaaacttctgatccaggtgttatttaccgctgcagaaaatgccggagaatgcttgcaacacaagaatttgttgttacccatgaagtaggtgcaggtggcaaaagcttcagagcaggcaaacggtctaatgtgcatgaggatgatgagaaaccagaatgtccatgcatcttcgtggagcccatgaagtggatgcaaactgtggaagaaggatatgttgcgaaaaagctcttttgcatgggatgtaaagctcgtctgggacagttcaattgggctggtatgcagtgcagctgcggagcctgggtgattccagcatttcagctgaccaaaagtaagatcgaccaatgctcaatgtaacaccagtgcaattaggcgaagttttgacccccttagcagtgtcgttacaacatatatatgtgactaggaaacagtatcatgtagacatgtataggcactgtggtcatttggtctgctgtttagtctgctgctgctgattggcacgtgggttccaccaagctgcaacaactgatactaggaagcattaggtgggctttcagtttgctggtttgttttgccatgctactttagagcaactctaatagattagctaaaaaggctagtcaaatttatagatttagctactctctcaaatcgtttttacagaaaaaagtgtaggttaatccaacagcatcggtaaacctaatggagataaacctaatggagagtgaagcagtctatccaaaaacaaaaacagagagcgaagatgtagggatagagagctactaaatttaaagagccatttacagagtctattggatacacttttcttctaatattagctaaatttacctttagaaaaccatatacctagtctcttggagttgtgaggtgatctattgttctagtctcttggagttgtgaggtgatctattgttcggagggagatgggtatgatatgatcaatctaatgagtgggtctatttcctcgagatggataatgcaattctgatctgctggtaagttgttatgaggttaccttccataatgctggcccgctgttgtatgaattatgagcatacgcatgttatgctgacgtcagcttcttcttcttctttccctgtcagctttgacttagttgtctccgacagtcttcctatctcaatctccattctataaacattcctatctcaatctccattctataaacagtacaatttatagtgtaaaataatgttttgtatggttatgtttatgctccgccgagcacgactttagagtgacatggacgtctggtatcttgaaataagcctgttttggtggcagtggagatcacag

SEQ ID NO: 45817 - DNA, 1983 bp, Zea Mays
aatttaaaaactaaaataaaataaaatagatggattaaaaattcgtcaataaaaatcaaacacgctgacatgtggtaccaacctttaatgggctatgccttagtgggccctcggtcaaccacctacgggcacatcacatgactcaacacgcacgcctgaggctgcctccagcagtccagccgcgtctcccgctctcgtcttttctttcggcgacgagccgcagactaggcaaccgctgccgccctaggtcaggtgcccaggtatccatcggacgacccttccccgtcgacagcaagcaccaggtgtgggcaatatcaaatcaaactgtgcacttatggaggcttcaattccaagttttgaaagcatgagatggaaaccagtcagacggccaacttggggattcatcaggagctgggaccagagatcagtcaaaatcccatgggaaatcatgttaacccagaaaaggaaactaatgaaattccaggatctgaggttaaccaagagcttgtggaaatatgccagggcgcagtggtggaaactgatacgatccaagaaaatcaagctgttccagaggcaggcttagaggttaatgaagagactgtggaaacatgccaggaaacagctgcagaatctgatgttaacctagagaagcaaacttctgatccaggtgttatttaccgctgcagaaaatgccggagaatgcttgcaacacaagaatttgttgttacccatgaagtaggtgcaggtggcaaaagcttcagagcaggcaaacggtctaatgtgcatgaggatgatgagaaaccagaatgtccatgcatcttcgtggagcccatgaagtggatgcaaactgtggaagaaggatatgttgcgaaaaagctcttttgcatgggatgtaaagctcgtctgggacagttcaattgggctggtatgcagtgcagctgcggagcctgggtgattccagcatttcagctgaccaaaagtaagatcgaccaatgctcaatgtaacaccagtgcaattaggcgaagttttgacccccttagcagtgtcgttacaacatatatatgtgactaggaaacagtatcatgtagacatgtataggcactgtggtcatttggtctgctgtttagtctgctgctgctgattggcacgtgggttccaccaagctgcaacaactgatactaggaagcattaggtgggctttcagtttgctggtttgttttgccatgctactttagagcaactctaatagattagctaaaaaggctagtcaaatttatagatttagctactctctcaaatcgtttttacagaaaaaagtgtaggttaatccaacagcatcggtaaacctaatggagataaacctaatggagagtgaagcagtctatccaaaaacaaaaacagagagcgaagatgtagggatagagagctactaaatttaaagagccatttacagagtctattggatacacttttcttctaatattagctaaatttacctttagaaaaccatatacctagtctcttggagttgtgaggtgatctattgttctagtctcttggagttgtgaggtgatctattgttcggagggagatgggtatgatatgatcaatctaatgagtgggtctatttcctcgagatggataatgcaattctgatctgctggtaagttgttatgaggttaccttccataatgctggcccgctgttgtatgaattatgagcatacgcatgttatgctgacgtcagcttcttcttcttctttccctgtcagctttgacttagttgtctccgacagtcttcctatctcaatctccattctataaacattcctatctcaatctccattctataaacagtacaatttatagtgtaaaataatgttttgtatggttatgtttatgctccgccgagcacgactttagagtgacatggacgtctggtatcttgaaataagcctgttttggtggcagtggagatcacag

SEQ ID NO: 45818 - DNA, 1828 bp, Zea Mays
aatttaaaaactaaaataaaataaaatagatggattaaaaattcgtcaataaaaatcaaacacgctgacatgtggtaccaacctttaatgggctatgccttagtgggccctcggtcaaccacctacgggcacatcacatgactcaacacgcacgcctgaggctgcctccagcagtccagccgcgtctcccgctctcgtcttttctttcggcgacgagccgcagactaggcaaccgctgccgccctaggtcaggtgcccaggtatccatcggacgacccttccccgtcgacagcaagcaccaggtgtgggcaatatcaaatcaaactgtgcacttatggaggcttcaattccaagttttgaaagcatgggcgcagtggtggaaactgatacgatccaagaaaatcaagctgttccagaggcaggcttagaggttaatgaagagactgtggaaacatgccaggaaacagctgcagaatctgatgttaacctagagaagcaaacttctgatccaggtgttatttaccgctgcagaaaatgccggagaatgcttgcaacacaagaatttgttgttacccatgaagtaggtgcaggtggcaaaagcttcagagcaggcaaacggtctaatgtgcatgaggatgatgagaaaccagaatgtccatgcatcttcgtggagcccatgaagtggatgcaaactgtggaagaaggatatgttgcgaaaaagctcttttgcatgggatgtaaagctcgtctgggacagttcaattgggctggtatgcagtgcagctgcggagcctgggtgattccagcatttcagctgaccaaaagtaagatcgaccaatgctcaatgtaacaccagtgcaattaggcgaagttttgacccccttagcagtgtcgttacaacatatatatgtgactaggaaacagtatcatgtagacatgtataggcactgtggtcatttggtctgctgtttagtctgctgctgctgattggcacgtgggttccaccaagctgcaacaactgatactaggaagcattaggtgggctttcagtttgctggtttgttttgccatgctactttagagcaactctaatagattagctaaaaaggctagtcaaatttatagatttagctactctctcaaatcgtttttacagaaaaaagtgtaggttaatccaacagcatcggtaaacctaatggagataaacctaatggagagtgaagcagtctatccaaaaacaaaaacagagagcgaagatgtagggatagagagctactaaatttaaagagccatttacagagtctattggatacacttttcttctaatattagctaaatttacctttagaaaaccatatacctagtctcttggagttgtgaggtgatctattgttctagtctcttggagttgtgaggtgatctattgttcggagggagatgggtatgatatgatcaatctaatgagtgggtctatttcctcgagatggataatgcaattctgatctgctggtaagttgttatgaggttaccttccataatgctggcccgctgttgtatgaattatgagcatacgcatgttatgctgacgtcagcttcttcttcttctttccctgtcagctttgacttagttgtctccgacagtcttcctatctcaatctccattctataaacattcctatctcaatctccattctataaacagtacaatttatagtgtaaaataatgttttgtatggttatgtttatgctccgccgagcacgactttagagtgacatggacgtctggtatcttgaaataagcctgttttggtggcagtggagatcacag

SEQ ID NO: 45819 - DNA, 1664 bp, Zea Mays
aatttaaaaactaaaataaaataaaatagatggattaaaaattcgtcaataaaaatcaaacacgctgacatgtggtaccaacctttaatgggctatgccttagtgggccctcggtcaaccacctacgggcacatcacatgactcaacacgcacgcctgaggctgcctccagcagtccagccgcgtctcccgctctcgtcttttctttcggcgacgagccgcagactaggcaaccgctgccgccctaggtcaggtgcccaggtatccatcggacgacccttccccgtcgacagcaagcaccaggtgtgggcaatatcaaatcaaactgtgcacttatggaggcttcaattccaagttttgaaagcatgaaaatgccggagaatgcttgcaacacaagaatttgttgttacccatgaagtaggtgcaggtggcaaaagcttcagagcaggcaaacggtctaatgtgcatgaggatgatgagaaaccagaatgtccatgcatcttcgtggagcccatgaagtggatgcaaactgtggaagaaggatatgttgcgaaaaagctcttttgcatgggatgtaaagctcgtctgggacagttcaattgggctggtatgcagtgcagctgcggagcctgggtgattccagcatttcagctgaccaaaagtaagatcgaccaatgctcaatgtaacaccagtgcaattaggcgaagttttgacccccttagcagtgtcgttacaacatatatatgtgactaggaaacagtatcatgtagacatgtataggcactgtggtcatttggtctgctgtttagtctgctgctgctgattggcacgtgggttccaccaagctgcaacaactgatactaggaagcattaggtgggctttcagtttgctggtttgttttgccatgctactttagagcaactctaatagattagctaaaaaggctagtcaaatttatagatttagctactctctcaaatcgtttttacagaaaaaagtgtaggttaatccaacagcatcggtaaacctaatggagataaacctaatggagagtgaagcagtctatccaaaaacaaaaacagagagcgaagatgtagggatagagagctactaaatttaaagagccatttacagagtctattggatacacttttcttctaatattagctaaatttacctttagaaaaccatatacctagtctcttggagttgtgaggtgatctattgttctagtctcttggagttgtgaggtgatctattgttcggagggagatgggtatgatatgatcaatctaatgagtgggtctatttcctcgagatggataatgcaattctgatctgctggtaagttgttatgaggttaccttccataatgctggcccgctgttgtatgaattatgagcatacgcatgttatgctgacgtcagcttcttcttcttctttccctgtcagctttgacttagttgtctccgacagtcttcctatctcaatctccattctataaacattcctatctcaatctccattctataaacagtacaatttatagtgtaaaataatgttttgtatggttatgtttatgctccgccgagcacgactttagagtgacatggacgtctggtatcttgaaataagcctgttttggtggcagtggagatcacag

SEQ ID NO: 45820 - DNA, 3912 bp, Zea Mays
cccgtcgtcctctccatttccttctgtctgcttgccctcaaaccctagcccgtaccggcgtccaccttcgcgcaccctcgcctcaccaaacacccacggcgcattggcgcttccacctcttatcgtacgaaggcgagcggctttcacggtgtctctctgtcgcatgcaatggcaccgctgtttgaggggcgcccaacagctgcctgcccacggcatgctcaggggcgctggggtcccttgccgctgtccctgaagtctagcctgggttgttgatcttgccgcagatgcggtactccattacttctccgcccgcgccatcatttcggccacacctcagtctgttgtgttcaggactgtcagggttgtgctacctggatgtcggttgcctcattgataggaatcatcgtgcagattgtcgtgttttggacaatgccaacctttgtttccgctgtgcctgccaaggttgtggcttccttgggtgatgcttatttgagaacatagctgttgtgctctgagcatgtcctgtgtgcctgtcatggcggcttcttttggcgacatcataccaacatattcaatgtcaggctttaaaggagtgagctggtttctatattttaactgatgcaccttgatgctttattgagcggtgtctatgaaatgatttggatggaaggtaaatttcccaccaatttaattttagatattttaaataattccttgccatatctgcattcagcctgttattgtgtttatgttcacccttttttagtagggaaatcaaaacatagttaatccagtactactgggttttattatgcctgattttgtttctgcttttgagtctatcatgattatagggctgttaatgacacatgacattgtcaattggaaataccatgtcaacggactgattaagaaatacaaaatctttgcttagatgggacatatttggaaaataccccttatattaaaaaacacatggtgtgtcaagcattttttttacaaactgtagcaaactgaaaactagttgcattggtcatgcggaaatgtctcatctatctcatgtatgttgcttatattttgtctcttgaagatcacaagcgaatgcacttttctcttgtctctcttgtttgttgtttctctccagatgagctgtcctattcttgttgcattttgtccgcaactcctatcacccctatcttaatccttcctgtaggatggtaggtgtactgaaacagatgatgacaaactttctgaattgcatgaaagtgaaccaggatatgctaattggattttccaaaagattggatcttttgagtggaatatcacaaattctcttactacaaaaaataggtcccactgggactcgaacccaggttgccagattcaaagtctggagtgataaccactacaccatggaaccatttatgtgtgttctccctagataatatatttatggtaacatgtttccatagcattattttgtttttttgtgtgcttttgctagccattccaaaaaatcatgttaggagtgagctagtgtcacacctggttttggaaaaagtaacctagtgcataccatatacgtgccaaggtcaaatttcacgtacacagtcacataagtgaattacatagcataacgctcgaaatacacataaacgtaactgttatattacagactcagtcttcaccataacagttaaactcatactatatttttttgacatagtaaataactaagtgacaatggaaagcgatagatgacatccatgggcaaataactgaagacaacaccaacgtagaacttatcatagttttggaacttctgcgggtactcctttggaacatcatgacttgagaaacggttgcatctcagcaagtgtcccatttaggttaaagtggattgaccatttaggttaaagtggattgactcatacatttccaatatgtgttgctgcctgctgtcccttcatgtttgtgatttcaaaaggctatcctatgctgctgatcagtacttaatggatgggagaagggtcagacctcagataagtacctaacttgctatttcctatttttttatcacttttattgatgcccaattgcatctaaagtgttgtccacttctattgcagcagtgcttgaggattcagtgatcagcagatctgcaaggacaaaaggaccaaaggagtgagctggtttttatattttaactgatgcacctggatgctttattgagcggtgtctatgaaatgagttggatggaagatactgagctgagtaattcgggatttggcactgctgtggagagactgttaagtttttttttctctcttcagattggagaaacgcccatgggcctggcaaactgtggcatgtggctttgaactttgccaattggagacctgatgtggatcattttgggacgcgagttaagccccctgtttggagtgccagaaacaaaacagatggagaagggaaaaaggtgtcaggggataagagccagcgcctgatcaccgttttattcgtttttgagtaaactgtagcgagcaacaggtgtgggcaatatcaaatcaaactgtgcacttatggaggcttcaattccaagttttgaaagcatgaaaatgccggagaatgcttgcaacacaagaatttgttgttacccatgaagtaggtgcaggtggcaaaagcttcagagcaggcaaacggtctaatgtgcatgaggatgatgagaaaccagaatgtccatgcatcttcgtggagcccatgaagtggatgcaaactgtggaagaaggatatgttgcgaaaaagctcttttgcatgggatgtaaagctcgtctgggacagttcaattgggctggtatgcagtgcagctgcggagcctgggtgattccagcatttcagctgaccaaaagtaagatcgaccaatgctcaatgtaacaccagtgcaattaggcgaagttttgacccccttagcagtgtcgttacaacatatatatgtgactaggaaacagtatcatgtagacatgtataggcactgtggtcatttggtctgctgtttagtctgctgctgctgattggcacgtgggttccaccaagctgcaacaactgatactaggaagcattaggtgggctttcagtttgctggtttgttttgccatgctactttagagcaactctaatagattagctaaaaaggctagtcaaatttatagatttagctactctctcaaatcgtttttacagaaaaaagtgtaggttaatccaacagcatcggtaaacctaatggagataaacctaatggagagtgaagcagtctatccaaaaacaaaaacagagagcgaagatgtagggatagagagctactaaatttaaagagccatttacagagtctattggatacacttttcttctaatattagctaaatttacctttagaaaaccatatacctagtctcttggagttgtgaggtgatctattgttctagtctcttggagttgtgaggtgatctattgttcggagggagatgggtatgatatgatcaatctaatgagtgggtctatttcctcgagatggataatgcaattctgatctgctggtaagttgttatgaggttaccttccataatgctggcccgctgttgtatgaattatgagcatacgcatgttatgctgacgtcagcttcttcttcttctttccctgtcagctttgacttagttgtctccgacagtcttcctatctcaatctccattctataaacattcctatctcaatctccattctataaacagtacaatttatagtgtaaaataatgttttgtatggttatgtttatgctccgccgagcacgactttagagtgacatggacgtctggtatcttgaaataagcctgttttggtggcagtggagatcacag

SEQ ID NO: 45821 - DNA, 1281 bp, Zea Mays
cccgtcgtcctctccatttccttctgtctgcttgccctcaaaccctagcccgtaccggcgtccaccttcgcgcaccctcgcctcaccaaacacccacggcgcattggcgcttccacctcttatcgtacgaaggcgagcggctttcacggtgtctctctgtcgcatgcaatggcaccgctgtttgaggggcgcccaacagctgcctgcccacggcatgctcaggggcgctggggtcccttgccgctgtccctgaagtctagcctgggttgttgatcttgccgcagatgcggtactccattacttctccgcccgcgccatcatttcggccacacctcagtctgttggtcggtcgcagatcccttgccccgtcgagcttaatatgcaatccgttgcttgtgaaggttgtggcttccttgggtgatgcttatttgagaacatagctgttgtgctctgagcatgtcctgtgtgcctgtcatggcggcttcttttggcgacatcataccaacatattcaatgtcaggctttaaaggagtgagctggtttctatattttaactgatgcaccttgatgctttattgagcggtgtctatgaaatgatttggatggaaggctatcctatgctgctgatcagtacttaatggatgggagaagggtcagacctcagataagtacctaacttgctatttcctatttttttatcacttttattgatgcccaattgcatctaaagtgttgtccacttctattgcagcagtgcttgaggattcagtgatcagcagatctgcaaggacaaaaggaccaaaggagtgagctggtttttatattttaactgatgcacctggatgctttattgagcggtgtctatgaaatgagttggatggaagattggagaaacgcccatgggcctggcaaactgtggcatgtggctttgaactttgccaattggagacctgatgtggatcattttgggacgcgagttaagccccctgtttggagtgccagaaacaaaacagatggagaagggaaaaaggtgtcaggggataagagccagcgcctgatcaccgttttattcgtttttgagtaaactgtagcgagcaacaggtagcctataattgagacaatgctgaatggattgtagaaaaggatctgctttaatttccgttaatttagcgccttcagtgatgttcctagttgctggagtacatgttaagtatatttaccatttaaatcctcccaccactctcgcgtagctttataaaaaagctcttaataaaccatgat

SEQ ID NO: 45822 - DNA, 1342 bp, Zea Mays
cccgtcgtcctctccatttccttctgtctgcttgccctcaaaccctagcccgtaccggcgtccaccttcgcgcaccctcgcctcaccaaacacccacggcgcattggcgcttccacctcttatcgtacgaaggcgagcggctttcacggtgtctctctgtcgcatgcaatggcaccgctgtttgaggggcgcccaacagctgcctgcccacggcatgctcaggggcgctggggtcccttgccgctgtccctgaagtctagcctgggttgttgatcttgccgcagatgcggtactccattacttctccgcccgcgccatcatttcggccacacctcagtctgttgtgttcaggactgtcagggttgtgctacctggatgtcggttgcctcattgataggaatcatcgtgcagattgtcgtgttttggacaatgccaacctttgtttccgctgtgcctgccaaggttgtggcttccttgggtgatgcttatttgagaacatagctgttgtgctctgagcatgtcctgtgtgcctgtcatggcggcttcttttggcgacatcataccaacatattcaatgtcaggctttaaaggagtgagctggtttctatattttaactgatgcaccttgatgctttattgagcggtgtctatgaaatgatttggatggaaggctatcctatgctgctgatcagtacttaatggatgggagaagggtcagacctcagataagtacctaacttgctatttcctatttttttatcacttttattgatgcccaattgcatctaaagtgttgtccacttctattgcagcagtgcttgaggattcagtgatcagcagatctgcaaggacaaaaggaccaaaggagtgagctggtttttatattttaactgatgcacctggatgctttattgagcggtgtctatgaaatgagttggatggaagattggagaaacgcccatgggcctggcaaactgtggcatgtggctttgaactttgccaattggagacctgatgtggatcattttgggacgcgagttaagccccctgtttggagtgccagaaacaaaacagatggagaagggaaaaaggtgtcaggggataagagccagcgcctgatcaccgttttattcgtttttgagtaaactgtagcgagcaacaggtagcctataattgagacaatgctgaatggattgtagaaaaggatctgctttaatttccgttaatttagcgccttcagtgatgttcctagttgctggagtacatgttaagtatatttaccatttaaatcctcccaccactctcgcgtagctttataaaaaagctcttaataaaccatgat

SEQ ID NO: 45823 - DNA, 1057 bp, Zea Mays
cccgtcgtcctctccatttccttctgtctgcttgccctcaaaccctagcccgtaccggcgtccaccttcgcgcaccctcgcctcaccaaacacccacggcgcattggcgcttccacctcttatcgtacgaaggcgagcggctttcacggtgtctctctgtcgcatgcaatggcaccgctgtttgaggggcgcccaacagctgcctgcccacggcatgctcaggggcgctggggtcccttgccgctgtccctgaagtctagcctgggttgttgatcttgccgcagatgcggtactccattacttctccgcccgcgccatcatttcggccacacctcagtctgttggtcggtcgcagatcccttgccccgtcgagcttaatatgcaatccgttgcttgtgaagattgtcgtgttttggacaatgccaacctttgtttccgctgtgcctgccaaggttgtggcttccttgggtgatgcttatttgagaacatagctgttgtgctctgagcatgtcctgtgtgcctgtcatggcggcttcttttggcgacatcataccaacatattcaatgtcaggctttaaaggagtgagctggtttttatattttaactgatgcacctggatgctttattgagcggtgtctatgaaatgatttggatggaagattggagaaacgcccatgggcctggcaaactgtggcatgtggctttgaactttgccaattggagacctgatgtggatcattttgggacgcgagttaagccccctgtttggagtgccagaaacaaaacagatggagaagggaaaaaggtgtcaggggataagagccagcgcctgatcaccgttttattcgtttttgagtaaactgtagcgagcaacaggtagcctataattgagacaatgctgaatggattgtagaaaaggatctgctttaatttccgttaatttagcgccttcagtgatgttcctagttgctggagtacatgttaagtatatttaccatttaaatcctcccaccactctcgcgtagctttataaaaaagctcttaataaaccatgat

SEQ ID NO: 45824 - DNA, 1540 bp, Zea Mays
cccgtcgtcctctccatttccttctgtctgcttgccctcaaaccctagcccgtaccggcgtccaccttcgcgcaccctcgcctcaccaaacacccacggcgcattggcgcttccacctcttatcgtacgaaggcgagcggctttcacggtgtctctctgtcgcatgcaatggcaccgctgtttgaggggcgcccaacagctgcctgcccacggcatgctcaggggcgctggggtcccttgccgctgtccctgaagtctagcctgggttgttgatcttgccgcagatgcggtactccattacttctccgcccgcgccatcatttcggccacacctcagtctgttggtcggtcgcagatcccttgccccgtcgagcttaatatgcaatccgttgcttgtgaaggttgtggcttccttgggtgatgcttatttgagaacatagctgttgtgctctgagcatgtcctgtgtgcctgtcatggcggcttcttttggcgacatcataccaacatattcaatgtcaggctttaaaggagtgagctggtttctatattttaactgatgcaccttgatgctttattgagcggtgtctatgaaatgatttggatggaaggctatcctatgctgctgatcagtacttaatggatgggagaagggtcagacctcagataagtacctaacttgctatttcctatttttttatcacttttattgatgcccaattgcatctaaagtgttgtccacttctattgcagcagtgcttgaggattcagtgatcagcagatctgcaaggacaaaaggaccaaaggagtgagctggtttttatattttaactgatgcacctggatgctttattgagcggtgtctatgaaatgagttggatggaagattgtcgtgttttggacaatgccaacctttgtttccgctgtgcctgccaaggttgtggcttccttgggtgatgcttatttgagaacatagctgttgtgctctgagcatgtcctgtgtgcctgtcatggcggcttcttttggcgacatcataccaacatattcaatgtcaggctttaaaggagtgagctggtttttatattttaactgatgcacctggatgctttattgagcggtgtctatgaaatgatttggatggaagattggagaaacgcccatgggcctggcaaactgtggcatgtggctttgaactttgccaattggagacctgatgtggatcattttgggacgcgagttaagccccctgtttggagtgccagaaacaaaacagatggagaagggaaaaaggtgtcaggggataagagccagcgcctgatcaccgttttattcgtttttgagtaaactgtagcgagcaacaggtagcctataattgagacaatgctgaatggattgtagaaaaggatctgctttaatttccgttaatttagcgccttcagtgatgttcctagttgctggagtacatgttaagtatatttaccatttaaatcctcccaccactctcgcgtagctttataaaaaagctcttaataaaccatgat

SEQ ID NO: 45825 - DNA, 1542 bp, Zea Mays
cccgtcgtcctctccatttccttctgtctgcttgccctcaaaccctagcccgtaccggcgtccaccttcgcgcaccctcgcctcaccaaacacccacggcgcattggcgcttccacctcttatcgtacgaaggcgagcggctttcacggtgtctctctgtcgcatgcaatggcaccgctgtttgaggggcgcccaacagctgcctgcccacggcatgctcaggggcgctggggtcccttgccgctgtccctgaagtctagcctgggttgttgatcttgccgcagatgcggtactccattacttctccgcccgcgccatcatttcggccacacctcagtctgttggtcggtcgcagatcccttgccccgtcgagcttaatatgcaatccgttgcttgtgaaggttgtggcttccttgggtgatgcttatttgagaacatagctgttgtgctctgagcatgtcctgtgtgcctgtcatggcggcttcttttggcgacatcataccaacatattcaatgtcaggctttaaaggagtgagctggtttctatattttaactgatgcaccttgatgctttattgagcggtgtctatgaaatgatttggatggaagtaaataactaagtgacaatggaaagcgatagatgacatccatgggcaaataactgaagacaacaccaacgtagaacttatcatagttttggaacttctgcgggtactcctttggaacatcatgacttgagaaacggttgcatctcagcaagtgtcccatttaggttaaagtggattgaccatttaggttaaagtggattgactcatacatttccaatatgtgttgctgcctgctgtcccttcatgtttgtgatttcaaaaggctatcctatgctgctgatcagtacttaatggatgggagaagggtcagacctcagataagtacctaacttgctatttcctatttttttatcacttttattgatgcccaattgcatctaaagtgttgtccacttctattgcagcagtgcttgaggattcagtgatcagcagatctgcaaggacaaaaggaccaaaggagtgagctggtttttatattttaactgatgcacctggatgctttattgagcggtgtctatgaaatgagttggatggaagattggagaaacgcccatgggcctggcaaactgtggcatgtggctttgaactttgccaattggagacctgatgtggatcattttgggacgcgagttaagccccctgtttggagtgccagaaacaaaacagatggagaagggaaaaaggtgtcaggggataagagccagcgcctgatcaccgttttattcgtttttgagtaaactgtagcgagcaacaggtagcctataattgagacaatgctgaatggattgtagaaaaggatctgctttaatttccgttaatttagcgccttcagtgatgttcctagttgctggagtacatgttaagtatatttaccatttaaatcctcccaccactctcgcgtagctttataaaaaagctcttaataaaccatgat

SEQ ID NO: 45826 - DNA, 977 bp, Zea Mays
cccgtcgtcctctccatttccttctgtctgcttgccctcaaaccctagcccgtaccggcgtccaccttcgcgcaccctcgcctcaccaaacacccacggcgcattggcgcttccacctcttatcgtacgaaggcgagcggctttcacggtgtctctctgtcgcatgcaatggcaccgctgtttgaggggcgcccaacagctgcctgcccacggcatgctcaggggcgctggggtcccttgccgctgtccctgaagtctagcctgggttgttgatcttgccgcagatgcggtactccattacttctccgcccgcgccatcatttcggccacacctcagtctgttggtcggtcgcagatcccttgccccgtcgagcttaatatgcaatccgttgcttgtgaagattgtcgtgttttggacaatgccaacctttgtttccgctgtgcctgccaaggttgtggcttccttgggtgatgcttatttgagaacatagctgttgtgctctgagcatgtcctgtgtgcctgtcatggcggcttcttttggcgacatcataccaacatattcaatgtcaggctttaaagattggagaaacgcccatgggcctggcaaactgtggcatgtggctttgaactttgccaattggagacctgatgtggatcattttgggacgcgagttaagccccctgtttggagtgccagaaacaaaacagatggagaagggaaaaaggtgtcaggggataagagccagcgcctgatcaccgttttattcgtttttgagtaaactgtagcgagcaacaggtagcctataattgagacaatgctgaatggattgtagaaaaggatctgctttaatttccgttaatttagcgccttcagtgatgttcctagttgctggagtacatgttaagtatatttaccatttaaatcctcccaccactctcgcgtagctttataaaaaagctcttaataaaccatgat

SEQ ID NO: 45827 - DNA, 1511 bp, Zea Mays
cccgtcgtcctctccatttccttctgtctgcttgccctcaaaccctagcccgtaccggcgtccaccttcgcgcaccctcgcctcaccaaacacccacggcgcattggcgcttccacctcttatcgtacgaaggcgagcggctttcacggtgtctctctgtcgcatgcaatggcaccgctgtttgaggggcgcccaacagctgcctgcccacggcatgctcaggggcgctggggtcccttgccgctgtccctgaagtctagcctgggttgttgatcttgccgcagatgcggtactccattacttctccgcccgcgccatcatttcggccacacctcagtctgttggtcggtcgcagatcccttgccccgtcgagcttaatatgcaatccgttgcttgtgaagattgtcgtgttttggacaatgccaacctttgtttccgctgtgcctgccaaggttgtggcttccttgggtgatgcttatttgagaacatagctgttgtgctctgagcatgtcctgtgtgcctgtcatggcggcttcttttggcgacatcataccaacatattcaatgtcaggctttaaaggagtgagctggtttctatattttaactgatgcaccttgatgctttattgagcggtgtctatgaaatgatttggatggaaggctatcctatgctgctgatcagtacttaatggatgggagaagggtcagacctcagataagtacctaacttgctatttcctatttttttatcacttttattgatgcccaattgcatctaaagtgttgtccacttctattgcagcagtgcttgaggattcagtgatcagcagatctgcaaggacaaaaggaccaaaggagtgagctggtttttatattttaactgatgcacctggatgctttattgagcggtgtctatgaaatgagttggatggaagattgtcgtgttttggacaatgccaacctttgtttccgctgtgcctgccaaggttgtggcttccttgggtgatgcttatttgagaacatagctgttgtgctctgagcatgtcctgtgtgcctgtcatggcggcttcttttggcgacatcataccaacatattcaatgtcaggctttaaagattggagaaacgcccatgggcctggcaaactgtggcatgtggctttgaactttgccaattggagacctgatgtggatcattttgggacgcgagttaagccccctgtttggagtgccagaaacaaaacagatggagaagggaaaaaggtgtcaggggataagagccagcgcctgatcaccgttttattcgtttttgagtaaactgtagcgagcaacaggtagcctataattgagacaatgctgaatggattgtagaaaaggatctgctttaatttccgttaatttagcgccttcagtgatgttcctagttgctggagtacatgttaagtatatttaccatttaaatcctcccaccactctcgcgtagctttataaaaaagctcttaataaaccatgat

SEQ ID NO: 45828 - DNA, 1332 bp, Zea Mays
cccgtcgtcctctccatttccttctgtctgcttgccctcaaaccctagcccgtaccggcgtccaccttcgcgcaccctcgcctcaccaaacacccacggcgcattggcgcttccacctcttatcgtacgaaggcgagcggctttcacggtgtctctctgtcgcatgcaatggcaccgctgtttgaggggcgcccaacagctgcctgcccacggcatgctcaggggcgctggggtcccttgccgctgtccctgaagtctagcctgggttgttgatcttgccgcagatgcggtactccattacttctccgcccgcgccatcatttcggccacacctcagtctgttggtcggtcgcagatcccttgccccgtcgagcttaatatgcaatccgttgcttgtgaagattgtcgtgttttggacaatgccaacctttgtttccgctgtgcctgccaaggttgtggcttccttgggtgatgcttatttgagaacatagctgttgtgctctgagcatgtcctgtgtgcctgtcatggcggcttcttttggcgacatcataccaacatattcaatgtcaggctttaaaggagtgagctggtttctatattttaactgatgcaccttgatgctttattgagcggtgtctatgaaatgatttggatggaaggctatcctatgctgctgatcagtacttaatggatgggagaagggtcagacctcagataagtacctaacttgctatttcctatttttttatcacttttattgatgcccaattgcatctaaagtgttgtccacttctattgcagcagtgcttgaggattcagtgatcagcagatctgcaaggacaaaaggaccaaaggagtgagctggtttttatattttaactgatgcacctggatgctttattgagcggtgtctatgaaatgagttggatggaagattggagaaacgcccatgggcctggcaaactgtggcatgtggctttgaactttgccaattggagacctgatgtggatcattttgggacgcgagttaagccccctgtttggagtgccagaaacaaaacagatggagaagggaaaaaggtgtcaggggataagagccagcgcctgatcaccgttttattcgtttttgagtaaactgtagcgagcaacaggtagcctataattgagacaatgctgaatggattgtagaaaaggatctgctttaatttccgttaatttagcgccttcagtgatgttcctagttgctggagtacatgttaagtatatttaccatttaaatcctcccaccactctcgcgtagctttataaaaaagctcttaataaaccatgat

SEQ ID NO: 45829 - DNA, 1603 bp, Zea Mays
cccgtcgtcctctccatttccttctgtctgcttgccctcaaaccctagcccgtaccggcgtccaccttcgcgcaccctcgcctcaccaaacacccacggcgcattggcgcttccacctcttatcgtacgaaggcgagcggctttcacggtgtctctctgtcgcatgcaatggcaccgctgtttgaggggcgcccaacagctgcctgcccacggcatgctcaggggcgctggggtcccttgccgctgtccctgaagtctagcctgggttgttgatcttgccgcagatgcggtactccattacttctccgcccgcgccatcatttcggccacacctcagtctgttgtgttcaggactgtcagggttgtgctacctggatgtcggttgcctcattgataggaatcatcgtgcagattgtcgtgttttggacaatgccaacctttgtttccgctgtgcctgccaaggttgtggcttccttgggtgatgcttatttgagaacatagctgttgtgctctgagcatgtcctgtgtgcctgtcatggcggcttcttttggcgacatcataccaacatattcaatgtcaggctttaaaggagtgagctggtttctatattttaactgatgcaccttgatgctttattgagcggtgtctatgaaatgatttggatggaagtaaataactaagtgacaatggaaagcgatagatgacatccatgggcaaataactgaagacaacaccaacgtagaacttatcatagttttggaacttctgcgggtactcctttggaacatcatgacttgagaaacggttgcatctcagcaagtgtcccatttaggttaaagtggattgaccatttaggttaaagtggattgactcatacatttccaatatgtgttgctgcctgctgtcccttcatgtttgtgatttcaaaaggctatcctatgctgctgatcagtacttaatggatgggagaagggtcagacctcagataagtacctaacttgctatttcctatttttttatcacttttattgatgcccaattgcatctaaagtgttgtccacttctattgcagcagtgcttgaggattcagtgatcagcagatctgcaaggacaaaaggaccaaaggagtgagctggtttttatattttaactgatgcacctggatgctttattgagcggtgtctatgaaatgagttggatggaagattggagaaacgcccatgggcctggcaaactgtggcatgtggctttgaactttgccaattggagacctgatgtggatcattttgggacgcgagttaagccccctgtttggagtgccagaaacaaaacagatggagaagggaaaaaggtgtcaggggataagagccagcgcctgatcaccgttttattcgtttttgagtaaactgtagcgagcaacaggtagcctataattgagacaatgctgaatggattgtagaaaaggatctgctttaatttccgttaatttagcgccttcagtgatgttcctagttgctggagtacatgttaagtatatttaccatttaaatcctcccaccactctcgcgtagctttataaaaaagctcttaataaaccatgat

SEQ ID NO: 45830 - DNA, 1829 bp, Zea Mays
gtaaatttcccaccaatttaattttagatattttaaataattccttgccatatctgcattcagcctgttattgtgtttatgttcacccttttttagtagggaaatcaaaacatagttaatccagtactactgggttttattatgcctgattttgtttctgcttttgagtctatcatgattatagggctgttaatgacacatgacattgtcaattggaaataccatgtcaacggactgattaagaaatacaaaatctttgcttagatgggacatatttggaaaataccccttatattaaaaaacacatggtgtgtcaagcattttttttacaaactgtagcaaactgaaaactagttgcattggtcatgcggaaatgtctcatctatctcatgtatgttgcttatattttgtctcttgaagatcacaagcgaatgcacttttctcttgtctctcttgtttgttgtttctctccagatgagctgtcctattcttgttgcattttgtccgcaactcctatcacccctatcttaatccttcctgtaggatggtaggtgtactgaaacagatgatgacaaactttctgaattgcatgaaagtgaaccaggatatgctaattggattttccaaaagattggatcttttgagtggaatatcacaaattctcttactacaaaaaataggtcccactgggactcgaacccaggttgccagattcaaagtctggagtgataaccactacaccatggaaccatttatgtgtgttctccctagataatatatttatggtaacatgtttccatagcattattttgtttttttgtgtgcttttgctagccattccaaaaaatcatgttaggagtgagctagtgtcacacctggttttggaaaaagtaacctagtgcataccatatacgtgccaaggtcaaatttcacgtacacagtcacataagtgaattacatagcataacgctcgaaatacacataaacgtaactgttatattacagactcagtcttcaccataacagttaaactcatactatatttttttgacatagtaaataactaagtgacaatggaaagcgatagatgacatccatgggcaaataactgaagacaacaccaacgtagaacttatcatagttttggaacttctgcgggtactcctttggaacatcatgacttgagaaacggttgcatctcagcaagtgtcccatttaggttaaagtggattgaccatttaggttaaagtggattgactcatacatttccaatatgtgttgctgcctgctgtcccttcatgtttgtgatttcaaaaggctatcctatgctgctgatcagtacttaatggatgggagaagggtcagacctcagataagtacctaacttgctatttcctatttttttatcacttttattgatgcccaattgcatctaaagtgttgtccacttctattgcagcagtgcttgaggattcagtgatcagcagatctgcaaggacaaaaggaccaaaggagtgagctggtttttatattttaactgatgcacctggatgctttattgagcggtgtctatgaaatgagttggatggaagattgtcgtgttttggacaatgccaacctttgtttccgctgtgcctgccaaggttgtggcttccttgggtgatgcttatttgagaacatagctgttgtgctctgagcatgtcctgtgtgcctgtcatggcggcttcttttggcgacatcataccaacatattcaatgtcaggctttaaagatactgagctgagtaattcgggatttggcactgctgtggagagactgttaagtttttt

SEQ ID NO: 45831 - DNA, 1791 bp, Zea Mays
atcacatccacaggctttttcaccattgatttccaggaaatccttctacttctttcaaggagtgagctggtttctatattttaactgatgcaccttgatgctttattgagcggtgtctatgaaatgatttggatggaaggctatcctatgctgctgatcagtacttaatggatgggagaagggtcagacctcagataagtacctaacttgctatttcctatttttttatcacttttattgatgcccaattgcatctaaagtgttgtccacttctattgcagcagtgcttgaggattcagtgatcagcagatctgcaaggacaaaaggaccaaaggagtgagctggtttttatattttaactgatgcacctggatgctttattgagcggtgtctatgaaatgagttggatggaagggagacttcaacttgtcaactctgtcctctcgtctctgccaacatacgccatgtgcaccttacaagttccagcagcggtcttggagtacattgacacagccagacgacactgtttgtggcgtaattctgatagcaatgcaaaatttaagcctctggtggcttggaataaatgcacacgaccgaagaaaaaaggtggtctgggggtcatcaacctaagaagccagaactcgtatctccgaatgaaatttcttgacaagctctacaacaggaaacaaatcccttgggttaacctggtttggaatacatactactctgacggcaagacccctcatgcatccaagttcatgggctcgttttggtggagagacgcccttaaactttgtgatctcttcagaggaatctccaactgtaaggttggagatggtaaaactgttctattttggcatgatttatggaatgacaacatccgcagaaacaaatttccaaggcttttcaccttcgcaaaaaatcaaagcatttcggttgcttcctttttgactcaggagaacttgacagacaatttccacttaccccttactgagcaagcaaacactgagctgcaacaactcccggatgaagtgcaacaaattcgagaatcagtgattgaacctgaagagaaagactcttggagttatatttgggggaatagcacctactcgtcaactaaactttaccactacactttcaaaaatgtgaatcctccaaaaccatttctctggatcttggagtccagatgttcaaacaagcttaaagtcttcgcctggctgctgttgatggacaggctgaacaccagaaacatcctaaagagaaagaactttaaggttcaaggcgacaactacagctgtgctctttgtcaacttcaaagagaagaaactgccttccatttgttcttcaattgccctttcagccaagactgttggagacatctgaatattcagtggaaccaccaaattgacttctttgcgacctttcaacaagccagggacttgcacggttcaccattctttatggaggtctttatcatagcagcttggcaaatctggaagcaaagaaacaattttatctttgacaggggacgaccatctttcattggctagaaaaaagaattccgcgccgaagctcttctgcaagctaaccgcttttctgaagagaaatcaactcttttctcctcgcttgtgaattcctatagatagcagatagttttttccctgtgctttagttagtttccttctggtttatgtcttgggagcgactgctaatgctctttgtccgtcttcttctttatattaatatatatctaccacagcacagcaggggcttcccttgctgtacattttc

SEQ ID NO: 45832 - DNA, 1906 bp, Zea Mays
cccgtcgtcctctccatttccttctgtctgcttgccctcaaaccctagcccgtaccggcgtccaccttcgcgcaccctcgcctcaccaaacacccacggcgcattggcgcttccacctcttatcgtacgaaggcgagcggctttcacggtgtctctctgtcgcatgcaatggcaccgctgtttgaggggcgcccaacagctgcctgcccacggcatgctcaggggcgctggggtcccttgccgctgtccctgaagtctagcctgggttgttgatcttgccgcagatgcggtactccattacttctccgcccgcgccatcatttcggccacacctcagtctgttggtcggtcgcagatcccttgccccgtcgagcttaatatgcaatccgttgcttgtgaaggttgtggcttccttgggtgatgcttatttgagaacatagctgttgtgctctgagcatgtcctgtgtgcctgtcatggcggcttcttttggcgacatcataccaacatattcaatgtcaggctttaaagggagacttcaacttgtcaactctgtcctctcgtctctgccaacatacgccatgtgcaccttacaagttccagcagcggtcttggagtacattgacacagccagacgacactgtttgtggcgtaattctgatagcaatgcaaaatttaagcctctggtggcttggaataaatgcacacgaccgaagaaaaaaggtggtctgggggtcatcaacctaagaagccagaactcgtatctccgaatgaaatttcttgacaagctctacaacaggaaacaaatcccttgggttaacctggtttggaatacatactactctgacggcaagacccctcatgcatccaagttcatgggctcgttttggtggagagacgcccttaaactttgtgatctcttcagaggaatctccaactgtaaggttggagatggtaaaactgttctattttggcatgatttatggaatgacaacatccgcagaaacaaatttccaaggcttttcaccttcgcaaaaaatcaaagcatttcggttgcttcctttttgactcaggagaacttgacagacaatttccacttaccccttactgagcaagcaaacactgagctgcaacaactcccggatgaagtgcaacaaattcgagaatcagtgattgaacctgaagagaaagactcttggagttatatttgggggaatagcacctactcgtcaactaaactttaccactacactttcaaaaatgtgaatcctccaaaaccatttctctggatcttggagtccagatgttcaaacaagcttaaagtcttcgcctggctgctgttgatggacaggctgaacaccagaaacatcctaaagagaaagaactttaaggttcaaggcgacaactacagctgtgctctttgtcaacttcaaagagaagaaactgccttccatttgttcttcaattgccctttcagccaagactgttggagacatctgaatattcagtggaaccaccaaattgacttctttgcgacctttcaacaagccagggacttgcacggttcaccattctttatggaggtctttatcatagcagcttggcaaatctggaagcaaagaaacaattttatctttgacaggggacgaccatctttcattggctagaaaaaagaattccgcgccgaagctcttctgcaagctaaccgcttttctgaagagaaatcaactcttttctcctcgcttgtgaattcctatagatagcagatagttttttccctgtgctttagttagtttccttctggtttatgtcttgggagcgactgctaatgctctttgtccgtcttcttctttatattaatatatatctaccacagcacagcaggggcttcccttgctgtacattttc

SEQ ID NO: 45833 - DNA, 3096 bp, Zea Mays
cccgtcgtcctctccatttccttctgtctgcttgccctcaaaccctagcccgtaccggcgtccaccttcgcgcaccctcgcctcaccaaacacccacggcgcattggcgcttccacctcttatcgtacgaaggcgagcggctttcacggtgtctctctgtcgcatgcaatggcaccgctgtttgaggggcgcccaacagctgcctgcccacggcatgctcaggggcgctggggtcccttgccgctgtccctgaagtctagcctgggttgttgatcttgccgcagatgcggtactccattacttctccgcccgcgccatcatttcggccacacctcagtctgttgtgttcaggactgtcagggttgtgctacctggatgtcggttgcctcattgataggaatcatcgtgcagattgtcgtgttttggacaatgccaacctttgtttccgctgtgcctgccaaggttgtggcttccttgggtgatgcttatttgagaacatagctgttgtgctctgagcatgtcctgtgtgcctgtcatggcggcttcttttggcgacatcataccaacatattcaatgtcaggctttaaaggagtgagctggtttctatattttaactgatgcaccttgatgctttattgagcggtgtctatgaaatgatttggatggaaggatggtaggtgtactgaaacagatgatgacaaactttctgaattgcatgaaagtgaaccaggatatgctaattggattttccaaaagattggatcttttgagtggaatatcacaaattctcttactacaaaaaataggtcccactgggactcgaacccaggttgccagattcaaagtctggagtgataaccactacaccatggaaccatttatgtgtgttctccctagataatatatttatggtaacatgtttccatagcattattttgtttttttgtgtgcttttgctagccattccaaaaaatcatgttaggagtgagctagtgtcacacctggttttggaaaaagtaacctagtgcataccatatacgtgccaaggtcaaatttcacgtacacagtcacataagtgaattacatagcataacgctcgaaatacacataaacgtaactgttatattacagactcagtcttcaccataacagttaaactcatactatatttttttgacatagtaaataactaagtgacaatggaaagcgatagatgacatccatgggcaaataactgaagacaacaccaacgtagaacttatcatagttttggaacttctgcgggtactcctttggaacatcatgacttgagaaacggttgcatctcagcaagtgtcccatttaggttaaagtggattgaccatttaggttaaagtggattgactcatacatttccaatatgtgttgctgcctgctgtcccttcatgtttgtgatttcaaaaggctatcctatgctgctgatcagtacttaatggatgggagaagggtcagacctcagataagtacctaacttgctatttcctatttttttatcacttttattgatgcccaattgcatctaaagtgttgtccacttctattgcagcagtgcttgaggattcagtgatcagcagatctgcaaggacaaaaggaccaaaggagtgagctggtttttatattttaactgatgcacctggatgctttattgagcggtgtctatgaaatgagttggatggaagggagacttcaacttgtcaactctgtcctctcgtctctgccaacatacgccatgtgcaccttacaagttccagcagcggtcttggagtacattgacacagccagacgacactgtttgtggcgtaattctgatagcaatgcaaaatttaagcctctggtggcttggaataaatgcacacgaccgaagaaaaaaggtggtctgggggtcatcaacctaagaagccagaactcgtatctccgaatgaaatttcttgacaagctctacaacaggaaacaaatcccttgggttaacctggtttggaatacatactactctgacggcaagacccctcatgcatccaagttcatgggctcgttttggtggagagacgcccttaaactttgtgatctcttcagaggaatctccaactgtaaggttggagatggtaaaactgttctattttggcatgatttatggaatgacaacatccgcagaaacaaatttccaaggcttttcaccttcgcaaaaaatcaaagcatttcggttgcttcctttttgactcaggagaacttgacagacaatttccacttaccccttactgagcaagcaaacactgagctgcaacaactcccggatgaagtgcaacaaattcgagaatcagtgattgaacctgaagagaaagactcttggagttatatttgggggaatagcacctactcgtcaactaaactttaccactacactttcaaaaatgtgaatcctccaaaaccatttctctggatcttggagtccagatgttcaaacaagcttaaagtcttcgcctggctgctgttgatggacaggctgaacaccagaaacatcctaaagagaaagaactttaaggttcaaggcgacaactacagctgtgctctttgtcaacttcaaagagaagaaactgccttccatttgttcttcaattgccctttcagccaagactgttggagacatctgaatattcagtggaaccaccaaattgacttctttgcgacctttcaacaagccagggacttgcacggttcaccattctttatggaggtctttatcatagcagcttggcaaatctggaagcaaagaaacaattttatctttgacaggggacgaccatctttcattggctagaaaaaagaattccgcgccgaagctcttctgcaagctaaccgcttttctgaagagaaatcaactcttttctcctcgcttgtgaattcctatagatagcagatagttttttccctgtgctttagttagtttccttctggtttatgtcttgggagcgactgctaatgctctttgtccgtcttcttctttatattaatatatatctaccacagcacagcaggggcttcccttgctgtacattttc

SEQ ID NO: 45834 - DNA, 3639 bp, Zea Mays
cccgtcgtcctctccatttccttctgtctgcttgccctcaaaccctagcccgtaccggcgtccaccttcgcgcaccctcgcctcaccaaacacccacggcgcattggcgcttccacctcttatcgtacgaaggcgagcggctttcacggtgtctctctgtcgcatgcaatggcaccgctgtttgaggggcgcccaacagctgcctgcccacggcatgctcaggggcgctggggtcccttgccgctgtccctgaagtctagcctgggttgttgatcttgccgcagatgcggtactccattacttctccgcccgcgccatcatttcggccacacctcagtctgttgtgttcaggactgtcagggttgtgctacctggatgtcggttgcctcattgataggaatcatcgtgcagattgtcgtgttttggacaatgccaacctttgtttccgctgtgcctgccaaggttgtggcttccttgggtgatgcttatttgagaacatagctgttgtgctctgagcatgtcctgtgtgcctgtcatggcggcttcttttggcgacatcataccaacatattcaatgtcaggctttaaaggagtgagctggtttctatattttaactgatgcaccttgatgctttattgagcggtgtctatgaaatgatttggatggaaggtaaatttcccaccaatttaattttagatattttaaataattccttgccatatctgcattcagcctgttattgtgtttatgttcacccttttttagtagggaaatcaaaacatagttaatccagtactactgggttttattatgcctgattttgtttctgcttttgagtctatcatgattatagggctgttaatgacacatgacattgtcaattggaaataccatgtcaacggactgattaagaaatacaaaatctttgcttagatgggacatatttggaaaataccccttatattaaaaaacacatggtgtgtcaagcattttttttacaaactgtagcaaactgaaaactagttgcattggtcatgcggaaatgtctcatctatctcatgtatgttgcttatattttgtctcttgaagatcacaagcgaatgcacttttctcttgtctctcttgtttgttgtttctctccagatgagctgtcctattcttgttgcattttgtccgcaactcctatcacccctatcttaatccttcctgtaggatggtaggtgtactgaaacagatgatgacaaactttctgaattgcatgaaagtgaaccaggatatgctaattggattttccaaaagattggatcttttgagtggaatatcacaaattctcttactacaaaaaataggtcccactgggactcgaacccaggttgccagattcaaagtctggagtgataaccactacaccatggaaccatttatgtgtgttctccctagataatatatttatggtaacatgtttccatagcattattttgtttttttgtgtgcttttgctagccattccaaaaaatcatgttaggagtgagctagtgtcacacctggttttggaaaaagtaacctagtgcataccatatacgtgccaaggtcaaatttcacgtacacagtcacataagtgaattacatagcataacgctcgaaatacacataaacgtaactgttatattacagactcagtcttcaccataacagttaaactcatactatatttttttgacatagtaaataactaagtgacaatggaaagcgatagatgacatccatgggcaaataactgaagacaacaccaacgtagaacttatcatagttttggaacttctgcgggtactcctttggaacatcatgacttgagaaacggttgcatctcagcaagtgtcccatttaggttaaagtggattgaccatttaggttaaagtggattgactcatacatttccaatatgtgttgctgcctgctgtcccttcatgtttgtgatttcaaaaggctatcctatgctgctgatcagtacttaatggatgggagaagggtcagacctcagataagtacctaacttgctatttcctatttttttatcacttttattgatgcccaattgcatctaaagtgttgtccacttctattgcagcagtgcttgaggattcagtgatcagcagatctgcaaggacaaaaggaccaaaggagtgagctggtttttatattttaactgatgcacctggatgctttattgagcggtgtctatgaaatgagttggatggaagggagacttcaacttgtcaactctgtcctctcgtctctgccaacatacgccatgtgcaccttacaagttccagcagcggtcttggagtacattgacacagccagacgacactgtttgtggcgtaattctgatagcaatgcaaaatttaagcctctggtggcttggaataaatgcacacgaccgaagaaaaaaggtggtctgggggtcatcaacctaagaagccagaactcgtatctccgaatgaaatttcttgacaagctctacaacaggaaacaaatcccttgggttaacctggtttggaatacatactactctgacggcaagacccctcatgcatccaagttcatgggctcgttttggtggagagacgcccttaaactttgtgatctcttcagaggaatctccaactgtaaggttggagatggtaaaactgttctattttggcatgatttatggaatgacaacatccgcagaaacaaatttccaaggcttttcaccttcgcaaaaaatcaaagcatttcggttgcttcctttttgactcaggagaacttgacagacaatttccacttaccccttactgagcaagcaaacactgagctgcaacaactcccggatgaagtgcaacaaattcgagaatcagtgattgaacctgaagagaaagactcttggagttatatttgggggaatagcacctactcgtcaactaaactttaccactacactttcaaaaatgtgaatcctccaaaaccatttctctggatcttggagtccagatgttcaaacaagcttaaagtcttcgcctggctgctgttgatggacaggctgaacaccagaaacatcctaaagagaaagaactttaaggttcaaggcgacaactacagctgtgctctttgtcaacttcaaagagaagaaactgccttccatttgttcttcaattgccctttcagccaagactgttggagacatctgaatattcagtggaaccaccaaattgacttctttgcgacctttcaacaagccagggacttgcacggttcaccattctttatggaggtctttatcatagcagcttggcaaatctggaagcaaagaaacaattttatctttgacaggggacgaccatctttcattggctagaaaaaagaattccgcgccgaagctcttctgcaagctaaccgcttttctgaagagaaatcaactcttttctcctcgcttgtgaattcctatagatagcagatagttttttccctgtgctttagttagtttccttctggtttatgtcttgggagcgactgctaatgctctttgtccgtcttcttctttatattaatatatatctaccacagcacagcaggggcttcccttgctgtacattttc

SEQ ID NO: 45835 - DNA, 2438 bp, Zea Mays
gagcgccctcacctgctcctgcgacgctcgtcggctcagcagcagtcctcccccacaaaagcagagacgcgtccgacgccgccaccaaaagcaccttccccagccacgctccgccgccatagccgcaggaaaatatcaaatcggagccgcgaagcacaacagaaatttttttccctagggcttgcacgcaaaaccctcctgaattccccaattccgtgccgtccctcgcttcttgtgggccacgaatctagggtttatgcatggcttctgaccctcccggagatggcaccagtggtgaggagacggcgccgggccctgcccccgccgtggaggcgccgcctgctcccgccgttccggccaggtcgcgctgggccgctgagatcaaggtctacacccgtaagcacccccgcaaaaaccctaaacctcctccagaatcagcggctgaccccgtttctgttccttccccggctccgaatcccctttctgaaaccttatcctcgattcgccgctccatccaccgcacggaggcggtggacgctgcggcgctgtccgatccggcagcgccggcctcggttcccacccgggcgccgtctggggaacgtggcgccgcctctggggatccctcgtctgggctgaaccgggtcggcggcggtattcctaacggccacggcgacgaccgggcggccgccgctgctgtgaaagctgagaaagcacggaaacgcaggttaaggagtgagctgcggcgctgtctggcaggagagctcgaccaggtccgcgtgctctccaggcgactgaaggaggctgccgaggccctggcgcaacaggaggcttctgagcccgtgcctttgcctttgatggtgctgccaacacagcagcaggtggtggatgctgggtatgttcagcaccagttcttggctggtgatatggcggtgcccatgcctactcagattgcagctgccgttactcctgcccgctcgctgctgcatcgcagaccactaaccgtgtcagttgttcataatgaagcctttgagaaggagaaacggacgccgaaggccaatcaattgtaccaaaattcagagttcttgcttgccaaggataggattcctccctcagattcacatgtgcgcaagaaacccaagcaccacaagaagaaacataggtccctagaatctcgtggcgcagactttgatgccgagcggcgcctgtactctcatgcgttcaagaagtcctcatcacttctgagccgcttaatgaagcacaagtttgggtgggtgttcaacaagcctgttgatccagtcacacttggtttgcatgattattttactattatcaagcacccaatggatcttggcacaataagggggcggctgagccgtgggcagtacaggaaccctaaggagtttgctgaggatgtccgtcttactttccataatgcgatgacatataatcccaagggtcaggatgtgcatttcatggcggagcagttgttaggaatctttgaggcacagtggcctgagattgaggctgaggttaactacctcgcatcatgtcctccattgccgaagaagtttcccccgccaccaattgacctgcgcttcctagagaggtcagattcaatgagacaccatgtggcattggacaccaattcaagaccgatcagtcatactcccacttatacccgaactccgtcaatgaagaaaccaagagcaaaggatccaaataagagggacatgacaatagatgagaagcgtaagcttagtgagaacctccagaatttgccgccggtgaagcttgatgctgttgtgcaagtcattaagaacaagaacttatcagttaagcaacatgatgatgagatagaggttgaaattgatagcatggatgctgagacactttgggagcttgacaggtttgtgtcgaactacaagaagaacctgagcaagcaaaagagaaaggccgagcgagcgatgcttgcccgacaagatgcagagttgcgtgcacagcaccctatacaacaaccacaaccaaccccagtcccccaagaaccttttggtgaaaaatctccaaaacaagttgtgaaagattcgctggaaggcgagcaactgccagcatctgcaccagaacaaaatggtgagaatagacagaatgcgagtagttcaagcaattcaagcagctccagcagtggctcaggatcatcttctagtggctcagacagtgatagctcctcttcagatggatctgatgctggcaattcatcttgagatatagatgcatgcctttttcttttgagaccagtgccatggggccttgggcgcctccgttctggtcagccctgatgttaacgtttctgctagataccgttcttgtttggtagacgagaaacattgtgtggctggtgttaaatgtgtactgcggacttggcttttgagctttgaattggc

SEQ ID NO: 45836 - DNA, 534 bp, Zea Mays
acgaccgcactcgccccctctcagccctcctctcctcccctaccaaccggtccctcccgaaccaccattgttgtgctcgcagctccgtggtcgcgtctgctcgagctgtttctggccgggctagagccgacaccgagcatggcggatgttggggatgccgtggtccacgtcccctcgctttcccttgccgccggcgagcctctggccggctattttgctctccccgtggagatacgtggaggtagaagacggatggaccgcgggctcaaatttgaccaagtgcagggggctaactgcgcatcccgtgacccacttcaatagtaccaaaaggacctgtttgctggaataaagtcgtggcctgttccagggactgaagcgcaaaggaccgagagaggatgatcgtgcaagtgatgtggtgccaaccacaaggtgcagtcgatggacgacccagagaaggatatacttaaccagtggatgctcgccaagcgagcacctcccccaacaaacactacctaagtgttaaattaaaggcaa

SEQ ID NO: 45837 - DNA, 1153 bp, Zea Mays
cggcgggccgaggagaaacagactctgccggtcccgcgctgcgttgggcaagccagtgaaggggcttggcctggggatggggcgggagcgcgcaagccagcggagcatcacgtgccaggcggcgagcagcatccccgccgaccgcgtccccgacatggagaagcggaagctgatgaacctcctcctcctgggcgccatatcgctgcccaccgtcggcatggtcgtcccctacggcgccttcttcgtccccgccggctccgggaacggcggcggcgggacctacgccaaggacaagctgggcaacgacatcacggtggaggagtggctcaacacgcacggtcccaacgaccgcacgctcgcgcaggggctcaagggtgaccccacgtacctggtggtggagcaggacaagacgctggccacctacgggatcaacgccgtgtgcacccacctcggctgcgtcgtgccgtggaacggcgccgagaacaagttcatctgcccctgccatggatcccagtacaacaaccagggcaaggtggtccgcggaccggcgcctctgtcgctggccctggttcacgccgacgtcgacgacggcaaggtcctcttcgtcccgtgggtggagaccgacttcaggaccggccaggacccgtggtggagtgcatgaggaggatcatccgacacaagcggtgctcagtactcataggctttctccgagggcgttgttgctacaaattcacttgcctcttgcctccaaattatatatattacacacactgcatgaaacaagaacacagctgtttgtcatctcttcactataaccttttgaacactctgaaatctgctgtaatcaaatatagactttctctgccatctgctgatcaagtgaccagcagggagagcaatttagacttttttttttgccgaaatgacttttatgtagtaggctcacaccaatttctagttacttggtcaatatttctcttcctcaatgaatgtacaagtttttagatcttgatctagatctacttatgctaagtttttagttaactcctctactagttatacatcaacatagccttttagtctcaagcaagttgtggtaggctatagttaaaatccaacaagatatcaccaaaaagagaaagaggaggaaaaa

SEQ ID NO: 45838 - DNA, 2236 bp, Zea Mays
tgaagtttttggctgcgagcccatggcatgccgctgtaccaccgctctctctccctctgcggcacactcgcacccttccgctagccttccttcttgaatcttgagcacagagtaggctcgctcacaggacagtcacttgcctgggaagccagatattattgcagcctcatacaccgcccttccctactgcttcctgagatttgagagctcgggcgccagatctgaaacctcttgtgttgtgcctttggtagttcggtgtagcattgagctagcagaggtgctgttctagttccaggatgagcaaggaggatgtcctcaagacattgatgctgagagtgaacatacactgtgacgggtgcgagaagaaggtcaagaagaccctccacaagatcgacggtgtctaccagagcagcatcgacgcggaacagggcaaggtgacggtgtccggtttgctggatccggacaccatcatcaggaagctcaacaaggccggcaagccggctcagctgtggggttccaagcccggcatccctcagaacgcctaccatggcggcggcaaggcccattccaaggaggctggcggcggcaaggcccattccaaggactccggaggtggcaagggccattccaaggatgccggcggcggcaaggcccagaagggcggtgcgggtggcggcggtcacaagggccctggcggtggcggtggcggaggcggtggcgtgggcaatcctaagatggtgatgccgcagccgacgccgcagcagctccagcagctgcagcagcagctgcagatgaaggggctgaagcttccgccgcacctgttgggcggcaatatgccggcgttccccgcggctgcgccgatgaaggaccccgagtccgtcaagtttgccctccccgaggacgactttcgacgactacggccgcgtagttcgacgatgacttcgacgacggcttcgacgacgacgaggacgactacgacgacgacggcctggacgacgacgtctacggcgaccccaagatgatgatgaaagcccatggctgtgccgccgccggcccggcgggggcgacaagaagggcggtggcggcaagaagggtggtggtggggggaacgagatcccggtgcagatcaagggaaacaaccacggcggtgccggtgggcagccgcacaatgcaaagggaggcgccccgggaggcggggcccacctgggccaggggaagaagggcggcggcagcgccgccgccgtcggtgtcggtggcccgatgggcggaatgctgcctcaacaaggcatgatgaggcctcctaacattcttggtggtgctggtgccggcttccccagcacggcccagatgggcggcggacctatgggcatgccggttggccacccgcacatgggtattatgcagcagagcggcggtggcggttgcggagctggcggcatgccgggcctggggttccacccgggattgggcggcggaatgcattctggggcggatatgcttcaggccgccgcggcatccgggaaccccgtggcgcagcagcagtacatggccttgatgcagcagcagcagcagcagatgatgatgatgcagcagcagcaacagcagcacgggaacggcggtgcaggatacccggcggcaatgggctacggctatggccggccaccgatgcattacccaatgggctacccagtgctgcccccgcactcgcatgctgagccttacaacatcttcagcgacgagaacgccaacagctgctcactgatgtgatcagcaattccgcatggaatggccctgttccaagtaaaccatctcaaggagctcaatgtcaccgctgatcaccgacagacatcgccatggttgaagcgccgtgaatcaatcaacaatcagtatgcttggggatgagtcctagctagaaccctgtccctttcctgctccttccccccctttctctagcttattttcgccttgcttttaaaaaaaaaggaacttccttgaatgcgaagttaggtatagtaattatgaggtttccataagggaggggaggagagaggagacgatagggacttcgtacggggtcgttcgcttgtgggttcttcttccctcctggcttcataaaggtggactaatggtagaacaatgttgtcaatctcagtcgtaaatcagtgtgaatatgtcgtgatttctcttctaatctaactaactatatatatggtaataagttctgtttatcggagtc

SEQ ID NO: 45839 - DNA, 2231 bp, Zea Mays
ctcacatgaagtttttggctgcgagcccatggcatgccgctgtaccaccgctctctctccctctgcggcacactcgcacccttccgctagccttccttcttgaatcttgagcacagagtaggctcgctcacaggacagtcacttgcctgggaagccagatattattgcagcctcatacaccgcccttccctactgcttcctgagatttgagagctcgggcgccagatctgaaacctcttgtgttgtgcctttggtagttcggtgtagcattgagctagcagaggtgctgttctagttccaggatgagcaaggaggatgtcctcaagacattgatgctgagagtgaacatacactgtgacgggtgcgagaagaaggtcaagaagaccctccacaagatcgacgagcagcatcgacgcggaacagggcaaggtgacggtgtccggtttgctggatccggacaccatcatcaggaagctcaacaaggccggcaagccggctcagctgtggggttccaagcccggcatccctcagaacgcctaccatggcggcggcaaggcccattccaaggaggctggcggcggcaaggcccattccaaggactccggaggtggcaagggccattccaaggatgccggcggcggcaaggcccagaagggcggtgcgggtggcggcggtcacaagggccctggcggtggcggtggcggaggcggtggcgtgggcaatcctaagatggtgatgccgcagccgacgccgcagcagctccagcagctgcagcagcagctgcagatgaaggggctgaagcttccgccgcacctgttgggcggcaatatgccggcgttccccgcggctgcgccgatgaaggaccccgagtccgtcaagtttgccctccccgaggacgactttcgacgactacggccgcgtagttcgacgatgacttcgacgacggcttcgacgacgacgaggacgactacgacgacgacggcctggacgacgacgtctacggcgaccccaagatgatgatgaaagcccatggctgtgccgccgccggcccggcgggggcgacaagaagggcggtggcggcaagaagggtggtggtggggggaacgagatcccggtgcagatcaagggaaacaaccacggcggtgccggtgggcagccgcacaatgcaaagggaggcgccccgggaggcggggcccacctgggccaggggaagaagggcggcggcagcgccgccgccgtcggtgtcggtggcccgatgggcggaatgctgcctcaacaaggcatgatgaggcctcctaacattcttggtggtgctggtgccggcttccccagcacggcccagatgggcggcggacctatgggcatgccggttggccacccgcacatgggtattatgcagcagagcggcggtggcggttgcggagctggcggcatgccgggcctggggttccacccgggattgggcggcggaatgcattctggggcggatatgcttcaggccgccgcggcatccgggaaccccgtggcgcagcagcagtacatggccttgatgcagcagcagcagcagcagatgatgatgatgcagcagcagcaacagcagcacgggaacggcggtgcaggatacccggcggcaatgggctacggctatggccggccaccgatgcattacccaatgggctacccagtgctgcccccgcactcgcatgctgagccttacaacatcttcagcgacgagaacgccaacagctgctcactgatgtgatcagcaattccgcatggaatggccctgttccaagtaaaccatctcaaggagctcaatgtcaccgctgatcaccgacagacatcgccatggttgaagcgccgtgaatcaatcaacaatcagtatgcttggggatgagtcctagctagaaccctgtccctttcctgctccttccccccctttctctagcttattttcgccttgcttttaaaaaaaaaggaacttccttgaatgcgaagttaggtatagtaattatgaggtttccataagggaggggaggagagaggagacgatagggacttcgtacggggtcgttcgcttgtgggttcttcttccctcctggcttcataaaggtggactaatggtagaacaatgttgtcaatctcagtcgtaaatcagtgtgaatatgtcgtgatttctcttctaatctaactaactatatatatggtaataagttctgtttatcggagtc

SEQ ID NO: 45840 - DNA, 1078 bp, Zea Mays
tatgacagatgtgcatacttgtacatctagtggaaggaggaagaccaagacccctacaagtggttgggttgccgctcaagctcttccactcctcaagaagaagcctacaatgggagccaaggaattgcagactgctttgcaggacacttacaatgtgcaaattgcttatttgacactttggagaggtcgggagaaggctttggcagagttgtttggaagttgggaggagagcttccaactcctattctcttggaagcaagctgtattggagaaaatgccagatagcgtggttgagattgatgttcgtgaagaggatggtaaggtatatttccatcggttcttttgtgctttcgggccatgcatcaagggattccttgaggggtgcagaccatacttgagcttggactccattgcacttaatggtcgatggaacggccatcttccttcagctacaggtgtcgacgggcacaattggatgtatccagtggcatttgggttttttgagtttgaaaatctggacagttggacttggttcatgacacatctacataaagcattgggggatatgcctcttcttgcagtttgctcagatgcttgcaagggactgactaaagcagtggccactattttcccaaatgcggagaagagggagtgcttcaggcacttgatgcaaaattacatcaaaaggtcaagaaagcagtgaaagaacattcaaagatggttcccgtctgaagaaggaccaagcacaccacttggcgatgttgaagcatcctcctcggtcctcacaagcaccacaaagggtgggggttaaaaagattacatccaagaagagagctcaacctcctaatgatgacatattgggtggaaccatgtaattgctgtttgaggcgatgtatggggtttaggacggagtactatgtatgaaacccctattatgatactgtggttgatgccatgtatgaaccatgttatatttctagctatgtgtgttggtagcttactgggtgtgtgaaacccctattatgatgcatgaaccatattcagtttacttggtgatatccatattatgtttctagac

SEQ ID NO: 45841 - DNA, 402 bp, Zea Mays
accatgaagaggtcaagaaagcagtgaaagaacattcaaagatggttcccgtctgaagaaggaccaagcacaccacttggcgatgttgaagcatcctcctcggtcctcacaagcaccacaaagggtgggggttaaaaagattacatccaagaagagagctcaacctcctaatgatgacatattgggtggaaccatgtaattgctgtttgaggcgatgtatggggtttaggacggagtactatgtatgaaacccctattatgatactgtggttgatgccatgtatgaaccatgttatatttctagctatgtgtgttggtagcttactgggtgtgtgaaacccctattatgatgcatgaaccatattcagtttacttggtgatatccatattatgtttctagac

SEQ ID NO: 45842 - DNA, 2522 bp, Zea Mays
tctgcatgttttggctccgtcaccaccacattatacgaccaccgttggagtccccgtcgttgaccatgaagagggctaactcagtagctataggatcaactgacataccacaaattgactgggcttcaatagaatctgagtctagatgggaggaagaaggacaccaagaagtggtaaaagaagatgggatgtatgatactttaggattgcaaaaggaagttgattgtgttcaaaatgattgtgaagatgcacaggccacaatgccatgtcttgataatgatgatgatgtggtcatgtttgatataaataaccctgttatgaggcttggcagcacttacagtagcatgaaggaatttaggctttcaatgatacaatatgcaattaagcaagaatttgagctgggcattgaagctactagtacacgaagatatagaggctattgtaaaggaggtgattgcccttggagtatacatgccagaaaaaaagtagaagaatcacccaccatcattgttacagctatgacagatgtgcatacttgtacatctagtggaaggaggaagaccaagacccctacaagtggttgggttgccgctcaagctcttccactcctcaagaagaagcctacaatgggagccaaggaattgcagactgctttgcaggacacttacaatgtgcaaattgcttatttgacactttggagaggtcgggagaaggctttggcagagttgtttggaagttgggaggagagcttccaactcctattctcttggaagcaagctgtattggagaaaatgccagatagcgtggttgagattgatgttcgtgaagaggatggtaaggtatatttccatcggttcttttgtgctttcgggccatgcatcaagggattccttgaggggtgcagaccatacttgagcttggactccattgcacttaatggtcgatggaacggccatcttccttcagctacaggtgtcgacgggcacaattggatgtatccagtggcatttgggttttttgagtttgaaaatctggacagttggacttggttcatgacacatctacataaagcattgggggatatgcctcttcttgcagtttgctcagatgcttgcaagggactgactaaagcagtggccactattttcccaaatgcggagaagagggagtgcttcaggcacttgatgcaaaattacatcaaaaggtatgctgggcaagaacacatgtatcctgcagctagagcataccggaaggaagtgtttgatcaacactttgctaatgtaataggcatttcagacttaatggcatggatgaagaaggagcattcacttctatggtatcgcagtggattcaacccggccattaagtgtgattacatcaccaacaacattgctgaggtcttcaacaattgggtgaaagactatttggacctcccaatttgtgagttagccgataagattagaaccttgattatggatctattttttaggaggaggaggataggagaaaggcttaatggcaagatactaccagctgtcctaaatgtgttgcgggcaagaactagaggattagggcatttgtcactagtaaacagtgaccactactgtgctgaggttcgtgacaacaacaattgtcattctaggcacattgttgacgccaaagtgcattattgctcatgcgaggagtggcaacacaccggaaagccatgccaacatgctctatgcgtcataatagcagaacaatatagggttgtggagttggagtattttgtagatgagtactattcagttgaaaagttcaagaaagcttatgatgggagaataggggcatgtttggttcccagcctaacttaccacactttgcctaacttttctgcctaaggttagttcttcaatttaaacgactaaccttaggcaaagtgtggcgtagttagccacgaaccaaacaggccctagaattacttggtgataagtctttttggccaaaggttgcattaggcaatgaggtgagtgcacctcttggtagaagaactgcaggtaggcaaagaaaaaataggatcaagggatgcctagaaggtggaatagggaagaagcgaagcagaaatgttgacaatcataggaacaaagaagaggtcaagaaagcagtgaaagaacattcaaagatggttcccgtctgaagaaggaccaagcacaccacttggcgatgttgaagcatcctcctcggtcctcacaagcaccacaaagggtgggggttaaaaagattacatccaagaagagagctcaacctcctaatgatgacatattgggtggaaccatgtaattgctgtttgaggcgatgtatggggtttaggacggagtactatgtatgaaacccctattatgatactgtggttgatgccatgtatgaaccatgttatatttctagctatgtgtgttggtagcttactgggtgtgtgaaacccctattatgatgcatgaaccatattcagtttacttggtgatatccatattatgtttctagac

SEQ ID NO: 45843 - DNA, 2091 bp, Zea Mays
caacctctgcatgttttggctccgtcaccaccacattatacgaccaccgttggagtccccgtcgttgaccatgaagaggttacagctatgacagatgtgcatacttgtacatctagtggaaggaggaagaccaagacccctacaagtggttgggttgccgctcaagctcttccactcctcaagaagaagcctacaatgggagccaaggaattgcagactgctttgcaggacacttacaatgtgcaaattgcttatttgacactttggagaggtcgggagaaggctttggcagagttgtttggaagttgggaggagagcttccaactcctattctcttggaagcaagctgtattggagaaaatgccagatagcgtggttgagattgatgttcgtgaagaggatggtaaggtatatttccatcggttcttttgtgctttcgggccatgcatcaagggattccttgaggggtgcagaccatacttgagcttggactccattgcacttaatggtcgatggaacggccatcttccttcagctacaggtgtcgacgggcacaattggatgtatccagtggcatttgggttttttgagtttgaaaatctggacagttggacttggttcatgacacatctacataaagcattgggggatatgcctcttcttgcagtttgctcagatgcttgcaagggactgactaaagcagtggccactattttcccaaatgcggagaagagggagtgcttcaggcacttgatgcaaaattacatcaaaaggtatgctgggcaagaacacatgtatcctgcagctagagcataccggaaggaagtgtttgatcaacactttgctaatgtaataggcatttcagacttaatggcatggatgaagaaggagcattcacttctatggtatcgcagtggattcaacccggccattaagtgtgattacatcaccaacaacattgctgaggtcttcaacaattgggtgaaagactatttggacctcccaatttgtgagttagccgataagattagaaccttgattatggatctattttttaggaggaggaggataggagaaaggcttaatggcaagatactaccagctgtcctaaatgtgttgcgggcaagaactagaggattagggcatttgtcactagtaaacagtgaccactactgtgctgaggttcgtgacaacaacaattgtcattctaggcacattgttgacgccaaagtgcattattgctcatgcgaggagtggcaacacaccggaaagccatgccaacatgctctatgcgtcataatagcagaacaatatagggttgtggagttggagtattttgtagatgagtactattcagttgaaaagttcaagaaagcttatgatgggagaataggggcatgtttggttcccagcctaacttaccacactttgcctaacttttctgcctaaggttagttcttcaatttaaacgactaaccttaggcaaagtgtggcgtagttagccacgaaccaaacaggccctagaattacttggtgataagtctttttggccaaaggttgcattaggcaatgaggtgagtgcacctcttggtagaagaactgcaggtaggcaaagaaaaaataggatcaagggatgcctagaaggtggaatagggaagaagcgaagcagaaatgttgacaatcataggaacaaagaagaggtcaagaaagcagtgaaagaacattcaaagatggttcccgtctgaagaaggaccaagcacaccacttggcgatgttgaagcatcctcctcggtcctcacaagcaccacaaagggtgggggttaaaaagattacatccaagaagagagctcaacctcctaatgatgacatattgggtggaaccatgtaattgctgtttgaggcgatgtatggggtttaggacggagtactatgtatgaaacccctattatgatactgtggttgatgccatgtatgaaccatgttatatttctagctatgtgtgttggtagcttactgggtgtgtgaaacccctattatgatgcatgaaccatattcagtttacttggtgatatccatattatgtttctagac

SEQ ID NO: 45844 - DNA, 2066 bp, Zea Mays
gacacctttgcccccgccagtgctgcaaggtatgccggagctgccttcatccatgccgcaacctctgcatgttttggctccgtcaccaccacattatacgaccaccgttggagtccccgtcgttgaccatgaagaggctaactcagtagctataggatcaactgacataccacaaattgactgggcttcaatagaatctgagtctagatgggaggaagaaggacaccaagaagtggtaaaagaagatgggatgtatgatactttaggattgcaaaaggaagttgattgtgttcaaaatgattgtgaagatgcacaggccacaatgccatgtcttgataatgatgatgatgtggtcatgtttgatataaataaccctgttatgaggcttggcagcacttacagtagcatgaaggaatttaggctttcaatgatacaatatgcaattaagcaagaatttgagctgggcattgaagctactagtacacgaagatatagaggctattgtaaaggaggtgattgcccttggagtatacatgccagaaaaaaagtagaagaatcacccaccatcattgttacagctatgacagatgtgcatacttgtacatctagtggaaggaggaagaccaagacccctacaagtggttgggttgccgctcaagctcttccactcctcaagaagaagcctacaatgggagccaaggaattgcagactgctttgcaggacacttacaatgtgcaaattgcttatttgacactttggagaggtcgggagaaggctttggcagagttgtttggaagttgggaggagagcttccaactcctattctcttggaagcaagctgtattggagaaaatgccagatagcgtggttgagattgatgttcgtgaagaggatggtaaggtatatttccatcggttcttttgtgctttcgggccatgcatcaagggattccttgaggggtgcagaccatacttgagcttggactccattgcacttaatggtcgatggaacggccatcttccttcagctacaggtgtcgacgggcacaattggatgtatccagtggcatttgggttttttgagtttgaaaatctggacagttggacttggttcatgacacatctacataaagcattgggggatatgcctcttcttgcagtttgctcagatgcttgcaagggactgactaaagcagtggccactattttcccaaatgcggagaagagggagtgcttcaggcacttgatgcaaaattacatcaaaaggtatgctgggcaagaacacatgtatcctgcagctagagcataccggaaggaagtgtttgatcaacactttgctaatgtaataggcatttcagacttaatggcatggatgaagaaggagcattcacttctatggtatcgcagtggattcaacccggccattaagtgtgattacatcaccaacaacattgctgaggtcttcaacaattgggtgaaagactatttggacctcccaatttgtgagttagccgataagattagaaccttgattatggatctattttttaggaggaggaggataggagaaaggcttaatggcaagatactaccagctgtcctaaatgtgttgcgggcaagaactagaggattagggcatttgtcactagtaaacagtgaccactactgtgctgaggtcaagaaagcagtgaaagaacattcaaagatggttcccgtctgaagaaggaccaagcacaccacttggcgatgttgaagcatcctcctcggtcctcacaagcaccacaaagggtgggggttaaaaagattacatccaagaagagagctcaacctcctaatgatgacatattgggtggaaccatgtaattgctgtttgaggcgatgtatggggtttaggacggagtactatgtatgaaacccctattatgatactgtggttgatgccatgtatgaaccatgttatatttctagctatgtgtgttggtagcttactgggtgtgtgaaacccctattatgatgcatgaaccatattcagtttacttggtgatatccatattatgtttctagac

SEQ ID NO: 45845 - DNA, 2483 bp, Zea Mays
gccagcgacacctttgcccccgccagtgctgcaaggctaactcagtagctataggatcaactgacataccacaaattgactgggcttcaatagaatctgagtctagatgggaggaagaaggacaccaagaagtggtaaaagaagatgggatgtatgatactttaggattgcaaaaggaagttgattgtgttcaaaatgattgtgaagatgcacaggccacaatgccatgtcttgataatgatgatgatgtggtcatgtttgatataaataaccctgttatgaggcttggcagcacttacagtagcatgaaggaatttaggctttcaatgatacaatatgcaattaagcaagaatttgagctgggcattgaagctactagtacacgaagatatagaggctattgtaaaggaggtgattgcccttggagtatacatgccagaaaaaaagtagaagaatcacccaccatcattgttacagctatgacagatgtgcatacttgtacatctagtggaaggaggaagaccaagacccctacaagtggttgggttgccgctcaagctcttccactcctcaagaagaagcctacaatgggagccaaggaattgcagactgctttgcaggacacttacaatgtgcaaattgcttatttgacactttggagaggtcgggagaaggctttggcagagttgtttggaagttgggaggagagcttccaactcctattctcttggaagcaagctgtattggagaaaatgccagatagcgtggttgagattgatgttcgtgaagaggatggtaaggtatatttccatcggttcttttgtgctttcgggccatgcatcaagggattccttgaggggtgcagaccatacttgagcttggactccattgcacttaatggtcgatggaacggccatcttccttcagctacaggtgtcgacgggcacaattggatgtatccagtggcatttgggttttttgagtttgaaaatctggacagttggacttggttcatgacacatctacataaagcattgggggatatgcctcttcttgcagtttgctcagatgcttgcaagggactgactaaagcagtggccactattttcccaaatgcggagaagagggagtgcttcaggcacttgatgcaaaattacatcaaaaggtatgctgggcaagaacacatgtatcctgcagctagagcataccggaaggaagtgtttgatcaacactttgctaatgtaataggcatttcagacttaatggcatggatgaagaaggagcattcacttctatggtatcgcagtggattcaacccggccattaagtgtgattacatcaccaacaacattgctgaggtcttcaacaattgggtgaaagactatttggacctcccaatttgtgagttagccgataagattagaaccttgattatggatctattttttaggaggaggaggataggagaaaggcttaatggcaagatactaccagctgtcctaaatgtgttgcgggcaagaactagaggattagggcatttgtcactagtaaacagtgaccactactgtgctgaggttcgtgacaacaacaattgtcattctaggcacattgttgacgccaaagtgcattattgctcatgcgaggagtggcaacacaccggaaagccatgccaacatgctctatgcgtcataatagcagaacaatatagggttgtggagttggagtattttgtagatgagtactattcagttgaaaagttcaagaaagcttatgatgggagaataggggcatgtttggttcccagcctaacttaccacactttgcctaacttttctgcctaaggttagttcttcaatttaaacgactaaccttaggcaaagtgtggcgtagttagccacgaaccaaacaggccctagaattacttggtgataagtctttttggccaaaggttgcattaggcaatgaggtgagtgcacctcttggtagaagaactgcaggtaggcaaagaaaaaataggatcaagggatgcctagaaggtggaatagggaagaagcgaagcagaaatgttgacaatcataggaacaaagaagaggtcaagaaagcagtgaaagaacattcaaagatggttcccgtctgaagaaggaccaagcacaccacttggcgatgttgaagcatcctcctcggtcctcacaagcaccacaaagggtgggggttaaaaagattacatccaagaagagagctcaacctcctaatgatgacatattgggtggaaccatgtaattgctgtttgaggcgatgtatggggtttaggacggagtactatgtatgaaacccctattatgatactgtggttgatgccatgtatgaaccatgttatatttctagctatgtgtgttggtagcttactgggtgtgtgaaacccctattatgatgcatgaaccatattcagtttacttggtgatatccatattatgtttctagac

SEQ ID NO: 45846 - DNA, 2615 bp, Zea Mays
cgcccccgcctgtgcttcttggcccgccagcgacacctttgcccccgccagtgctgcaaggtatgccggagctgccttcatccatgccgcaacctctgcatgttttggctccgtcaccaccacattatacgaccaccgttggagtccccgtcgttgaccatgaagaggctaactcagtagctataggatcaactgacataccacaaattgactgggcttcaatagaatctgagtctagatgggaggaagaaggacaccaagaagtggtaaaagaagatgggatgtatgatactttaggattgcaaaaggaagttgattgtgttcaaaatgattgtgaagatgcacaggccacaatgccatgtcttgataatgatgatgatgtggtcatgtttgatataaataaccctgttatgaggcttggcagcacttacagtagcatgaaggaatttaggctttcaatgatacaatatgcaattaagcaagaatttgagctgggcattgaagctactagtacacgaagatatagaggctattgtaaaggaggtgattgcccttggagtatacatgccagaaaaaaagtagaagaatcacccaccatcattgttacagctatgacagatgtgcatacttgtacatctagtggaaggaggaagaccaagacccctacaagtggttgggttgccgctcaagctcttccactcctcaagaagaagcctacaatgggagccaaggaattgcagactgctttgcaggacacttacaatgtgcaaattgcttatttgacactttggagaggtcgggagaaggctttggcagagttgtttggaagttgggaggagagcttccaactcctattctcttggaagcaagctgtattggagaaaatgccagatagcgtggttgagattgatgttcgtgaagaggatggtaaggtatatttccatcggttcttttgtgctttcgggccatgcatcaagggattccttgaggggtgcagaccatacttgagcttggactccattgcacttaatggtcgatggaacggccatcttccttcagctacaggtgtcgacgggcacaattggatgtatccagtggcatttgggttttttgagtttgaaaatctggacagttggacttggttcatgacacatctacataaagcattgggggatatgcctcttcttgcagtttgctcagatgcttgcaagggactgactaaagcagtggccactattttcccaaatgcggagaagagggagtgcttcaggcacttgatgcaaaattacatcaaaaggtatgctgggcaagaacacatgtatcctgcagctagagcataccggaaggaagtgtttgatcaacactttgctaatgtaataggcatttcagacttaatggcatggatgaagaaggagcattcacttctatggtatcgcagtggattcaacccggccattaagtgtgattacatcaccaacaacattgctgaggtcttcaacaattgggtgaaagactatttggacctcccaatttgtgagttagccgataagattagaaccttgattatggatctattttttaggaggaggaggataggagaaaggcttaatggcaagatactaccagctgtcctaaatgtgttgcgggcaagaactagaggattagggcatttgtcactagtaaacagtgaccactactgtgctgaggttcgtgacaacaacaattgtcattctaggcacattgttgacgccaaagtgcattattgctcatgcgaggagtggcaacacaccggaaagccatgccaacatgctctatgcgtcataatagcagaacaatatagggttgtggagttggagtattttgtagatgagtactattcagttgaaaagttcaagaaagcttatgatgggagaataggggcatgtttggttcccagcctaacttaccacactttgcctaacttttctgcctaaggttagttcttcaatttaaacgactaaccttaggcaaagtgtggcgtagttagccacgaaccaaacaggccctagaattacttggtgataagtctttttggccaaaggttgcattaggcaatgaggtgagtgcacctcttggtagaagaactgcaggtaggcaaagaaaaaataggatcaagggatgcctagaaggtggaatagggaagaagcgaagcagaaatgttgacaatcataggaacaaagaagaggtcaagaaagcagtgaaagaacattcaaagatggttcccgtctgaagaaggaccaagcacaccacttggcgatgttgaagcatcctcctcggtcctcacaagcaccacaaagggtgggggttaaaaagattacatccaagaagagagctcaacctcctaatgatgacatattgggtggaaccatgtaattgctgtttgaggcgatgtatggggtttaggacggagtactatgtatgaaacccctattatgatactgtggttgatgccatgtatgaaccatgttatatttctagctatgtgtgttggtagcttactgggtgtgtgaaacccctattatgatgcatgaaccatattcagtttacttggtgatatccatattatgtttctagac

SEQ ID NO: 45847 - DNA, 3369 bp, Zea Mays
gtacaaatagaataggcacgcacactccgaacttcccaccccatctccgccgcgcgcaccgcccaatctccgcctccacctgcgccccgctcaggcgagcagaggcttccaccactctccatttcccacgcccgctgcgggctcgcgggcgagaggggattgtctgtgccgccgggcgggaatttgattcgttcgattcgctgcgccgcgatgccggagcggcaccagtcgatcgacgcgcagctgcggctgctggcccccgggaaggtctccgaggatgacaagctcgtcgagtacgacgccctcctcgtcgaccgcttccttgacatcctccaggacctgcacggcccccacctacgcgaattcgtgcaggagtgctacgagctctcggcggagtacgagaacgaccgggatgaggctcggcttggcgagctcgggagcaagctcaccagcctgccgccgggggactccatcgtcgtcgctagttccttctcgcacatgctcaacctcgctaaccttgccgaggaagtgcagatcgcgcaccgccgccggatcaagctaaagcgtggggacttcgccgacgaggcctccgcgccgacagagtcggacatcgaggagacgctcaagcgcctcgtctcgcagctcggcaagtcgcgggaggaggtcttcgacgcgctcaagagccagaccgtcgacctcgtcttcaccgcccaccctacacaatccgtgaggaggtctcttctccagaagcacggcaggatccgtaactgcctgcggcagctctatgccaaggacatcactgctgacgacaagcaggagcttgatgaggcacttcagagggagattcaagctgcttttagaactgatgaaatccgcagaacccctcctactcctcaagatgaaatgcgtgctggactgagttacttccatgaaactatctggaagggtgtacctaaattcttgcgccgtattgacactgctctgaaaaatattgggatcaatgaacgtctcccttacaatgctcctcttattcagttctcttcctggatgggtggtgatcgagatggaaatccaagagtaacaccagaggttacacgggatgtatgcttgttggcgagaatgatggctgctaacttgtatttctctcagatcgaagatctaatgtttgagctctcgatgtggcgttgcagtgatgagcttcggatccgtgcagacgaactacaccgctcttcaaaaaaagctgcaaaacactatatagaattctggaagcaagttcctccaaatgaaccatatcgtgtcatacttggtgatgtcagggataaattgtactacacacgtgaacgttctcgtcatctattgacatctggaatttctgagattccagaggaggcaacttttactaacgttgaacagtttctggaacctcttgagctatgttatagatcattatgtgcttgtggtgacaaacctatagctgacggaagtcttcttgatttcttgcgtcaagtatcaacttttgggcttgcccttgtgaagcttgacatcaggcaggaatctgatcgacacacagatgtccttgattcgataacgacacatcttggaattggctcctatgctgaatggtctgaggagaaacgccaggattggttgttgtctgaactgaggggcaaacgtccattgtttggttctgatcttcctcagactgaagagactgctgatgttttaggcacatttcatgtccttgcagagcttccagcagattgctttggtgcatatatcatctcgatggcaactgccccatctgatgtgcttgcggtggagcttttgcagcgagagtgccatgtaaagcaaccactgagagttgttccactcttcgagaaacttgcagaccttgaagcagctccagcagctgtagcacgactcttttcaattgactggtacatgaataggattaatggtaagcaggaggtcatgatcggatattcagattctggcaaagatgcagggcgtctctctgcagcatggcaaatgtataaagcacaagaagagctcatcaaggtggcaaagcattatggagtgaagctgacaatgtttcatggaagaggtggaacagttggcagaggtggtggtccaacccatctggctatattatctcagccaccagacacgatacatggatcgcttcgtgtaacagttcaaggcgaagttattgagcactcctttggagaggagcacttgtgctttagaactttacaacgctacactgcagctactcttgagcatggcatgcatcctccaatttcccccaagccagaatggcgtgctctgatggatgaaatggctgttgtagcaactaaagaatatcgatcaattgtctttcaagagccacgcttcgttgaatacttcagatcggctacgcctgagactgaatatggcaggatgaatattggcagccgtccatcaaagaggaagcctagtgggggaatagaatcgctccgcgcaatcccatggatctttgcttggacacaaacaaggttccatctgcctgtttggcttggatttggcgcggcgatcaagcacatcatgcagaaggacatcaggaacatccatatactgaaagagatgtacaatgagtggccattcttcagggtcacccttgatctgctcgagatggttttcgccaagggtgatccaggaatcgcagctgtgtatgacaaattgcttgtggctgatgatttgcaatccttcggcgagcaactgaggaagaactatgaggagacaaaggaactactcctccaggttgccggtcacaaggacgtccttgaaggtgatccttacctgaagcagcgtctgcggctgcgcgaatcctacatcaccaccctgaacgtgtgccaggcctacacgctgaagcggatacgtgacccgagcttccaggtgagcccgcagccgccactgtccaaggagttcaccgacgagagtcagccggcggagctggtgcagctgaacgagcagagcgagtacgccccgggcctggaggacacgctgatcctgaccatgaagggcatcgctgccggcatgcagaacaccggctaggccaagatacatactcggtttgcgaataacccgtctcccatgagatggtaggcgatatgtgtagcctgtaagcagacagttcgtcggcgtgttgcggaggaatttttatgtcagagcctttctctcgtgtgcttgatgtagatgccatggggagtttttactggctgttgaagcctgatgcaaaataaactatggaactaaggcattgtttgtttttttttatctaataactagcaaatatgtttcgatcccattgaaactaacatctatttttgt

SEQ ID NO: 45848 - DNA, 2890 bp, Zea Mays
gtccttcgtatcaaatccaggcctggcctggcccataaggccgactggtccccacgggcagcctctctcgtccggtatcaggctccttggccattcgcccgttctacgccagagcccagaggaggcagcaagtcgttctcgcatctcgcgcgcctcgtgaacgaatccctaaccccacaattaaaagcaagcaacccccgctcccccacctgcgctaattaatcacatcacgagatccccttgcccacctccttcgcctcagtcacacgcctcgatctcgcctcgccgcgctcccaccaccgcaccatcccggccgcctcgctcgcgacgcaccaaggtgccctcgtatcccgcggcgccggattgggttccctccggggatcacgcggcgagcctcgccgctcgagccacaggataatatgttcaatctgtttccttgttcatttaaacgtagagtggccttgaaggatgataattgaagcaaaatgattctctatttcaccatattttggagatggatgatctgccaggagatgaaggaagatcccagacacacccttcagaccggaattggccctcccatttggagcagaagttccagtccctgcccctgactaaacaggaaaggaattttgattctgcatattcttcccttgattctagggaagttggtcattcattgcaggctgctcagacattatggtctagcggatccctttcaggtccaatacccaatggtttttattccattattccggaaaagagactcaaggagcattttgataccataccttctcctgatgacctttattctcttggaatagaaggatttaaggctgagattatccttgtggacatagaaagagataaaaagctatctgctttaaagcagttatgcacagcactggtaaaaggattgaattcaaatcctgctgcaatgataaaaaaaattgcaggtttggtttttgacttctacaaccgaccaaacccacatctcagtcctgcaagaacatcctctgaagatctttccaatttattagaaaatcgaggagttcaattgctgggacagataagacatggatcttgcaggcccaaagctatattatttaaagtccttgctgactcagttggtatagattctaaactgctggtgggcattccaaatgaagaacctcatggatatgataattcatccaaacatatgtctgttgtggtcattctgaaatctgcggagtttctagttgacctgatgcgttttccaggacaactagttccattttcatccaaagctgttgtcacatcccatatgtctgcaactggagaaagtgattcagccgactatgattcctgtgattctcctcttgaaccaaatagtcctctatgtgctcaaaggcaagagcaagatgatggcaatagatccttcaaagtcctctcactaagaaacatcatgctcaaatcgacaaattctatggagggtaaaatgagttgttcatctcatagtgagccgaatgttgcaaatgccttctgtggtcgcagccgcgataaagttgtggatgaacatcaaagaactgcaagctcaagtccagagcatccactgtccagagttcgtgggcgctcaatgctgggtgataaacaatatggtggtgctgtagcagtgtcaaggtcagatggcgcatcaacatcaaatacacatagagcacggagaagtactaatattactcctgaaatcagtgatgatattgtgagagcagttcgagcaatgagtgaaagcatgagacaaaatcgcctttcaagggagcagaaggatggtagtcttggatcctcaaatgattcaatgaaacatgaacctgctggtgactccaatgatgatgaagcatccacaagacgaccgagtgcactggagggtttgagaaggcaatttaatagtcagaaagctgtgtcattgccttcgtcgcccaataggtcaggtattcttggcctcaggagcccatctgactatacagaagccgatctgatggcgacctggaatgaggtgttgcagtcttcaccatttctgaacaagcctttattgccttatgaggaatggtgcattgagttttcagagatcactgttggcattcgtgtgggagtagggttttttggggaagtcttccgtggcctttggaacggaacagatgtagctataaaagtatttctggagcaggatttgacaacagagaatatgaaagatttctgcaacgagatatcaatacttagccgacttcgacaccccaatgtcatactctttcttggtgcatgtatgaagcctcctcacttatccctagtcactgagtacatggaagtgggttctttgtatagtttgattcactcaaaaacacagaaaactaagctccattggaagaggaggttaaagatgctccgtgatatctgtaggggtctcatgtgcatgcaccggctaaagattgttcaccgggacctcaagagtgcaaattgcctcgttaacaaatactggacagtcaagatatgtgattttgggctctctcgagtaatgtcaaattctgcaatgaatgacaactcatctgcgggaactccagagtggatggctcctgagctcattcgcaacgagccattcacagaaaaatgtgatatcttcagcttcggggtcatcatgtgggagctttgcactctttgtagaccttgggaaggaattccacctgttcagatcgtttactctgttgcgaatgatggggcaagactggaaataccagatgggcctcttggaagcttgatagcagattgctgggcagaaccggagaggcgtccatgctgccaggagatcctgacccgccttcttgattgcgaggttatgcattcgaaggatcaagttggg

SEQ ID NO: 45849 - DNA, 3224 bp, Zea Mays
ctcgcatctcgcgcgcctcgtgaacgaatccctaaccccacaattaaaagcaagcaacccccgctcccccacctgcgctaattaatcacatcacgagatccccttgcccacctccttcgcctcagtcacacgcctcgatctcgcctcgccgcgctcccaccaccgcaccatcccggccgcctcgctcgcgacgcaccaaggtgccctcgtatcccgcggcgccggattgggttccctccggggatcacgcggcgagcctcgccgctcgagccacagagtggccttgaaggatgataattgaagcaaaatgattctctatttcaccatattttggagatggatgatctgccaggagatgaaggaagatcccagacacacccttcagaccggaattggccctcccatttggagcagaagttccagtccctgcccctgactaaacaggaaaggaattttgattctgcatattcttcccttgattctagggaagttggtcattcattgcaggctgctcagacattatggtctagcggatccctttcaggtccaatacccaatggtttttattccattattccggaaaagagactcaaggagcattttgataccataccttctcctgatgacctttattctcttggaatagaaggatttaaggctgagattatccttgtggacatagaaagagataaaaagctatctgctttaaagcagttatgcacagcactggtaaaaggattgaattcaaatcctgctgcaatgataaaaaaaattgcaggtttggtttttgacttctacaaccgaccaaacccacatctcagtcctgcaagaacatcctctgaagatctttccaatttattagaaaatcgaggagttcaattgctgggacagataagacatggatcttgcaggcccaaagctatattatttaaagtccttgctgactcagttggtatagattctaaactgctggtgggcattccaaatgaagaacctcatggatatgataattcatccaaacatatgtctgttgtggtcattctgaaatctgcggagtttctagttgacctgatgcgttttccaggacaactagttccattttcatccaaagctgttgtcacatcccatatgtctgcaactggagaaagtgattcagccgactatgattcctgtgattctcctcttgaaccaaatagtcctctatgtgctcaaaggcaagagcaagatgatggcaatagatccttcaaagtcctctcactaagaaacatcatgctcaaatcgacaaattctatggagggtaaaatgagttgttcatctcatagtgagccgaatgttgcaaatgccttctgtggtcgcagccgcgataaagttgtggatgaacatcaaagaactgcaagctcaagtccagagcatccactgtccagagttcgtgggcgctcaatgctgggtgataaacaatatggtggtgctgtagcagtgtcaaggtcagatggcgcatcaacatcaaatacacatagagcacggagaagtactaatattactcctgaaatcagtgatgatattgtgagagcagttcgagcaatgagtgaaagcatgagacaaaatcgcctttcaagggagcagaaggatggtagtcttggatcctcaaatgattcaatgaaacatgaacctgctggtgactccaatgatgatgaagcatccacaagacgaccgagtgcactggagggtttgagaaggcaatttaatagtcagaaagctgtgtcattgccttcgtcgcccaataggtcaggtattcttggcctcaggagcccatctgactatacagaagccgatctgatggcgacctggaatgaggtgttgcagtcttcaccatttctgaacaagcctttattgccttatgaggaatggtgcattgagttttcagagatcactgttggcattcgtgtgggagtagggttttttggggaagtcttccgtggcctttggaacggaacagatgtagctataaaagtatttctggagcaggatttgacaacagagaatatgaaagatttctgcaacgagatatcaatacttagccgacttcgacaccccaatgtcatactctttcttggtgcatgtatgaagcctcctcacttatccctagtcactgagtacatggaagtgggttctttgtatagtttgattcactcaaaaacacagaaaactaagctccattggaagaggaggttaaagatgctccgtgatatctgtaggggtctcatgtgcatgcaccggctaaagattgttcaccgggacctcaagagtgcaaattgcctcgttaacaaatactggacagtcaagatatgtgattttgggctctctcgagtaatgtcaaattctgcaatgaatgacaactcatctgcgggaactccagagtggatggctcctgagctcattcgcaacgagccattcacagaaaaatgtgatatcttcagcttcggggtcatcatgtgggagctttgcactctttgtagaccttgggaaggaattccacctgttcagatcgtttactctgttgcgaatgatggggcaagactggaaataccagatgggcctcttggaagcttgatagcagattgctgggcagaaccggagaggcgtccatgctgccaggagatcctgacccgccttcttgattgcgagtataccttgtgctgaggctttgcttctagtctgtatagcggttataggggcatcagacggtctggcttatatatacatcacttaattttccatttcacatacatcattgagggtgtaaattaccatgtattaataagcaaactttttctaaacctctttaatgctattgccccaaaatccaagaaaagttttcgcaaaaaaaaagccttgttcgagttctgtacgttttccctttatctatatcttagtcgctttctgaaataatgagatttcactttccaaataaatctatatgtgatttttttaacctttgtttgactaactgccgaacccaacgattcttccaggacccgacccaaacgtttttgattggatctctttctttctctctccctgagagcaagcagatgggatgtaagcttgtctatgtcattaaatcctacgtagagatgagagagaataagagaccgaagtgggcacccgatctaccgcacaactaaaacacgccatttccaaggttcgtttaacttttaatccat

SEQ ID NO: 45850 - DNA, 2871 bp, Zea Mays
ctcgcatctcgcgcgcctcgtgaacgaatccctaaccccacaattaaaagcaagcaacccccgctcccccacctgcgctaattaatcacatcacgagatccccttgcccacctccttcgcctcagtcacacgcctcgatctcgcctcgccgcgctcccaccaccgcaccatcccggccgcctcgctcgcgacgcaccaaggtgccctcgtatcccgcggcgccggattgggttccctccggggatcacgcggcgagcctcgccgctcgagccacagagtggccttgaaggatgataattgaagcaaaatgattctctatttcaccatattttggagatggatgatctgccaggagatgaaggaagatcccagacacacccttcagaccggaattggccctcccatttggagcagaagttccagtccctgcccctgactaaacaggaaaggaattttgattctgcatattcttcccttgattctagggaagttggtcattcattgcaggctgctcagacattatggtctagcggatccctttcaggtccaatacccaatggtttttattccattattccggaaaagagactcaaggagcattttgataccataccttctcctgatgacctttattctcttggaatagaaggatttaaggctgagattatccttgtggacatagaaagagataaaaagctatctgctttaaagcagttatgcacagcactggtaaaaggattgaattcaaatcctgctgcaatgataaaaaaaattgcaggtttggtttttgacttctacaaccgaccaaacccacatctcagtcctgcaagaacatcctctgaagatctttccaatttattagaaaatcgaggagttcaattgctgggacagataagacatggatcttgcaggcccaaagctatattatttaaagtccttgctgactcagttggtatagattctaaactgctggtgggcattccaaatgaagaacctcatggatatgataattcatccaaacatatgtctgttgtggtcattctgaaatctgcggagtttctagttgacctgatgcgttttccaggacaactagttccattttcatccaaagctgttgtcacatcccatatgtctgcaactggagaaagtgattcagccgactatgattcctgtgattctcctcttgaaccaaatagtcctctatgtgctcaaaggcaagagcaagatgatggcaatagatccttcaaagtcctctcactaagaaacatcatgctcaaatcgacaaattctatggagggtaaaatgagttgttcatctcatagtgagccgaatgttgcaaatgccttctgtggtcgcagccgcgataaagttgtggatgaacatcaaagaactgcaagctcaagtccagagcatccactgtccagagttcgtgggcgctcaatgctgggtgataaacaatatggtggtgctgtagcagtgtcaaggtcagatggcgcatcaacatcaaatacacatagagcacggagaagtactaatattactcctgaaatcagtgatgatattgtgagttcgagcaatgagtgaaagcatgagacaaaatcgcctttcaagggagcagaaggatggtagtcttggatcctcaaatgattcaatgaaacatgaacctgctggtgactccaatgatgatgaagcatccacaagacgaccgagtgcactggagggtttgagaaggcaatttaatagtcagaaagctgtgtcattgccttcgtcgcccaataggtcaggtattcttggcctcaggagcccatctgactatacagaagccgatctgatggcgacctggaatgaggtgttgcagtcttcaccatttctgaacaagcctttattgccttatgaggaatggtgcattgagttttcagagatcactgttggcattcgtgtgggagtagggttttttggggaagtcttccgtggcctttggaacggaacagatgtagctataaaagtatttctggagcaggatttgacaacagagaatatgaaagatttctgcaacgagatatcaatacttagccgacttcgacaccccaatgtcatactctttcttggtgcatgtatgaagcctcctcacttatccctagtcactgagtacatggaagtgggttctttgtatagtttgattcactcaaaaacacagaaaactaagctccattggaagaggaggttaaagatgctccgtgatatctgtaggggtctcatgtgcatgcaccggctaaagattgttcaccgggacctcaagagtgcaaattgcctcgttaacaaatactggacagtcaagatatgtgattttgggctctctcgagtaatgtcaaattctgcaatgaatgacaactcatctgcgggaactccagagtggatggctcctgagctcattcgcaacgagccattcacagaaaaatgtgatatcttcagcttcggggtcatcatgtgggagctttgcactctttgtagaccttgggaaggaattccacctgttcagatcgtttactctgttgcgaatgatggggcaagactggaaataccagatgggcctcttggaagcttgatagcagattgctgggcagaaccggagaggcgtccatgctgccaggagatcctgacccgccttcttgattgcgagacccgacccaaacgtttttgattggatctctttctttctctctccctgagagcaagcagatgggatgtaagcttgtctatgtcattaaatcctacgtagagatgagagagaataagagaccgaagtgggcacccgatctaccgcacaactaaaacacgccatttccaaggttcgtttaacttttaatccat

SEQ ID NO: 45851 - DNA, 3181 bp, Zea Mays
ctcgcatctcgcgcgcctcgtgaacgaatccctaaccccacaattaaaagcaagcaacccccgctcccccacctgcgctaattaatcacatcacgagatccccttgcccacctccttcgcctcagtcacacgcctcgatctcgcctcgccgcgctcccaccaccgcaccatcccggccgcctcgctcgcgacgcaccaaggtgccctcgtatcccgcggcgccggattgggttccctccggggatcacgcggcgagcctcgccgctcgagccacaggataatatgttcaatctgtttccttgttcatttaaacgtagagtggccttgaaggatgataattgaagcaaaatgattctctatttcaccatattttggagatggatgatctgccaggagatgaaggaagatcccagacacacccttcagaccggaattggccctcccatttggagcagaagttccagtccctgcccctgactaaacaggaaaggaattttgattctgcatattcttcccttgattctagggaagttggtcattcattgcaggctgctcagacattatggtctagcggatccctttcaggtccaatacccaatggtttttattccattattccggaaaagagactcaaggagcattttgataccataccttctcctgatgacctttattctcttggaatagaaggatttaaggctgagattatccttgtggacatagaaagagataaaaagctatctgctttaaagcagttatgcacagcactggtaaaaggattgaattcaaatcctgctgcaatgataaaaaaaattgcaggtttggtttttgacttctacaaccgaccaaacccacatctcagtcctgcaagaacatcctctgaagatctttccaatttattagaaaatcgaggagttcaattgctgggacagataagacatggatcttgcaggcccaaagctatattatttaaagtccttgctgactcagttggtatagattctaaactgctggtgggcattccaaatgaagaacctcatggatatgataattcatccaaacatatgtctgttgtggtcattctgaaatctgcggagtttctagttgacctgatgcgttttccaggacaactagttccattttcatccaaagctgttgtcacatcccatatgtctgcaactggagaaagtgattcagccgactatgattcctgtgattctcctcttgaaccaaatagtcctctatgtgctcaaaggcaagagcaagatgatggcaatagatccttcaaagtcctctcactaagaaacatcatgctcaaatcgacaaattctatggagggtaaaatgagttgttcatctcatagtgagccgaatgttgcaaatgccttctgtggtcgcagccgcgataaagttgtggatgaacatcaaagaactgcaagctcaagtccagagcatccactgtccagagttcgtgggcgctcaatgctgggtgataaacaatatggtggtgctgtagcagtgtcaagagcagttcgagcaatgagtgaaagcatgagacaaaatcgcctttcaagggagcagaaggatggtagtcttggatcctcaaatgattcaatgaaacatgaacctgctggtgactccaatgatgatgaagcatccacaagacgaccgagtgcactggagggtttgagaaggcaatttaatagtcagaaagctgtgtcattgccttcgtcgcccaataggtcaggtattcttggcctcaggagcccatctgactatacagaagccgatctgatggcgacctggaatgaggtgttgcagtcttcaccatttctgaacaagcctttattgccttatgaggaatggtgcattgagttttcagagatcactgttggcattcgtgtgggagtagggttttttggggaagtcttccgtggcctttggaacggaacagatgtagctataaaagtatttctggagcaggatttgacaacagagaatatgaaagatttctgcaacgagatatcaatacttagccgacttcgacaccccaatgtcatactctttcttggtgcatgtatgaagcctcctcacttatccctagtcactgagtacatggaagtgggttctttgtatagtttgattcactcaaaaacacagaaaactaagctccattggaagaggaggttaaagatgctccgtgatatctgtaggggtctcatgtgcatgcaccggctaaagattgttcaccgggacctcaagagtgcaaattgcctcgttaacaaatactggacagtcaagatatgtgattttgggctctctcgagtaatgtcaaattctgcaatgaatgacaactcatctgcgggaactccagagtggatggctcctgagctcattcgcaacgagccattcacagaaaaatgtgatatcttcagcttcggggtcatcatgtgggagctttgcactctttgtagaccttgggaaggaattccacctgttcagatcgtttactctgttgcgaatgatggggcaagactggaaataccagatgggcctcttggaagcttgatagcagattgctgggcagaaccggagaggcgtccatgctgccaggagatcctgacccgccttcttgattgcgagtataccttgtgctgaggctttgcttctagtctgtatagcggttataggggcatcagacggtctggcttatatatacatcacttaattttccatttcacatacatcattgagggtgtaaattaccatgtattaataagcaaactttttctaaacctctttaatgctattgccccaaaatccaagaaaagttttcgcaaaaaaaaagccttgttcgagttctgtacgttttccctttatctatatcttagtcgctttctgaaataatgagatttcactttccaaataaatctatatgtgatttttttaacctttgtttgactaactgccgaacccaacgattcttccaggacccgacccaaacgtttttgattggatctctttctttctctctccctgagagcaagcagatgggatgtaagcttgtctatgtcattaaatcctacgtagagatgagagagaataagagaccgaagtgggcacccgatctaccgcacaactaaaacacgccatttccaaggttcgtttaacttttaatccat

SEQ ID NO: 45852 - DNA, 1787 bp, Zea Mays
ctcgcatctcgcgcgcctcgtgaacgaatccctaaccccacaattaaaagcaagcaacccccgctcccccacctgcgctaattaatcacatcacgagatccccttgcccacctccttcgcctcagtcacacgcctcgatctcgcctcgccgcgctcccaccaccgcaccatcccggccgcctcgctcgcgacgcaccaaggtgccctcgtatcccgcggcgccggattgggttccctccggggatcacgcggcgagcctcgccgctcgagccacaggataatatgttcaatctgtttccttgttcatttaaacgtagagtggccttgaaggatgataattgaagcaaaatgattctctatttcaccatattttggagatggatgatctgccaggagatgaaggaagatcccagacacacccttcagaccggaattggccctcccatttggagcagaagttccagtccctgcccctgactaaacaggaaaggaattttgattctgcatattcttcccttgattctagggaagttggtcattcattgcaggctgctcagacattatggtctagcggatccctttcaggtccaatacccaatggtttttattccattattccggaaaagagactcaaggagcattttgataccataccttctcctgatgacctttattctcttggaatagaaggatttaaggctgagattatccttgtggacatagaaagagataaaaagctatctgctttaaagcagttatgcacagcactggtaaaaggattgaattcaaatcctgctgcaatgataaaaaaaattgcaggtttggtttttgacttctacaaccgaccaaacccacatctcagtcctgcaagaacatcctctgaagatctttccaatttattagaaaatcgaggagttcaattgctgggacagataagacatggatcttgcaggcccaaagctatattatttaaagtccttgctgactcagttggtatagattctaaactgctggtgggcattccaaatgaagaacctcatggatatgataattcatccaaacatatgtctgttgtggtcattctgaaatctgcggagtttctagttgacctgatgcgttttccaggacaactagttccattttcatccaaagctgttgtcacatcccatatgtctgcaactggagaaagtgattcagccgactatgattcctgtgattctcctcttgaaccaaatagtcctctatgtgctcaaaggcaagagcaagatgatggcaatagatccttcaaagtcctctcactaagaaacatcatgctcaaatcgacaaattctatggagggtaaaatgagttgttcatctcatagtgagccgaatgttgcaaatgccttctgtggtcgcagccgcgataaagttgtggatgaacatcaaagaactgcaagctcaagtccagagcatccactgtccagagttcgtgggcgctcaatgctgggtgataaacaatatggtggtgctgtagcagtgtcaaggtcagatggcgcatcaacatcaaatacacatagagcacggagaagtactaatattactcctgaaatcagtgatgatattgtgagagcagttcgagcaatgagtgaaagcatgagacaaaatcgcctttcaagggagcagaaggatggtagtcttggatcctcaaatgattcaatgaaacatatcatgatctattatcaccctacaaaccagaggcccagcttggcatgtccaccagccttatcgcccaggctgctgttttgg

SEQ ID NO: 45853 - DNA, 2752 bp, Zea Mays
atgtacaacggcatcgggctgcagaccgcgcgggggtcgggcaccaacgggtacgtccagaccaacaagttcttcatcaagccccgctccacatccggcgggggcccgggcggaccccacaggccgccgctccccgacgccaccggcgcggatggcggcgggctcggcgggatgcgcaagcccaacaaggagatcctcgagcacgaccgcaagcgccaggtcgagctcaatctgctcgtgctcagggacgcgctcgaggagcagggctacaccgaagacgagatcgaggagcgcgtagaggaggcgcgcaaggctgctgaggcagaggcggccgcggtcgcggcagcggaggaagcagggagcgttagcggcgccggtcgaccgcctctacccggcagagggtttacagacacacagagccaccatgttgcagcacggaaggagaaacaacttgagactctaagggctgctttagggctgaacgtggaggatgcaaagaagggggatgtagaaagtgatgtagaatctggggagcttgttcctggtaagtactatgaggaactggttactgttggggaaaataatagtaaggattcaaagaatgcaaagaagagcaagaagaaaaaagagaatgacaaaaggcgtcaacccaaaagttcgagaaagagcaagtatgactcagacttggatcacgatcataacacaaaaacgaagaagagttctcaccatgattcagatgatgattcagagactgattatgatgagaaaaaggaaaagaaatacaacaagaaacatcgtcttggttctgatgatgattctgaaaatgatcgaaagaaggcaaagcgtggaaagaactctggttctgagtctgatacagatagtggccatggcaaaaagaaaactaaacatgtaaagagtgatcagggtgggagaaagaagatacaagtgaagaactctcatcacgattccgagtctgacacagatagtagctatggcaagaaaacagaacatgcaaggaatgataggggtgagagaaagaagataccggtaaataattctcgtcatgatttcaaatctgatatagatagtggatatggcaagaaaacagaagatgcaaagagtgaacactatgagagaaagaagttattggtgaagagctctcgtcatgattctgagtctgatacagacagtggttatggcaagaagaaaatggaacatataaagaatgaacgcgatgagagaaagaaggtgctggtgaagaactctcgtcatgattctgagtctgatacagatagtggctatggcaagaagaaaatggaacatgcaaaaattgaacgtgatgagagaaggaaggtaccggtgaagagttctcgttatgattctgagtctgatactgatagtggctatggcaagaagaaaatggagcaaacaaagaatgtacgtgatgagaaaaggaaggtaccattgaagagttctcatcatgattctgagtctgatgcagatattgactataggaagaagaaaatagaacatacagagggtattcgtgatgagagaaagaagataccagcgagaagctctcgccatgattctgactctggtgcagataataatgggaaaaacaagagaccattgcaaagctctcgtcatgatttggaggatgagaagcctagatcgagaaattataattatggctctcgggcttccgagcatgagaaacatatgttgaaaaaggatgtgcaagagaaaagaaaagtagctacctcaagtgatagttcagattacagcagcagcctcagcagtagtgattctgacacgagtgcagatagctatgaggaacagaaaaggagtcaagctggagggagaagaaatgagctgactacacaaaggcagaaagaggaggaaagaaaagagcttgaaaagcaacagaagagagagaaggagaagaaaaggcagcgagagagggaggaagagagacagagggagagagagcaatacgaaaggaaaggtggaaatgatgtggagagggacaacaaaaggaaactgatagatgatcggtatgatccaaattcaagtagagatagagaagagggatacagagactctcagaacagagatgacaatagaaggcaggaagagcatggtcaacacaatagatatatggatagtcatgattccaagaggtcaaggcatgactcgcattaccattcaaggagggattttgaacaacgctattctagagacgaacatagagacagaaggcgtcactaaatgtaagcttggaagaatgccgctctaggtggacaacttattctcagctatcacccataagttccagtcccagatcttttctgcggcagcaagaccaacccatcagtacctccgctgcagcattaatatctgcttttgtttgtatcatactttggattttactatgcaaagagcgaagtctgcaatatgtaatatgttgtggaacagacatgaacggtaggattttttttgttggaatttgtggtgcgcatgttgctgatcataattatgataagttttcttaagcttatatttgatgagctccaggtttttcaaaatttggtgcgcatgttagggttcttttcatgtttcatgtgtactgctcaagcctttagataagccttgatgtttgcaggccactttagattagaaaaacagcaccaagtttaatacgtgctactctttcaagtggtaaccaagcataaaaaaacctgaaaaagag

SEQ ID NO: 45854 - DNA, 3227 bp, Zea Mays
acctcaccccgtccggattgcggatctgacgcgcgagcacgaagcctcgacctagccaggcttcccttgccctactttgcgccgccgccgccgccgatccagccggcctctccccgcccgccggccgcgatgtacaacggcatcgggctgcagaccgcgcgggggtcgggcaccaacgggtacgtccagaccaacaagttcttcatcaagccccgctccacatccggcgggggcccgggcggaccccacaggccgccgctccccgacgccaccggcgcggatggcggcgggctcggcgggatgcgcaagcccaacaaggagatcctcgagcacgaccgcaagcgccaggtcgagctcaatctgctcgtgctcagggacgcgctcgaggagcagggctacaccgaagacgagatcgaggagcgcgtagaggaggcgcgcaaggctgctgaggcagaggcggccgcggtcgcggcagcggaggaagcagggagcgttagcggcgccggtcgaccgcctctacccggcagagggtttacagacacacagagccaccatgttgcagcacggaaggagaaacaacttgagactctaagggctgctttagggctgaacgtggaggatgcaaagaagggggatgtagaaagtgatgtagaatctggggagcttgttcctggtaagtactatgaggaactggttactgttggggaaaataatagtaaggattcaaagaatgcaaagaagagcaagaagaaaaaagagaatgacaaaaggcgtcaacccaaaagttcgagaaagagcaagtatgactcagacttggatcacgatcataacacaaaaacgaagaagagttctcaccatgattcagatgatgattcagagactgattatgatgagaaaaaggaaaagaaatacaacaagaaacatcgtcttggttctgatgatgattctgaaaatgatcgaaagaaggcaaagcgtggaaagaactctggttctgagtctgatacagatagtggccatggcaaaaagaaaactaaacatgtaaagagtgatcagggtgggagaaagaagatacaagtgaagaactctcatcacgattccgagtctgacacagatagtagctatggcaagaaaacagaacatgcaaggaatgataggggtgagagaaagaagataccggtaaataattctcgtcatgatttcaaatctgatatagatagtggatatggcaagaaaacagaagatgcaaagagtgaacactatgagagaaagaagttattggtgaagagctctcgtcatgattctgagtctgatacagacagtggttatggcaagaagaaaatggaacatataaagaatgaacgcgatgagagaaagaaggtgctggtgaagaactctcgtcatgattctgagtctgatacagatagtggctatggcaagaagaaaatggaacatgcaaaaattgaacgtgatgagagaaggaaggtaccggtgaagagttctcgttatgattctgagtctgatactgatagtggctatggcaagaagaaaatggagcaaacaaagaatgtacgtgatgagaaaaggaaggtaccattgaagagttctcatcatgattctgagtctgatgcagatattgactataggaagaagaaaatagaacatacagagggtattcgtgatgagagaaagaagataccagcgagaagctctcgccatgattctgactctggtgcagataataatgggaaaaacaagagaccattgcaaagctctcgtcatgatttggaggatgagaagcctagatcgagaaattataattatggctctcgggcttccgagcatgagaaacatatgttgaaaaaggatgtgcaagagaaaagaaaagtagctacctcaagtgatagttcagattacagcagcagcctcagcagtagtgattctgacacgagtgcagatagctatgaggaacagaaaaggagtcaagctggagggagaagaaatgagctgactacacaaaggcagaaagaggaggaaagaaaagagcttgaaaagcaacagaagagagaggtagagaagaaagagctggataagcaaaagcaaagggaggaagagaggatggagatggagaaggagaagaaaaggcagcgagagagggaggaagagagacagagggagagagagcaatacgaaaggaaaggtggaaatgatgtggagagggacaacaaaaggaaactgatagatgatcggtatgatccaaattcaagtagagatagagaagagggatacagagactctcagaacagagatgacaatagaaggcaggaagagcatggtcaacacaatagatatatggatagtcatgattccaagaggtcaaggcatgactcgcattaccattcaaggagggattttgaacaacgctattctagagacgaacatagagacagaaggcgtcactaaatgtaaggtatattaaccaccccacctaaactccccttgacatacctggtgccttgtcgtagataagctcacgtgtttttttttgttatattgccaaatcatacaaccagtctacattgagctgtaggctgtaggtttagaagctagttcagcatatatatgtgtatgttatgaactactaatatgttttggatgctacatgcctctgcatattggtacacggcccttttgcttgtgtcaaattaattggttattacacatttatctcaccatactctgcgccttatgtgcagcttggaagaatgccgctctaggtggacaacttattctcagctatcacccataagttccagtcccagatcttttctgcggcagcaagaccaacccatcagtacctccgctgcagcattaatatctgcttttgtttgtatcatactttggattttactatgcaaagagcgaagtctgcaatatgtaatatgttgtggaacagacatgaacggtaggattttttttgttggaatttgtggtgcgcatgttgctgatcataattatgataagttttcttaagcttatatttgatgagctccaggtttttcaaaatttggtgcgcatgttagggttcttttcatgtttcatgtgtactgctcaagcctttagataagccttgatgtttgcaggccactttagattagaaaaacagcaccaagtttaatacgtgctactctttcaagtggtaaccaagcataaaaaaacctgaaaaagag

SEQ ID NO: 45855 - DNA, 3025 bp, Zea Mays
catctctaccggggccgggcctacggactcggagtcacgaggcagcccacaatcagaatataacccaaccggctcctccctcgcttctcacctcaccccgtccggattgcggatctgacgcgcgagcacgaagcctcgacctagccaggcttcccttgccctactttgcgccgccgccgccgccgatccagccggcctctccccgcccgccggccgcgatgtacaacggcatcgggctgcagaccgcgcgggggtcgggcaccaacgggtacgtccagaccaacaagttcttcatcaagccccgctccacatccggcgggggcccgggcggaccccacaggccgccgctccccgacgccaccggcgcggatggcggcgggctcggcgggatgcgcaagcccaacaaggagatcctcgagcacgaccgcaagcgccaggtcgagctcaatctgctcgtgctcagggacgcgctcgaggagcagggctacaccgaagacgagatcgaggagcgcgtagaggaggcgcgcaaggctgctgaggcagaggcggccgcggtcgcggcagcggaggaagcagggagcgttagcggcgccggtcgaccgcctctacccggcagagggtttacagacacacagagccaccatgttgcagcacggaaggagaaacaacttgagactctaagggctgctttagggctgaacgtggaggatgcaaagaagggggatgtagaaagtgatgtagaatctggggagcttgttcctggtaagtactatgaggaactggttactgttggggaaaataatagtaaggattcaaagaatgcaaagaagagcaagaagaaaaaagagaatgacaaaaggcgtcaacccaaaagttcgagaaagagcaagtatgactcagacttggatcacgatcataacacaaaaacgaagaagagttctcaccatgattcagatgatgattcagagactgattatgatgagaaaaaggaaaagaaatacaacaagaaacatcgtcttggttctgatgatgattctgaaaatgatcgaaagaaggcaaagcgtggaaagaactctggttctgagtctgatacagatagtggccatggcaaaaagaaaactaaacatgtaaagagtgatcagggtgggagaaagaagatacaagtgaagaactctcatcacgattccgagtctgacacagatagtagctatggcaagaaaacagaacatgcaaggaatgataggggtgagagaaagaagataccggtaaataattctcgtcatgatttcaaatctgatatagatagtggatatggcaagaaaacagaagatgcaaagagtgaacactatgagagaaagaagttattggtgaagagctctcgtcatgattctgagtctgatacagacagtggttatggcaagaagaaaatggaacatataaagaatgaacgcgatgagagaaagaaggtgctggtgaagaactctcgtcatgattctgagtctgatacagatagtggctatggcaagaagaaaatggaacatgcaaaaattgaacgtgatgagagaaggaaggtaccggtgaagagttctcgttatgattctgagtctgatactgatagtggctatggcaagaagaaaatggagcaaacaaagaatgtacgtgatgagaaaaggaaggtaccattgaagagttctcatcatgattctgagtctgatgcagatattgactataggaagaagaaaatagaacatacagagggtattcgtgatgagagaaagaagataccagcgagaagctctcgccatgattctgactctggtgcagataataatgggaaaaacaagagaccattgcaaagctctcgtcatgatttggaggatgagaagcctagatcgagaaattataattatggctctcgggcttccgagcatgagaaacatatgttgaaaaaggatgtgcaagagaaaagaaaagtagctacctcaagtgatagttcagattacagcagcagcctcagcagtagtgattctgacacgagtgcagatagctatgaggaacagaaaaggagtcaagctggagggagaagaaatgagctgactacacaaaggcagaaagaggaggaaagaaaagagcttgaaaagcaacagaagagagaggtagagaagaaagagctggataagcaaaagcaaagggaggaagagaggatggagatggagaaggagaagaaaaggcagcgagagagggaggaagagagacagagggagagagagcaatacgaaaggaaaggtggaaatgatgtggagagggacaacaaaaggaaactgatagatgatcggtatgatccaaattcaagtagagatagagaagagggatacagagactctcagaacagagatgacaatagaaggcaggaagagcatggtcaacacaatagatatatggatagtcatgattccaagaggtcaaggcatgactcgcattaccattcaaggagggattttgaacaacgctattctagagacgaacatagagacagaaggcgtcactaaatcttggaagaatgccgctctaggtggacaacttattctcagctatcacccataagttccagtcccagatcttttctgcggcagcaagaccaacccatcagtacctccgctgcagcattaatatctgcttttgtttgtatcatactttggattttactatgcaaagagcgaagtctgcaatatgtaatatgttgtggaacagacatgaacggtaggattttttttgttggaatttgtggtgcgcatgttgctgatcataattatgataagttttcttaagcttatatttgatgagctccaggtttttcaaaatttggtgcgcatgttagggttcttttcatgtttcatgtgtactgctcaagcctttagataagccttgatgtttgcaggccactttagattagaaaaacagcaccaagtttaatacgtgctactctttcaagtggtaaccaagcataaaaaaacctgaaaaagag

SEQ ID NO: 45856 - DNA, 766 bp, Zea Mays
ctccaatgtccatgttattttggtgtgcaatttcaggcataaatcgtccctgttggtgagctgttccaaagactcaaaggttaaagtttgggacacagtggctccttcgagtggttcatcatcatgtgtaggcagtgctcacctcaactcaaacgggccaccaattgctatgaaatgccatgaatccctttgctatatcgctgctggagctgaagtgacagcgattgacttgaggacaatgaagaaggcttctgtccttgcactccagaaccacagaatgctttcttgtgagatgatgccttctgaatggttaatatgtactggcacgaaagacagggctcttctatgggacacccgcaaggctcaggaactcccaaacacagtggcagagatgcaatcgaacggcccggtgacattgcttcacttggaccaatacaaggtggtgaccggagtgccgtcggacggccaggtccacgtctaggaaacacggacgggggactcactgaactcgttgggttgtggcgaaccttcgagactgggcgtgcggagcagggtgtcggccatggccgtggacgggtgcaggatcgccatggcgggcagctctccggaaggctgcatgctgcactaccgtgacttcgcgacggcttctgcccctgtagtgtccttgccaggcaaggagaaggaggtctccaggttctagtgtgttattcaagtaccctagttgatcacttggacaaggcataaggctgaagttggtgcataaggc

SEQ ID NO: 45857 - DNA, 1305 bp, Zea Mays
ccagcttcccccttcctgctaagtccaacaccccaacccctcgcccttccctgctcgacagccacgtccctggtcttccaaggccgcgccctcacctccttcccatggtgagctcgcccatggcggctttccccgctcggcgtactcccctctgcaggagctcgccctcaaactccctgcctgctcgagctcgccgaggccgcgacctcgccgaatcgcgcagcccctgctctccttccccagccgcgcttagcctagcctccctcctggctccctgctcttttccatcgccgaggatttggccagcgctatccctactcgcctctaccctgctgctcccctatgtgttgtgcgatggggaatttttagttgcggcaatcgctatctgaacctccaatgtccatgttattttggtgtgcaatttcaggtttagaaaatcagattattgcaattgcaagtggaggggaagactgcaccattcgtctatggtctatgagtacgagggcgaaaaatcacccactaatagcaacatttcatgggcatgaaaagacactgtcttttttatctattgcgtggcataaatcgtccctgttggtgagctgttccaaagactcaaaggttaaagtttgggacacagtggctccttcgagtggttcatcatcatgtgtaggcagtgctcacctcaactcaaacgggccaccaattgctatgaaatgccatgaatccctttgctatatcgctgctggagctgaagtgacagcgattgacttgaggacaatgaagaaggcttctgtccttgcactccagaaccacagaatgctttcttgtgagatgatgccttctgaatggttaatatgtactggcacgaaagacagggctcttctatgggacacccgcaaggctcaggaactcccaaacacagtggcagagatgcaatcgaacggcccggtgacattgcttcacttggaccaatacaaggtggtgaccggagtgccgtcggacggccaggtccacgtctaggaaacacggacgggggactcactgaactcgttgggttgtggcgaaccttcgagactgggcgtgcggagcagggtgtcggccatggccgtggacgggtgcaggatcgccatggcgggcagctctccggaaggctgcatgctgcactaccgtgacttcgcgacggcttctgcccctgtagtgtccttgccaggcaaggagaaggaggtctccaggttctagtgtgttattcaagtaccctagttgatcacttggacaaggcataaggctgaagttggtgcataaggc

SEQ ID NO: 45858 - DNA, 1291 bp, Zea Mays
ccagcttcccccttcctgctaagtccaacaccccaacccctcgcccttccctgctcgacagccacgtccctggtcttccaaggccgcgccctcacctccttcccatggtgagctcgcccatggcggctttccccgctcggcgtactcccctctgcaggagctcgccctcaaactccctgcctgctcgagctcgccgaggccgcgacctcgccgaatcgcgcagcccctgctctccttccccagccgcgcttagcctagcctccctcctggctccctgctcttttccatcgccgaggatttggccagcgctatccctactcgcctctaccctgctgctcccctatgtgttgtgcgatggggaatttttagttgcggcaatcgctatctgaacctccaatgtccatgttattttggtgtgcaatttcagattattgcaattgcaagtggaggggaagactgcaccattcgtctatggtctatgagtacgagggcgaaaaatcacccactaatagcaacatttcatgggcatgaaaagacactgtcttttttatctattgcgtggcataaatcgtccctgttggtgagctgttccaaagactcaaaggttaaagtttgggacacagtggctccttcgagtggttcatcatcatgtgtaggcagtgctcacctcaactcaaacgggccaccaattgctatgaaatgccatgaatccctttgctatatcgctgctggagctgaagtgacagcgattgacttgaggacaatgaagaaggcttctgtccttgcactccagaaccacagaatgctttcttgtgagatgatgccttctgaatggttaatatgtactggcacgaaagacagggctcttctatgggacacccgcaaggctcaggaactcccaaacacagtggcagagatgcaatcgaacggcccggtgacattgcttcacttggaccaatacaaggtggtgaccggagtgccgtcggacggccaggtccacgtctaggaaacacggacgggggactcactgaactcgttgggttgtggcgaaccttcgagactgggcgtgcggagcagggtgtcggccatggccgtggacgggtgcaggatcgccatggcgggcagctctccggaaggctgcatgctgcactaccgtgacttcgcgacggcttctgcccctgtagtgtccttgccaggcaaggagaaggaggtctccaggttctagtgtgttattcaagtaccctagttgatcacttggacaaggcataaggctgaagttggtgcataaggc

SEQ ID NO: 45859 - DNA, 2121 bp, Zea Mays
agtatagaccgacaaatagtgtttctgcatctcaatgtatcttatcattatatattgactccgtagcaaagcacggtcatacagctagtataagtgaattgttcacctcttctatcaatttaagattttggattgaactggttggtgtggttggtgcatgcaacttaataatgtggtctatctgtgattttagatgtctctatcttgtttgttgattctgtatgttgaggtcacccctttgaatcttcctgtacctctattaatgtacaaacaaatgggtgtttcatcactcttgtgactgcaggaaaatgaacaaactggatgtggttggtactatacccgaggagccgaggaacctcagacacttgacaactctgtatgaactctcccaacttcgtttctcgctcctcgagctaggccatgtttgttggatgttaaaaagtttgtgcgtcctatcttttaaggcttttagcggattatggttatctacttatctgctacagtggctatcgttttacatatgctttgcaattaaatgaaaaggatgtccttaaatatttccccatatgctttgcaatgcaagtaactgaaagaaaaggtcccaatgtttcatgcatcatcataacccatttgaaatttgcttatttttttaccaagctaatttattttattactacttgaccatacctgtccgtatgttgtttcaggaatttacaacagaattacttaacagggccttcgccatcgttccttcttccttggagaattgactgctttgcaacagatgtcgctttctggcaatgcattatcaggaagtattcctaaggagctggggaaccttgtcaatctcataatcctgtaagaaatggactttgtagtgtcatgacctatctgataagaaatatagatttacaaaaaacgtgtcctcaatttaactcacgtgcatgtacatatcacaactattcaggtgtgtaatcaccactgaattaaatgcatgacaatttaacttgcctcaaaccacttcaagctcttcctattagagaggaaacaaatttacgtcttcgtttattctaccagttatcatcatgcttctatggtaaggatattccacccacaaatttaatgcttctaacctggtcttactatttatgtgatttttggagtttaggcacgaacaatttaactggctcccttccttctgaattaggtaacctggttaatggcaatgatcctattgtcgacagttgacactcgagcttaacattcccaaaaaagcttcttttattcaggtctgaataatctatccaaatcaactgcaaagtttcaagggcgaataaatattcttaggtctttgaaaattccaagtaatctgaacttattgacctgctacgaagaaacattcaatcaaatgagtgatatgcctaagtatacattatttgcaaatgctacaatatataacattaaaagctaaaaggctataattgtacagtttaatataaggctgttaagattagtattgtagtacaatgtgaggggatcatttggtacccatctgtaatatctgaattcttaattgtatgtccttttcctagaaggcatttcagatttactccttgaagcgatcggcatatgctgttgtgctgagagcattctgtgctcagtcagaccttctctcaaggttacgtcctcatatggtgatttcatatgtgaagtattactaaacaaattataattagtaggaactatggtgatttcatactctatgttgtttgagaaaaaaattctacaaactgtactttgttagtttatttccatttgtgattttattttatgaggaaatagaatgtgtttctaatgctttagcaaatctgtctatagcatatgatttgtatagttgtctatggaaatctaatgcacttattgcttccagtttcacttaacagcatgatagattttctagatgcggacttccgttctcttccgactatgcaacagaggcggcagcactgtcctgtaaaaaatatttctacaaactgtatttctctgtacttcgttagtttatttccatttgcgatgttattttccgaggaaatagaatgtgtttttaatgctttagtaaat

SEQ ID NO: 45860 - DNA, 2247 bp, Zea Mays
ggcgcacccgacagaagcggcagcgtcccgatggacgcgtttgccaaggatcaaggcgtgttgcaggtgtgtggtgggggaggatcggaggaggcccactgcgggtgcgagccggtggagcacagcaagaacgggaagaggtggaggaggcctttgcaggtgcgagccggtggagcacaacaagaacgagaagaggcagaggaggccagggcgtgagggagaggttgcggacgatgggcgcatgctgcgacgtgaattgtggtggcaccgggaaagctcggagagcacaacaaaatcagtcgtcttttaagaactccgatataagagtcttagattgcacaagctaactaattttccacacaagcctgtagacatctgggaaaagatccgcatagtcattattggtcgaatcgtgatgccaagggcaatggaaaatgaacaaactggatgtggttggtactatacccgaggagccgaggaacctcagacacttgacaactctgtatgaactctcccaacttcgtttctcgctcctcgagctaggccatgtttgttggatgttaaaaagtttgtgcgtcctatcttttaaggcttttagcggattatggttatctacttatctgctacagtggctatcgttttacatatgctttgcaattaaatgaaaaggatgtccttaaatatttccccatatgctttgcaatgcaagtaactgaaagaaaaggtcccaatgtttcatgcatcatcataacccatttgaaatttgcttatttttttaccaagctaatttattttattactacttgaccatacctgtccgtatgttgtttcaggaatttacaacagaattacttaacagggccttcgccatcgttccttcttccttggagaattgactgctttgcaacagatgtcgctttctggcaatgcattatcaggaagtattcctaaggagctggggaaccttgtcaatctcataatcctgtaagaaatggactttgtagtgtcatgacctatctgataagaaatatagatttacaaaaaacgtgtcctcaatttaactcacgtgcatgtacatatcacaactattcaggtgtgtaatcaccactgaattaaatgcatgacaatttaacttgcctcaaaccacttcaagctcttcctattagagaggaaacaaatttacgtcttcgtttattctaccagttatcatcatgcttctatggtaaggatattccacccacaaatttaatgcttctaacctggtcttactatttatgtgatttttggagtttaggcacgaacaatttaactggctcccttccttctgaattaggtaacctggttaatggcaatgatcctattgtcgacagttgacactcgagcttaacattcccaaaaaagcttcttttattcaggtctgaataatctatccaaatcaactgcaaagtttcaagggcgaataaatattcttaggtctttgaaaattccaagtaatctgaacttattgacctgctacgaagaaacattcaatcaaatgagtgatatgcctaagtatacattatttgcaaatgctacaatatataacattaaaagctaaaaggctataattgtacagtttaatataaggctgttaagattagtattgtagtacaatgtgaggggatcatttggtacccatctgtaatatctgaattcttaattgtatgtccttttcctagaaggcatttcagatttactccttgaagcgatcggcatatgctgttgtgctgagagcattctgtgctcagtcagaccttctctcaaggttacgtcctcatatggtgatttcatatgtgaagtattactaaacaaattataattagtaggaactatggtgatttcatactctatgttgtttgagaaaaaaattctacaaactgtactttgttagtttatttccatttgtgattttattttatgaggaaatagaatgtgtttctaatgctttagcaaatctgtctatagcatatgatttgtatagttgtctatggaaatctaatgcacttattgcttccagtttcacttaacagcatgatagattttctagatgcggacttccgttctcttccgactatgcaacagaggcggcagcactgtcctgtaaaaaatatttctacaaactgtatttctctgtacttcgttagtttatttccatttgcgatgttattttccgaggaaatagaatgtgtttttaatgctttagtaaat

SEQ ID NO: 45861 - DNA, 1577 bp, Zea Mays
gttagacctcagctggccaagacggaggtagcgcacataggtcaagttgctctggtgacaacctgaattgcttgaaacatctatggaaccggaaaatgaacaaactggatgtggttggtactatacccgaggagccgaggaacctcagacacttgacaactctgaatttacaacagaattacttaacagggccttcgccatcgttccttcttccttggagaattgactgctttgcaacagatgtcgctttctggcaatgcattatcaggaagtattcctaaggagctggggaaccttgtcaatctcataatcctgtaagaaatggactttgtagtgtcatgacctatctgataagaaatatagatttacaaaaaacgtgtcctcaatttaactcacgtgcatgtacatatcacaactattcaggtgtgtaatcaccactgaattaaatgcatgacaatttaacttgcctcaaaccacttcaagctcttcctattagagaggaaacaaatttacgtcttcgtttattctaccagttatcatcatgcttctatggtaaggatattccacccacaaatttaatgcttctaacctggtcttactatttatgtgatttttggagtttaggcacgaacaatttaactggctcccttccttctgaattaggtaacctggttaatggcaatgatcctattgtcgacagttgacactcgagcttaacattcccaaaaaagcttcttttattcaggtctgaataatctatccaaatcaactgcaaagtttcaagggcgaataaatattcttaggtctttgaaaattccaagtaatctgaacttattgacctgctacgaagaaacattcaatcaaatgagtgatatgcctaagtatacattatttgcaaatgctacaatatataacattaaaagctaaaaggctataattgtacagtttaatataaggctgttaagattagtattgtagtacaatgtgaggggatcatttggtacccatctgtaatatctgaattcttaattgtatgtccttttcctagaaggcatttcagatttactccttgaagcgatcggcatatgctgttgtgctgagagcattctgtgctcagtcagaccttctctcaaggttacgtcctcatatggtgatttcatatgtgaagtattactaaacaaattataattagtaggaactatggtgatttcatactctatgttgtttgagaaaaaaattctacaaactgtactttgttagtttatttccatttgtgattttattttatgaggaaatagaatgtgtttctaatgctttagcaaatctgtctatagcatatgatttgtatagttgtctatggaaatctaatgcacttattgcttccagtttcacttaacagcatgatagattttctagatgcggacttccgttctcttccgactatgcaacagaggcggcagcactgtcctgtaaaaaatatttctacaaactgtatttctctgtacttcgttagtttatttccatttgcgatgttattttccgaggaaatagaatgtgtttttaatgctttagtaaat

SEQ ID NO: 45862 - DNA, 1285 bp, Zea Mays
ggactctcggagaatataatccaaccggctcctcccttgcttctcatctcacatgtaatttcgtcctagccaggcttcccttgccctaggattgcgccgccgccgatccaaccggcttctccccgcccgacggccgcgatgtacaacggcatcgggctgcagaccgcgcgggggtcgggcaccaacggttacgcgcagagcaacacgttcttcgtcaagccccgcccccgctccaccacatccggcgggggtccgggcaggccccacaggccgctgccccccgacgccgccggcgcggatggcggcgggatgcgaaagcccaacaaggagatcctcgagcacgaccgcaagcgccaagtcgagctcaagctgctcgtgctcagggacgcgctcgaggagcacggctacaccgaagacgagatcgaggagcgcgtcgcggaggcgcgcaaggccgcggaggcagaggcggccgcggccgtggcagcggaggaggcagggagcggtcgtggcgccgggcgaccgcctctgcccgtgagagggtatggatctgtcggcgtcttttaggtttcagattgccgcagataagcccagatgttgattatctgtcggcgtctatattagtatgggagtcttttggatcgtgaaagctagttatgttctgtttatatgttcgtgcatttgtccatcttttggatcgtaaaatcatttatcagtcccaagctttgcacatatgggaagaattgcatattgatggagtggatggtggtggaagacagttcttccatgtaagggcttgttcggttattcccaaaacacatggattggatgggattggaaaaaaatgagaagaggtttgacttgtatgggattcaaacccatccaatcccactcaatccacatggattgagagctaaccgaacaagccctaatttgtttcctgataaatattattggtagcagcgctggtgtgatttagatggatgccatgcatgatttcatacattcccgtgcaaaagtctgtagtattttgtaacggttgatttcctgtccattattagactttctgttggatggcattttcatgcagacgatagacaatagaagctgaccatgctcatatttcatgtccacactaggtccgtgctcgtgcgttgccacgagagtaaaaaaatagtataaaacatagatacggaacgacaaatcttactacgatatgcaaattccatatggcaaaatatcgttgtaacactaatattataaatactctgacacaaatagattgaac

SEQ ID NO: 45863 - DNA, 913 bp, Zea Mays
ctagggcccatctacctaaccctagcagtcgcgcgctcccgggcttctctcccagccgccgccgccgcctctcccttccctcacctcgctcctctctgtcctgaccaagcagcaacggctgagccctggccgagccgctctcccccgacgcacctgcaccgaccctagtgccactatgagagttcggagcggaggccgagcgggaccgcgggagggggcggccggggtccggtccggggaggcggggaccagggcaacgcacaacgcgccggcggtgaccagtagcccgctctgacaccagctcctcgcatcgcatctcccctactaggcctcctcgtcccgacatgcaattgaaaaagagatagatctttttataggcgaagtgttgaagatggctttggtgaaagaaatgtcttgttagcatcaaagtcattccaccacttacgaatcaagatcattggcccaaagtgaattttggatttatgctacaaccatgaggggtcggggtagaaagatggcaccatcaaaatgctctatatgccaaggtacaggtcatcgttggagaacatgcaaaagaggccaacttgatgtagatgatgagccaaagaataagaggaggagaagcaagaagacatcaagtgttgctgcctcaaatcaattggaggatggaacattgaatgctcttgaatttaattatttacaagttgatgaatcaaatgtagatgcctccaacaagttagagggttcttgatgcgtcaagagcccaatacgtgttgagtgtgtgcattttattttgctctaaaattggtccatgaaagggatgtggcagaatcaaaagcctcgttgggtgtaatggattttattttgttccaaaactggttcatgaaaggaatgttctaaactctattttgtt

SEQ ID NO: 45864 - DNA, 1099 bp, Zea Mays
aggcctactagggcccatctacctaaccctagcagtcgcgcgctcccgggcttctctcccagccgccgccgccgcctctcccttccctcacctcgctcctctctgtcctgaccaagcagcaacggctgagccctggccgagccgctctcccccgacgcacctgcaccgaccctagtgccactatgagagttcggagcggaggccgagcgggaccgcgggagggggcggccggggtccggtccggggaggcggggaccagggcaacgcacaacgcgccggcggtgaccagtagcccgctctgacaccagctcctcgcatcgcatctcccctactaggcctcctcgtcccggaccgggagtgtgcttgcgcgttcggttttaccgcggggacaggacagcgatggcgcacacgggcgctggccggaagacgacgccggaacggacaaggacacgcacgcaaggcgatcgaggacaggcaggcatagtgttatgcctttgagagagccagccagacagacaggcggcaacacaccaccacgctgatcgacgcagatcagtctaggagggagcgctcggcatcaagcggagtgttatgcaatggcccttcatgctggactgtgtgatcagctccaacaagatcctgagttgtccacacccaagctgcttgtttgatgccacccttccatggactttgggctgcccctccaatccttctgaaacttttgtttgaatgcttctcgtagtcggcagctatacttatattagctgaattttggttttgtcatctaaatatatttatgtcaatgtcacataatgtgttaattagttgaggtctggccagccaggtagtctaaaaaaataaactgaaagccaattttttcacggcgattctggaacatatgcctaacaggaaaacaaaaaagtgggcacctgaatttctttagtaactctatttctatctttcggtatgtcgttccttccatataaaaatagctttgtatgcatgatatatcgttgggttcttttttttcatccgcttaactatctgtattttctatgaatatttatgtgtatagctagacagacgtacatatatacac

SEQ ID NO: 45865 - DNA, 1295 bp, Zea Mays
aatagacattaaatgctcatattaaataaggaataaaatatggtctcctatgtcataggagataggagatatttcctatatattaaacccggttcaaaacgtggacggacacgatatccacgtctgcgcaaatgattctaatcactcgattgccaatcaacggcccacgttggtcgactttcatcgcctcttccctcaaattctctggaataggaatcgtctcgactcgctccctcgtttctttcgcctccgaacacttctgctcgaaccttgtctcccgtcgcctctcttcgttcccgtcgtagcgtccctcttccacctcttctctccccgcttccttgtctaaatcgattcatcacccattgctttcgtccttactgcagtgtccattttggttgtttggtgaaatttgtcgctatcttcgtcgactctagttcgtcgtccatttcttaaagttcaaataggcctgctttgtccccttttttctcccgtcccgaggtacgcgattgcagcagatccggcttcctccgcttcagatctccttcaatcgtcgtcttccacttcgcgtttccctctccgtactcatatggctttgtctgcatgaatgctttactggtcgcgaagccctttgttttctctagtttgcagttcgcatagctgcctcctttggatctaagcctcacggactgctgcatgttgctacccccgtcgcttccattcccctgcaagcccacgctctgctatggatttcccacctaaagttgtttgtccattcatgacccatgttcatgtgcaatagctacaactttcaagtttgccagatctaaagcatcagttgaacggtcataatagtgaatcaacaaggaactcggcggagcatctctaaaaggttcagcttggttgtaatctataaactggaggaatgtagataccaatgacgtcttactccatcagaagctactagctcctaatgaagaaccaaatttctgaaaaatacggactacaacattatccgccattttagtaatttatgaaactataaacacggtttttgtgacatgtaaatggtattatcttccaaaaaatttgctattttgtcacttctgttttgggctctctgctattatgtcaccccgtgtctatgacttatgggatcatttatcatctgtgtctataatttatgggcctaatggtaaattagtgaagtccacaacttagagtgacaaaatagcaaatggctctcttcttctacatgcgcctgagaaatgcaatacacccttatctacattccatgt

SEQ ID NO: 45866 - DNA, 1485 bp, Zea Mays
ggggaactttcttgtcgcacatatttgagggacgccaatccttgtttgtgggtcgcgaaaaaatgcgagcaaggaaggggattctgttggacatgctggttctatgattgaagggagtgatccggtcacaggccatataatctcgacaaccattggagggaagaatggagagcctaaaaggactatcagctacatggcagagagagttgtgggaactggatcatttggaatcgtcttccaggcaaaatgtctggagactggtgagactgttgcgattaagaaggttttgcaggacaagcgctacaagaacagggagctacaaatcatgcgatccatggatcactgcaatgttgtttccttgaagcattgcttcttctctaccacaagcagagatgaacttttccttaacttagtgatggagtttgttcccgagtcattatatcgggtgttgaaacattacagcaatatgaaccagaggatgccactcatttatgtcaaattatatacctaccagatatttcgaggcttagcctatattcacacagtacctggagtttgccacagggatgtgaaaccacaaaatcttttggttgatccactgactcaccaagtgaagatatgtgattttgggagtgccaaaatgttggtcaaaggtgaagcaaacatatcatatatatgttcacgttattaccgtgctccagagctcatatttggggcaactgagtacacaacatcaattgatatttggtcagctggatgtgttcttgctgagctgcttcttggccagcctctcttccctggtgaaagtgctgtggatcagcttgttgagataataaaggttcttggtaccccaacgcgcgaggaaatccgatgtatgaatccaaactacaccgagtttagatttcctcagatcaaagctcacccatggcacaagattttccacaagcggatgcctccagaagctatagatctcgcttcacgcttgctccagtattcaccaaatctaagatgcactgctcttgaagcgtgtgcacatccattctttgacgatttgcgagaaccacatgcgaggttgccaaatggacggccatttcctccactgttcaactttaaacaggaactagcaaatgcctccccagagctcatcaacaggttgatcccagaccatgctaggcggcatcttgggctcacattattgcccgctactggaccataggcgaaggctctatggtggtgcttcgttgtgcggaaggcaacctgcattcaaggtgtagaatctgacaattattggaaggtcaaacatgagctggcgcgtaaggagaggtggtttcaaagtgagcaggtgaagctatatggattcgcatgggtctgttcgagactattcactccactttcaacttcgccacccaaataaaaaacacggttctacgaactctgcttctgctctagaaaaagggtaaaggtcaaaggtaagtctagcctttt

SEQ ID NO: 45867 - DNA, 1681 bp, Zea Mays
ggggcggtggcgctgcctccctctctctctctagcccagccgcctccccaacggcccaacctcaccgaggagagagagaccgatacagagagagagaccaagaggacacgggagagaggacgttcatttccgcgtcgtctccgcccgcagccggcagccccaccacccaccacatggccgccatgccgggtggggcccacggcgccggcgccgcggacccgatgcaggtggaccagccgctcccccctgccgccgcaggcacagcacacgcccccgccgacgccaagcatgctggttctatgattgaagggagtgatccggtcacaggccatataatctcgacaaccattggagggaagaatggagagcctaaaaggactatcagctacatggcagagagagttgtgggaactggatcatttggaatcgtcttccaggcaaaatgtctggagactggtgagactgttgcgattaagaaggttttgcaggacaagcgctacaagaacagggagctacaaatcatgcgatccatggatcactgcaatgttgtttccttgaagcattgcttcttctctaccacaagcagagatgaacttttccttaacttagtgatggagtttgttcccgagtcattatatcgggtgttgaaacattacagcaatatgaaccagaggatgccactcatttatgtcaaattatatacctaccagatatttcgaggcttagcctatattcacacagtacctggagtttgccacagggatgtgaaaccacaaaatcttttggttgatccactgactcaccaagtgaagatatgtgattttgggagtgccaaaatgttggtcaaaggtgaagcaaacatatcatatatatgttcacgttattaccgtgctccagagctcatatttggggcaactgagtacacaacatcaattgatatttggtcagctggatgtgttcttgctgagctgcttcttggccagcctctcttccctggtgaaagtgctgtggatcagcttgttgagataataaaggttcttggtaccccaacgcgcgaggaaatccgatgtatgaatccaaactacaccgagtttagatttcctcagatcaaagctcacccatggcacaagattttccacaagcggatgcctccagaagctatagatctcgcttcacgcttgctccagtattcaccaaatctaagatgcactgctcttgaagcgtgtgcacatccattctttgacgatttgcgagaaccacatgcgaggttgccaaatggacggccatttcctccactgttcaactttaaacaggaactagcaaatgcctccccagagctcatcaacaggttgatcccagaccatgctaggcggcatcttgggctcacattattgcccgctactggaccataggcgaaggctctatggtggtgcttcgttgtgcggaaggcaacctgcattcaaggtgtagaatctgacaattattggaaggtcaaacatgagctggcgcgtaaggagaggtggtttcaaagtgagcaggtgaagctatatggattcgcatgggtctgttcgagactattcactccactttcaacttcgccacccaaataaaaaacacggttctacgaactctgcttctgctctagaaaaagggtaaaggtcaaaggtaagtctagcctttt

SEQ ID NO: 45868 - DNA, 1526 bp, Zea Mays
cgtcttccgcaaaatgtctggagactggtgagactgttgcgattaagaaggttttgcaggacaagcgctacaagaacagggagctacaaatcatgcgatccatggatcactgcaatgttgtttccttgaagcattgcttcttctctaccacaagcagagatgaacttttccttaacttagtgatggagtttgttcccgagtcattatatcgggtgttgaaacattacagcaatatgaaccagaggatgccactcatttatgtcaaattatatacctaccagatatttcgaggcttagcctatattcacacagtacctggagtttgccacagggatgtgaaaccacaaaatcttttggttgatccactgactcaccaagtgaagatatgtgattttgggagtgccaaaatgttggtcaaaggtgaagcaaacatatcatatatatgttcacgttattaccgtgctccagagctcatatttggggcaactgagtacacaacatcaattgatatttggtcagctggatgtgttcttgctgagctgcttcttggccagcctctcttccctggtgaaagtgctgtggatcagcttgttgagataataaaggttcttggtaccccaacgcgcgaggaaatccgatgtatgaatccaaactacaccgagtttagatttcctcagatcaaagctcacccatggcacaagattttccacaagcggatgcctccagaagctatagatctcgcttcacgcttgctccagtattcaccaaatctaagatgcactgctcttgaagcgtgtgcacatccattctttgacgatttgcgagaaccacatgcgaggttgccaaatggacggccatttcctccactgttcaactttaaacaggaactagcaaatgcctccccagagctcatcaacaggttgatcccagaccatgctaggcggcatcttgggctcacattattgcccgctactggaccataggcgaaggctctatggtggtgcttcgttgtgcggaaggcaacctgcattcaaggtgtagaatctgacaattattggaaggtcaaacatgagctggcgcgtaaggagaggtggtatgttctcgtgcagccagccttaatttgtcgcatgtcttaatgcaaaaatctgatttttgcccaagtagtgagaggagggaagggggtggtcggtgtattgttaagctattgaaggaattcgatccctgctattgtgttactttctccaacgtttaaacgttgtagtgcgcctgtaagtgttccatatatcccctgttgtcagtcagtgtaattctgtaaatgttattaatgggaaattatttcgtgcttttccaaccacataactaatccctaccttgttggaagcaatctcttgttttcgttgtcagttgtgctgatctgggaattgtttccttcaactccatgcgagcaagttttagttctgaatgaattgtcatcctagagtagcatcagatgggcacgtgcctagtgcaaaggcagcaaagatata

SEQ ID NO: 45869 - DNA, 1947 bp, Zea Mays
ggggcggtggcgctgcctccctctctctctctagcccagccgcctccccaacggcccaacctcaccgaggagagagagaccgatacagagagagagaccaagaggacacgggagagaggacgttcatttccgcgtcgtctccgcccgcagccggcagccccaccacccaccacatggccgccatgccgggtggggcccacggcgccggcgccgcggacccgatgcaggtggaccagccgctcccccctgccgccgcaggcacagcacacgcccccgccgacgccaagcatgctggttctatgattgaagggagtgatccggtcacaggccatataatctcgacaaccattggagggaagaatggagagcctaaaaggctacatggcagagagagttgtgggaactggatcatttggaatcgtcttccaggcaaaatgtctggagactggtgagactgttgcgattaagaaggttttgcaggacaagcgctacaagaacagggagctacaaatcatgcgatccatggatcactgcaatgttgtttccttgaagcattgcttcttctctaccacaagcagagatgaacttttccttaacttagtgatggagtttgttcccgagtcattatatcgggtgttgaaacattacagcaatatgaaccagaggatgccactcatttatgtcaaattatatacctaccagatatttcgaggcttagcctatattcacacagtacctggagtttgccacagggatgtgaaaccacaaaatcttttggttgatccactgactcaccaagtgaagatatgtgattttgggagtgccaaaatgttggtcaaaggtgaagcaaacatatcatatatatgttcacgttattaccgtgctccagagctcatatttggggcaactgagtacacaacatcaattgatatttggtcagctggatgtgttcttgctgagctgcttcttggccagcctctcttccctggtgaaagtgctgtggatcagcttgttgagataataaaggttcttggtaccccaacgcgcgaggaaatccgatgtatgaatccaaactacaccgagtttagatttcctcagatcaaagctcacccatggcacaagattttccacaagcggatgcctccagaagctatagatctcgcttcacgcttgctccagtattcaccaaatctaagatgcactgctcttgaagcgtgtgcacatccattctttgacgatttgcgagaaccacatgcgaggttgccaaatggacggccatttcctccactgttcaactttaaacaggaactagcaaatgcctccccagagctcatcaacaggttgatcccagaccatgctaggcggcatcttgggctcacattattgcccgctactggaccataggcgaaggctctatggtggtgcttcgttgtgcggaaggcaacctgcattcaaggtgtagaatctgacaattattggaaggtcaaacatgagctggcgcgtaaggagaggtggtatgttctcgtgcagccagccttaatttgtcgcatgtcttaatgcaaaaatctgatttttgcccaagtagtgagaggagggaagggggtggtcggtgtattgttaagctattgaaggaattcgatccctgctattgtgttactttctccaacgtttaaacgttgtagtgcgcctgtaagtgttccatatatcccctgttgtcagtcagtgtaattctgtaaatgttattaatgggaaattatttcgtgcttttccaaccacataactaatccctaccttgttggaagcaatctcttgttttcgttgtcagttgtgctgatctgggaattgtttccttcaactccatgcgagcaagttttagttctgaatgaattgtcatcctagagtagcatcagatgggcacgtgcctagtgcaaaggcagcaaagatata

SEQ ID NO: 45870 - DNA, 3618 bp, Zea Mays
ggaaaaccgaagccaaaacccacgcgaagccacctccccgaattccccaacccgccatgcccgactccgccgatcccctccccacgcaagcctcgccggatccggacatgccgccgcggaagcctacagctggctgcggcggcggcaagctcaagaagcctctcactgacaagcagcgcgctgccgcggagcagcgcctgtcccacctccgcgcccacctcatcctccgatccctcgagtcctcagctgccggggcccgtgccctaccgccggcgcaggaggcggcgctcgatgccctaggtctgctcgagtttttccgcctcgacctgcaatccgacaccctgcgccccgacctcatcgccccgctcgtcgcctactacgacccggtctgcaagcgcagcttcgtccgaggcgtccgtgtcgccgtctcgcgccacaactttacccgcgcgctctgcctaccctcgaagccctccccctcggcgccggccccagccgacatcgaccccgcagccgtggtgcctgccgttatgcagctcctgaaggattacgttctgctcccgttcctaggagacgacatgtgcatactgccgcaggaagtggccgccgcggagcaggcggtcagggagggggcggcgcatagggttgactgggcgggcctgatgtggggcctcgtcgagaaggagatcctcgagctgcctaagagggaagacggggtgtgctactacgggcctcatctgcagaggctcatttatgcccaaaagccacatttgttggagctggtggaggaagggggcacaggagagcctgctccggaggcatccactgatgtggagatggaggaggatggtgatgtggatatgaaaagcaagagcttggtggagctggagctgggggatagggatggggatgccagtaacgacgtgaggagcaagagcttggaggagtcggaattgggaaatgctagtgcaaggagtgatggtttggacgagttggaattgggggtttctgttactaggaacaaggtcatggaggagttgggtttaggggatatggatgacaggaacaacagtatagaggaactagaggtggttgaggaagatgcaaggagcaagaggttggatgaatatgagtctgtggatgtggatccggatgccatggataacaatatagatgaaataaacacagtcaatgaagactcaaggaggaaaagcttgaatgaatctgagactgtggatgtggatccggatgccatggacaacaatatagatgaaatgcaggcggtcaatgaagactcaaggagcaagagcttgaatgaatctgaggatgtggatgtggatccgcatgccatggacaacaatatagatgaaatggagatggtcaatgaagatgcaaggaccaagagcttggatgaatctgaggctgtggatgtggatccggatgccatggacaacaatatagatgaaatggaggcagtcagtgaagattcaaggagcaagaccttcaatgagtctgagtctgtggatgccatgaacaacaatatagtcgaattggatgcggtcaatgaagacacaaggagccagagattgaatgatgaatcagagttggtggaagaggatgttaagggtccaaacttagatgacaagaacactgcggatgagcatgtcaatggcacaaacattgatggaatatgtttgggatttgtggcagttgaagtggtgcctgctgtacatgaggcaaggcttgacaataatgaggaaacagcagaggtagcaccaatggggggcgatgatgtgccagtgcctacagatgtggatggtgaagaacccttggtggaggcagcagctgtaacacaggaggtagtggctgttgcagaggaattgggggatgatgaggctgaggaggatgaagagaaggatgcaatgggattgagcttggggtttgactctaccaatggttatgttgctatggatgtggaagaggaaactaatgttgagaatctggacgaggatgagagtgacagtgccaatgaagaggcagaggagtcagaggatgatgcatttgaggttaatgatggagaggacatgaattggagaattggggatggcaggggggatgagggaatgtcacattctttgcaacgctgtaacacatttggaggcatggagtttgagaacctgaatgaaggggagactgtaatgaaggatgagttgaggtttgatgatttccctgcgagggcatcttcagaaaggatgacaccatcaaacctcctccaagccatgaactcaattccctcaacgtacaatgtagcagggaatgtgcatgatctgccttctggggatttcttggctatgggggctgatgcacataagaatggagtggatctgggaccagggagctcatatttatttgggaataatggtaagaggaatattgatgatattgatggttacgatgacaatatgcaggcgcaagaggactttcctcagtctaatcagcagaagaggatgcgccatagtaacagtggcaacatatcacctggatcaggctttttcaacgcaagcttttcggtacctatacagaacttgatggttgaggcaagcaggctctatgagcagaaggagcaaaaacttcagagtttgcaatttgagaaacaacattggtctgacatgctgcaagagaaggaagccattatccaatccctaaactcagctcggtttgagcaacagaacaagtatcaagtggagcttagacgcttcgagcatgatctgaatgttatggcccatttggtaactacctacaaaagagctttaaaacagacccgggcttcttttgatgagtacaggaagaagttcccttgcaatgttcctctttatgatgatgttgctggtggtggtggtcttgttcttagtgtgagggagttggagaagaggcggtgtgaggaggagcagcaaaaaattgccatggtaaatgatatgatcgaaagattccagtacaaatggttctcaaaagcttgaagagtggggactgtctgtcaactcactgtggagcagaatggaaggactctataaggagattgagcttctgaaggaaaatagaagatcaagatttgctaccccagctacagaggaatctctagctacagaagaacctaccccagctacagaggaatgagttccctgacagtcagagatgtgaatatgactcccagtcactccgctagatgttttgatgtcaacgagcatacattccctctgctggatgactcccagttagtccctaccctctgctgccaccaagagtgtggctgcctattggtacatactgtagcaaggataaatagtttcgcaagtaaccctgcttgtatcctcatgtgggatattttgattattagtgatcaaggccctgtttgtttccttccaggattattagtgattaaggccctgtttgataaatagttctctagattatataatccacctaataatctatgatgtttgtttgcctcccaacttatttaagctggattatataatctcgagggtaaacaaacatggcttaattcaggtgcatttagggtttcttaatctacgtggaagtgtgtgctttcatatcctt

SEQ ID NO: 45871 - DNA, 3236 bp, Zea Mays
ggaaaaccgaagccaaaacccacgcgaagccacctccccgaattccccaacccgccatgcccgactccgccgatcccctccccacgcaagcctcgccggatccggacatgccgccgcggaagcctacagctggctgcggcggcggcaagctcaagaagcctctcactgacaagcagcgcgctgccgcggagcagcgcctgtcccacctccgcgcccacctcatcctccgatccctcgagtcctcagctgccggggcccgtgccctaccgccggcgcaggaggcggcgctcgatgccctaggtctgctcgagtttttccgcctcgacctgcaatccgacaccctgcgccccgacctcatcgccccgctcgtcgcctactacgacccggtctgcaagcgcagcttcgtccgaggcgtccgtgtcgccgtctcgcgccacaactttacccgcgcgctctgcctaccctcgaagccctccccctcggcgccggccccagccgacatcgaccccgcagccgtggtgcctgccgttatgcagctcctgaaggattacgttctgctcccgttcctaggagacgacatgtgcatactgccgcaggaagtggccgccgcggagcaggcggtcagggagggggcggcgcatagggttgactgggcgggcctgatgtggggcctcgtcgagaaggagatcctcgagctgcctaagagggaagacggggtgtgctactacgggcctcatctgcagaggctcatttatgcccaaaagccacatttgttggagctggtggaggaagggggcacaggagagcctgctccggaggcatccactgatgtggagatggaggaggatggtgatgtggatatgaaaagcaagagcttggtggagctggagctgggggatagggatggggatgccagtaacgacgtgaggagcaagagcttggaggagtcggaattgggaaatgctagtgcaaggagtgatggtttggacgagttggaattgggggtttctgttactaggaacaaggtcatggaggagttgggtttaggggatatggatgacaggaacaacagtatagaggaactagaggtggttgaggaagatgcaaggagcaagaggttggatgaatatgagtctgtggatgtggatccggatgccatggataacaatatagatgaaataaacacagtcaatgaagactcaaggaggaaaagcttgaatgaatctgagactgtggatgtggatccggatgccatggacaacaatatagatgaaatgcaggcggtcaatgaagactcaaggagcaagagcttgaatgaatctgaggatgtggatgtggatccgcatgccatggacaacaatatagatgaaatggagatggtcaatgaagatgcaaggaccaagagcttggatgaatctgaggctgtggatgtggatccggatgccatggacaacaatatagatgaaatggaggcagtcagtgaagattcaaggagcaagaccttcaatgagtctgagtctgtggatgccatgaacaacaatatagtcgaattggatgcggtcaatgaagacacaaggagccagagattgaatgatgaatcagagttggtggaagaggatgttaagggtccaaacttagatgacaagaacactgcggatgagcatgtcaatggcacaaacattgatggaatatgtttgggatttgtggcagttgaagtggtgcctgctgtacatgaggcaaggcttgacaataatgaggaaacagcagaggtagcaccaatggggggcgatgatgtgccagtgcctacagatgtggatggtgaagaacccttggtggaggcagcagctgtaacacaggaggtagtggctgttgcagaggaattgggggatgatgaggctgaggaggatgaagagaaggatgcaatgggattgagcttggggtttgactctaccaatggttatgttgctatggatgtggaagaggaaactaatgttgagaatctggacgaggatgagagtgacagtgccaatgaagaggcagaggagtcagaggatgatgcatttgaggttaatgatggagaggacatgaattggagaattggggatggcaggggggatgagggaatgtcacattctttgcaacgctgtaacacatttggaggcatggagtttgagaacctgaatgaaggggagactgtaatgaaggatgagttgaggtttgatgatttccctgcgagggcatcttcagaaaggatgacaccatcaaacctcctccaagccatgaactcaattccctcaacgtacaatgtagcagggaatgtgcatgatctgccttctggggatttcttggctatgggggctgatgcacataagaatggagtggatctgggaccagggagctcatatttatttgggaataatggtaagaggaatattgatgatattgatggttacgatgacaatatgcaggcgcaagaggactttcctcagtctaatcagcagaagaggatgcgccatagtaacagtggcaacatatcacctggatcaggctttttcaacgcaagcttttcggtacctatacagaacttgatggttgaggcaagcaggctctatgagcagaaggagcaaaaacttcagagtttgcaatttgagaaacaacattggtctgacatgctgcaagagaaggaagccattatccaatccctaaactcagctcggtttgagcaacagaacaagtatcaagtggagcttagacgcttcgagcatgatctgaatgttatggcccatttggtaactacctacaaaagagctttaaaacagacccgggcttcttttgatgagtacaggaagaagttcccttgcaatgttcctctttatgatgatgttgctggtggtggtggtcttgttcttagtgtgagggagttggagaagaggcggtgtgaggaggagcagcaaaaaattgccatggtaaatgatatgatcgaaagattccagtacaaatggttctcaaaagcttgaagagtggggactgtctgtcaactcactgtggagcagaatggaaggactctataaggagattgagcttctgaaggaaaatagaagatcaagatttgctaccccagctacagaggaatctctagctacagaagaacctaccccagctacagaggaatgagttccctgacagtcagagatacaatcggccgtaaatgaggaccggatgagttttcaggagat

SEQ ID NO: 45872 - DNA, 3226 bp, Zea Mays
ggaaaaccgaagccaaaacccacgcgaagccacctccccgaattccccaacccgccatgcccgactccgccgatcccctccccacgcaagcctcgccggatccggacatgccgccgcggaagcctacagctggctgcggcggcggcaagctcaagaagcctctcactgacaagcagcgcgctgccgcggagcagcgcctgtcccacctccgcgcccacctcatcctccgatccctcgagtcctcagctgccggggcccgtgccctaccgccggcgcaggaggcggcgctcgatgccctaggtctgctcgagtttttccgcctcgacctgcaatccgacaccctgcgccccgacctcatcgccccgctcgtcgcctactacgacccggtctgcaagcgcagcttcgtccgaggcgtccgtgtcgccgtctcgcgccacaactttacccgcgcgctctgcctaccctcgaagccctccccctcggcgccggccccagccgacatcgaccccgcagccgtggtgcctgccgttatgcagctcctgaaggattacgttctgctcccgttcctaggagacgacatgtgcatactgccgcaggaagtggccgccgcggagcaggcggtcagggagggggcggcgcatagggttgactgggcgggcctgatgtggggcctcgtcgagaaggagatcctcgagctgcctaagagggaagacggggtgtgctactacgggcctcatctgcagaggctcatttatgcccaaaagccacatttgttggagctggtggaggaagggggcacaggagagcctgctccggaggcatccactgatgtggagatggaggaggatggtgatgtggatatgaaaagcaagagcttggtggagctggagctgggggatagggatggggatgccagtaacgacgtgaggagcaagagcttggaggagtcggaattgggaaatgctagtgcaaggagtgatggtttggacgagttggaattgggggtttctgttactaggaacaaggtcatggaggagttgggtttaggggatatggatgacaggaacaacagtatagaggaactagaggtggttgaggaagatgcaaggagcaagaggttggatgaatatgagtctgtggatgtggatccggatgccatggataacaatatagatgaaataaacacagtcaatgaagactcaaggaggaaaagcttgaatgaatctgagactgtggatgtggatccggatgccatggacaacaatatagatgaaatgcaggcggtcaatgaagactcaaggagcaagagcttgaatgaatctgaggatgtggatgtggatccgcatgccatggacaacaatatagatgaaatggagatggtcaatgaagatgcaaggaccaagagcttggatgaatctgaggctgtggatgtggatccggatgccatggacaacaatatagatgaaatggaggcagtcagtgaagattcaaggagcaagaccttcaatgagtctgagtctgtggatgccatgaacaacaatatagtcgaattggatgcggtcaatgaagacacaaggagccagagattgaatgatgaatcagagttggtggaagaggatgttaagggtccaaacttagatgacaagaacactgcggatgagcatgtcaatggcacaaacattgatggaatatgtttgggatttgtggcagttgaagtggtgcctgctgtacatgaggcaaggcttgacaataatgaggaaacagcagaggtagcaccaatggggggcgatgatgtgccagtgcctacagatgtggatggtgaagaacccttggtggaggcagcagctgtaacacaggaggtagtggctgttgcagaggaattgggggatgatgaggctgaggaggatgaagagaaggatgcaatgggattgagcttggggtttgactctaccaatggttatgttgctatggatgtggaagaggaaactaatgttgagaatctggacgaggatgagagtgacagtgccaatgaagaggcagaggagtcagaggatgatgcatttgaggttaatgatggagaggacatgaattggagaattggggatggcaggggggatgagggaatgtcacattctttgcaacgctgtaacacatttggaggcatggagtttgagaacctgaatgaaggggagactgtaatgaaggatgagttgaggtttgatgatttccctgcgagggcatcttcagaaaggatgacaccatcaaacctcctccaagccatgaactcaattccctcaacgtacaatgtagcagggaatgtgcatgatctgccttctggggatttcttggctatgggggctgatgcacataagaatggagtggatctgggaccagggagctcatatttatttgggaataatggtaagaggaatattgatgatattgatggttacgatgacaatatgcaggcgcaagaggactttcctcagtctaatcagcagaagaggatgcgccatagtaacagtggcaacatatcacctggatcaggctttttcaacgcaagcttttcggtacctatacagaacttgatggttgaggcaagcaggctctatgagcagaaggagcaaaaacttcagagtttgcaatttgagaaacaacattggtctgacatgctgcaagagaaggaagccattatccaatccctaaactcagctcggtttgagcaacagaacaagtatcaagtggagcttagacgcttcgagcatgatctgaatgttatggcccatttggtaactacctacaaaagagctttaaaacagacccgggcttcttttgatgagtacaggaagaagttcccttgcaatgttcctctttatgatgatgttgctggtggtggtggtcttgttcttagtgtgagggagttggagaagaggcggtgtgaggaggagcagcaaaaaattgccatggtaaatgatatgatcgaaagattccagtacaaatggttctcaaaagcttgaagagtggggactgtctgtcaactcactgtggagcagaatggaaggactctataaggagattgagcttctgaaggaaaatagaagatcaagatttgctaccccagctacagaggaatctctagctacagaagaacctaccccagctacagaggaatgagttccctgacagtcagagcccaatttctgagagggattcctaaagctttaga

SEQ ID NO: 45873 - DNA, 3366 bp, Zea Mays
ggaaaaccgaagccaaaacccacgcgaagccacctccccgaattccccaacccgccatgcccgactccgccgatcccctccccacgcaagcctcgccggatccggacatgccgccgcggaagcctacagctggctgcggcggcggcaagctcaagaagcctctcactgacaagcagcgcgctgccgcggagcagcgcctgtcccacctccgcgcccacctcatcctccgatccctcgagtcctcagctgccggggcccgtgccctaccgccggcgcaggaggcggcgctcgatgccctaggtctgctcgagtttttccgcctcgacctgcaatccgacaccctgcgccccgacctcatcgccccgctcgtcgcctactacgacccggtctgcaagcgcagcttcgtccgaggcgtccgtgtcgccgtctcgcgccacaactttacccgcgcgctctgcctaccctcgaagccctccccctcggcgccggccccagccgacatcgaccccgcagccgtggtgcctgccgttatgcagctcctgaaggattacgttctgctcccgttcctaggagacgacatgtgcatactgccgcaggaagtggccgccgcggagcaggcggtcagggagggggcggcgcatagggttgactgggcgggcctgatgtggggcctcgtcgagaaggagatcctcgagctgcctaagagggaagacggggtgtgctactacgggcctcatctgcagaggctcatttatgcccaaaagccacatttgttggagctggtggaggaagggggcacaggagagcctgctccggaggcatccactgatgtggagatggaggaggatggtgatgtggatatgaaaagcaagagcttggtggagctggagctgggggatagggatggggatgccagtaacgacgtgaggagcaagagcttggaggagtcggaattgggaaatgctagtgcaaggagtgatggtttggacgagttggaattgggggtttctgttactaggaacaaggtcatggaggagttgggtttaggggatatggatgacaggaacaacagtatagaggaactagaggtggttgaggaagatgcaaggagcaagaggttggatgaatatgagtctgtggatgtggatccggatgccatggataacaatatagatgaaataaacacagtcaatgaagactcaaggaggaaaagcttgaatgaatctgagactgtggatgtggatccggatgccatggacaacaatatagatgaaatgcaggcggtcaatgaagactcaaggagcaagagcttgaatgaatctgaggatgtggatgtggatccgcatgccatggacaacaatatagatgaaatggagatggtcaatgaagatgcaaggaccaagagcttggatgaatctgaggctgtggatgtggatccggatgccatggacaacaatatagatgaaatggaggcagtcagtgaagattcaaggagcaagaccttcaatgagtctgagtctgtggatgccatgaacaacaatatagtcgaattggatgcggtcaatgaagacacaaggagccagagattgaatgatgaatcagagttggtggaagaggatgttaagggtccaaacttagatgacaagaacactgcggatgagcatgtcaatggcacaaacattgatggaatatgtttgggatttgtggcagttgaagtggtgcctgctgtacatgaggcaaggcttgacaataatgaggaaacagcagaggtagcaccaatggggggcgatgatgtgccagtgcctacagatgtggatggtgaagaacccttggtggaggcagcagctgtaacacaggaggtagtggctgttgcagaggaattgggggatgatgaggctgaggaggatgaagagaaggatgcaatgggattgagcttggggtttgactctaccaatggttatgttgctatggatgtggaagaggaaactaatgttgagaatctggacgaggatgagagtgacagtgccaatgaagaggcagaggagtcagaggatgatgcatttgaggttaatgatggagaggacatgaattggagaattggggatggcaggggggatgagggaatgtcacattctttgcaacgctgtaacacatttggaggcatggagtttgagaacctgaatgaaggggagactgtaatgaaggatgagttgaggtttgatgatttccctgcgagggcatcttcagaaaggatgacaccatcaaacctcctccaagccatgaactcaattccctcaacgtacaatgtagcagggaatgtgcatgatctgccttctggggatttcttggctatgggggctgatgcacataagaatggagtggatctgggaccagggagctcatatttatttgggaataatggtaagaggaatattgatgatattgatggttacgatgacaatatgcaggcgcaagaggactttcctcagtctaatcagcagaagaggatgcgccatagtaacagtggcaacatatcacctggatcaggctttttcaacgcaagcttttcggtacctatacagaacttgatggttgaggcaagcaggctctatgagcagaaggagcaaaaacttcagagtttgcaatttgagaaacaacattggtctgacatgctgcaagagaaggaagccattatccaatccctaaactcagctcggtttgagcaacagaacaagtatcaagtggagcttagacgcttcgagcatgatctgaatgttatggcccatttggtaactacctacaaaagagctttaaaacagacccgggcttcttttgatgagtacaggaagaagttcccttgcaatgttcctctttatgatgatgttgctggtggtggtggtcttgttcttagtgtgagggagttggagaagaggcggtgtgaggaggagcagcaaaaaattgccatggtaaatgatatgatcgaaagattccagtacaaatggttctcaaaagcttgaagagtggggactgtctgtcaactcactgtggagcagaatggaaggactctataaggagattgagcttctgaaggaaaatagaagatcaagatttgctaccccagctacagaggaatctctagctacagaagaacctaccccagctacagaggaatgagttccctgacagtcagaggatacacagaggtggttcaggatttcagcctcttgatcacataatagacaaatgtttgggtgattcagaccccctttttgccaatcgatcagtagtccaacatctgttttgggccacaagccaaataaaaaagcagcactttgatggggcccaagttctccagactcttttata

SEQ ID NO: 45874 - DNA, 3268 bp, Zea Mays
atttgatccacacccacatggaaaaccgaagccaaaacccacgcgaagccacctccccgaattccccaacccgccatgcccgactccgccgatcccctccccacgcaagcctcgccggatccggacatgccgccgcggaagcctacagctggctgcggcggcggcaagctcaagaagcctctcactgacaagcagcgcgctgccgcggagcagcgcctgtcccacctccgcgcccacctcatcctccgatccctcgagtcctcagctgccggggcccgtgccctaccgccggcgcaggaggcggcgctcgatgccctaggtctgctcgagtttttccgcctcgacctgcaatccgacaccctgcgccccgacctcatcgccccgctcgtcgcctactacgacccggtctgcaagcgcagcttcgtccgaggcgtccgtgtcgccgtctcgcgccacaactttacccgcgcgctctgcctaccctcgaagccctccccctcggcgccggccccagccgacatcgaccccgcagccgtggtgcctgccgttatgcagctcctgaaggattacgttctgctcccgttcctaggagacgacatgtgcatactgccgcaggaagtggccgccgcggagcaggcggtcagggagggggcggcgcatagggttgactgggcgggcctgatgtggggcctcgtcgagaaggagatcctcgagctgcctaagagggaagacggggtgtgctactacgggcctcatctgcagaggctcatttatgcccaaaagccacatttgttggagctggtggaggaagggggcacaggagagcctgctccggaggcatccactgatgtggagatggaggaggatggtgatgtggatatgaaaagcaagagcttggtggagctggagctgggggatagggatggggatgccagtaacgacgtgaggagcaagagcttggaggagtcggaattgggaaatgctagtgcaaggagtgatggtttggacgagttggaattgggggtttctgttactaggaacaaggtcatggaggagttgggtttaggggatatggatgacaggaacaacagtatagaggaactagaggtggttgaggaagatgcaaggagcaagaggttggatgaatatgagtctgtggatgtggatccggatgccatggataacaatatagatgaaataaacacagtcaatgaagactcaaggaggaaaagcttgaatgaatctgagactgtggatgtggatccggatgccatggacaacaatatagatgaaatgcaggcggtcaatgaagactcaaggagcaagagcttgaatgaatctgaggatgtggatgtggatccgcatgccatggacaacaatatagatgaaatggagatggtcaatgaagatgcaaggaccaagagcttggatgaatctgaggctgtggatgtggatccggatgccatggacaacaatatagatgaaatggaggcagtcagtgaagattcaaggagcaagaccttcaatgagtctgagtctgtggatgccatgaacaacaatatagtcgaattggatgcggtcaatgaagacacaaggagccagagattgaatgatgaatcagagttggtggaagaggatgttaagggtccaaacttagatgacaagaacactgcggatgagcatgtcaatggcacaaacattgatggaatatgtttgggatttgtggcagttgaagtggtgcctgctgtacatgaggcaaggcttgacaataatgaggaaacagcagaggtagcaccaatggggggcgatgatgtgccagtgcctacagatgtggatggtgaagaacccttggtggaggcagcagctgtaacacaggaggtagtggctgttgcagaggaattgggggatgatgaggctgaggaggatgaagagaaggatgcaatgggattgagcttggggtttgactctaccaatggttatgttgctatggatgtggaagaggaaactaatgttgagaatctggacgaggatgagagtgacagtgccaatgaagaggcagaggagtcagaggatgatgcatttgaggttaatgatggagaggacatgaattggagaattggggatggcaggggggatgagggaatgtcacattctttgcaacgctgtaacacatttggaggcatggagtttgagaacctgaatgaaggggagactgtaatgaaggatgagttgaggtttgatgatttccctgcgagggcatcttcagaaaggatgacaccatcaaacctcctccaagccatgaactcaattccctcaacgtacaatgtagcagggaatgtgcatgatctgccttctggggatttcttggctatgggggctgatgcacataagaatggagtggatctgggaccagggagctcatatttatttgggaataatggtaagaggaatattgatgatattgatggttacgatgacaatatgcaggcgcaagaggactttcctcagtctaatcagcagaagaggatgcgccatagtaacagtggcaacatatcacctggatcaggctttttcaacgcaagcttttcggtacctatacagaacttgatggttgaggcaagcaggctctatgagcagaaggagcaaaaacttcagagtttgcaatttgagaaacaacattggtctgacatgctgcaagagaaggaagccattatccaatccctaaactcagctcggtttgagcaacagaacaagtatcaagtggagcttagacgcttcgagcatgatctgaatgttatggcccatttggtaactacctacaaaagagctttaaaacagacccgggcttcttttgatgagtacaggaagaagttcccttgcaatgttcctctttatgatgatgttgctggtggtggtggtcttgttcttagtgtgagggagttggagaagaggcggtgtgaggaggagcagcaaaaaattgccatggtaaatgatatgatcgaaagattccagtacaaatggttctcaaaagcttgaagagtggggactgtctgtcaactcactgtggagcagaatggaaggactctataaggagattgagcttctgaaggaaaatagaagatcaagatttgctaccccagctacagaggaatctctagctacagaagaacctaccccagctacagaggaatgagttccctgacagtcagagggaaaccaaggtttcgaggtgtccgttttcatgaaccagagccatcgtaagcgtaga

SEQ ID NO: 45875 - DNA, 3353 bp, Zea Mays
atttgatccacacccacatggaaaaccgaagccaaaacccacgcgaagccacctccccgaattccccaacccgccatgcccgactccgccgatcccctccccacgcaagcctcgccggatccggacatgccgccgcggaagcctacagctggctgcggcggcggcaagctcaagaagcctctcactgacaagcagcgcgctgccgcggagcagcgcctgtcccacctccgcgcccacctcatcctccgatccctcgagtcctcagctgccggggcccgtgccctaccgccggcgcaggaggcggcgctcgatgccctaggtctgctcgagtttttccgcctcgacctgcaatccgacaccctgcgccccgacctcatcgccccgctcgtcgcctactacgacccggtctgcaagcgcagcttcgtccgaggcgtccgtgtcgccgtctcgcgccacaactttacccgcgcgctctgcctaccctcgaagccctccccctcggcgccggccccagccgacatcgaccccgcagccgtggtgcctgccgttatgcagctcctgaaggattacgttctgctcccgttcctaggagacgacatgtgcatactgccgcaggaagtggccgccgcggagcaggcggtcagggagggggcggcgcatagggttgactgggcgggcctgatgtggggcctcgtcgagaaggagatcctcgagctgcctaagagggaagacggggtgtgctactacgggcctcatctgcagaggctcatttatgcccaaaagccacatttgttggagctggtggaggaagggggcacaggagagcctgctccggaggcatccactgatgtggagatggaggaggatggtgatgtggatatgaaaagcaagagcttggtggagctggagctgggggatagggatggggatgccagtaacgacgtgaggagcaagagcttggaggagtcggaattgggaaatgctagtgcaaggagtgatggtttggacgagttggaattgggggtttctgttactaggaacaaggtcatggaggagttgggtttaggggatatggatgacaggaacaacagtatagaggaactagaggtggttgaggaagatgcaaggagcaagaggttggatgaatatgagtctgtggatgtggatccggatgccatggataacaatatagatgaaataaacacagtcaatgaagactcaaggaggaaaagcttgaatgaatctgagactgtggatgtggatccggatgccatggacaacaatatagatgaaatgcaggcggtcaatgaagactcaaggagcaagagcttgaatgaatctgaggatgtggatgtggatccgcatgccatggacaacaatatagatgaaatggagatggtcaatgaagatgcaaggaccaagagcttggatgaatctgaggctgtggatgtggatccggatgccatggacaacaatatagatgaaatggaggcagtcagtgaagattcaaggagcaagaccttcaatgagtctgagtctgtggatgccatgaacaacaatatagtcgaattggatgcggtcaatgaagacacaaggagccagagattgaatgatgaatcagagttggtggaagaggatgttaagggtccaaacttagatgacaagaacactgcggatgagcatgtcaatggcacaaacattgatggaatatgtttgggatttgtggcagttgaagtggtgcctgctgtacatgaggcaaggcttgacaataatgaggaaacagcagaggtagcaccaatggggggcgatgatgtgccagtgcctacagatgtggatggtgaagaacccttggtggaggcagcagctgtaacacaggaggtagtggctgttgcagaggaattgggggatgatgaggctgaggaggatgaagagaaggatgcaatgggattgagcttggggtttgactctaccaatggttatgttgctatggatgtggaagaggaaactaatgttgagaatctggacgaggatgagagtgacagtgccaatgaagaggcagaggagtcagaggatgatgcatttgaggttaatgatggagaggacatgaattggagaattggggatggcaggggggatgagggaatgtcacattctttgcaacgctgtaacacatttggaggcatggagtttgagaacctgaatgaaggggagactgtaatgaaggatgagttgaggtttgatgatttccctgcgagggcatcttcagaaaggatgacaccatcaaacctcctccaagccatgaactcaattccctcaacgtacaatgtagcagggaatgtgcatgatctgccttctggggatttcttggctatgggggctgatgcacataagaatggagtggatctgggaccagggagctcatatttatttgggaataatggtaagaggaatattgatgatattgatggttacgatgacaatatgcaggcgcaagaggactttcctcagtctaatcagcagaagaggatgcgccatagtaacagtggcaacatatcacctggatcaggctttttcaacgcaagcttttcggtacctatacagaacttgatggttgaggcaagcaggctctatgagcagaaggagcaaaaacttcagagtttgcaatttgagaaacaacattggtctgacatgctgcaagagaaggaagccattatccaatccctaaactcagctcggtttgagcaacagaacaagtatcaagtggagcttagacgcttcgagcatgatctgaatgttatggcccatttggtaactacctacaaaagagctttaaaacagacccgggcttcttttgatgagtacaggaagaagttcccttgcaatgttcctctttatgatgatgttgctggtggtggtggtcttgttcttagtgtgagggagttggagaagaggcggtgtgaggaggagcagcaaaaaattgccatggtaaatgatatgatcgaaagattccagtacaaatggttctcaaaagcttgaagagtggggactgtctgtcaactcactgtggagcagaatggaaggactctataaggagattgagcttctgaaggaaaatagaagatcaagatttgctaccccagctacagaggaatctctagctacagaagaacctaccccagctacagaggaatgagttccctgacagtcagaggctatcacttgcatcagtacaagatcccagtgcaattagaagattgtccttgctaagatcatcctcatatagtcatatatgttcatatcatcgccttctgcagcttcccccgccacacccctccctctccctcgaccacgag

SEQ ID NO: 45876 - DNA, 1848 bp, Zea Mays
ggagacgacgacatggcaaaaaagctggagagatgctacacgttgcacaggcattcattgacaagaactaccatcctactgttatttgtcgagcatacaccaaagcgcttgatgatgctattgctgtacttgacaaaattgcaatgccggttgatgtgaatgatcgcggggcaatgctaggcctcgtgaagagctccattggtacaaaattcactggccagtttggtgatcttattgctgaccttgctattgatgctacaacaacagcaggcgttgaccttggtcagggtatgcgtgaagttgatatcaagaaatacattaaagttgaaaaggttcctggtggtcagttagaggattctagagtccttaaaggagttatgatcaataaggatgttgtggctcctggaaaaatgaggagaaagatagttaacccccgtatcatcctgttggactgccctgttgagtataagaaaggagaaaatcagaccaacgctgaattgatgaaggaagaagattggcaggttctcctagagatggaggaagaatatataaagaacctttgcgctcaaattctaaaattcaagcctgatttagttatcacagagaaagggctcagtgatctcgctatccattatttgagcaaggctggtgttactgcaatccgtagacttaggaaaactgacaacaacaggattgctaaagcttgtggggcagttatagtgaacaggcctgaggagctccaagaatctgatgtgggaacaggagctggcctgtttgaggtcaagaagataggtgatgaattctttgcctttattgttgactgtaaagatcccaaggcatgtactgttctgttgaggggagcaagcaaggatgtattgaatgaagttgagagaaacctgcaggatgccatgtctgttgcaagaaacattttgaaaaatccgaaactccttcctggaggtggtgctacagagctgactgtatcagcaacactgaagcaaaagagttcttcagttgaaggcgtggaaaagtggccctatgaagctgctgctctagcatttgaggcaattccaaggactttggcccaaaattgtggtttgaatgttattaggataatgacacaacttcagggaaagcatgctaatggtgaaaatgcgtgggttggcattgatggaaggagtggcgatatcgttgatatgaaagagcgaaagatctgggattcctacagcgttaaagcgcagacgttcaagacagcgattgaggctgcttgcatgcttttgagaatagatgacattgtcagcggtatcaagaagaagcaggctcctggagcctcagctcccaagcaaccccaaattgaaactgagggtgatgccgacaatgagcagatgatcccagagtagaggctgtgaccaacctgcactgtcaaagttgtttactagtgccggaatagcactttgaatagagttcattttatttgagtgttggtggttagccttaggttttatatatagtttgatacactcgtccgagggttttttgtagtgtggttgctgcgcattttgctttggacagatggacgaactttacctgttgtatgccgtaaatctacctaatacatggtaatgctgttgtttcccatgatccgaactgattcgtaatgttctcctcatgatccgaacgtgattgatagacgcatacagtaaagccattttttcttgaagatacctacaccagttcttggggactgtagaatacaattctctaatcaaggaccacgtttctacatcgaagttgccattttgtgttgtttctgttgtggaggagctaaaagaaaactttatattttggatg

SEQ ID NO: 45877 - DNA, 2283 bp, Zea Mays
ccggtaaccctactcccggcgacggggatcctgcactcttgggttcttgcatcccgcataccctcgaaagctcgaaagatcccgcggcgcagcagccacccttctctcctctccgctcccaatcttatcgtcgcctccctcgaagtcgccgctgccttcattccaccatggcgcttcacgccccggtccacgtgatgaaggactcgctgaagcgggagtctggcgcgaaggttcaccaagccaacatccaggcggccaaggctgttgctgacatcattcgcacgacattgggtcccagatccatgctgaaaatgcttctggacgctggtggaggtattgtggttactaatgatggtaattctattttgagggaaatagacatcgcacaccctgctgccaagtctatgattgaactaagtcgtacacaagatgaagaagttggtgatggcactacatctgtcattgttctagctggagagatgctacacgttgcacaggcattcattgacaagaactaccatcctactgttatttgtcgagcgcttgatgatgctattgctgtacttgacaaaattgcaatgccggttgatgtgaatgatcgcggggcaatgctaggcctcgtgaagagctccattggtacaaaattcactggccagtttggtgatcttattgctgaccttgctattgatgctacaacaacagcaggcgttgaccttggtcagggtatgcgtgaagttgatatcaagaaatacattaaagttgaaaaggttcctggtggtcagttagaggattctagagtccttaaaggagttatgatcaataaggatgttgtggctcctggaaaaatgaggagaaagatagttaacccccgtatcatcctgttggactgccctgttgagtataagaaaggagaaaatcagaccaacgctgaattgatgaaggaagaagattggcaggttctcctagagatggaggaagaatatataaagaacctttgcgctcaaattctaaaattcaagcctgatttagttatcacagagaaagggctcagtgatctcgctatccattatttgagcaaggctggtgttactgcaatccgtagacttaggaaaactgacaacaacaggattgctaaagcttgtggggcagttatagtgaacaggcctgaggagctccaagaatctgatgtgggaacaggagctggcctgtttgaggtcaagaagataggtgatgaattctttgcctttattgttgactgtaaagatcccaaggcatgtactgttctgttgaggggagcaagcaaggatgtattgaatgaagttgagagaaacctgcaggatgccatgtctgttgcaagaaacattttgaaaaatccgaaactccttcctggaggtggtgctacagagctgactgtatcagcaacactgaagcaaaagagttcttcagttgaaggcgtggaaaagtggccctatgaagctgctgctctagcatttgaggcaattccaaggactttggcccaaaattgtggtttgaatgttattaggataatgacacaacttcagggaaagcatgctaatggtgaaaatgcgtgggttggcattgatggaaggagtggcgatatcgttgatatgaaagagcgaaagatctgggattcctacagcgttaaagcgcagacgttcaagacagcgattgaggctgcttgcatgcttttgagaatagatgacattgtcagcggtatcaagaagaagcaggctcctggagcctcagctcccaagcaaccccaaattgaaactgagggtgatgccgacaatgagcagatgatcccagagtagaggctgtgaccaacctgcactgtcaaagttgtttactagtgccggaatagcactttgaatagagttcattttatttgagtgttggtggttagccttaggttttatatatagtttgatacactcgtccgagggttttttgtagtgtggttgctgcgcattttgctttggacagatggacgaactttacctgttgtatgccgtaaatctacctaatacatggtaatgctgttgtttcccatgatccgaactgattcgtaatgttctcctcatgatccgaacgtgattgatagacgcatacagtaaagccattttttcttgaagatacctacaccagttcttggggactgtagaatacaattctctaatcaaggaccacgtttctacatcgaagttgccattttgtgttgtttctgttgtggaggagctaaaagaaaactttatattttggatg

SEQ ID NO: 45878 - DNA, 2291 bp, Zea Mays
ccggtaaccctactcccggcgacggggatcctgcactcttgggttcttgcatcccgcataccctcgaaagctcgaaagatcccgcggcgcagcagccacccttctctcctctccgctcccaatcttatcgtcgcctccctcgaagtcgccgctgccttcattccaccatggcgcttcacgccccggtccacgtgatgaaggactcgctgaagcgggagtctggcgcgaaggttcaccaagccaacatccaggcggccaaggctgttgctgacatcattcgcacgacattgggtcccagatccatgctgaaaatgcttctggacgctggtggaggtattgtggttactaatgatggtaattctattttgagggaaatagacatcgcacaccctgctgccaagtctatgattgaactaagtcgtacacaagatgaagaagttggtgatggcactacatctgtcattgttctagctggagagatgctacacgttgcacaggcattcattgacaagaactaccatcctactgttatttgtcgagcatacaccaaagcgcttgatgatgctattgctgtacttgacaaaattgcaatgccggttgatgtgaatgatcgcggggcaatgctaggcctcgtgaagagctccattggtacaaaattcactggccagtttggtgatcttattgctgaccttgctattgatgctacaacaacagcaggcgttgaccttggtcagggtatgcgtgaagttgatatcaagaaatacattaaagttgaaaaggttcctggtggtcagttagaggattctagagtccttaaaggagttatgatcaataaggatgttgtggctcctggaaaaatgaggagaaagatagttaacccccgtatcatcctgttggactgccctgttgagtataagaaaggagaaaatcagaccaacgctgaattgatgaaggaagaagattggttctcctagagatggaggaagaatatataaagaacctttgcgctcaaattctaaaattcaagcctgatttagttatcacagagaaagggctcagtgatctcgctatccattatttgagcaaggctggtgttactgcaatccgtagacttaggaaaactgacaacaacaggattgctaaagcttgtggggcagttatagtgaacaggcctgaggagctccaagaatctgatgtgggaacaggagctggcctgtttgaggtcaagaagataggtgatgaattctttgcctttattgttgactgtaaagatcccaaggcatgtactgttctgttgaggggagcaagcaaggatgtattgaatgaagttgagagaaacctgcaggatgccatgtctgttgcaagaaacattttgaaaaatccgaaactccttcctggaggtggtgctacagagctgactgtatcagcaacactgaagcaaaagagttcttcagttgaaggcgtggaaaagtggccctatgaagctgctgctctagcatttgaggcaattccaaggactttggcccaaaattgtggtttgaatgttattaggataatgacacaacttcagggaaagcatgctaatggtgaaaatgcgtgggttggcattgatggaaggagtggcgatatcgttgatatgaaagagcgaaagatctgggattcctacagcgttaaagcgcagacgttcaagacagcgattgaggctgcttgcatgcttttgagaatagatgacattgtcagcggtatcaagaagaagcaggctcctggagcctcagctcccaagcaaccccaaattgaaactgagggtgatgccgacaatgagcagatgatcccagagtagaggctgtgaccaacctgcactgtcaaagttgtttactagtgccggaatagcactttgaatagagttcattttatttgagtgttggtggttagccttaggttttatatatagtttgatacactcgtccgagggttttttgtagtgtggttgctgcgcattttgctttggacagatggacgaactttacctgttgtatgccgtaaatctacctaatacatggtaatgctgttgtttcccatgatccgaactgattcgtaatgttctcctcatgatccgaacgtgattgatagacgcatacagtaaagccattttttcttgaagatacctacaccagttcttggggactgtagaatacaattctctaatcaaggaccacgtttctacatcgaagttgccattttgtgttgtttctgttgtggaggagctaaaagaaaactttatattttggatg

SEQ ID NO: 45879 - DNA, 1698 bp, Zea Mays
gggagtctggcgcgaaggttcaccaagccaacatccaggcggccaaggctgttgctgacatcattcgcacgacattgggtcccagatccatgctgaaaatgcttctggacgctggtggaggcgttgaccttggtcagggtatgcgtgaagttgatatcaagaaatacattaaagttgaaaaggttcctggtggtcagttagaggattctagagtccttaaaggagttatgatcaataaggatgttgtggctcctggaaaaatgaggagaaagatagttaacccccgtatcatcctgttggactgccctgttgagtataagaaaggagaaaatcagaccaacgctgaattgatgaaggaagaagattggcaggttctcctagagatggaggaagaatatataaagaacctttgcgctcaaattctaaaattcaagcctgatttagttatcacagagaaagggctcagtgatctcgctatccattatttgagcaaggctggtgttactgcaatccgtagacttaggaaaactgacaacaacaggattgctaaagcttgtggggcagttatagtgaacaggcctgaggagctccaagaatctgatgtgggaacaggagctggcctgtttgaggtcaagaagataggtgatgaattctttgcctttattgttgactgtaaagatcccaaggcatgtactgttctgttgaggggagcaagcaaggatgtattgaatgaagttgagagaaacctgcaggatgccatgtctgttgcaagaaacattttgaaaaatccgaaactccttcctggaggtggtgctacagagctgactgtatcagcaacactgaagcaaaagagttcttcagttgaaggcgtggaaaagtggccctatgaagctgctgctctagcatttgaggcaattccaaggactttggcccaaaattgtggtttgaatgttattaggataatgacacaacttcagggaaagcatgctaatggtgaaaatgcgtgggttggcattgatggaaggagtggcgatatcgttgatatgaaagagcgaaagatctgggattcctacagcgttaaagcgcagacgttcaagacagcgattgaggctgcttgcatgcttttgagaatagatgacattgtcagcggtatcaagaagaagcaggctcctggagcctcagctcccaagcaaccccaaattgaaactgagggtgatgccgacaatgagcagatgatcccagagtagaggctgtgaccaacctgcactgtcaaagttgtttactagtgccggaatagcactttgaatagagttcattttatttgagtgttggtggttagccttaggttttatatatagtttgatacactcgtccgagggttttttgtagtgtggttgctgcgcattttgctttggacagatggacgaactttacctgttgtatgccgtaaatctacctaatacatggtaatgctgttgtttcccatgatccgaactgattcgtaatgttctcctcatgatccgaacgtgattgatagacgcatacagtaaagccattttttcttgaagatacctacaccagttcttggggactgtagaatacaattctctaatcaaggaccacgtttctacatcgaagttgccattttgtgttgtttctgttgtggaggagctaaaagaaaactttatattttggatg

SEQ ID NO: 45880 - DNA, 245 bp, Zea Mays
tggaatttgacctcctggtaggagattaccctaccaaattgggcccgcagagttccccgcgattcggcagaggaggaaccctaggaatggacgaggaggtagagaagatggattcgcgctcgcagcgtgggcgttggcggcggggggaggggcgcgtgagcgtgacagcgtgatccccagccgtggagcgtgtggtgtgaaactgggaagatccgccggcgcccggctgctgtgcgcgaaaattc

SEQ ID NO: 45881 - DNA, 1015 bp, Zea Mays
agcagtacaagaaaacaaataaacgatacatctgttcaacagcattctgcatgcatgtatattcttcagaaagatatcccatgttgatttcaatcaaaatctccaatatttacaaaaatagggagaatgacttcaagaaggcgaaataaacagtttaaggtatatgttttatccctcctgtcatcttaaaaggtaagattaacaaaacagatgacatgaaggaaaacattcaacatccaacagctaattcacattattaaatgataaatgtacatgctcacatgatatacattttaagaaaacaggttttaataaaaagaacaaaatctatcgcaacttccacccttgaaaagcaggaaccaatataagataacttaagtggctagatcactatcccatgcaaaaagtacactccttatgcaggaaatttttctttaacaaatgtagccaaacaaggacacatcaacatatagaagtattcaatggaaatatggaatcaaggttatcacagcgcccacggtgaggccaggcgccagctgggcacctggacgcctagtcaggcacctaggcgccaattaggcaatggtcagtagttagtaatcagtagcaatttagagattaagagtacaagttcatacttcatagcaaataaatataggtgataagttcatactgctggtggcggctggcagttggagaggaggggctggcggatgctggcgggtaggagaggaggggaggcagctggagggtgagtgaagggctggaggcgctgtttgaggggaaggagaattagagataagaggtgggccaaatgggctggggcggcgcggcgaagtcacggcgtccctgagcggacgcctaggcagcacggtgaatccggacccacccaggcacctgcctaacttcctctgggcgaggcgaacagccatggcatccagtctcggctgactggacaccttggcggcgactaggcggcaccatgataagcatgaatggaatgacttaccgctgg

SEQ ID NO: 45882 - DNA, 129 bp, Zea Mays
atgcgctactttgaacgcataggtatctgcctatctgcgtacatcacatacatagaccatcagcctagtgccctagactcaaccttttctgcacaccgtgcagccccgcaaagtttttatttaacctaa

SEQ ID NO: 45883 - DNA, 851 bp, Zea Mays
ctgattacagacacgcagtcatccaatcaagacgctcctcaaccggactgcgataatcgcgactgagctcgccgcaccgtgcgactcttgcggacccgggcacccggcgcaaccaacctttccgggttattaaaccctgcgcccgacgtccctcacccccatctcctccctcatatgcatcgcatgctcttcggctgtgaggttctagtcaccgccgagaatccgccgcgcccttgccttgcctccgttgctgctcggtgtccgccgtgtgtcggggtgattcgcctcgatacaaggatcgcaaccagggaagattgaggcctgaagaacagccagaaaccagtgaatttctcgccggagttgaagctccgccacaaaactgctccccgccgtggccagcctccacagcgtcataatcatcgcagtgaggtcatgagaatctgaagatcatcctgatacctggaatctcgagtctcaggcaagttgtgcccttgatcactcctttttacctaataatgttcgctgataatcactatgacatgatcaggttaatttgatgggacctaacaggtttccctagcattgtttttcccctaccttgcaaacagatgaattattggatagatttgctattgctctacttggtttggaaaactaatgttttattatgatcatgttccaattatgttgtttaattattgttcatgataagatcatattgttaattggaacatggagtaaccacccgggaaaacagtaccacaagggtggtatgggacgcccttggctgactaattaggaaagctagtggaggactaccttacccgaaaggggcaagggcagtagggaag

SEQ ID NO: 45884 - DNA, 867 bp, Zea Mays
cagccatggtggggcgagcctgattacagacacgcagtcatccaatcaagacgctcctcaaccggactgcgataatcgcgactgagctcgccgcaccgtgcgactcttgcggacccgggcacccggcgcaaccaacctttccgggttattaaaccctgcgcccgacgtccctcacccccatctcctccctcatatgcatcgcatgctcttcggctgtgaggttctagtcaccgccgagaatccgccgcgcccttgccttgcctccgttgctgctcggtgtccgccgtgtgtcggggtgattcgcctcgatacaaggatcgcaaccagggaagattgaggcctgaagaacagccagaaaccagtgaatttctcgccggagttgaagctccgccacaaaactgctccccgccgtggccagcctccacagcgtcataatcatcgtgaggtcatgagaatctgaagatcatcctgatacctggaatctcgagtctcaggcaagttgtgcccttgatcactcctttttacctaataatgttcgctgataatcactatgacatgatcaggttaatttgatgggacctaacaggtttccctagcattgtttttcccctaccttgcaaacagatgaattattggatagatttgctattgctctacttggtttggaaaactaatgttttattatgatcatgttccaattatgttgtttaattattgttcatgataagatcatattgttaattggaacatggagtaaccacccgggaaaacagtaccacaagggtggtatgggacgcccttggctgactaattaggaaagctagtggaggactaccttacccgaaaggggcaagggcagtagggaag

SEQ ID NO: 45885 - DNA, 75 bp, Zea Mays
cgtgcatccttcccctggcgcaggccagcatcaaacacgtcgtacattaattatcctcctgctgaccagtacttg

SEQ ID NO: 45886 - DNA, 1568 bp, Zea Mays
cctagaacccacgtcttcaaatagactgtcatatggtgcatttaccaccctcgaaccatagatgatttggcagagatgtcttctgccggcatcagcggatgcgtgcctacaactgaacaccatatacaaacgaatcatggacctgtatctgttgcagtgtacggtgaccatgacaagcctgcccttgttacttatcccgatattgctttaaactatatgtcctgcttccaaggactattgttctgtcccgaagccgcttcgctgctgcttcataatttttgcatttaccatattagccccccaggacatgagttaggagctgctccaatttccccaaatgctcctataccgtctgttgacgatttggcagatcaggttgcggatgtcctcgatttctttggattaggctctgttatgtgcttcggtgtcactgcaggtgcctacattctaactctgttcgcggcaaagtatagggagcgggtactaggtcttatccttgtttcacctctgtgtaaaggccccacttggactgagtggttatacagtaaggtaacatccaatctgctgtattactatggcatgtgtgggttagtgaaggagtgcctacttcagcggtacttcagcaaggaagtgcgaggattctctgaactacccgaatcagacatagtgcaggcttgtaaaagcctgctagagcagcggcagagcatgaacgtgtggcgcttcgtacagacaatgaacgagagatacgacttgtctgagcatataaagcggctgcagtgcagaaccctgatttttgtgggcgacaattcccagttccacacggaggccgttcacttgacgtcgaagctggacaggagatactgcgctctagttgaggtgcaagcgtgcggttcactggtaaccgaggagcagccgcacgcgatgcttataccgatggagtacttcctgatgggatacggcctgtacaggccgcctagccaggtggtggagtgcagcccgcgcagccccctgagcccgttctgcatttcgccggatctcctgtcacctgagagcatgggggtgaagctaaagccgatcagaacgcgagtcaggcttgaggtgtagcagagggctaggctaacttttgcaggtctgtgtttagtttttggaggtatagttatactgccatgtatatataaatatataggaaacgctgttctttgatttgtagcctgaaagaaaataatagcagaagtttgggtgtacagtctctctattatgccattatacccgctggtttggttgggtggcaggattagatgtggttcccaaagaagcatatgtcttaagaagataagagatggaccagctgtagtatttgttcggtttgttgtttggtgtcgatttgattcctctgcgttgctttaggatcgggacaaggattggcttgcagttgtgtcttgttgatgtctgtctcctgctgttgtaataagcatatatgcaagctggtaaagaccatggtctggaccagaggtgagcatcacaagagacgatggcctggctgagtcgatgcacacaaagaaaaaaaa

SEQ ID NO: 45887 - DNA, 1769 bp, Zea Mays
ggcagtcctccgccccgaaaggcaacaatgagaggagagggagggaggccgcgcgcctggctcgtcctcccccttgcttccttccgtcgtttataagcgacggcaacacaggcgaagaagacggggggagaaaggggcgcacgaggcaatttatagggaggaagaggaggggccgggcctgagcagagcaggccggaccagccatctctcctctgaggcgtcgaggggaggcggcgcccgagatgggggactccggcggctccgtcgtgtcggtcgacgtcgagcgcatctcctttggcggcaaggaacaccatatacaaacgaatcatggacctgtatctgttgcagtgtacggtgaccatgacaagcctgcccttgttacttatcccgatattgctttaaactatatgtcctgcttccaaggactattgttctgtcccgaagccgcttcgctgctgcttcataatttttgcatttaccatattagccccccaggacatgagaaccatgcagttaggagctgctccaatttccccaaatgctcctataccgtctgttgacgatttggcagatcaggttgcggatgtcctcgatttctttggattaggctctgttatgtgcttcggtgtcactgcaggtgcctacattctaactctgttcgcggcaaagtatagggagcgggtactaggtcttatccttgtttcacctctgtgtaaaggccccacttggactgagtggttatacagtaaggtaacatccaatctgctgtattactatggcatgtgtgggttagtgaaggagtgcctacttcagcggtacttcagcaaggaagtgcgaggattctctgaactacccgaatcagacatagtgcaggcttgtaaaagcctgctagagcagcggcagagcatgaacgtgtggcgcttcgtacagacaatgaacgagagatacgacttgtctgagcatataaagcggctgcagtgcagaaccctgatttttgtgggcgacaattcccagttccacacggaggccgttcacttgacgtcgaagctggacaggagatactgcgctctagttgaggtgcaagcgtgcggttcactggtaaccgaggagcagccgcacgcgatgcttataccgatggagtacttcctgatgggatacggcctgtacaggccgcctagccaggtggtggagtgcagcccgcgcagccccctgagcccgttctgcatttcgccggatctcctgtcacctgagagcatgggggtgaagctaaagccgatcagaacgcgagtcaggcttgaggtgtagcagagggctaggctaacttttgcaggtctgtgtttagtttttggaggtatagttatactgccatgtatatataaatatataggaaacgctgttctttgatttgtagcctgaaagaaaataatagcagaagtttgggtgtacagtctctctattatgccattatacccgctggtttggttgggtggcaggattagatgtggttcccaaagaagcatatgtcttaagaagataagagatggaccagctgtagtatttgttcggtttgttgtttggtgtcgatttgattcctctgcgttgctttaggatcgggacaaggattggcttgcagttgtgtcttgttgatgtctgtctcctgctgttgtaataagcatatatgcaagctggtaaagaccatggtctggaccagaggtgagcatcacaagagacgatggcctggctgagtcgatgcacacaaagaaaaaaaa

SEQ ID NO: 45888 - DNA, 1712 bp, Zea Mays
ggcagtcctccgccccgaaaggcaacaatgagaggagagggagggaggccgcgcgcctggctcgtcctcccccttgcttccttccgtcgtttataagcgacggcaacacaggcgaagaagacggggggagaaaggggcgcacgaggcaatttatagggaggaagaggaggggccgggcctgagcagagcaggccggaccagccatctctcctctgaggcgtcgaggggaggcggcgcccgagatgggggactccggcggctccgtcgtgtcggtcgacgtcgagcgcatctcctttggcggcaagtgtacggtgaccatgacaagcctgcccttgttacttatcccgatattgctttaaactatatgtcctgcttccaaggactattgttctgtcccgaagccgcttcgctgctgcttcataatttttgcatttaccatattagccccccaggacatgagttaggagctgctccaatttccccaaatgctcctataccgtctgttgacgatttggcagatcaggttgcggatgtcctcgatttctttggattaggctctgttatgtgcttcggtgtcactgcaggtgcctacattctaactctgttcgcggcaaagtatagggagcgggtactaggtcttatccttgtttcacctctgtgtaaaggccccacttggactgagtggttatacagtaaggtaacatccaatctgctgtattactatggcatgtgtgggttagtgaaggagtgcctacttcagcggtacttcagcaagtgcgaggattctctgaactacccgaatcagacatagtgcaggcttgtaaaagcctgctagagcagcggcagagcatgaacgtgtggcgcttcgtacagacaatgaacgagagatacgacttgtctgagcatataaagcggctgcagtgcagaaccctgatttttgtgggcgacaattcccagttccacacggaggccgttcacttgacgtcgaagctggacaggagatactgcgctctagttgaggtgcaagcgtgcggttcactggtaaccgaggagcagccgcacgcgatgcttataccgatggagtacttcctgatgggatacggcctgtacaggccgcctagccaggtggtggagtgcagcccgcgcagccccctgagcccgttctgcatttcgccggatctcctgtcacctgagagcatgggggtgaagctaaagccgatcagaacgcgagtcaggcttgaggtgtagcagagggctaggctaacttttgcaggtctgtgtttagtttttggaggtatagttatactgccatgtatatataaatatataggaaacgctgttctttgatttgtagcctgaaagaaaataatagcagaagtttgggtgtacagtctctctattatgccattatacccgctggtttggttgggtggcaggattagatgtggttcccaaagaagcatatgtcttaagaagataagagatggaccagctgtagtatttgttcggtttgttgtttggtgtcgatttgattcctctgcgttgctttaggatcgggacaaggattggcttgcagttgtgtcttgttgatgtctgtctcctgctgttgtaataagcatatatgcaagctggtaaagaccatggtctggaccagaggtgagcatcacaagagacgatggcctggctgagtcgatgcacacaaagaaaaaaaa

SEQ ID NO: 45889 - DNA, 2864 bp, Zea Mays
tagcttcctgttttaccttagctgcaatcagaagttattcctttgcatctgcctgctggtgatacttcaactgaaagaactgtgcatattgatggtacccaagaacaaattgaagctgcaaagcaactgatcagtgaggttaccagtgagcttgccaggaggactgcaaactatcctggagagcaggtgtgttactgtttaatatcaatgtcctactggatataactctgtattttcacttataacatgttttatggattatgtgagctgacgtgctttatctggcatctgtatcatttcaaatttttcatctgatcctcctgtttctctggagcacaatggatacatatacattgctttctcatggcttgtttgtgagaaagaaatgctctaaacagacccaggtccccaggtgtttcggttgtttatggtggtcatgcattccaatttaggtccttctgttctagttgcacatatttagttctgatgtttatgatcactacagaggcaagtttttccttttaattcactattcccacctatacaacttggtggttgattaagagttgtattctcatgtacatagtctctgattcatgatacttattttatagttgggcccaaaaattaaggatctatattctctaaagtgtgcatagaccagacaagaagccagttaatagtgcaactaaagaagggttgtactggggaaagtaggtaaaaaggctaaaatttgggatccaaatacagtctgtgtcatgcataaattttatttggaatattcctgtatcatatatgttgaactctttcgcagcagaaggattccgaaaaccttgcatgaagctattttatgtgatatttgtgtctattatatgtaccttgtggctttgcaggttgctgtccaatcttttttgtgtgcttatatagtatcatttgaatgctgtctttgatgcttcattttatttaatttttttcaacttcagtaaagtagcatatctgatcattatatatcctgtcatttagcaatgaatagaatcttttagatagtagtggaagcacctttgtattatcatatatatctttggacatctattgaaactctattccatggtattgctattcaacatatatatatgtatatattcgtctagctgtccaatcttcattagccccatagttttgcgcgtgggcaacggtagatgggcatcactagcttgacgatcttgatcgaatcgtgctaggaatccaatgtctggtggctattctcagcagggatatcgccctcctcgtcctcagtcaaactggggcccgccttctgtgccaccccagcagcctggctatggttatatgcagcctggggcttatcctggggcaccgccacagtatggtgcacctcagcaaccttatggtagctaccccccaacatctggtggttatcagactggatgggatcagtctcaaaaccagcaatctcatacaactccccctggtactgggtatgattattatagtcagcagcagcaacctcagcaacaatctgcccctgggacagctgcttctactgatgccactagctacaattatggtcagccttcgacgtatgcttcacagggatatgattctacctacactcagcagagtggtgggcagcaagcatatggacatgatggctacactggttaccagacccaagggcagcagcagggctactctcagcagactggttatgatcagcagggttatggcacatctgcttatggatcagctgcaagctcgacccaggatgggtccaactatggtggtcctggaggggccagtcaggcatctccagggcagcaaacatcaaacccagctgctggaagccaacctggctataccagccaaccgcccactagtgctgcagcaacttacccacctcaaggttcagctccatctggatatggcgctccaccatcccagtctggctatggcacccaaccaccacagcaagccggatatggtcagggcgcttatgggcagccttctccacagggccagaaacctcctgcattgtcaccttatggacaggctccgcctcctggttctgctcaggctggttacgggcagtatggttacagccaacctgcttacggtgcaccaccagcttaccctggtgcacccattgcaagccaccagggctatggccagcagcagtcttatggccagcagcagtcttatggcgatgcttatggtagtgcaagctatgggcagcctccagcctactctactgaagcaacacctcctgctgcatcccaggatcactctgctgcccctgctgcggcccttggaacaacagcttcgacagctcctgaaaacagtgggggcgcccaaacatccgctgaaacttgagcttcagcagctaattgggaacaaacattttccaagaccctgccgtgtggtttcctccgcgctgttgcttaatataattacgcatctaatttagggtctacaactacaagttatttatttttctgcctgttgtttttgacaccatgactttctgtttccttgctatattgagtagtactttgcagttattttattgctggcgtatatgtctggactagtgatatatgtgtttgtgtggttacccttgttggaccgtaatgggtaccttccggcttggtctggacagataaatgcccatctatatgtattctgagccctgttatgattgctctaccgtcggaggtttctatgcccacttcagctggtgatgatggttatgtatgaaatttggtttcaatatttcgtaagacttatgtatcggtccataaaaggtttaagcagcatgaaagtctgcctttttgtttttgctgctggta

SEQ ID NO: 45890 - DNA, 3871 bp, Zea Mays
ccttcgtccacgctccctgcagccgccgcccaaaccctagcaacccgtcctccgccatggccgacgaccactactcctctaagaggaagtacgacgacccctcgccgccgccgcggcgcacggggttctcttcgggcccgccgcctgcctcgccgctcgcgggcggcgccccgtcgtacaacagcgtgccaccgccccccgatgagatccagctcgcgaagcagcgcgcgcaggagatcgcggcgcggatctttaacgccgcagaggccaagcgtcctcgcgtcgacaacggcgacgatgacagcggcggcttcggtgtaggcctgggcagcactggtggcggtggccgcatcggcggcggaggactcggcttctcgtcctctgccggtggtgggcacggggcttctatcccacaattatcttctcagagcagcgcacctcagtactcctcttatggtggatatcagggtacaagcaaaaagattgaaattccaaatggaagggttggtgttatcattggaaaagccggggaaactattaggtatatccaacttcaatcaggagcaaagattcaagtcacaagagaccatgaagctgaacctggtgcactgacaaggcaagttgagctttctggcaaacctgagcagataagcaaagctgaacagttgatcaaagaagttctggcagaggccgatgctgggtcatccggtgctggatctggtggccggaaatacaatgcaacacagccaggtgctgagacgttccagatgaaaattgctaataacaaggtgggactgattattgggaagggtggggagactataaagtccatgcaggccaattctggagctcgtattcaggttattcctttgcatctgcctgctggtgatacttcaactgaaagaactgtgcatattgatggtacccaagaacaaattgaagctgcaaagcaactgatcagtgaggttaccagtgagagccaattagtgtcattagcttgccaggaggactgcaaactatcctggagagcaggtgtgttactgtttaatatcaatgtcctactggatataactctgtattttcacttataacatgttttatggattatgtgagctgacgtgctttatctggcatctgtatcatttcaaatttttcatctgatcctcctgtttctctggagcacaatggatacatatacattgctttctcatggcttgtttgtgagaaagaaatgctctaaacagacccaggtccccaggtgtttcggttgtttatggtggtcatgcattccaatttaggtccttctgttctagttgcacatatttagttctgatgtttatgatcactacagaggcaagtttttccttttaattcactattcccacctatacaacttggtggttgattaagagttgtattctcatgtacatagtctctgattcatgatacttattttatagttgggcccaaaaattaaggatctatattctctaaagtgtgcatagaccagacaagaagccagttaatagtgcaactaaagaagggttgtactggggaaagtaggtaaaaaggctaaaatttgggatccaaatacagtctgtgtcatgcataaattttatttggaatattcctgtatcatatatgttgaactctttcgcagcagaaggattccgaaaaccttgcatgaagctattttatgtgatatttgtgtctattatatgtaccttgtggctttgcaggttgctgtccaatcttttttgtgtgcttatatagtatcatttgaatgctgtctttgatgcttcattttatttaatttttttcaacttcagtaaagtagcatatctgatcattatatatcctgtcatttagcaatgaatagaatcttttagatagtagtggaagcacctttgtattatcatatatatctttggacatctattgaaactctattccatggtattgctattcaacatatatatatgtatatattcgtctagctgtccaatcttcattagccccatagttttgcgcgtgggcaacggtagatgggcatcactagcttgacgatcttgatcggtgagttgctccttccatttttcttggtggttatggaatttatctgcaatatgtcttgtgcttttgtatgtctgctatttgtgctgctattttttttctattatgtgcactatgtctctttgtcatatacatatacagatgtgcaaactatatttttgcagaatcgtgctaggaatccaatgtctggtggctattctcagcagggatatcgccctcctcgtcctcagtcaaactggggcccgccttctgtgccaccccagcagcctggctatggttatatgcagcctggggcttatcctggggcaccgccacagtatggtgcacctcagcaaccttatggtagctaccccccaacatctggtggttatcagactggatgggatcagtctcaaaaccagcaatctcatacaactccccctggtactgggtatgattattatagtcagcagcagcaacctcagcaacaatctgcccctgggacagctgcttctactgatgccactagctacaattatggtcagccttcgacgtatgcttcacagggatatgattctacctacactcagcagagtggtgggcagcaagcatatggacatgatggctacactggttaccagacccaagggcagcagcagggctactctcagcagactggttatgatcagcagggttatggcacatctgcttatggatcagctgcaagctcgacccaggatgggtccaactatggtggtcctggaggggccagtcaggcatctccagggcagcaaacatcaaacccagctgctggaagccaacctggctataccagccaaccgcccactagtgctgcagcaacttacccacctcaaggttcagctccatctggatatggcgctccaccatcccagtctggctatggcacccaaccaccacagcaagccggatatggtcagggcgcttatgggcagccttctccacagggccagaaacctcctgcattgtcaccttatggacaggctccgcctcctggttctgctcaggctggttacgggcagtatggttacagccaacctgcttacggtgcaccaccagcttaccctggtgcacccattgcaagccaccagggctatggccagcagcagtcttatggccagcagcagtcttatggcgatgcttatggtagtgcaagctatgggcagcctccagcctactctactgaagcaacacctcctgctgcatcccaggatcactctgctgcccctgctgcggcccttggaacaacagcttcgacagctcctgaaaacagtgggggcgcccaaacatccgctgaaacttgagcttcagcagctaattgggaacaaacattttccaagaccctgccgtgtggtttcctccgcgctgttgcttaatataattacgcatctaatttagggtctacaactacaagttatttatttttctgcctgttgtttttgacaccatgactttctgtttccttgctatattgagtagtactttgcagttattttattgctggcgtatatgtctggactagtgatatatgtgtttgtgtggttacccttgttggaccgtaatgggtaccttccggcttggtctggacagataaatgcccatctatatgtattctgagccctgttatgattgctctaccgtcggaggtttctatgcccacttcagctggtgatgatggttatgtatgaaatttggtttcaatatttcgtaagacttatgtatcggtccataaaaggtttaagcagcatgaaagtctgcctttttgtttttgctgctggta

SEQ ID NO: 45891 - DNA, 3994 bp, Zea Mays
ccttcgtccacgctccctgcagccgccgcccaaaccctagcaacccgtcctccgccatggccgacgaccactactcctctaagaggaagtacgacgacccctcgccgccgccgcggcgcacggggttctcttcgggcccgccgcctgcctcgccgctcgcgggcggcgccccgtcgtacaacagcgtgccaccgccccccgatgagatccagctcgcgaagcagcgcgcgcaggagatcgcggcgcggatctttaacgccgcagaggccaagcgtcctcgcgtcgacaacggcgacgatgacagcggcggcttcggtgtaggcctgggcagcactggtggcggtggccgcatcggcggcggaggactcggcttctcgtcctctgccggtggtgggcacggggcttctatcccacaattatcttctcagagcagcgcacctcagtactcctcttatggtggatatcagggtacaagcaaaaagattgaaattccaaatggaagggttggtgttatcattggaaaagccggggaaactattaggtatatccaacttcaatcaggagcaaagattcaagtcacaagagaccatgaagctgaacctggtgcactgacaaggcaagttgagctttctggcaaacctgagcagataagcaaagctgaacagttgatcaaagaagttctggcagaggccgatgctgggtcatccggtgctggatctggtggccggaaatacaatgcaacacagccaggtgctgagacgttccagatgaaaattgctaataacaaggtgggactgattattgggaagggtggggagactataaagtccatgcaggccaattctggagctcgtattcaggttattcctttgcatctgcctgctggtgatacttcaactgaaagaactgtgcatattgatggtacccaagaacaaattgaagctgcaaagcaactgatcagtgaggttaccagtgaggtccgccttctttctcgttgtgtatattcctgatctgtaattgctttgccgttttgcgctttatctatcttaggtaggttgcttctggttcattctgtttattgtctcattttatgattttccccgattctttttgaaaattttgtttcttctgcttattgctgccctacattgattacactgcgtcttcgctaatcaatgtctgaaacatattgttcgtgggtacatcctcagcatgcaaggggattgttatatgtgttcttccctgtttatgaacataacttattaatggttttgggcaaggttcacaactggagtatataataaagcgaagaaacatatttgtaaactaacttgttatttatcaattagccactgctaggctcgttaaatggttttgtacagaaactgcatctaaagttttgacaagtattgatttgaaattcatatgatcgtttacatcatatggaatatggatgatactattttgggaaaaaaccagagagtccttgttccacttgttctattcagtggttattgtttttttgtttttccacatagagccaattagtgtcattagcttgccaggaggactgcaaactatcctggagagcaggtgtgttactgtttaatatcaatgtcctactggatataactctgtattttcacttataacatgttttatggattatgtgagctgacgtgctttatctggcatctgtatcatttcaaatttttcatctgatcctcctgtttctctggagcacaatggatacatatacattgctttctcatggcttgtttgtgagaaagaaatgctctaaacagacccaggtccccaggtgtttcggttgtttatggtggtcatgcattccaatttaggtccttctgttctagttgcacatatttagttctgatgtttatgatcactacagaggcaagtttttccttttaattcactattcccacctatacaacttggtggttgattaagagttgtattctcatgtacatagtctctgattcatgatacttattttatagttgggcccaaaaattaaggatctatattctctaaagtgtgcatagaccagacaagaagccagttaatagtgcaactaaagaagggttgtactggggaaagtaggtaaaaaggctaaaatttgggatccaaatacagtctgtgtcatgcataaattttatttggaatattcctgtatcatatatgttgaactctttcgcagcagaaggattccgaaaaccttgcatgaagctattttatgtgatatttgtgtctattatatgtaccttgtggctttgcaggttgctgtccaatcttttttgtgtgcttatatagtatcatttgaatgctgtctttgatgcttcattttatttaatttttttcaacttcagtaaagtagcatatctgatcattatatatcctgtcatttagcaatgaatagaatcttttagatagtagtggaagcacctttgtattatcatatatatctttggacatctattgaaactctattccatggtattgctattcaacatatatatatgtatatattcgtctagctgtccaatcttcattagccccatagttttgcgcgtgggcaacggtagatgggcatcactagcttgacgatcttgatcgaatcgtgctaggaatccaatgtctggtggctattctcagcagggatatcgccctcctcgtcctcagtcaaactggggcccgccttctgtgccaccccagcagcctggctatggttatatgcagcctggggcttatcctggggcaccgccacagtatggtgcacctcagcaaccttatggtagctaccccccaacatctggtggttatcagactggatgggatcagtctcaaaaccagcaatctcatacaactccccctggtactgggtatgattattatagtcagcagcagcaacctcagcaacaatctgcccctgggacagctgcttctactgatgccactagctacaattatggtcagccttcgacgtatgcttcacagggatatgattctacctacactcagcagagtggtgggcagcaagcatatggacatgatggctacactggttaccagacccaagggcagcagcagggctactctcagcagactggttatgatcagcagggttatggcacatctgcttatggatcagctgcaagctcgacccaggatgggtccaactatggtggtcctggaggggccagtcaggcatctccagggcagcaaacatcaaacccagctgctggaagccaacctggctataccagccaaccgcccactagtgctgcagcaacttacccacctcaaggttcagctccatctggatatggcgctccaccatcccagtctggctatggcacccaaccaccacagcaagccggatatggtcagggcgcttatgggcagccttctccacagggccagaaacctcctgcattgtcaccttatggacagctcctgaaaacagtgggggcgcccaaacatccgctgaaacttgagcttcagcagctaattgggaacaaacattttccaagaccctgccgtgtggtttcctccgcgctgttgcttaatataattacgcatctaatttagggtctacaactacaagttatttatttttctgcctgttgtttttgacaccatgactttctgtttccttgctatattgagtagtactttgcagttattttattgctggcgtatatgtctggactagtgatatatgtgtttgtgtggttacccttgttggaccgtaatgggtaccttccggcttggtctggacagataaatgcccatctatatgtattctgagccctgttatgattgctctaccgtcggaggtttctatgcccacttcagctggtgatgatggttatgtatgaaatttggtttcaatatttcgtaagacttatgtatcggtccataaaaggtttaagcagcatgaaagtctgcctttttgtttttgctgctggta

SEQ ID NO: 45892 - DNA, 3281 bp, Zea Mays
gcgagctctacaaatgtcgacaccttgtctgcaagggtttttcgccgtcttatcccttcgtccacgctccctgcagccgccgcccaaaccctagcaacccgtcctccgccatggccgacgaccactactcctctaagaggaagtacgacgacccctcgccgccgccgcggcgcacggggttctcttcgggcccgccgcctgcctcgccgctcgcgggcggcgccccgtcgtacaacagcgtgccaccgccccccgatgagatccagctcgcgaagcagcgcgcgcaggagatcgcggcgcggatctttaacgccgcagaggccaagcgtcctcgcgtcgacaacggcgacgatgacagcggcggcttcggtgtaggcctgggcagcactggtggcggtggccgcatcggcggcggaggactcggcttctcgtcctctgccggtggtgggcacggggcttctatcccacaattatcttctcagagcagcgcacctcagtactcctcttatggtggatatcagggtacaagcaaaaagattgaaattccaaatggaagggttggtgttatcattggaaaagccggggaaactattaggtatatccaacttcaatcaggagcaaagattcaagtcacaagagaccatgaagctgaacctggtgcactgacaaggcaagttgagctttctggcaaacctgagcagataagcaaagctgaacagttgatcaaagaagttctggcagaggccgatgctgggtcatccggtgctggatctggtggccggaaatacaatgcaacacagccaggtgctgagacgttccagatgaaaattgctaataacaaggtgggactgattattgggaagggtggggagactataaagtccatgcaggccaattctggagctcgtattcaggttattcctttgcatctgcctgctggtgatacttcaactgaaagaactgtgcatattgatggtacccaagaacaaattgaagctgcaaagcaactgatcagtgaggttaccagtgaggtccgccttctttctcgttgtgtatattcctgatctgtaattgctttgccgttttgcgctttatctatcttaggtaggttgcttctggttcattctgtttattgtctcattttatgattttccccgattctttttgaaaattttgtttcttctgcttattgctgccctacattgattacactgcgtcttcgctaatcaatgtctgaaacatattgttcgtgggtacatcctcagcatgcaaggggattgttatatgtgttcttccctgtttatgaacataacttattaatggttttgggcaaggttcacaactggagtatataataaagcgaagaaacatatttgtaaactaacttgttatttatcaattagccactgctaggctcgttaaatggttttgtacagaaactgcatctaaagttttgacaagtattgatttgaaattcatatgatcgtttacatcatatggaatatggatgatactattttgggaaaaaaccagagagtccttgttccacttgttctattcagtggttattgtttttttgtttttccacatagagccaattagtgtcattagcttgccaggaggactgcaaactatcctggagagcagaatcgtgctaggaatccaatgtctggtggctattctcagcagggatatcgccctcctcgtcctcagtcaaactggggcccgccttctgtgccaccccagcagcctggctatggttatatgcagcctggggcttatcctggggcaccgccacagtatggtgcacctcagcaaccttatggtagctaccccccaacatctggtggttatcagactggatgggatcagtctcaaaaccagcaatctcatacaactccccctggtactgggtatgattattatagtcagcagcagcaacctcagcaacaatctgcccctgggacagctgcttctactgatgccactagctacaattatggtcagccttcgacgtatgcttcacagggatatgattctacctacactcagcagagtggtgggcagcaagcatatggacatgatggctacactggttaccagacccaagggcagcagcagggctactctcagcagactggttatgatcagcagggttatggcacatctgcttatggatcagctgcaagctcgacccaggatgggtccaactatggtggtcctggaggggccagtcaggcatctccagggcagcaaacatcaaacccagctgctggaagccaacctggctataccagccaaccgcccactagtgctgcagcaacttacccacctcaaggttcagctccatctggatatggcgctccaccatcccagtctggctatggcacccaaccaccacagcaagccggatatggtcagggcgcttatgggcagccttctccacagggccagaaacctcctgcattgtcaccttatggacaggctccgcctcctggttctgctcaggctggttacgggcagtatggttacagccaacctgcttacggtgcaccaccagcttaccctggtgcacccattgcaagccaccagggctatggccagcagcagtcttatggccagcagcagtcttatggcgatgcttatggtagtgcaagctatgggcagcctccagcctactctactgaagcaacacctcctgctgcatcccaggatcactctgctgcccctgctgcggcccttggaacaacagcttcgacagctcctgaaaacagtgggggcgcccaaacatccgctgaaacttgagcttcagcagctaattgggaacaaacattttccaagaccctgccgtgtggtttcctccgcgctgttgcttaatataattacgcatctaatttagggtctacaactacaagttatttatttttctgcctgttgtttttgacaccatgactttctgtttccttgctatattgagtagtactttgcagttattttattgctggcgtatatgtctggactagtgatatatgtgtttgtgtggttacccttgttggaccgtaatgggtaccttccggcttggtctggacagataaatgcccatctatatgtattctgagccctgttatgattgctctaccgtcggaggtttctatgcccacttcagctggtgatgatggttatgtatgaaatttggtttcaatatttcgtaagacttatgtatcggtccataaaaggtttaagcagcatgaaagtctgcctttttgtttttgctgctggta

SEQ ID NO: 45893 - DNA, 4353 bp, Zea Mays
gacaatttggagaaaataaaatcaaggggcgagctctacaaatgtcgacaccttgtctgcaagggtttttcgccgtcttatcccttcgtccacgctccctgcagccgccgcccaaaccctagcaacccgtcctccgccatggccgacgaccactactcctctaagaggaagtacgacgacccctcgccgccgccgcggcgcacggggttctcttcgggcccgccgcctgcctcgccgctcgcgggcggcgccccgtcgtacaacagcgtgccaccgccccccgatgagatccagctcgcgaagcagcgcgcgcaggagatcgcggcgcggatctttaacgccgcagaggccaagcgtcctcgcgtcgacaacggcgacgatgacagcggcggcttcggtgtaggcctgggcagcactggtggcggtggccgcatcggcggcggaggactcggcttctcgtcctctgccggtggtgggcacggggcttctatcccacaattatcttctcagagcagcgcacctcagtactcctcttatggtggatatcagggtacaagcaaaaagattgaaattccaaatggaagggttggtgttatcattggaaaagccggggaaactattaggtatatccaacttcaatcaggagcaaagattcaagtcacaagagaccatgaagctgaacctggtgcactgacaaggcaagttgagctttctggcaaacctgagcagataagcaaagctgaacagttgatcaaagaagttctggcagaggccgatgctgggtcatccggtgctggatctggtggccggaaatacaatgcaacacagccaggtgctgagacgttccagatgaaaattgctaataacaaggtgggactgattattgggaagggtggggagactataaagtccatgcaggccaattctggagctcgtattcaggttattcctttgcatctgcctgctggtgatacttcaactgaaagaactgtgcatattgatggtacccaagaacaaattgaagctgcaaagcaactgatcagtgaggttaccagtgaggtccgccttctttctcgttgtgtatattcctgatctgtaattgctttgccgttttgcgctttatctatcttaggtaggttgcttctggttcattctgtttattgtctcattttatgattttccccgattctttttgaaaattttgtttcttctgcttattgctgccctacattgattacactgcgtcttcgctaatcaatgtctgaaacatattgttcgtgggtacatcctcagcatgcaaggggattgttatatgtgttcttccctgtttatgaacataacttattaatggttttgggcaaggttcacaactggagtatataataaagcgaagaaacatatttgtaaactaacttgttatttatcaattagccactgctaggctcgttaaatggttttgtacagaaactgcatctaaagttttgacaagtattgatttgaaattcatatgatcgtttacatcatatggaatatggatgatactattttgggaaaaaaccagagagtccttgttccacttgttctattcagtggttattgtttttttgtttttccacatagagccaattagtgtcattagcttgccaggaggactgcaaactatcctggagagcaggtgtgttactgtttaatatcaatgtcctactggatataactctgtattttcacttataacatgttttatggattatgtgagctgacgtgctttatctggcatctgtatcatttcaaatttttcatctgatcctcctgtttctctggagcacaatggatacatatacattgctttctcatggcttgtttgtgagaaagaaatgctctaaacagacccaggtccccaggtgtttcggttgtttatggtggtcatgcattccaatttaggtccttctgttctagttgcacatatttagttctgatgtttatgatcactacagaggcaagtttttccttttaattcactattcccacctatacaacttggtggttgattaagagttgtattctcatgtacatagtctctgattcatgatacttattttatagttgggcccaaaaattaaggatctatattctctaaagtgtgcatagaccagacaagaagccagttaatagtgcaactaaagaagggttgtactggggaaagtaggtaaaaaggctaaaatttgggatccaaatacagtctgtgtcatgcataaattttatttggaatattcctgtatcatatatgttgaactctttcgcagcagaaggattccgaaaaccttgcatgaagctattttatgtgatatttgtgtctattatatgtaccttgtggctttgcaggttgctgtccaatcttttttgtgtgcttatatagtatcatttgaatgctgtctttgatgcttcattttatttaatttttttcaacttcagtaaagtagcatatctgatcattatatatcctgtcatttagcaatgaatagaatcttttagatagtagtggaagcacctttgtattatcatatatatctttggacatctattgaaactctattccatggtattgctattcaacatatatatatgtatatattcgtctagctgtccaatcttcattagccccatagttttgcgcgtgggcaacggtagatgggcatcactagcttgacgatcttgatcgaatcgtgctaggaatccaatgtctggtggctattctcagcagggatatcgccctcctcgtcctcagtcaaactggggcccgccttctgtgccaccccagcagcctggctatggttatatgcagcctggggcttatcctggggcaccgccacagtatggtgcacctcagcaaccttatggtagctaccccccaacatctggtggttatcagactggatgggatcagtctcaaaaccagcaatctcatacaactccccctggtactgggtatgattattatagtcagcagcagcaacctcagcaacaatctgcccctgggacagctgcttctactgatgccactagctacaattatggtcagccttcgacgtatgcttcacagggatatgattctacctacactcagcagagtggtgggcagcaagcatatggacatgatggctacactggttaccagacccaagggcagcagcagggctactctcagcagactggttatgatcagcagggttatggcacatctgcttatggatcagctgcaagctcgacccaggatgggtccaactatggtggtcctggaggggccagtcaggcatctccagggcagcaaacatcaaacccagctgctggaagccaacctggctataccagccaaccgcccactagtgctgcagcaacttacccacctcaaggttcagctccatctggatatggcgctccaccatcccagtctggctatggcacccaaccaccacagcaagccggatatggtcagggcgcttatgggcagccttctccacagggccagaaacctcctgcattgtcaccttatggacaggctccgcctcctggttctgctcaggctggttacgggcagtatggttacagccaacctgcttacggtgcaccaccagcttaccctggtgcacccattgcaagccaccagggctatggccagcagcagtcttatggccagcagcagtcttatggcgatgcttatggtagtgcaagctatgggcagcctccagcctactctactgaagcaacacctcctgctgcatcccaggatcactctgctgcccctgctgcggcccttggaacaacagcttcgacagctcctgaaaacagtgggggcgcccaaacatccgctgaaacttgagcttcagcagctaattgggaacaaacattttccaagaccctgccgtgtggtttcctccgcgctgttgcttaatataattacgcatctaatttagggtctacaactacaagttatttatttttctgcctgttgtttttgacaccatgactttctgtttccttgctatattgagtagtactttgcagttattttattgctggcgtatatgtctggactagtgatatatgtgtttgtgtggttacccttgttggaccgtaatgggtaccttccggcttggtctggacagataaatgcccatctatatgtattctgagccctgttatgattgctctaccgtcggaggtttctatgcccacttcagctggtgatgatggttatgtatgaaatttggtttcaatatttcgtaagacttatgtatcggtccataaaaggtttaagcagcatgaaagtctgcctttttgtttttgctgctggta

SEQ ID NO: 45894 - DNA, 2226 bp, Zea Mays
gccagtgtcctccgcatctcccgtctctcctgttccgcctcccctccgatctccgccgcatcacctccctcgaaccctagacccacccgcgcgcccattgcctccggtcgccatgtccgccactcagcttctccgtcgctcccgcaagctgcagagtttgcacaatgctgtaggttgtgagaaatttttcctttttcggcatttctccagtggttccggatcctttatcgccaaggaaaatggtgttggaaaaagaaccagaggtcccagattttcccagcattaccagctacaaaagagcttgacccattctcactaggagtaaatggaaactgcagttggagaagagcatccaacagccttaccccaagtgctgctagttggctcaatggttcattctcatgtggacaggtagtttcagcacggacattctcaaatagtgcagacctgcctccacatcaagaaattggaatgccttcactttcacctaccatgactgagggaaacattgccaagtggcttaagaaggaaggagataaggtctcccctggcgaggttctctgtgaggtggaaactgataaagcaactgtggagatggagtgcatggaagagggctatcttgctaagattattcatggagatggtgcaaaggagattaaagttggtgaggtcattgctataactgtggaagaagagggtgacattgagaagtttaaggattataagccgtcatcttcagctgaacctgtagctcctgctgaatcaaaggctcaaccagaaccttcacaaccaaaggtggaggaaaagaagcttacccaggctcctgaggttaaggccccaaagattgaagaagcttctcaatctggagatcgcatatttgccagccctcttgcccgtaaactggctgaagataacaatgtcccactatcaagtgtgaaaggtactggtcctgatgggcgtattttgaaggcagacattgaagattacttggccaagggtgggctgagggaggcttttgcagctccagggttaggttacgttgatattccaaatgcacagataagaaaggttaccgcaaaccgcttgctagcatctaaacagaccattcctcattactacttgacagtagatgcacgtgttgacaaacttgtcaagttgcgaggtgaactgaatccactgcaggatgcttctggtggaaagaaaatatctatcaatgatcttgtcatcaaggctgcagctttggctcttagaaaggtccctcagtgtaacagctcatggatgaatgattttattcgccaatatcacaatgtgaacatcaacgtggctgtgcagactgaacacggattgtttgttccagtaattagggatgcagacaagaagggacttggtacaattgctgaggaggtgaagcagttggctcaaaaagcaagagacaatagcttaaaaccagcagattatgagggtggcaccttcacgatatcaaacttgggaggtcccttcggaatcaaacaattctgtgccatcataaatcctcctcagtcagcaattttggctattggttctgccgagaagaggtgatacctggttccgccgatggtctgtatgagtttggttcgttcatgtcagccacactgagctgtgaccacagggttatagatggtgcaatcggtgcggaatttctgaaagcattcaagggctacatcgagaacccgacttcgatgctgctgtgaagttaggatcgatgacctaacacaattcttgtcaagttgtttaaataaccaggccacccaaaggtggcgtctccaaagttccaaaccaatagcacagagccgttatgatattcccagtgttaattaggatcaacgtatagaggcctgaagtcatttttgggattgttctcacgggcaattgatgggaataaatatgaaagcagccaacatgggaaataacttttgattttttttctttggaacatcgctatgcgatttaaaaaaattgtgtaaatctgttgagcttctccacagtaagcgtgatttgatgcgttgatgatatcttgataagagtggtaatcatggattgggttaatatgttatgatgcatggtctaataccatcaaagggcctgcctaatgacagcgcctgggctgacagattcataggaaaaatttattaagtttgctgaaatataatcaaaactgctgtaatggctgcttttgcggctattccg

SEQ ID NO: 45895 - DNA, 2104 bp, Zea Mays
gccagtgtcctccgcatctcccgtctctcctgttccgcctcccctccgatctccgccgcatcacctccctcgaaccctagacccacccgcgcgcccattgcctccggtcgccatgtccgccactcagcttctccgtcgctcccgcaagctgcagagtttgcacaatgctgtaggttgtgagaaatttttcctttttcggcatttctccagtggttccggatcctttatcgccaaggaaaatggtgttggaaaaagaaccagaggtcccagattttcccagcattaccagctacaaaagagcttgacccattctcactaggagtaaatggaaactgcagttggagaagagcatccaacagccttaccccaagtgctgctagttggctcaatggttcattctcatgtggacaggtagtttcagcacggacattctcaaatagtgcagacctgcctccacatcaagaaattggaatgccttcactttcacctaccatgactgagggaaacattgccaagtggcttaagaaggaaggagataaggtctcccctggcgaggttctctgtgaggtggaaactgataaagcaactgtggagatggagtgcatggaagagggctatcttgctaagattattcatggagatggtgcaaaggagattaaagttgctgaacctgtagctcctgctgaatcaaaggctcaaccagaaccttcacaaccaaaggtggaggaaaagaagcttacccaggctcctgaggttaaggccccaaagattgaagaagcttctcaatctggagatcgtcccactatcaagtgtgaaaggtactggtcctgatgggcgtattttgaaggcagacattgaagattacttggccaagggtgggctgagggaggcttttgcagctccagggttaggttacgttgatattccaaatgcacagataagaaaggttaccgcaaaccgcttgctagcatctaaacagaccattcctcattactacttgacagtagatgcacgtgttgacaaacttgtcaagttgcgaggtgaactgaatccactgcaggatgcttctggtggaaagaaaatatctatcaatgatcttgtcatcaaggctgcagctttggctcttagaaaggtccctcagtgtaacagctcatggatgaatgattttattcgccaatatcacaatgtgaacatcaacgtggctgtgcagactgaacacggattgtttgttccagtaattagggatgcagacaagaagggacttggtacaattgctgaggaggtgaagcagttggctcaaaaagcaagagacaatagcttaaaaccagcagattatgagggtggcaccttcacgatatcaaacttgggaggtcccttcggaatcaaacaattctgtgccatcataaatcctcctcagtcagcaattttggctattggttctgccgagaagaggtgatacctggttccgccgatggtctgtatgagtttggttcgttcatgtcagccacactgagctgtgaccacagggttatagatggtgcaatcggtgcggaatttctgaaagcattcaagggctacatcgagaacccgacttcgatgctgctgtgaagttaggatcgatgacctaacacaattcttgtcaagttgtttaaataaccaggccacccaaaggtggcgtctccaaagttccaaaccaatagcacagagccgttatgatattcccagtgttaattaggatcaacgtatagaggcctgaagtcatttttgggattgttctcacgggcaattgatgggaataaatatgaaagcagccaacatgggaaataacttttgattttttttctttggaacatcgctatgcgatttaaaaaaattgtgtaaatctgttgagcttctccacagtaagcgtgatttgatgcgttgatgatatcttgataagagtggtaatcatggattgggttaatatgttatgatgcatggtctaataccatcaaagggcctgcctaatgacagcgcctgggctgacagattcataggaaaaatttattaagtttgctgaaatataatcaaaactgctgtaatggctgcttttgcggctattccg

SEQ ID NO: 45896 - DNA, 569 bp, Zea Mays
ggcttcggcatcacagcgaatgtgaggcgtcgctggttgcggtcgcgcgtggcgacgggaaccagaaacggtcggcaagatttcaggcggtggatcggcattctgttacggggaagaagaagcttctaagcgcctgtgcccacgatatctgcggaaaggctcgcgtgcatcttatcgagagttctgggaacagatgaacatggatgaggcttacaaacgtggcccactgctaagtgacgtgaagggttattagggtgattagcatgatgatgtaatgcttgcgtcaggctgatgtaagcgcggcaagaggaataaaaaacaaaagaaatggtagaggacgtcagatgggctatggctaggtggttaggccgaatgggtcggtttcttttctttttactattttctattttccaaattccttttttttagttttcaaattttctatttcaatcagattaaattcaaatttcaaattatattcaaatagagttcaaacttcaagccaatctaactccacaaacaaagatacaacatgtatgcattccatagataaaattcatgaaagaaat

SEQ ID NO: 45897 - DNA, 2257 bp, Zea Mays
aagaatgtcagaaaaacacaacaccagataggacagatatattacggagagctggcttatgtgcctatatatggcgctgagcatcccagatgtccccggtactgtcattcaagctacgcaaaattcatgcaatgtatttgttgtgtccaaacggagactaattatgaaactcgcaagatatcctcaaacgagtgagtctaacagaaacttgaggatcgagtccattagtcatgaaacatttgcactatcacacaggagtttactgtttgacaactttggtgacgatgaagcacaatcagattcattctcccagtcccacagctcacatagtgcttccaatgttgtttcaagttcagaaagttctgaacaagttgcttcaggaagttcaggagtaaattatgcagcaaccgaaggaagtaagaactacgattctcttagctcctggggggaagatccttgggttgcctcaaactccagcgaagagtgccaatctacggatgatgtgtccaaactaaggaaggagctgcaggaaaccttagtagtctatgataaagcttgtgcaaaccttgttagtgttaagaaaaagattcaggtactttctatcgagtgttctgaagaggctaggaaggtggagcacgcgctagagtgggaggaagctttgaagcagacggtgtctgatgagaaggcgaaacagctcgaggtcatcagtgaagtcgagcaagcaggaaaatcattcacccgagaggcttattcaaggtacaagacagaaatggctgccagcatgatctgtcaggataaggtgcagattgttgatgcgattttgacaaagagcagaagttgcaggcggtattcgaagagagatatagagcttgccactgacaacttctctgaagaaaggaagatcggtgagggtggttatggcaatgtgtacaggtgcaccctcgaccacactgaagtagctgtgaaggtcattcaggaaaactccattgacaaaactgatgagttcctgaaggaggttgagattcttagccagcttcgccatcccaacctggttttgttgcttggtttctgtcccgaaattggctgcctggtgtacgaatacctgaagaacgggagcctagaagaccagctcttcaacagcgaagggtgccaaccactgcactggttcctccggttccaggtcgtcttcgaggtgtcctgcggactcgcattcctgcacgcgagaagcccagagcctgtcgtccaccgcgacctgaaaccggccaacatcttgctggacaggaactacgtgggcaaggtcggcgacgtcggtttcgcgaagttcgtctctgatctcgtgcccgactggcagaccgagtacaaggacacgatcgtcgccggcacgctgtactacacggaccccgagtaccagcagaccggcaccgtgcgtcccaagtccgacgtgttcgcgctgggagtcgtcatcctgcagctcctgaccggcagacgcccggacgggctcgttgcgagcgcagagaacgctgtgagaaacggcaggctcgctgatatcctcgactggtctcaggctggttggccgcttgccgaggcagaggtgtttgccaggctcgggttgagatgcgcggccttgaggtgcagggacaggcctgaccttgagtcggaggtgctgccggagctcgacgagatcctgcacaggattacttttgctgtcagtttgagaagccccaaactgacgagcgtaccaagccacttcgtctgccctataacacaggagctgatggaggatcctcacgtcgccgcagacggccacacctacgagcattacgcgatcagagcttggctcaagcggcacaggacatcgcctgttacgaggagtaagctgcagaattcgtccgtaatcccgaaccactcattgcgcggcgcgatacagcagtggaagtcacagttaccggctcagacgaacgagtgaaacgggagtcagggtgccctctcttcttgattcaactgttaatggtggcgaaattattttggagagcacgcaaaaggcctttgcgtttcggtttttgtaagtggttcaaagctgtaaatgaaaaaggaggcagctgtaaattgaagcgcagaatcacgaaggtcgattttgtaactggagtgctaggttctgttgccatagtattggtcatcagttttggaacagagcaagcttaaaagttttttttttgctatttattactccccctctctgaatactgttctgcccaag

SEQ ID NO: 45898 - DNA, 2677 bp, Zea Mays
ctcgcccgccacagccgctacatcgtcccctactaacggcggcgcgacacccttcagttttagaccgaaaccaatggcctccggcggcgcaccgccgaccgttgccgtcgctgtgcgccccggcggcagcggcagccgcctcgccgcgcggtgggtggccgcgggactcccgggcaacgggcgcgccaccgcgatcactgtcgtccacgtcatccccgagctctcctacgagccttctccgacgggggagcgggtgccgatgccgctggtgggaagggagccggcggaggcgtacgcgtgggaccggcgcgcacgcgcggaggaggcgctgctcccgttccgccgcctctactgctgtggcctcgcgaacgtcaccgtggagacggtagtggttgaaggcgacggtgtcgcggaggcgctgctgcggtacatacgggagtccggcgtacggagcctggtgctcggctcggcgtccttccgctggtttcggagggcgctgagcatcccagatgtccccggtactgtcattcaagctacgcaaaattcatgcaatgtatttgttgtgtccaaacggagactaattatgaaactcgcaagatatcctcaaacgagtgagtctaacagaaacttgaggatcgagtccattagtcatgaaacatttgcactatcacacaggagtttactgtttgacaactttggtgacgatgaagcacaatcagattcattctcccagtcccacagctcacatagtgcttccaatgttgtttcaagttcagaaagttctgaacaagttgcttcaggaagttcaggagtaaattatgcagcaaccgaaggaagtaagaactacgattctcttagctcctggggggaagatccttgggttgcctcaaactccagcgaagagtgccaatctacggatgatgtgtccaaactaaggaaggagctgcaggaaaccttagtagtctatgataaagcttgtgcaaaccttgttagtgttaagaaaaagattcaggtactttctatcgagtgttctgaagaggctaggaaggtggagcacgcgctagagtgggaggaagctttgaagcagacggtgtctgatgagaaggcgaaacagctcgaggtcatcagtgaagtcgagcaagcaggaaaatcattcacccgagaggcttattcaaggtacaagacagaaatggctgccagcatgatctgtcaggataaggtgcagattgttgatgcgattttgacaaagagcagaagttgcaggcggtattcgaagagagatatagagcttgccactgacaacttctctgaagaaaggaagatcggtgagggtggttatggcaatgtgtacaggtgcaccctcgaccacactgaagtagctgtgaaggtcattcaggaaaactccattgacaaaactgatgagttcctgaaggaggttgagattcttagccagcttcgccatcccaacctggttttgttgcttggtttctgtcccgaaattggctgcctggtgtacgaatacctgaagaacgggagcctagaagaccagctcttcaacagcgaagggtgccaaccactgcactggttcctccggttccaggtcgtcttcgaggtgtcctgcggactcgcattcctgcacgcgagaagcccagagcctgtcgtccaccgcgacctgaaaccggccaacatcttgctggacaggaactacgtgggcaaggtcggcgacgtcggtttcgcgaagttcgtctctgatctcgtgcccgactggcagaccgagtacaaggacacgatcgtcgccggcacgctgtactacacggaccccgagtaccagcagaccggcaccgtgcgtcccaagtccgacgtgttcgcgctgggagtcgtcatcctgcagctcctgaccggcagacgcccggacgggctcgttgcgagcgcagagaacgctgtgagaaacggcaggctcgctgatatcctcgactggtctcaggctggttggccgcttgccgaggcagaggtgtttgccaggctcgggttgagatgcgcggccttgaggtgcagggacaggcctgaccttgagtcggaggtgctgccggagctcgacgagatcctgcacaggattacttttgctgtcagtttgagaagccccaaactgacgagcgtaccaagccacttcgtctgccctataacacaggagctgatggaggatcctcacgtcgccgcagacggccacacctacgagcattacgcgatcagagcttggctcaagcggcacaggacatcgcctgttacgaggagtaagctgcagaattcgtccgtaatcccgaaccactcattgcgcggcgcgatacagcagtggaagtcacagttaccggctcagacgaacgagtgaaacgggagtcagggtgccctctcttcttgattcaactgttaatggtggcgaaattattttggagagcacgcaaaaggcctttgcgtttcggtttttgtaagtggttcaaagctgtaaatgaaaaaggaggcagctgtaaattgaagcgcagaatcacgaaggtcgattttgtaactggagtgctaggttctgttgccatagtattggtcatcagttttggaacagagcaagcttaaaagttttttttttgctatttattactccccctctctgaatactgttctgcccaag

SEQ ID NO: 45899 - DNA, 1940 bp, Zea Mays
cgagagtttgaaaatctaagtggtatgagagtttgaagatctaagtaacatagaatgctaagtttgaggaccgcgttaaaaggaagaggagagtgcccaacttttgctaattttttgtgtggttcttggaatgaaaatccactactagtagttatgatgccactgagattgctggaaacaagttatttttttttcaggaaccgagctggtgaattaaataaaggaggcaaaccatagtttggaaacttgaggctgctgttacagcaaaaaagaaatcaacacattttacacacatgtacacaccataagtttcctttgtatgctccccttatctacacgctaacaatctcgtttggttcactggaactattttaggccccatcatcaggcgctgcagtccatgaccatctcatctgagtcaggactgaatctgaacaagcatggacagcagtggttttccagacctggaaggcaacctcatgcccgtctatactctatacaattatgagtatgcttgatttgcttgatccggcggaagattccttcccatggcattcagatgtcatcgttattgaaactgtaaggagcggagcttgagcagttcgtacttgcgcagctgacctgggaagtctcatactcatgcccaagattgcgcagcctgttcagctccggcaagatttccttcccgagatccggcctgtctttcttccgcagctccgcgcaccgcagcgccagcttggcgaattccagagcctcttccaccggccagtcggtcaccgtcgggtcgaggatctcctggaaggctcctctctctatggcgttctccacatggtgcgtgagccccatgggcgacctcgccgtgatgatctggagcagcatgatgccgagcgagtacacgtcggacttggtggtgagcatgccagtctgttggtactccgggtcgatgtagcagaaggtgccggccgtcgatgtcatcctgtactgcgtgacgtcggccgcggactgtggcaccagcctcgcgagcccgacgtcgctgatcttgctgacgaagttgtggtcgaggaggatgttggcgggcttcaggtcccggtggacaagtggttctggcttcgcttggtggaggaagaggagtccagttgcgatgtcagcggcgatcctgaagcggatgctccatgggattggcaacgtttttcctcgcctgcagagccgatcctctaggctcccatagtccatgtactcgtacaccaggcacccatactctgggcaggctccaagcaacagaaccatgtttggatgccgcatgcagcttagtacttcaatctcttgctgaaattgtttccgcccctgtgatgcatctggtctcaagattttgatagcaacattggtatgatccagtactgctttgtatactggtccatatccgccttctcctatcttgagcgccttatcaaacttatgagtagcagcctctatgtcatcgatggagtatctcctgtaccggatatcatttttgttcagtgcatcagttgctttcttcctatcctcagcctccctctttgccttccactctgctctcaatctcttctgcgcctcgagctctgcaattttctgcgcagcttctgctgcctcaagtgcagctctacacttcgctttctccatttcaactagcgcaagagcttcctcttctgaattccgtagttcttggtacttcttggactcctccaccttcatctggtgcatctgtgctgcctgcagtgagatcattgttcattgtttcaatatctttaggtaagcttaggaacaaagaacctggtatttagcaatacggatcggaagcaaacacaccttctgtttggcatcaacagcttccttacatgcagagttatacatctccattgtctgtttcagttctagtctcaggcgtctcatttcagcttcca

SEQ ID NO: 45900 - DNA, 1641 bp, Zea Mays
aattagcatgaagttgtttttgctgaagagggtcgaacaaaagaaatgcttcactgagcaaaatatagcatttcgatcccgacaccccaaaatccctcagccctctggcctcggcggcgctcaaaccttcgccgtcccgccgtctccaaaaccctcttaccatggccgccgcgacaaccgcgggggccggagccgcgacgccgcagccgccacggcagtacaagctagctccgcagagcgagctgcgtgtggaggtgctccccgacgcgcccctccgagtgcgcctcgtcactggcaccgcagagatcttcggcaccgagctgcctccggagggctgggtccccgtccctccccgatccaagatcgccattttcacctggcacggcgcgacggtggaactggacggggtgagcgagagcgagtacacgtctgacgagactccaatggtaatttatgtcaacacgcacgccattctggatgcccgcagggcaagggcgagaacagccgcagctcaggggggcgataaggaggcatcacagggacctagagtgattgttgtggggccaacagattctggaaaaagtactctctgcaaaatgcttcttagctgggctgccaaactgggctggaagcctacgtatgtcgatttagatattggccagggatctataacgatccctggatgtatttctgctacaccaattgagaaacctatagatataattgatgggattcccttggagatgccactggtatacttctatggtcacccaaatccaagtattaatgcggatgtttacaaagttcttatgaaggagctagctaaaacattggagaaacagttctctggcaatgctgaatctagggcagcaggaatggttatcaatacaatggggtgggttgaaggccttgggtatgagttacttctcaacgcaattgaaaccttcaaggccaatgtagtactggtactgggacaggagaaactctggaagatgttgaaagatgcagttcaaagcaagtccaacattgatgttgtaaaacttcataaatcagagggtgttgtcctcagaaattcaaaatatcggcaaagaacgagaagcttccgaatcaagtgatgtctcggtgtataaaatcggtggtggccatcaagctccccgttcagcattacctatcggtgcagagcctgtggcagatcctactcgacttgttgctgtcaacatcagcacggatatgatccatacagtgcttgcaatttcctatgctaaggaacctgaagaaataatatctagcaatgttgccggattcattcatgttactgatgttgacatccaaaggaagaagctgacgtacattgcaccttgcccgggggacttgccaagcaggttgttgatcgcgagttcacttacatggtatgaagcgtgatcagtctaagttagatgggccatatgcccatacgcatgttgtaaagccaggacatgtgacgttgggactgagcgttcgatgtctactgctaaccaagagaaacgatgcaaggacaaatatcctgttccctcgtgatttactgtgttctcgtttcttctcttattatacgccaacatctacggtgcggttgagataacaaatggcgtggtttgagaaatg

SEQ ID NO: 45901 - DNA, 5296 bp, Zea Mays
aaatattactgtgacatagaatattgccagttaaaataactgcagaaaaatacagcccattagtgtaaaagctcgtgacatggtatattactgctatatagaatacattgtcgatttattcatagtttctcttttgcccatgctttggctatcatgattaacatgagttaatttaagcactgtaaattcatttggccggagtttgaagtcctgaaaccattaggccctggttctcttttcacttagattgtcctttccatacagtggtaatttttcagtgacattgtacattctctcgcctaaatcctatctgtcacatccaaaatgtattgtgtgacgtgtatgtttatggttgactacacaatttggatgacaggtcaaacaaaaccacccagtagttacatagccactcctataaacaattcaatgaatgaagcaagattgtttgtcaactgggctcaaccattcctttgaagtatcagagcttaagatctgactttgtatgtgttgattgagtaaactgcacggctgttctaaagtattatacgatttttgtgtaggtccctaaactatgaaattacatacttggctccctaatatgtttaagtgatctcatccttgtcgaaagtagacacgacaacaccaaagagcctgatatggcatccacatgtatgtgatttatgcagaaaacccactaggccaagtcaaatgtgtccacttggtgcccggcagtggcaagatggtgaaatcagcgttacaagttgggccccagctcggaattgcctgcctagcaagcacaaggaacagagggaggcagcagagctgatggtgctctgggcacagaggcaagaggaggttggtggccctaagcactctgcggtgtggtgctgaaacacaagccagagtagagctcagtgcttcggcgatggtggaggtggacgccttttgggtcccccgatgcaagcacgagctgcaagggtttaggctatctccagcagccttattcatctcatctcctattttaaacttcactatataaagagtgcaatctacagtgcaaaatagtcttttgccggccatatgcacggtctgctaaccatagccttggggcaagaccaacacgaggaaacggaataagggtgatggaagcggccaaccatgcgcaaaggttgagctcacggtaatggcggtcgaactgaggacaaaatggcacgacagatggcatgacaacgcttcccaccaaatgactcttggcagtgacatgccgtcgacgtccctgaagttatcattcacatcggcctgcttatgtgggatgtgcaagctaacaataaggctactggtgctggaggtgtagaagaggtactctagcacgccatggcgacacaaagtaaacagcatgttcctgtaaaggagagcgaaaggatcattcagcgactcttagcctagccctacacagcaatgaccaagacggtgtcagctagcgatagtggcagcacgtggaagttgatggacaggttcatctccacatcatgtgtgacagcggtcatggcatccgtagacatgacaggcagtttgatgatgatgacagtaaaagcgagcgacatgggcagtctcggcataaggaagcgatggcatgttggcttgttgacacagctatggaccatgagattttttgcttaaatcacatccacatgggcgaccatatcggctccttgccatcaccatgtttagtttgaccagaatgagatcagttaagtacattagggagccaaatataaggtttaatagtttgggggcagacgagattcctgtaatacttcaagtactgaccatgcaatttacttgtgtttttctaatgaaatcacacaagattgtgcctaacttcattgaatagagcggaagaaacgaactcctaaggacagagagagtttaaaaagggattaacagtacaaaagaaaggctctcctaggtgccttgtgcatgtgttcacccaaattctagtttcgtccttgaatttcccaatcatggatagcgttgataggtccttgtgttgaaagattctttggtttcactccttccagtgttctcgtgctacaagcaagatgtgttaacacaaccccatctttagaacatcatttgtgactgctatactcgaccaccacccatacgttgacctaattgaactccagttagcttggtggagctgcaggtaagaaatccaagccattgttgcctagatttttttggtgaatgaacgtttggcatttatgtggtggttggtctcatggctacaccaacatagtggacaatgcatgttgttcggccatcctctcactgctagcctatagctaagtgccaccaatttgggatgatcaaccatgcaaagaatttgcatttagtcgcccacagagcatccaaatgatggttttgttgttcgttgttgtggtgccaagagattgtgcttaataagctaatgaggtagtgtagtcctcttgttttgttagttccaccatatgtcgtcatcttggttttggtcaagttgtagagtttcaactatattccacagaaaagagggttgttacagtagttccaccgtcggatatgtgtgatcaatgccctgaagtcattactatccttccacaagggattgtttggaagttggttcatatacaagtttcgttgaggttgttgttcaaagatgttgaggttcttcaagcagcagctcaaccttccatttttgtgagctataatgcccatgtgttcgagtatttggatagttcgtaataatcaaattttcatggtttgcaaatattatgaatagcaggtctattcattatggggtcaactagcacaaatatataggtacatgagtacaaatatacacaaaaacccttaagagaaaaatacaaataaacccatatctatctaggcaacaactgctatgcaagcagtcattctgtgcaagcgtacaagcaaaccatctgatctattagattacgatccaaccacagatataaccattgtttgttaggggtttttttataaagattattgagttggtggtggaagggtttaagtgttaaatgtgacccacggttggatcacgatataatggatcagatggtttgcttgcacgcttgcacagaatgactacttgcatagcagtcgttgcctatctatctaatacccttataaaatggaaaaatacaaataaacccatatctatctaatactccctcaaactcaaggtggatctataacactgagttttgagaggaaaaatttatgctcagcgcgagcctgtgccctcgtgaagaaattagccaactgaagctctaaaggcacataccaaagcaagataacatcatcctagacttgagctcgtgtatacgaaacatcaactccaatatgcttggtgagctcatgcttcaccgcatcacgagcaatactgataacacctgtactgtcagacaaaaggagtcgtcatggaaacagaaacatgaaaatcctcaagcaactatcgtaaccaagtaacctctgcagtcacaagggccatagcacgcaactcagcctcggtactcaaacgagaaactgctacctgctacttagtcttccgagcaatgagagaaccaccaagaaaaacacaatattgagaaagagaccaactatcgaaaaaatcactagcccaagtagcatcagaacaagattgcagttgcaacgagctagaatgtggaaagaacatacatctagatatggttccacaaagatattgtaggacacaaagcaagtgactatagtgtacctggatgggatctgaagcaaactaactcaggatacacacaacatatgaaatgtcaagacgagtgacacagagataaacaaaacttcctacagtatgttgacgataacgagtatggtcgggaaaagactcgccatcatcggcactaaggtgaagattgagctccatgggagtctcaacaatctagtgatcggtaagagaagcccgatgaagaaaatcttgaatgtactcctcttgagatagataaaggccctgagacaaagaagaaacctttgtcccaagaaagtaacacagaggaccaagatcagacatgagaaaatgataactaagacgtgccttaacaaagtcaacatactcaaggttatctccagtgataattatatcatcaacataaagaagagtccgaccccgagaggaggtagtacacaaagagtgcaggaccatgattactggtagaaaaaccaacaacagttatcatagaagcaaagagctgaaaccaagaatgtggagcctgcttgaggccataaggggaacggcgaagacaacaaaccatacaagcagaaatagaatacctaggcgatggctacatatagaactcaagtagcttaccatcaagaaaggtattcttgacatcaagatgagagatggaccacgcacgaacagaggccatagcaagaagagtgcgaacagtggtcatatgagcaacaggtgcaaaaatctcatcatagccacaaccatgttcctactggaagccatgggcaactagacgagatttatagcgatcaagagaaccatcagaacgggtcttgaccttatagacccacatactggtgataggacaaacacgtgatggacaaggaacaagttccaacgtgctagtgcgctcaagagtagcaatctcctcagaaatcgcatgttgtcgttacagatgaagaatagcatcatgataagaagtcagctcagaaagaacggtagcgactaaacctgaaggagagtacccattaggtggctgacgaaaacgatgactccgtctaagaggtggctcgagcaaagagtcaactgaggaagctggatccagagatgaatagggagcatcagtcaaaggtaaatcgcaagaaaatgaatgagttgcagaagagcgcacatcataagagggcaacgcatgagaggatgatggtgtaccaaaagaattgatgacccggcgggtgtagacaagtgttcatagcgtagtcaggggctaaagcagcaggctccaaagaaaacactatagaaggcaccacaaaggaaggcaccgaaagagagatgaacatgtcagaaggagctaaggctactatcgtgggcgcaccaagcgtgaggcaggtccaatagtaacacgggcatctagaaaatatagaaaagagatgggatcaaccaaggatgttgacaaagcatcgaaagaaggacaagaataaaaagaatgagcctcatcaaagacaacatcccaagagaccctcatcc

SEQ ID NO: 45902 - DNA, 2998 bp, Zea Mays
ctgactgccacaacgtacgctgcatggatggaacgtacgttgcgctgcatcctgcattcagaaggccacggcacacctgtcttcctcgcagggcctctcgcagtctctctgtcttatcgcaaatgcaatatagctatagactgaaacatgcatgtaggtaaaggaatgagctagtgcttgggccgtggtgaaaaataatggcgtcggcgggaggagaaggtgcagttttggtacccctggcgcggcgctgcggcgggtgcgacggccgtgaggaagccgtggtggaggcgatgctgcagtggcagaaggtgagcgacctgctcatcgcggcgtcgctgctgtccatcccgctggagctgctctacttcgccacgtgcgccgccctggcgcctctccggcgggtgctcctccagctgggcaccttcattgtcatgtgcggcgtgacccacctgctgaacgtcctcgcctacgaccacccgggctcccaccgcatcctcgtcgccctcaccaccgccaagattctgggcgcgctcgccacctccgccgccgccgtctccctcccggtcctgttcccgcgcctgctccgcctcaaggtccgcgaatcgttcctccgcaccaaggcgcgccagcttgaccgcgacctcgccaccgtcaggcaccgcgaggagaccgtctggcgcgtcgtccgcgcggtcacgcaccacatccgcgactccatcgacgcgcgcaccatcctgcgcaccaccatgctccagcttgccgccgccctcggcctcagcaactgcgccatctggatgccccagcccggcgggagcgaccgcggcgtgctccagctcatggaccagctgctgccagaccgagacgacgaaggcgacaaggtgcttcatcacagcggcggcacacgcgccatctccgttcgtgaccctgacgtggccgccgtattggccagcaaggacgccaaggtgcttagccggccaggctcggcgctcaaggcggcgagctgccggagcgtgccgctggcaggagccgcggccgccatacggattccaaatttccacggagaagtgggcagcaggaacacatcagagccgttgagctacgccatcctagtcctggttcttcgggctcatgaagatcaacacagggcacctacaggctggagcaacctggacctggagattgtccaggccgtcgccgaccaggtcaccgtcgcgctgtcccacgcggcagccctggaggagtcacagctgatccggcacaggctggcggagcagcacggggcactgctgcgcgcaaggagcgagctcgcggctgcgaccaaggcgaggaacaacgctcacagcgcgatgcgaagcgccatgggcaggccgatgcactccgtcgtcggcctgatatccgtgatgcagcaggaggccgccgcgatgcgcccggagcagaggctcatcgtcgacgccatcgctaggacaaacgctgtgtcctccactctcatggacgacgtcatggagacgctgcagaggatggtggacatccgtgacccgccgctgtcgactcctactcctaccctggtgtcaaggcggccgttcgagctccgctcgctgatcagggacgcggccttcgtcgcccgatgcttgtccggctgccaggagctcggcttctcgcaccagctgcaggccaattccctgcccgaatgggttgtcggcgacgacaagagagtcttccatctcgtgctgcacatggtgggcgctcagctgagccgatgccatggccagcatgtcacagcagcaggccgtaccctctcgttttctgtctgcagctgcaacagcatcgccagtgagcaccaggactggatcccgtcgccactgcgacccgtcagcttcaccagtggcaaccaagtatttgtcaggatccagattgggctgacgaagagcggtcctgggagctcgccggcatcgcgcccaccccagtgtggcctctcctccgattccggcggtgccaacatgcggctaaccttcgctatgtgcaaaaagattgtggagagtcggaaggccagggagaaaccatgacgtgcatccttcggttccaacagcagcagccaccgaatccgcacgtgcctggatcaggcacgtaccggattggagcctcgtctgcgacggcggcgcctcaccttcacttcaacggcctaagaatcctgcttgccgacagcgacgccatgagcatggaggtcacccggaagctcatcgagcggctaggctgccaagtcctgccagtgtcgtcgggcgccgactgcctcagtttgctgcgaggcgctgagccgtcgttcgaactcgtggttcttgatctcgatgggcatggcggagccggcacggcaggcgccatggatgggctcgaggtagccctcaggatacgggagctcagtaacacctgctggctgctggtcctcgtcgccgtggaagccagcggcgtcgatgacaccgtgcgtgatatgtgccggcgagcgggagtggacgggctcatccacaagcccatcacgctgccggcgctcggagctcagctccagagagtccttcagaacaactgatccaacctccaaggaacctgtgtgtcgatttgcagccttcacattacgccacgtcatgatgtagctgtgtagagactcatgttgagccttctctcaatcgcaagttatgttgaagctgctaattatttttggatatgccgagccaataatttaatagcaatactataaacaacagcagaaaaatatatagaatagcttgtaaaacaataatatatttatacttataagagaatgtatactaaattcagttcaatataagcataaatttatcgtattaactgtttagaaaaaacaacttattaaagacacaatgtggtattgcaacaaaaaaattatgattgtgtataaagtgagctaatttatatactgtaaatattgactgaataatgaacaatatattgagaacaatctataaagttt

SEQ ID NO: 45903 - DNA, 1832 bp, Zea Mays
ctttaatagacccctctttctcctaccgaatcttcaatttttcatttgccgtcgcctactttgttatctgtttcgagtctcttcttctactttctcccgtcccgttcatttatttatatataaataaattctgctaagctctgctctgcttctcgccctaccatcgcctgaccgacgcgcccgttttctcctgaaaacagaaggctccggcctccggcatccgccaaaaaggggaaaaaaggagagataacacacacacacacaaaccccaatcccctgcggcggcgatggacccgtcatcggcgggctccggcggcaactccctcccgtccgtcggccccgacgggcagaagcggcgcgtgtgctacttctacgacccggatgtgggcaactactactacgggcagggccatccgatgaagccgcaccgcatccggatgacgcactcgctgctggcgcgctacggcctcctcaaccagatgcaggtgtaccgccccaacccggcccgcgaccgcgacctctgccgcttccacgccgacgactacatcaacttcctgcgctccgtcacgccggaaacgcagcaggaccagatccgcctgctcaagcgcttcaacgtcggcgaggactgccccgtcttcgacggcctctacagcttctgccagacctatgcgggcgcctccgtcggcggggccgtcaagctcaaccacggccatgacatcgcaatcaactggtcggggggcctgcaccacgccaagaagtgcgaggcgtcgggcttctgctacgtcaatgacatcgtgctcgccatactcgagctgctcaagcatcacgagactggagttgctcttggccaagagcctgaagacaagatgcctgttaatgagtactatgaatacttcggtccagattacactcttcatgttgcaccaagtaacatggagaacaaaaatacacgacaacaactggatgatatacgatctaaacttctggataatctttcaaaacttcgacatgctcctagtgtccactttcaagagagagttcctgacacagaaatacctgagcaagatgaagatcaagatgatccagatgaacgacatgatcctgactctgatatggaagtggatgaccacaaggctgtggaagagtcatcgaggaggagcattctaggtataaaaatcaagagagaatttggtgaaaatgcgaccagagtacaggatggtggcagggttgcatctgaacatagaggactggaacccatggcagaagacattggttcctccaagcaagctcctgcagatgccagtgcaatggccatcgatgaaccaagcaatgtcaagaatgaacctgagagctcaactaaattgcaaggccaagcagctgcgtaccacaagccatagctgcgaccatcaagagttgctgggtttctgctaggcaacttcctgcttgatttggacagtccagaaaacagaagtgaatccgcaatacgtccctgccatttcaaatttgacttggttacacctatctgtgacaatgttaatgtaatgagatcccatggcactagtgaagttcccaggtgtccacctgggattgcttgcggttgagagagacgatagtctgatgacccatgtatacatgaagcccatgatctcagttgtacagtcattagccaatacaaatatgcagtggactaaagggtgattcattgcgtgttcttaatggttttgtgtcctgactcgtccttttttttgtgcggaagcaaggtaggcagttgctgtgccgcaaatttgccgagtttgtagaatgctgatgcaaatacatgcgctatctgcctg

SEQ ID NO: 45904 - DNA, 3859 bp, Zea Mays
cgcagaacattgccatctcgctgctcgtgctgaatgtgatcaagaagaggtctgcaacgtgctctgtgatggctatagagaagataaaatctgccaggaataaatcatcgcaaggaaggtgagtatctcttggcatcttgtacaaactacaaagtgcaggtgagtatatttgcttctttaaattgatcttactgccctaaaactactaattctcgacttcatgtgaccagactagatttttttttaatccagttgccaccacatcagcaccactgcaacggaaagtacctccagaaaatgtgaccccaactttcatgattatatgttattcttagccttctctgtagtcatcaattctagatagggcatctcagtctatgcaggccaggtagcaattaggtcaatagaagctgtatcttacaagcatgtcctcgagacacatggcagcactttttcatttaaagtcatatgttactcatctaaatgcactatagggttgttcttctgcatgccagttgtgtttgaagagattgtgtaaacaaaacttaattattatggttgttagttcttagttcatgtctgtacaacttcctcctgttctttaaagcatatatgttgcaaattttaaggcggttatgttgctgttttgcactttgcccggtaatgtgcttgatccaatggtcgagctcagtgcttgtgcaaagcacacatgctgtccacgggaatagtcaccacaaacggttgcaagtggaaaccaaaaccttgttcgtggacggcgcatatgacttcacaagctcagacctcaagcactacaacatggttctccaatacaatcctgatgaatcaaacgtgctccgggttccacgcttaatgaatctggcctcaagtgcataccttcggttgaggggtaatgatactaatatgcggtttgtgtttgttaaagacatgcctagagatggtcatcctatgaaggctcctgacatgtcttttatagttgggaagatggtttttgtatggattataatgctccttttcccggtatgatctgttttagtataaactaattaattaatgaaaattgaaacccttttattttgtaatatataaaccattagtacttggagaaatatattattataataaaataatccattcaaaattgtaagctttgccctatgtcaaatttctctaagttcaatcaaattcttagagaaatgcaccgtcatctacaataccgaacaagattcattagatatacaccataaaatatattttgataaagtatttttttgatattttatatgtaaatataaactaaaataatttataatttaaaatggacaaagacacgaagtatgtgaaataagggcgttgtagcccccatataagtaggccaatacaataaaattgtgactcaatttacactactggagacggcttctttattaattatcaaacactcggtaaaggttttaccttataatacatataaattcgtaagaacactctcaatacatatacactggatatgaacaaagtgccttagcttatacaatgggagaataaaaaaaagaggaaaacaaacaaaccgacatttatcttaaaataacatactaacattgcaggtcatcctgagcagtttagtgtatgagaaacaacagaagctaagggcaatgatgaagatgcatggtttaggggatatggcatattggactatatcttattgctacttccttgtcatatcattactttatatgttcttgctggttgtatttggcgccgtcgttgatataaagttatttgcagtgaacagctacgtgctacaattcttactatattttatctacatgaacttgcaaatttcatttgcgttcctcatgacaacgtacttttctacttccgcaacagctaccgtaacaggatacctctatgttattgggtctggcctcataggagaatatctgttcaggccttttgtcgaagacacctccgtctcaagaagcctgattacgctgatggagttcttcccaccaatgtctctgtaccgcataatctacgagctctctccacctccatcgccgtcggggcctttctcggacttctccggcgtacgcgtgggagacctgagcgaccctgagaacgggatcttggtcctcatggtcgtgatggttcttgagtggcctacgtttcttttcctgacattgtatctggatggatttggctggctccaaactagagttagaaagctgccgccggcggcggcggcatcttctcatcagacccttcagaagccgtccaccacacggcctcaagaacgacccgaagcttcgattgaaatagacgggacgacagatatcccgggagaggtagcgcgtgcatgcgcagagagagagatagtcgacaggttcttgcagcaaccggaccagagctacgcagtcatagtcgacaacgtcaggaaagtgtaccctccgagagacggaaacgcagaggtggtcgcagtgaacggcttctcgctctccatcaaacgcgggcagtgtttcggactccttggctcaaacggcgccggaaaaacctctctcattggcatgctgactgggttcactaaacctacatccggcacggcttatattgatgggatggacatacgaacagacatgagcgagatctacacgagaataggcgtttgtccgcaattcaacttgctatgggaaacactgaccggccgtgagcatctgatgttctatggcagactaaagagactgaacggcgctgcattaactgaggctgcagaacaatctatgaaagtactgaagatattcgagggcggtgtcgccgacacgctggtttcacagtacagcggtggcatgaaacgccgcctcagcgtcgctatctctctgatcggggaccctaaggtggtgtacttggacgagccaagcacagggttggatccagcgtcaaggagcgccttgtgggacgctgtgaagcttgccaagaaggacaaagccatcattctcacaacgcattccatggaggaggctgaggctctgtgcgaccggatcggaataaccgcgcatggacgtctccgctgcaccggaacctccaaagagctgaaggccaagtacggcggcacgttcgtgttcacggtgacgacggcggcggcgggcgaggacgaggcggtggagcggctggtccgcggctccatctcgcctgacgccaagcggacgtaccacatcgccgggacgcagaagttcgagctgcccaagcagggggtcaggatcgccgaggtcttccgcgccatggagcaggcgaagcgctcgctgagcatcgccgcctggggccttgtcgacaccacgctcgaggacgtcttcatcaaggttgctgcttgctaaggagagagagagaccgagagagtgcgcgcggaatgccctggatgcgtcgtagtcgtcgtagagccgggatcgccaccaaaagcgtgcagcgcttgcggatacgcccatacgcttctgcaacccaactgaagattgctcccccctctccgttagtaggatatactaacaactctacaatcactatcggaatttggctctttgccgagtgccaaattctttgccgagtgttttttttcgggtactcggcaaagagctctttgccgagtaccacgtaaaaaacactcggtaaaagaaaacactcgtcgaataagctctttgccgagtgccacgtaaaaacactcggtaaaagaaaacactcgtcgaataagctctttaccgagtgtttttttgacactcgacaaaaagctctttgccaagtgtcagaaattgagaaatacaacactcggcaaagagctctttgccgagttttt

SEQ ID NO: 45905 - DNA, 4020 bp, Zea Mays
gcaaaaccacgacacgatcgagcgcctcgccactctcggcggcgccggaaacggtccagcgtgcgcgtggcggctggcgagcaggagcatccgccgcgtgtttgatttccacgcgcgcgagctagctctgacagtagacgttgcagttgcagaagaaccccgccaaagacgcccaaccttctacagcgccaatggatccattttgatgcatcgagcctgtgctgtgctgtgctgcactgctgcgctgccagatctgaccttgttcgggcggtatctctgatctctctctaagctaggtcgctagctccttgcatcgatcatggcagcggcggccttccaatcccaggcggatgcgctgttcaggaaaaatctcgcgatccagaggcgcgcttacaagacgaactgctgcctgatcctgttcccggtgctcgtctgcggcctgctcggcggcctgcagacgttcatggacacgctgttcaacacggacgacggctacaagcccgactgcaagggctgcgccggcggcggcgtgcgcgtgcgcctcagcgaggacgccgtcgggggcctcgcgtgctcccagagctgcccgctgccggcggcccagcgatggcccgtcgcgctgctgcttcccgccggcggggcggtggacgtcctccctgacctctccgccctggctgggactgggatgaaggaaccgccgccgtgcgtcagccccgagtcgtgcacggcgccagccaaattcctcgtcaccggcggcaacaagtcattcgcagaaagtctcgcggccaacatgttcccgccacacgcatcgccgaagctgacggctgacatttccggcttggctgattatgcgctggcaatagagggatcaagttttggtactaatacttatggcgccgccttcgatatggcgggcctttattttcttcagagaaaatgcactccgaactcaatactttctttcccagttcagtacggtccaaaaatgggcatccaagaagcaagatgtactcaaggattgtttgaatggcgagagaattcagtatccatgaacaatgaactgtatagaggcttcagagctgacaaaaccaaagaaaggatagagaacaagaacgacattgtttcaggatgttgcaactgggggtatcgatacaaatgcagtaatctttgatcggtcatctggtcaaatcttgtgcacgcttactggtcactcaaagaaggatcttggaaatcagaaagtcttgctctcaggcatcaatctcgatgaggatgcaaaaccaagaggggacaactgtgaacagtggtcattgttcgtcggcactgctcaagcatcattgacgttggcgctggcctcctctgtacaaggccaggggtgtactgaccccaaggccggtgctgttgaccccaaggccgagaacaaggctatagagaagataaaatctgccaggaataaatcatcgcaaggaagcatatatgttgcaaattttaaggcggttatgttgctgttttgcactttgcccgcatatgacttcacaagctcagacctcaagcactacaacatggttctccaatacaatcctgatgaatcaaacgtgctccgggttccacgcttaatgaatctggcctcaagtgcataccttcggttgaggggtaatgatactaatatgcggtttgtgtttgttaaagacatgcctagagatggtcatcctatgaaggctcctgacatgtcttttatagttgggaagatggtttttgtatggattataatgctccttttcccggtcatcctgagcagtttagtgtatgagaaacaacagaagctaagggcaatgatgaagatgcatggtttaggggatatggcatattggactatatcttattgctacttccttgtcatatcattactttatatgttcttgctggttgtatttggcgccgtcgttgatataaagttatttgcagtgaacagctacgtgctacaattcttactatattttatctacatgaacttgcaaatttcatttgcgttcctcatgacaacgtacttttctacttccgcaacagctaccgtaacaggatacctctatgttattgggtctggcctcataggagaatatctgttcaggccttttgtcgaagacacctccgtctcaagaagcctgattacgctgatggagttcttcccaccaatgtctctgtaccgcataatctacgagctctctccacctccatcgccgtcggggcctttctcggacttctccggcgtacgcgtgggagacctgagcgaccctgagaacgggatcttggtcctcatggtcgtgatggttcttgagtggcctacgtttcttttcctgacattgtatctggatggatttggctggctccaaactagagttagaaagctgccgccggcggcggcggcatcttctcatcagacccttcagaagccgtccaccacacggcctcaagaacgacccgaagcttcgattgaaatagacgggacgacagatatcccgggagaggtagcgcgtgcatgcgcagagagagagatagtcgacaggttcttgcagcaaccggaccagagctacgcagtcatagtcgacaacgtcaggaaagtgtaccctccgagagacggaaacgcagaggtggtcgcagtgaacggcttctcgctctccatcaaacgcgggcagtgtttcggactccttggctcaaacggcgccggaaaaacctctctcattggcatggtatgctgactgggttcactaaacctacatccggcacggcttatattgatgggatggacatacgaacagacatgagcgagatctacacgagaataggcgtttgtccgcaattcaacttgctatgggaaacactgaccggccgtgagcatctgatgttctatggcagactaaagagactgaacggcgctgcattaactgaggctgcagaacaatctatgaaagtactgaagatattcgagggcggtgtcgccgacacgctggtttcacagtacagcggtggcatgaaacgccgcctcagcgtcgctatctctctgatcggggaccctaaggtggtgtacttggacgagccaagcacagggttggatccagcgtcaaggagcgccttgtgggacgctgtgaagcttgccaagaaggacaaagccatcattctcacaacgcattccatggaggaggctgaggctctgtgcgaccggatcggaataaccgcgcatggacgtctccgctgcaccggaacctccaaagagctgaaggccaagtacggcggcacgttcgtgttcacggtgacgacggcggcggcgggcgaggacgaggcggtggagcggctggtccgcggctccatctcgcctgacgccaagcggacgtaccacatcgccgggacgcagaagttcgagctgcccaagcagggggtcaggatcgccgaggtcttccgcgccatggagcaggcgaagcgctcgctgagcatcgccgcctggggccttgtcgacaccacgctcgaggacgtcttcatcaaggttgctgcttgctaaggagagagagagaccgagagagtgcgcgcggaatgccctggatgcgtcgtagtcgtcgtagagccgggatcgccaccaaaagcgtgcagcgcttgcggatacgcccatacgcttctgcaacccaactgaagattgctcccccctctccgttagtaggatatactaacaactctacaatcactatcggaatttggctctttgccgagtgccaaattctttgccgagtgttttttttcgggtactcggcaaagagctctttgccgagtaccacgtaaaaaacactcggtaaaagaaaacactcgtcgaataagctctttgccgagtgccacgtaaaaacactcggtaaaagaaaacactcgtcgaataagctctttaccgagtgtttttttgacactcgacaaaaagctctttgccaagtgtcagaaattgagaaatacaacactcggcaaagagctctttgccgagttttt

SEQ ID NO: 45906 - DNA, 2955 bp, Zea Mays
atgcccagcctcctctcttgcatgcagtgtccagccattcgtagctcagctttcttggccgccgccgccggcggcaccctccacaggtggaatgaccatgtcaggcttgtagatgttgtggacgatggaggcgccaacgaggagggaggcgacgatgacgacggacgaccacgcgagggacggggtccccgtcggcacccgcccgccgccgaacctcttgccaccggtcatcctcctgggagtccgacgcctgtaccaaatggccacctacaccctcagaaggagtcaggagtcaggacacccaaccaacaccaagcaaagcatgacgtgtcaggaaacatttgtactgtattattaaacaacaggtgtatttctttcctccgtcccaacattgcttcctaccaactagttttccatgctatttttttttcaaaaaaaaaacaaagaaaacatcgcttccttccagttcaaataccaagacatcatacaaaccaactcaccaaaatctactgtaaggctggagaatttgttggcgcagagagagagagagagagagagagagagagagaaaagctcaaatttgaagaccgggttagacgagcagtggtggagtggagagactggagttccaccggcgcaccgtgggcatatcgccatatccccatgacggcatggccacaaggtacaaggggcggtgctggccactgcacccatctgcgacctgcacgggcgcactgcacacaagcacctgaggacagggcgaggtgtcgagcaaacggccacagatttgtgatgtgtcacaccgtagtggtggaaccaagaatttgatccagattactcagctgaatttactatatgcacttgagtttgaagtgatattattgtcgtcgtgctccccatacttatggtgcgtttggttagggagccaccggagtggagcggctgcattctagatttggagagtaaagctactccgttctatgtttggtaagcaggatggagctgctccatttttttggttggggagtgtattagagcagagccattcagttttttgtttggttgaggaatgtaccagagcagaaccgcgacaacatcactcgagtgctcgattggcctttctgctaaatggagctgcttttgttcaacatcactccactcgccaacaacaacatgtgcgcaggaacagtatgtgttcatatccatagtaccaaaacattgaaaacatgagttatatgctctgaaacattttaataataccaaaacatgagttcatatccatagttcacccaaccataactcataaccatagttcatcaccagcgatgttcaagtacacaagcaaaatcacaacacataaccatagttcatcaaacaactacgatacatgagttcatatcaccatgacataccaagttcaattcatcaataaaatagtttacaaaatcggaagaaggatgctcactgccattgttatggaaagagtatagtagcacagttaccggtttcttgttgcatagaattccgccaagcagagagtaacatgagacaacaattgaagaattaaaagtttaagaaacaaaacatgattcttgttgctcgtgcgtagaattcacattcacaacagtgccatgaatgccagtgctagctctgctgctcgtgcgagcacaaagcaacaacagaaaattcccagattcttgctgggattaaactgattcgcagtaatctttttacagattgcatttggatatattcgaataaaatggcttttgtgcaatcgggcgttggtaaccagcttggatttgtcttgttatcacaactgagcatggtgaccatccaagtggagtgaagattcgtccaaacaagaattattagtgttttcctgacaggacagtacttctttggatggtattaaaccaagagacaagacaacactaataaacaagaattattagtgttttcctacaaggccaaccgtgtctgtggtggccgccaacgccttgggcggtgccgccacggccgcgacgcttgccaacggcatgggcaccgcgtcgtcgtccaacacgcagctgcccctgccacagcaaccctatcgtcaactagtatctatcgacgcgtcgctgctgttgctgcctgatcagacactacgtctccactacgaccagatccggcgacggacggacacagagacgtgcacaatacctagctgccgggtcttttctgccatttcccacttctcttcagatccatcactgtgaagctccctgcacccagcagatctggtgaagggaggagaagacagagcagatctgctgacggcgtggaggaaggtggcgatggcagaagcacaaatagtggaggaggaaaggggccggtgggggaagagaagagggggcctggaaggagaagaggtggtggcagattcacctgatttgacggatgacggcggacgggcggagctcctcacggcggcggtggctcaaggatgcactgctcgcgtgagagagaacggaggagtagagagaacgagagcgctcaggtccggtcgatttggccgagcgggctcgttccggatatcagctgtactgggtgtgtgcccgttgcaacgggagtacgctgagatgagcatcgacacatatctgatcggatcttatattttcttggggtctggagaaagtttgctcggaagccaaacatgttaaaaactaaagagggagcaacctagttgtgccatgtctcccactgctttgttagaaatagaaccaaaatcagattttgaagagccaatatgtgacttgtcaaagatgctgacaaccaatacaataagcgcacaaagaagatgtgccttccttgaggttcaactactaaaactcaattggacctctctagaactcaagacaagggaagacgatacgcaaacaagctttgtgccttccatcccatcctatgcaaaag

SEQ ID NO: 45907 - DNA, 934 bp, Zea Mays
ttctagaacaaaaaaaaaaaggtgctgatggccggtccctcactactcccatgcccagcctcctctcttgcatgcagtgtccagccattcgtagctcagctttcttggccgccgccgccggcggcaccctccacaggtggaatggtctgcaagagcggggaaatgaatagatgatccggtgtagacattgggtcgaacaggtggtgtgcagtgtgcagtgtggcggggggtgcgagggccgtcggaacaaaccatgtcaggcttgtagatgttgtggacgatggaggcgccaacgaggagggaggcgacgatgacgacggacgaccacgcgagggacggggtccccgtcggcacccgcccgccgccgaacctcttgccaccggtcatcctcctgggagtccgacgcctgatttgacggatgacggcggacgggcggagctcctcacggcggcggtggctcaaggatgcactgctcgcgtgagagagaacggaggagtagagagaacgagagcgctcaggtccggtcgatttggccgagcgggctcgttccggatatcagctgtactgggtgtgtgcccgttgcaacgggagtacgctgagatgagcatcgacacatatctgatcggatcttatattttcttggggtctggagaaagtttgctcggaagccaaacatgttaaaaactaaagagggagcaacctagttgtgccatgtctcccactgctttgttagaaatagaaccaaaatcagattttgaagagccaatatgtgacttgtcaaagatgctgacaaccaatacaataagcgcacaaagaagatgtgccttccttgaggttcaactactaaaactcaattggacctctctagaactcaagacaagggaagacgatacgcaaacaagctttgtgccttccatcccatcctatgcaaaag

SEQ ID NO: 45908 - DNA, 2889 bp, Zea Mays
gttgcagctgtttggactgctgcagctgcaatccatagagagaaaaatactgtagaagccgcagccgcagccggattgcagccgcagcaagccgcagcgaacaagctggtaatcaccacctgtcgtcgatttagcactcgtcagaaatcattagccagctagctgtctagacaccgccttccccgcgaccggctgcacccggtcacttcttctccccacgcagtcacctccccgcaaaccccacgaggaaaaagtttctttttttctctgttaaacacgcgcatcgaagcaagccagcagcaacaaaagagacgagccttttcgctcgccgctaccaccacctcgttgtctcgcctccgcctcggcctcagcacgcgcgcgggatctcgcgctcgctcgcgcaccgaggagcgcgcacccacccgcagggttcggggcggggtgatccggtggtgatggcgagccggatcaaggaggacgagaggcacgagaagatcatccgcggcctgctgaagctgcccgccaacaagcgctgcatcaactgcaataatttgggaccacaatatgtctgcacaaatttctggacctttgtttgtaccaattgcagtggatcacatcgggagtttacacatcgagtaaaatctgtttccatggccaaatttaccgcacaagaagttgctgcccttcaagaaggggggaatgagcgtgctagagaagtatttttcaaggaatgggatcctcaacgaaatggataccctgacagcagtaacgctgacaaattgagaaatttcattaagcatgtgtatgtggaacgtagatacacaggagaaaggagtactgataggccaccaagggcaaaggatgacaaggatgagtatagtgaaaatagaagatctgatggaaattggggtggttcgagaagtccgccaaatggaagttactctgatcgtcagaattatagcggacggagtgatgacagaaattccagatattcctatggggaccgtagtcctggctatgaccaaaatgactataagagaagtcctcgctactttgaggttggtgataatagatctggaaaaataactccaattcaagggtttgaagacaggaggttttcagagcccagaaagcgagatagtgggtctccagacttccagaaagaagctgatggttctagtcctgttgtacggccagtgagggatatattgggtgacaacgctcctcaacttcgggtcggtgaaccttcaaagccagctactgagcctgcaaagccaactgtagtcagaccaattgatcctccaaagccaagtgtagtcagaccaattgatcctccgaagccaaatggaaccagggcaattgatcctccaccactgacaaagacaatatctagtgccagcagcattggttctgcagaagggacatcggaacagacaaaggtggcaagtgcagtgagtttgattgatttcagtgcagatcctgaacctgagtccacagcaccaccacagccggcccctatgacacaacagcctccagttaatgcagtagcaccacagcctgttcttgaacaaaggaaaagtgctccttctgtcagtggtggtgattgggcatcttttgatgcttttggccaacaacaaacacctcaaacaagcagcagtgtaaatccccttgagtctgcacttgcacagctgtcattctctgaagcaccctctgcaccaaatgtgtcagcttatcctgtttctctggatcccactttgaaagcaaatgatggaggatattcatctgtgctagatcagtcacattccttgtttgatgcaccctttggaatctcaggcaaccaggcctcaacagtaatgtctggccaagaaacatcggttcaacaatcttctatagctgcccctacggctggacttccatctcaagctactgcaaatcaacaaggaaccagtggtattcaaggagcagcttcttctactgacagtaaattcagtggcaggaaagaacttccagcggatatctttactgcactatatccaccatcaactccaatgatgcctggttggcagagagccccccattttggaatgggatacgccatgcaatatccacctggagtgttccagggaatgcaagcatatcctcagcctacatatcagcaacctgtatattcgcaacatgcatattcccacccccaacctgtgaaagcttcaaacccttttgatcttgggaatgggccagctccaactcaagctcacatgcccccatctggaccaccaggagtattagcaggcccagctccccaaaccttaattagcaactctagttttggtgttcctccacagcagcctcaccagctctatcaatcagccgcacatccaagccatttcatgatgcagcaagttccgaacagcatgcccatgcccgagcaacaacctaatagcatgcttgtaacgtttgggatacctccagccaaacacccccccaccttcatacggctccgttgggggtagtaatccattcgggtaaaagaagtgtgggaacacctgctctttcatctctagactaagggtctgcagcactcagcgggacagacatgcatcgaagccctcgagagaatgtgttccatacaaccaggtggtgtattctgtcggctgtgatatgttgtacaacttgtttccaagggcgtcatcatcgaatgtaactctgttttagagggcctaagctgctttcagcctcactccttgtatattgtgtctgcttgaattgcatagtatgtatattttgtgatccttcgttgtccctgtcactatcactagacatagagcatttagcgataaaatgactgggcttaccacatttgcgtcgatgggaagcctacttgatgtagac

SEQ ID NO: 45909 - DNA, 2887 bp, Zea Mays
gttgcagctgtttggactgctgcagctgcaatccatagagagaaaaatactgtagaagccgcagccgcagccggattgcagccgcagcaagccgcagcgaacaagctggtaatcaccacctgtcgtcgatttagcactcgtcagaaatcattagccagctagctgtctagacaccgccttccccgcgaccggctgcacccggtcacttcttctccccacgcagtcacctccccgcaaaccccacgaggaaaaagtttctttttttctctgttaaacacgcgcatcgaagcaagccagcagcaacaaaagagacgagccttttcgctcgccgctaccaccacctcgttgtctcgcctccgcctcggcctcagcacgcgcgcgggatctcgcgctcgctcgcgcaccgaggagcgcgcacccacccgcagggttcggggcggggtgatccggtggtgatggcgagccggatcaaggaggacgagaggcacgagaagatcatccgcggcctgctgaagctgcccgccaacaagcgctgcatcaactgcaataatttgggaccacaatatgtctgcacaaatttctggacctttgtttgtaccaattgcagtggatcacatcgggagtttacacatcgagtaaaatctgtttccatggccaaatttaccgcacaagaagttgctgcccttcaagaaggggggaatgagcgtgctagagaagtatttttcaaggaatgggatcctcaacgaaatggataccctgacagcagtaacgctgacaaattgagaaatttcattaagcatgtgtatgtggaacgtagatacacaggagaaaggagtactgataggccaccaagggcaaaggatgacaaggatgagtatagtgaaaatagaagatctgatggaaattggggtggttcgagaagtccgccaaatggaagttactctgatcgtcagaattatagcggacggagtgatgacagaaattccagatattcctatggggaccgtagtcctggctatgaccaaaatgactataagagaagtcctcgctactttgaggttggtgataatagatctggaaaaataactccaattcaagggtttgaagacaggaggttttcagagcccagaaagcgagatagtgggtctccagacttccagaaagaagctgatggttctagtcctgttgtacggccagtgagggatatattgggtgacaacgctcctcaacttcgggtcggtgaaccttcaaagccagctactgagcctgcaaagccaactgtagtcagaccaattgatcctccaaagccaagtgtagtcagaccaattgatcctccgaagccaaatggaaccagggcaattgatcctccaccactgacaaagacaatatctagtgccagcagcattggttctgcagaagggacatcggaacagacaaaggtggcaagtgcagtgagtttgattgatttcagtgcagatcctgaacctgagtccacagcaccaccacagccggcccctatgacacaacagcctccagttaatgcagtagcaccacagcctgttcttgaacaaaggaaaagtgctccttctgtcagtggtggtgattgggcatcttttgatgcttttggccaacaacaaacacctcaaacaagcagcagtgtaaatccccttgagtctgcacttgcacagctgtcattctctgaagcaccctctgcaccaaatgtgtcagcttatcctgtttctctggatcccactttgaaagcaaatgatggaggatattcatctgtgctagatcagtcacattccttgtttgatgcaccctttggaatctcaggcaaccagtaatgtctggccaagaaacatcggttcaacaatcttctatagctgcccctacggctggacttccatctcaagctactgcaaatcaacaaggaaccagtggtattcaaggagcagcttcttctactgacagtaaattcagtggcaggaaagaacttccagcggatatctttactgcactatatccaccatcaactccaatgatgcctggttggcagagagccccccattttggaatgggatacgccatgcaatatccacctggagtgttccagggaatgcaagcatatcctcagcctacatatcagcaacctgtatattcgcaacatgcatattcccacccccaacctgtgaaagcttcaaacccttttgatcttgggaatgggccagctccaactcaagctcacatgcccccatctggaccaccaggagtattagcaggcccagctccccaaaccttaattagcaactctagttttggtgttcctccacagcagcctcaccagctctatcaatcagccgcacatccaagccatttcatgatgcagcaagttccgaacagcatgcccatgcccgagcaacaacctaatagcatgcttgtaacgcaacaaggtttgggatacctccagccaaacacccccccaccttcatacggctccgttgggggtagtaatccattcgggtaaaagaagtgtgggaacacctgctctttcatctctagactaagggtctgcagcactcagcgggacagacatgcatcgaagccctcgagagaatgtgttccatacaaccaggtggtgtattctgtcggctgtgatatgttgtacaacttgtttccaagggcgtcatcatcgaatgtaactctgttttagagggcctaagctgctttcagcctcactccttgtatattgtgtctgcttgaattgcatagtatgtatattttgtgatccttcgttgtccctgtcactatcactagacatagagcatttagcgataaaatgactgggcttaccacatttgcgtcgatgggaagcctacttgatgtagac

SEQ ID NO: 45910 - DNA, 3652 bp, Zea Mays
gaaagcctgtcccgccatacaaacacggtttacgcacgatcggtgctcgcagatgtctgcattttgaagtttggtaaatagcattgttatatgtgccaagagttttgggagttactggcataatggaattctcaaagcaagggcaggcacccatgccaaacaacatcggactacaaccgctgccctcttcaaatgtccaatctaatcaaacagagtatccatctctgttttatccatcatcattgcctggtgactggagttcacatatgggaacctcagtaccagttagctcatattatattgtccccatgaatcagcaatcagtccagctaggtgcttcgaggccagaggtttcacatccggcacaacctttgctaagtagggtatcattgaggccaccccagcaggtgctaaatattcaaacatctttgccagcaatggctggatcacaaccctcaccatctatggcaggcaggaaatcacaacagaaagttgcttctccaaaggttcaaatgctgaaatctccatcattccagtcatctaataagcggtctgcacagaaggagctaccgtcaaaggtccagcatcatcaacttgaatctgttaggtccaagttcagggagtcacttattgctgcgctgagtttggatttggatcagcagaataggagtcagtctcctgataatgtgcagtctgatggttctacagataaattcaaaccagcagcaggagatgtggtacaggatttagcggcaaacacatcaaaagatgtgtgcacaaccaattcaggtgtagccacaactgtagctcccagtagatgtgaggaaaatgagaagttaatcagtggtttagcttcagagatgaccatgagcatcaacgatgacatgcagcaaccatcaaatcaggtttcttcagaagacgacttattgggtcagtgtatggttgcagatgaacttttgcaaggtcacgggcttagttgggtttctgatcatgttgccgggatttctaaacctaacgcagaacctaatgatttaaaaaggccgcaaacttctgatgtggagtctgagtcaaaaagaataaagtctgctaatgaattagcaatggatgaggagaaatttaatcaaagggctgaaagtttggcgtttagaattgaagaggagctgttcaaattgtttcgtggggtaaataagaagtacaaggaaaagggcagatctcttttgtttaatttgaaagacaaaagcaaccctgagctaagagagagggttttgtctggagatattgcgcctgagcgcctttgttcaatgactgcagaagaacttgcctccaaagaactctcagagtggcggctggctaaagctgaggagtttgcacagatggttgtccttcctaatatggaggttgacccaaggcgtttggttagaaaaactcacaaaggagagttccaagttgaagtcgaagaaccagatggtttctcagtggaggttgaacttgggagtaatcttactaacattccatcaaaaaccgtcgaagatcaggccaagtctaatggaacagatggtaaagaagatgttcaagaaaaagacaaagcatctgatggcacttcacaagatgagggtggcagaacaggcaacaatgatatgccaggtgatgtacaatatatcgataatgagaaagctgatctcatgcaggaacttattttggatgacatgaaggacaccgtaaatctcccaccgatcccttctttagatgaattcatgcagggcttagattccgagccaccttttgttgatctctcagttgggactcctcaagaagatgtcaatgactctgaggaacctggcaccaccatggagcctgaggaccttccagagacagaggataatgcatctacaccagagaaatttgaatctgaatctgataaatcatctgcacaggttaacagcgagcctaagctagagtcaccaggagatacagcggttccaaattcggatcttactgaaccacgtgatggagagctgaataaatcctccccctcccatggcaaaggtgaagccaagaaaacgacgactgataatgcctctaatcctgactctgttcatcaggatcaggcagccagtatccctatgatacgtgagagcatatgggaaggtgcaattcagctgaacgtgtcttcactctctaatgttgttgctattttcaaaagtggtgaaaagccatcattaaaagtttggcgtagctttgttgagattaagggaagagttaaacttagtgcttttcaagaatttgtcgagcagcttcccaaatctagaagccgtgctataatgataactgagctgtgttggaaggagggttcatcagagagcggccgccaacatatcctgcagactattgatgcatacatttcagatgggagagtaggattagctgagcctgcagaaggaatagagctgtacctgtgcccttctcatgggaaaaccgtggaaatcctctcacggcacttgccaaaggagcaccaggagagccttgctgtggcgggatcatccttcatcggagtcgtcgtatggcggaggcccgacattcctagggtacccacctcccgccacagacatgatggttccaaaaggcagtcgatcctagggaagccaccggttacaaatccagcagccgcaaggccctccctacctctcaactcttatggtgcgccaccaggctttcccaaccagcgccaccaggaggaggaagatgtagctgacgatgcccctccgggctttggacccggtgttgctagggatgaggatgatcttcctgaatttaattttgttaatccgacacaccatgctgctaatgtaactgcgcgtgcctacatgggtcggccacatgtaccaccaccctccgctcgcccagcagagcaaatgagggaactggttcagaagtatggtaaaagatcatctgttcaagccccacgtacctgggatgacgatgacgacgacataccagagtggaaccccagccagacgattaaacagccaccgccactgcctcacgccccacagcaacagccgttgcctccacctcccgtccagcagatggacgcctaccagcagcagtaccacatcacaagtgcagtgcagcctcaggttcccgtcgcatcgctgacccatgcctacctccagatccagcagcctgggcaggcatggcagcagcctagcaatccttggtggccggcgcagggagttgctgccgctgccgcacagatgacgaacattgtacatcatcaaccacagtatggtgtagtgcctggcagtagcggcgtccagggctacgactatagcagtgcgagtggtatggcatggaggccgagataggacactgtaaaattcagctggttttcttctgtagctgtggtctacctgactagcgggtgttttttattcccttttttttggttagctgttcatgtaagtatatgagtggtgttcgcccgtacgaaggatctaatctggatggactagatagttgctggctgtatccgtctatccagcaatccgttttgaacagtagtctgtcttcagctaggcgctgccagcaataacaataatgtaccgcaaagtttctgaactatatttatacatttcatggcatttggtgggac

SEQ ID NO: 45911 - DNA, 3677 bp, Zea Mays
ccgcagcagccagcagcatgggaatagacactctttacagacctgctcgcccgtctcgtccacacgcaaccacaaatcaacgagacctgcatacatcgataaccctaaaaccccaaatcgcccatttcccgattcgcatcgccgccgccgccgcggggcttaccggctggtgccgccgagcgctgggctcaccgcgggccgacgccaccgccccacgggccacggcttccctcgatatgtctgcattttgaagtttggtaaatagcattgttatatgtgccaagagttttgggagttactggcataatggaattctcaaagcaagggcaggcacccatgccaaacaacatcggactacaaccgctgccctcttcaaatgtccaatctaatcaaacagagtatccatctctgttttatccatcatcattgcctggtgactggagttcacatatgggaacctcagtaccagttagctcatattatattgtccccatgaatcagcaatcagtccagctagttgcttctccaaaggttcaaatgctgaaatctccatcattccagtcatctaataagcggtctgcacagaaggagctaccgtcaaaggtccagcatcatcaacttgaatctgttaggtccaagttcagggagtcacttattgctgcgctgagtttggatttggatcagcagaataggagtcagtctcctgataatgtgcagtctgatggttctacagataaattcaaaccagcagcaggagatgtggtacaggatttagcggcaaacacatcaaaagatgtgtgcacaaccaattcaggtgtagccacaactgtagctcccagtagatgtgaggaaaatgagaagttaatcagtggtttagcttcagagatgaccatgagcatcaacgatgacatgcagcaaccatcaaatcaggtttcttcagaagacgacttattgggtcagtgtatggttgcagatgaacttttgcaaggtcacgggcttagttgggtttctgatcatgttgccgggatttctaaacctaacgcagaacctaatgatttaaaaaggccgcaaacttctgatgtggagtctgagtcaaaaagaataaagtctgctaatgaattagcaatggatgaggagaaatttaatcaaagggctgaaagtttggcgtttagaattgaagaggagctgttcaaattgtttcgtggggtaaataagaagtacaaggaaaagggcagatctcttttgtttaatttgaaagacaaaagcaaccctgagctaagagagagggttttgtctggagatattgcgcctgagcgcctttgttcaatgactgcagaagaacttgcctccaaagaactctcagagtggcggctggctaaagctgaggagtttgcacagatggttgtccttcctaatatggaggttgacccaaggcgtttggttagaaaaactcacaaaggagagttccaagttgaagtcgaagaaccagatggtttctcagtggaggttgaacttgggagtaatcttactaacattccatcaaaaaccgtcgaagatcaggccaagtctaatggaacagatggtaaagaagatgttcaagaaaaagacaaagcatctgatggcacttcacaagatgagggtggcagaacaggcaacaatgatatgccaggtgatgtacaatatatcgataatgagaaagctgatctcatgcaggaacttattttggatgacatgaaggacaccgtaaatctcccaccgatcccttctttagatgaattcatgcagggcttagattccgagccaccttttgttgatctctcagttgggactcctcaagaagatgtcaatgactctgaggaacctggcaccaccatggagcctgaggaccttccagagacagaggataatgcatctacaccagagaaatttgaatctgaatctgataaatcatctgcacaggttaacagcgagcctaagctagagtcaccaggagatacagcggttccaaattcggatcttactgaaccacgtgatggagagctgaataaatcctccccctcccatggcaaaggtgaagccaagaaaacgacgactgataatgcctctaatcctgactctgttcatcaggatcaggcagccagtatccctatgatacgtgagagcatatgggaaggtgcaattcagctgaacgtgtcttcactctctaatgttgttgctattttcaaaagtggtgaaaagccatcattaaaagtttggcgtagctttgttgagattaagggaagagttaaacttagtgcttttcaagaatttgtcgagcagcttcccaaatctagaagccgtgctataatgataactgagctgtgttggaaggagggttcatcagagagcggccgccaacatatcctgcagactattgatgcatacatttcagatgggagagtaggattagctgagcctgcagaaggaatagagctgtacctgtgcccttctcatgggaaaaccgtggaaatcctctcacggcacttgccaaaggagcaccaggagagccttgctgtggcgggatcatccttcatcggagtcgtcgtatggcggaggcccgacattcctagggtacccacctcccgccacagacatgatggttccaaaaggcagtcgatcctagggaagccaccggttacaaatccagcagccgcaaggccctccctacctctcaactcttatggtgcgccaccaggctttcccaaccagcgccaccaggaggaggaagatgtagctgacgatgcccctccgggctttggacccggtgttgctagggatgaggatgatcttcctgaatttaattttgttaatccgacacaccatgctgctaatgtaactgcgcgtgcctacatgggtcggccacatgtaccaccaccctccgctcgcccagcagagcaaatgagggaactggttcagaagtatggtaaaagatcatctgttcaagccccacgtacctgggatgacgatgacgacgacataccagagtggaaccccagccagacgattaaacagccaccgccactgcctcacgccccacagcaacagccgttgcctccacctcccgtccagcagatggacgcctaccagcagcagtaccacatcacaagtgcagtgcagcctcaggttcccgtcgcatcgctgacccatgcctacctccagatccagcagcctgggcaggcatggcagcagcctagcaatccttggtggccggcgcagggagttgctgccgctgccgcacagatgacgaacattgtacatcatcaaccacagtatggtgtagtgcctggcagtagcggcgtccagggctacgactatagcagtgcgagtggtatggcatggaggccgagataggacactgtaaaattcagctggttttcttctgtagctgtggtctacctgactagcgggtgttttttattcccttttttttggttagctgttcatgtaagtatatgagtggtgttcgcccgtacgaaggatctaatctggatggactagatagttgctggctgtatccgtctatccagcaatccgttttgaacagtagtctgtcttcagctaggcgctgccagcaataacaataatgtaccgcaaagtttctgaactatatttatacatttcatggcatttggtgggac

SEQ ID NO: 45912 - DNA, 2656 bp, Zea Mays
ccgcagcagccagcagcatgggaatagacactctttacagacctgctcgcccgtctcgtccacacgcaaccacaaatcaacgagacctgcatacatcgataaccctaaaaccccaaatcgcccatttcccgattcgcatcgccgccgccgccgcggggcttaccggctggtgccgccgagcgctgggctcaccgcgggccgacgccaccgccccacgggccacggcttccctcgatatgtctgcattttgaagtttggtaaatagcattgttatatgtgccaagagttttgggagttactggcataatggaattctcaaagcaagggcaggcacccatgccaaacaacatcggactacaaccgctgccctcttcaaatgtccaatctaatcaaacagagtatccatctctgttttatccatcatcattgcctggtgactggagttcacatatgggaacctcagtaccagttagctcatattatattgtccccatgaatcagcaatcagtccagctaggtgcttcgaggccagaggtttcacatccggcacaacctttgctaagtagggtatcattgaggccaccccagcaggtgctaaatattcaaacatctttgccagcaatggctggatcacaaccctcaccatctatggcaggcaggaaatcacaacagaaagttgcttctccaaaggttcaaatgctgaaatctccatcattccagtcatctaataagcggtctgcacagaaggagctaccgtcaaaggtccagcatcatcaacttgaatctgttaggtccaagttcagggagtcacttattgctgcgctgagtttggatttggatcagcagaataggagtcagtctcctgataatgtgcagtctgatggttctacagataaattcaaaccagcagcaggagatgtggtacaggatttagcggcaaacacatcaaaagatgtgtgcacaaccaattcaggtgtagccacaactgtagctcccagtagatgtgaggaaaatgagaagttaatcagtggtttagcttcagagatgaccatgagcatcaacgatgacatgcagcaaccatcaaatcaggtttcttcagaagacgacttattgggtcagtgtatggttgcagatgaacttttgcaaggtcacgggcttagttgggtttctgatcatgttgccgggatttctaaacctaacgcagaacctaatgatttaaaaaggccgcaaacttctgatgtggagtctgagtcaaaaagaataaagtctgctaatgaattagcaatggatgaggagaaatttaatcaaagggctgaaagtttggcgtttagaattgaagaggagctgttcaaattgtttcgtggggtaaataagaagtacaaggaaaagggcagatctcttttgtttaatttgaaagacaaaagcaaccctgagctaagagagagggttttgtctggagatattgcgcctgagcgcctttgttcaatgactgcagaagaacttgcctccaaagaactctcagagtggcggctggctaaagctgaggagtttgcacagatggttgtccttcctaatatggaggttgacccaaggcgtttggttagaaaaactcacaaaggagagttccaagttgaagtcgaagaaccagatggtttctcagtggaggttgaacttgggagtaatcttactaacattccatcaaaaaccgtcgaagatcaggccaagtctaatggaacagatggtaaagaagatgttcaagaaaaagacaaagcatctgatggcacttcacaagatgagggtggcagaacaggcaacaatgatatgccaggtgatgtacaatatatcgataatgagaaagctgatctcatgcaggaacttattttggatgacatgaaggacaccgtaaatctcccaccgatcccttctttagatgaattcatgcagggcttagattccgagccaccttttgttgatctctcagttgggactcctcaagaagatgtcaatgactctgaggaacctggcaccaccatggagcctgaggaccttccagagacagaggataatgcatctacaccagagaaatttgaatctgaatctgataaatcatctgcacaggttaacagcgagcctaagctagagtcaccaggagatacagcggttccaaattcggatcttactgaaccacgtgatggagagctgaataaatcctccccctcccatggcaaaggtgaagccaagaaaacgacgactgataatgcctctaatcctgactctgttcatcaggatcaggcagccagtatccctatgatacgtgagagcatatgggaaggtgcaattcagctgaacgtgtcttcactctctaatgttgttgctattttcaaaagtggtgaaaagccatcattaaaagtttggcgtagctttgttgagattaagggaagagttaaacttagtgcttttcaagaatttgtcgagcagcttcccaaatctagaagccgtgctataatggaaagaaagtttgaaactgtcctgatgaggcccatacactccagtaaaccaccaagcagcaccagactcatcctggaattgaactgatatcgaataatcttttataaaagacgcaaccgaggagaaagtaccatcacgcccaagcaat

SEQ ID NO: 45913 - DNA, 5698 bp, Zea Mays
ctcccccacgcactaatcaccttccccgacgagcattagcacgcgcaggtatttatacctcgtcgccacctcctcctcattcatcagacactacgaacatctctccctctcccttcctcttcttcacggagagcagcaagctacacgcctagagctacaggcctacagcaaaaagacaaagaacacagagtcaagcactcaagctcaagcagggagaagtgttcgtcaggaaagacaaaaaaacggagggggtttgcatcgccggcgggaaagaaaaaaaaaaccgaaccgaggccctgagggcgcgcgaggatggacttagtgcagatggggagcatcgccggcgggagcatgcggcggacggcgtcgtcgtggcgggcgtccgggcggagcgacgcgttcggccggtccgtgcgggaggaggacgacgaggaggcgctgcgctgggcggccatcgagaagctgcccacctacgaccgcatgcgcaagggcatcctcacggggaacgcggccggcgccggcgtcgaggaggtggacatccaggggctcggcatgcaggagcgcaagaacctcatcgagcgcctcgtgcgcaccgccgaggaggacaacgagcgcttcctgctcaagctccgcgaccgcatggagctggttgggatcgataatccgacgatagaggtgcgttttgagaacctgaacatcgacgccgaggcctacgtcggcaaccgaggtgtccccacgatgaccaacttcttctccaacaaagtcatggatgtactaagtgctatgcacatcgtctctagcgggaagaggcctgtctccatccttcacgatatcagtggggtcataagacccggcagaatgtccttgctgcttggccctcctggatccgggaaaacaagtctacttctggctttgtcagggaaacttgactccaatctgaaggtgtcaggaagagtaacttacaatggtcatgacatggatgaatttgtccctcagaggacatcggcgtacatcgggcagcacgatgttcacgtcggcgaaatgacggtccgggaaacacttgccttctccgcaagatgtcaaggagtcggaacacgttatgacatgcttactgaactttcaagaagggagaaagaagccaacattaaaccagatcctgatgtcgatgtttacatgaaggctatctccgtggaaggtcaggagagcgtggttacagattacatcctcaagattctgggtctggagatctgtgcggatacaatggttggagactctatgatcagaggtatctcaggaggacaaaagaagcgtgtcactaccggcgagatgcttgttggtccagctaaggcgctattcatggatgaaatctccaccggcctggacagctccacaacatatcagatcgtcaactctctaaggcagtcggtccacatccttggtggaactgcacttatcgcattgcttcagcctgcgcctgaaacatacgagctcttcgatgacattgttctcctctcggagggccaaattgtgtaccagggtcctcgggagaatgtcctggaattttttgaggtcatgggcttcaaatgtcctgagagaaaaggtgttgcagacttcttgcaagaagttacatctaggaaggatcagcaccagtactggtgtagaagagacgagccatacagatacatctcagttaacgacttttcagaggcattcaaagcattccatgttggccgtaagctgggatcagatctcaaggtgcccttcgatcgcaccaggaaccatcctgcagctctcacaacgtcaaagtatggtatcagcaagatggaacttctcagagcatgcttctctagggagtggctactgatgaagaggaactcatttgtttatatcttcaaagtagtccagctcataattcttggaacaattgcaatgacggtcttcctgcgcacaacaatgcatcgacgtggtgtcgaagatggggtgatatttctgggcgccatgttccttggactagtcacacatttgttcaatggttttgctgagctcgccatgagtatcgcaaagctgccgatattttataagcagagggacctcctcttctatccatcatgggcatatgcatcgcctacatggttgctaaagataccaatatcattcttggaatgtgctgtgtggatcggcatgacttactatgtcattggctttgatccaagcatcgaaaggttctttcgccattaccttctgcttgtactagtcagccagatggcatctggtcttttccggcttcttgctgcactaggaagagaaatggttgtcgcagacacatttgggtcattcgcgcagcttgttcttctgattcttggtggcttcttgatagcaagagataacattaaaaaatggtggatctggggctactggtcctcccctctgatgtatgcccagaatgccgtagcggtgaatgagttccttggccatagctggcagatggttgtcgataggacacatagcaacgacacactcggtgttcaaatcctaaaggcccgtggcatttttgtcgatccaaactggtattggattggtgttggtgcattgcttgggtatatcatgctcttcaacgtactcttcgttctgttccttgattggcttggcccacttggaaaaggtcaggccgttgtttctgaagaggaactgagggagaagcatgtaaaccgtactggtcaaaatgttgagttgctgcctcttggaacagcttcccagaatccgccttcagatggaagaggagaaattgctggagctgaaagcaggaagagaggaatggtacttccatttacgccgttgtccatcacctttgacaatatcaaatactcggtggacatgcctcaggaaatgaaagataaaggtattactgaagatcggctactgctgctgaagggtgtaagcggagccttcagaccaggagtccttacagcactgatgggagtcagtggagcgggtaaaactaccctgatggatgtattggcgggaaggaaaactggtggtcacattgaaggagatatttcaatctctggatacccaaagaaacaagagacctttgctcggattgctggctactgtgagcaaaatgatattcattctccacatgtcactgtttatgaatccctcctgtactccgcatggctccggttgccccatgaagtggattcagaagcaagaaagatgtttgtggaagaagtcatggaactcgtggaattgacaccactgaggggagcattggtaggactgccaggagtaaatggtttatccacagaacagcggaagagactcactattgctgttgagctcgtggccaacccatccatcatattcatggacgaaccaacttctggactagatgctagggcagctgcaattgtgatgaggacagtccgaaacacggtggacaccggaaggacggttgtctgcacaatccaccagcctagcattgatatctttgaagcttttgatgagctatttctgatgaaacggggaggggaagaaatatatgtcggacctttgggacgcaactcatgccatctaattaactactttgagggaatagaaggagtaaagaaaatcaaggatggttacaaccctgcaacatggatgttggaagtgaccaccttagctcaagaagatatccttgggatcaactttgctgaagtatacagaaactctgacctataccggaggaataaagatttgattagtgaactaagcacaccaccaccagggtccaaggacttgtacttcccaacccagtactcacagtccttcctcacacaatgcatggcttgcctgtggaagcagcacaagtcttactggagaaatccatcatataccgcaactaggatcttcttcacaacagttattgctctcatcttcggaactatcttcttaaacttgggaaagaaaattggcactaggcaggaccttttcaattctttggggtccatgtatgcagcagttcttttcattggaattcagaatggtcaaactgtgcagccaattgtggatgtcgagcgaacagttttctaccgagaaaaggcagctgggatgtactctgctctaccctatgcttttgcacaggttcttattgagatcccacacatcttccttcagacagttgtgtatggtctcattgtctacagcctgattggctttgattggacagttgcaaagttcttctggtatatgttcttcatgttcttcaccttcatgtacttcacattttatggaatgatggcagtcgccatgacaccaaacagcgacattgcggctatagtctcaactgcattctacgcaatatggaacatctttgccggcttccttatcccccgcccgaggataccaatatggtggagatggtactcgtgggcttgcccagtggcttggacactatatggacttgttgcctcacaatttggagacatcgcagacatcaggctggaagatgacggggaactagtgaaagatttcgtcaacagattctttggattcgagcatgacaacttgggttatgtagctaccgctgttgttggattcactgttctctttgctttcgtctttgccttctccatcaaagtcttcaacttccagagaagataagggagggcgtcatccaaaaaggatttggtgttattccagctcacttcagtatataggtcctgcagcaatgtaaagtgacgagaaagagtgtatacttagcctttgtttatttctaggaagtttgacttcattttttgtattccggccagtttggcctgtactgaacagaaaagggcttctgtgtaaattgtatgtagtagactgtgcacagctgggttcaatacttcaatgtaagatttttccattaaatttataccttttgtccaactgagactcgcctccaggaattaagtccatggcagaataacatgagaaaaaaaagaaggtagtgtctatatggctatggcagtatggctagcggatcgtgtatatatggtcatacaaaacattgttttatattgtagactatactgtttataatgcaaagtttaaaataaaagataaagtcatagggatgggtaagctgctggggataagaagggcatttgggttcagacacatactcaataaatattaggaacagtggagtattcagaagcaacacccgtgtcactgctgacggacagcaattctgccactaagtcgctaggggtcctaaattgcgtgaaatccgagcccaattggtatcctggacaacatcctaaaatgacgtgaaatctgagcccaattcaattggtatcctggaggacctggacaaggacaacatcctaaaataacttgtcgaaatttctatgcagaacccagaatggtgcaccgaccagcgaaagagccgaaacagccgaggaacgaacacgcagtgcgtgttcgcaactcgcaaacccttcctaaaccacaaaccaacctcttttccccatcggcaggcttggatcacattttgcggcgcaaaactgttcaatgggagctgcaggcagccgccgcagggcgcagctcccattgcttgcgccagccgccgcaggacgaagacggaaccgccagtccgccaccgcaggttgggtgcggattgcggaacaagccgccgaagaggcaacggcctagagcctatgtaacgcacccg

SEQ ID NO: 45914 - DNA, 1156 bp, Zea Mays
cttgatttcgtttatgatcatactatcaaaggcaagtgttatggtttaaaaactttcactcaccccagagctgctgagcaagcaattgcaggcatggacggcaagaaattaggcaatcgtattattcgagtaaatgaagtgcgtacaagaggtccccgagattttggtcgagatggttttagacgagatccaagaaggtatggtagagatccatactgggacagaagggatagggaacagagctatgatcgtgaaagagatccctaccatgacagggatagtgatagatcccgcgagcatgatagagaaagagattatgagcatggtggctttaatagagaagttgactatcccatggatcgagatcatgaagtagacgacatacatcctagagaacatgatcgtgcagcagaaacacataatatggattcagataatgacaaatataaggaacatggatcaagaaaaaggttcagccacccaaaaggtcgtgatagcaaagatttatcgagttccagtgatcttcaaaatgatgttagccagattaaggataaaatctctgcgaaaggacaacacattgcagatttgcagaagaaagctcagaaattagaggacgaactggctgctgcacggaaagtctcttcagaacgacaattagctgttacagacctgtacaaacattttcttcaactccaagactacaacgatagggtcaaaacagctgaacataggctgcagtctcttgttgacgctgccatggccgagcttgacatggccgaagatgctactaccagagatggctcgatgtatgagaacggcgtggtttgaacacccaaagggggctgccagctgtcatgtcacggcttgtgaggtttactaatttgttagatttgtagtttggatttgccatgtataatagaactgtactgtaactagaaacgggaaaatgttgtgtaaggatcagggaatgaatggctgcacagtgcacatttgctatggcttgtttttttttttcaaagttgaatttattagccggcctgactattgctgatacggtatgatctgccctaatatcagagctgttcagttaggcaggtttgacttgagaaacgttcgtgttctgtttgtcaatcacatatatcatgctggcttgttg

SEQ ID NO: 45915 - DNA, 1150 bp, Zea Mays
cttgatttcgtttatgatcatactatcaaaggcaagtgttatggtttaaaaactttcactcaccccagagctgctgagcaagcaattgcaggcatggacggcaagaaattaggcaatcgtattattcgagtaaatgaagtgcgtacaagaggtccccgagattttggtcgagatggttttagacgagatccaagaaggtatggtagagatccatactgggacagaagggatagggaacagagctatgatcgtgaaagagatccctaccatgacagggatagtgatagatcccgcgagcatgatagagaaagagattatgagcatggtggctttaatagagaagttgactatcccatggatcgagatcatgaagtagacgacatacatcctagagaacatgatcgtgcagcagaaacacataatatggattcagataatgacaaatataaggaacatggatcaagaaaaagccacccaaaaggtcgtgatagcaaagatttatcgagttccagtgatcttcaaaatgatgttagccagattaaggataaaatctctgcgaaaggacaacacattgcagatttgcagaagaaagctcagaaattagaggacgaactggctgctgcacggaaagtctcttcagaacgacaattagctgttacagacctgtacaaacattttcttcaactccaagactacaacgatagggtcaaaacagctgaacataggctgcagtctcttgttgacgctgccatggccgagcttgacatggccgaagatgctactaccagagatggctcgatgtatgagaacggcgtggtttgaacacccaaagggggctgccagctgtcatgtcacggcttgtgaggtttactaatttgttagatttgtagtttggatttgccatgtataatagaactgtactgtaactagaaacgggaaaatgttgtgtaaggatcagggaatgaatggctgcacagtgcacatttgctatggcttgtttttttttttcaaagttgaatttattagccggcctgactattgctgatacggtatgatctgccctaatatcagagctgttcagttaggcaggtttgacttgagaaacgttcgtgttctgtttgtcaatcacatatatcatgctggcttgttg

SEQ ID NO: 45916 - DNA, 2324 bp, Zea Mays
cttgatttcgtttatgatcatactatcaaaggcaagtgttatggtttaaaaactttcactcaccccagagctgctgagcaagcaattgcaggcatggacggcaagaaattaggcaatcgtattattcgagtaaatgaagtgcgtacaagaggtccccgagattttggtcgagatggttttagacgagatccaagaaggtatggtagagatccatactgggacagaagggatagggaacagagctatgatcgtgaaagagatccctaccatgacagggatagtgatagatcccgcgagcatgatagagaaagagattatgagcatggtggctttaatagagaagttgactatcccatggatcgagatcatgaagtagacgacatacatcctagagaacatgatcgtgcagcagaaacacataatatggattcagataatgacaaatataaggaacatggatcaagaaaaaggttcaggtgccatgttaattttgtttttcatagtggagttatgttggtattggagaccacggtggctatttttaatatttaaacgaaaacaacattgtgtttgatatattgatgtgcatattttaggagaaatatttactgagtgcttaattgatgttcttggtccgtttgaaattaatttgctagagcatctcttagttcttaacttaggtgtcacatttcaagatcttggaaagtacaattcattgattgtagcttgtagctatgttgtatactctctattcctaattgcaagatgtttttccttttctagatacatcacttttgttatgcacttaactgtacactgtctctagatacatagtacaagcaatgtagctagaaaagaacgaaatgtcttacaatttggaaggggggagagtagttcaataagaatagggtcatattcaccaacggcatttttagtgatatttatatgtttccctgcattactctctctatccactcaattattttacgctaatatagtgaatactggctgcacaattagaatgatgggcatgtttgatgatttgtttgccctaacggtaaaaaatcttgtatgctgactagtggccttgcagattgcgtaaacttataaagtactacacagcatcattattatgctgaaactgggttcattattattttttgggttaaatgcatcggtagcccctgaacttgtcaatgaatggcactttggtccatgaactttaaaaatgcatttttaggtccttgaacttgttaaatgatgtatcacagatccctaaacttgaaaaaatggtgcatcacaggtctttttttagaccatgccaatcactgttatgtgccacttaacaaattcaagggcctaaaaatgtattttcaaagtccgtggatctaattgacatccctcgataagttcagggactgctcatgcatttagctctttttttacaaggaactgggtacattattagagaccttgttttgttacccttattgtgaaatctacatcattgttaagtccaaattttaatgtactgactactgtctatttataaagaaaggttgtaccactatgggaaatatttcatgggtcaactatagcccttagaaaaaatgggcatttattttcctaatgttctctatgcagccacccaaaaggtcgtgatagcaaagatttatcgagttccagtgatcttcaaaatgatgttagccagattaaggataaaatctctgcgaaaggacaacacattgcagatttgcagaagaaagctcagaaattagaggacgaactggctgctgcacggaaagtctcttcagaacgacaattagctgttacagacctgtacaaacattttcttcaactccaagactacaacgatagggtcaaaacagctgaacataggctgcagtctcttgttgacgctgccatggccgagcttgacatggccgaagatgctactaccagagatggctcgatgtatgagaacggcgtggtttgaacacccaaagggggctgccagctgtcatgtcacggcttgtgaggtttactaatttgttagatttgtagtttggatttgccatgtataatagaactgtactgtaactagaaacgggaaaatgttgtgtaaggatcagggaatgaatggctgcacagtgcacatttgctatggcttgtttttttttttcaaagttgaatttattagccggcctgactattgctgatacggtatgatctgccctaatatcagagctgttcagttaggcaggtttgacttgagaaacgttcgtgttctgtttgtcaatcacatatatcatgctggcttgttg

SEQ ID NO: 45917 - DNA, 1852 bp, Zea Mays
cttgatttcgtttatgatcatactatcaaaggcaagtgttatggtttaaaaactttcactcaccccagagctgctgagcaagcaattgcaggcatggacggcaagaaattaggcaatcgtattattcgagtaaatgaagtgcgtacaagaggtccccgagattttggtcgagatggttttagacgagatccaagaaggtatggtagagatccatactgggacagaagggatagggaacagagctatgatcgtgaaagagatccctaccatgacagggatagtgatagatcccgcgagcatgatagagaaagagattatgagcatggtggctttaatagagaagttgactatcccatggatcgagatcatgaagtagacgacatacatcctagagaacatgatcgtgcagcagaaacacataatatggattcagataatgacaaatataaggaacatggatcaagaaaaagccacccaaaaggtcgtgatagcaaagatttatcgagttccagtgatcttcaaaatgatgggaaacaccagttggataaaactattcagatgcgtgaggaccttgaaaatgaggcacgccatttccttaaaggccttgttctgtgttagtttgatgtggaaaccatagaatcagtggacactatcttggcgtcggtgtaaaatcatgatggatttatttccttgccagagtccccacttaagttaacttgcctacattggtttgaagatgaaaacatgctaaatgtaaatgtgaaagtaatcaaagttctccaggcttaatggatgtagatttatggatagtgatgacctgcagaattagaacatgaactcaattgcatttgcgaggtccaaaaaggataaatggctgttaaatctgtagtcacatttaggatttatcttttgcttgacttatacagaatttttcacatttagcccagttttttttgtacactggcatgcttgggtacctcagatgacagccatgcattggtcactgaatgtgcatgccttatttactcagaaaagcttcacaatcagttgcctattgcattacaatatatggtattatcttttcagctgaagttatatagtacatgggatgcatgatccatgaaccatgatacatagactgatagtacactcagttactttttagataggcatgagtacttgtgtccatgatttaactgtttcttgcattttatattatgagctttgcaggttagccagattaaggataaaatctctgcgaaaggacaacacattgcagatttgcagaagaaagctcagaaattagaggacgaactggctgctgcacggaaagtctcttcagaacgacaattagctgttacagacctgtacaaacattttcttcaactccaagactacaacgatagggtcaaaacagctgaacataggctgcagtctcttgttgacgctgccatggccgagcttgacatggccgaagatgctactaccagagatggctcgatgtatgagaacggcgtggtttgaacacccaaagggggctgccagctgtcatgtcacggcttgtgaggtttactaatttgttagatttgtagtttggatttgccatgtataatagaactgtactgtaactagaaacgggaaaatgttgtgtaaggatcagggaatgaatggctgcacagtgcacatttgctatggcttgtttttttttttcaaagttgaatttattagccggcctgactattgctgatacggtatgatctgccctaatatcagagctgttcagttaggcaggtttgacttgagaaacgttcgtgttctgtttgtcaatcacatatatcatgctggcttgttg

SEQ ID NO: 45918 - DNA, 1858 bp, Zea Mays
cttgatttcgtttatgatcatactatcaaaggcaagtgttatggtttaaaaactttcactcaccccagagctgctgagcaagcaattgcaggcatggacggcaagaaattaggcaatcgtattattcgagtaaatgaagtgcgtacaagaggtccccgagattttggtcgagatggttttagacgagatccaagaaggtatggtagagatccatactgggacagaagggatagggaacagagctatgatcgtgaaagagatccctaccatgacagggatagtgatagatcccgcgagcatgatagagaaagagattatgagcatggtggctttaatagagaagttgactatcccatggatcgagatcatgaagtagacgacatacatcctagagaacatgatcgtgcagcagaaacacataatatggattcagataatgacaaatataaggaacatggatcaagaaaaaggttcagccacccaaaaggtcgtgatagcaaagatttatcgagttccagtgatcttcaaaatgatgggaaacaccagttggataaaactattcagatgcgtgaggaccttgaaaatgaggcacgccatttccttaaaggccttgttctgtgttagtttgatgtggaaaccatagaatcagtggacactatcttggcgtcggtgtaaaatcatgatggatttatttccttgccagagtccccacttaagttaacttgcctacattggtttgaagatgaaaacatgctaaatgtaaatgtgaaagtaatcaaagttctccaggcttaatggatgtagatttatggatagtgatgacctgcagaattagaacatgaactcaattgcatttgcgaggtccaaaaaggataaatggctgttaaatctgtagtcacatttaggatttatcttttgcttgacttatacagaatttttcacatttagcccagttttttttgtacactggcatgcttgggtacctcagatgacagccatgcattggtcactgaatgtgcatgccttatttactcagaaaagcttcacaatcagttgcctattgcattacaatatatggtattatcttttcagctgaagttatatagtacatgggatgcatgatccatgaaccatgatacatagactgatagtacactcagttactttttagataggcatgagtacttgtgtccatgatttaactgtttcttgcattttatattatgagctttgcaggttagccagattaaggataaaatctctgcgaaaggacaacacattgcagatttgcagaagaaagctcagaaattagaggacgaactggctgctgcacggaaagtctcttcagaacgacaattagctgttacagacctgtacaaacattttcttcaactccaagactacaacgatagggtcaaaacagctgaacataggctgcagtctcttgttgacgctgccatggccgagcttgacatggccgaagatgctactaccagagatggctcgatgtatgagaacggcgtggtttgaacacccaaagggggctgccagctgtcatgtcacggcttgtgaggtttactaatttgttagatttgtagtttggatttgccatgtataatagaactgtactgtaactagaaacgggaaaatgttgtgtaaggatcagggaatgaatggctgcacagtgcacatttgctatggcttgtttttttttttcaaagttgaatttattagccggcctgactattgctgatacggtatgatctgccctaatatcagagctgttcagttaggcaggtttgacttgagaaacgttcgtgttctgtttgtcaatcacatatatcatgctggcttgttg

SEQ ID NO: 45919 - DNA, 877 bp, Zea Mays
cttgatttcgtttatgatcatactatcaaaggcaagtgttatggtttaaaaactttcactcaccccagagctgctgagcaagcaattgcaggcatggacggcaagaaattaggcaatcgtattattcgagtaaatgaagtgcgtacaagaggtccccgagattttggtcgagatggttttagacgagatccaagaagccacccaaaaggtcgtgatagcaaagatttatcgagttccagtgatcttcaaaatgatgttagccagattaaggataaaatctctgcgaaaggacaacacattgcagatttgcagaagaaagctcagaaattagaggacgaactggctgctgcacggaaagtctcttcagaacgacaattagctgttacagacctgtacaaacattttcttcaactccaagactacaacgatagggtcaaaacagctgaacataggctgcagtctcttgttgacgctgccatggccgagcttgacatggccgaagatgctactaccagagatggctcgatgtatgagaacggcgtggtttgaacacccaaagggggctgccagctgtcatgtcacggcttgtgaggtttactaatttgttagatttgtagtttggatttgccatgtataatagaactgtactgtaactagaaacgggaaaatgttgtgtaaggatcagggaatgaatggctgcacagtgcacatttgctatggcttgtttttttttttcaaagttgaatttattagccggcctgactattgctgatacggtatgatctgccctaatatcagagctgttcagttaggcaggtttgacttgagaaacgttcgtgttctgtttgtcaatcacatatatcatgctggcttgttg

SEQ ID NO: 45920 - DNA, 1000 bp, Zea Mays
cttgatttcgtttatgatcatactatcaaaggcaagtgttatggtttaaaaactttcactcaccccagagctgctgagcaagcaattgcaggcatggacggcaagaaattaggcaatcgtattattcgagtaaatgaagtgcgtacaagaggtccccgagattttggtcgagatggttttagacgagatccaagaaggtatggtagagatccatactgggacagaagggatagggaacagagctatgatcgtgaaagagatccctaccatgacagggatagtgatagatcccgcgagcatgatagagaaagagattatgagcatggtggctttaatagagaagttgactatcccatggatcgagatcatgaagtagacgacatacatcctagagaacatgatcgtgcagcagaaacacataatatggattcagataatgacaaatataaggaacatggatcaagaaaaaggttcagccacccaaaaggtcgtgatagcaaagatttatcgagttccagtgatcttcaaaatgatgggaaacaccagttggataaaactattcagatgcgtgaggaccttgaaaatgaggttagccagattaaggataaaatctctgcgaaaggacaacacattgcagatttgcagaagaaagctcaggtgatctctgtcatggttttcaaaggattctgctgtcctcacctgccacattcctatatgagatagcccctgtttggccatctcgtagaatctcattcggggtgagttctgatgataagtaaaaaaaaaaaacaatttccgcatcaaactgcagaaattagaggacgaactggctgctgcacggaaagtctcttcagaacgacaattagctgttacagacctgtacaaacattttcttcaactccaagactacaacgatagggtcaaaacagctgaacataggctgcaggtttgcttatgttgttggcaaggtgagaacggtgcgctgatcctctgttttgat

SEQ ID NO: 45921 - DNA, 840 bp, Zea Mays
cttgatttcgtttatgatcatactatcaaaggcaagtgttatggtttaaaaactttcactcaccccagagctgctgagcaagcaattgcaggcatggacggcaagaaattaggcaatcgtattattcgagtaaatgaagtgcgtacaagaggtccccgagattttggtcgagatggttttagacgagatccaagaaggtatggtagagatccatactgggacagaagggatagggaacagagctatgatcgtgaaagagatccctaccatgacagggatagtgatagatcccgcgagcatgatagagaaagagattatgagcatggtggctttaatagagaagttgactatcccatggatcgagatcatgaagtagacgacatacatcctagagaacatgatcgtgcagcagaaacacataatatggattcagataatgacaaatataaggaacatggatcaagaaaaagccacccaaaaggtcgtgatagcaaagatttatcgagttccagtgatcttcaaaatgatgggaaacaccagttggataaaactattcagatgcgtgaggaccttgaaaatgaggttagccagattaaggataaaatctctgcgaaaggacaacacattgcagatttgcagaagaaagctcagaaattagaggacgaactggctgctgcacggaaagtctcttcagaacgacaattagctgttacagacctgtacaaacattttcttcaactccaagactacaacgatagggtcaaaacagctgaacataggctgcaggtttgcttatgttgttggcaaggtgagaacggtgcgctgatcctctgttttgat

SEQ ID NO: 45922 - DNA, 3758 bp, Zea Mays
ccgagtatccgacagtttcgccttcccgtctttccctctccccccacacccgggtcgtcgtcgtcgcggcgtgagcgtctgagcgagcgtgcgagagcgagaggggggaacacaaaaccctagcaccgtcgccgacggacgccagagtagagagatggcggtggacgaggtgaattcggtctacgtcggcagccttccctacgaggccaacgaggagatgcttcgcgacgccttcgggtactacggcaccatcgtctccgtcaaggtccgccccgctcctcccccctctagtctccgtttagccatctcccgcgtttgctatctgtcatggcctcggttggtgacaatggagcagtcacggaagctacggggattgcaacttctgctgaaagggctattgccgggtgaggaggagatgtgggattattcccatgtaatagggatgtcatggcctcggctggtgacaatggagcagtcacggaagctacggggattgcaactactgctgatggaagggttattgccgggtgaggaggagaagccatgtaaaggctgatttggtgaaacagggattaacaggagatcaggagatatgggccagcccattatatccgtgtataaatgctgtaatctgaggatggattgaacacgaacagaaatatcagaaatcaaatcacatacctgagtttgctggcgaggcttaccttgccgtcgtcggtggagtctcacgccgcagaattgctcgccgctggccaaggggcctcacaagtggtattagagccgttctcctcggagtgggtgagggagtctggtgatcaggaatcgtcgcaagcatgacgaggtggtggaagggctcggaggcgctgtacacagagataggaagaccccgaacctgcaaccttgctgcggtgttccaggagaagggagatcatggcgccagcagcgaaaccatcggtgcagacccagttcctactggaggtgatggcgggcaagtcgaaggaggaaggtgattgatgggagaagttgatggcgaagttggaggtattgacagagaaggttgcagacatggaagacatccagcagcagctgttagggcaagcggacatggccgtgatcgtagcctagaaggccgtggaggagagaatccagttggtacagcaactggatcagacggggaaggtggttgtgtaactgagattggagcaaatggctcaagacatggactcagaggatttggtgattcatcatcggaatcacagagaggatttacgatggggtgatccagaatcgagccgaagaaacagatggatgcagtctgagcactcaagattgatggctggtcgacgggttgcggtcagagaagagaaagcaatatccatactgtggcttgcctttccgaggtttgatgtatcggaactgaagattttggttgaacaagtgtattttttttggaaagcgcaggagaactgcacatcatttaatttagagaagaaaaaggtttaaaatggaccaaggtacaaagccctgaacagggctcaataaaacacctactcacacacacactacttccttccccaacaacttaggccctgtgaaggttacgcgtgagctcaatgtcggttaatgggagatggtatgagggtgaaggaggtgaaggagatttctgtgttgcagattgagaagagtatgaagggaaatgatgtgtgggcttttgctttgatggagaatataactgagactgagtttgtgcctgacagtaccatggagatgcaccagttgttggaagaatttcaggatgtgttttctgttcctactgcctaccacctcccagatcatttgatcaccatatcccactcatccctggtgccattctagtaaactctcgaccctatagatattctccctatcacaaactgaggtagaaaaacaggtggctgattattgaaatcagggctggtagtacccagtgtaagacctttggcctcaccagtattgctaatgcaaaagaaaaatggttcctggaggttttgtattgattacaggaaactgaatgatctgacaatcaaaaataggtttcctatgtctttggtggatgagattattgatgaactggttggaaccaaatatttttcaagtctagatctaactgcagggtaccaccagatcaggatgggtgaggcagatgagcacaagattgcttttaaaactcacaaaggacactatcaattcaaggtaatgccctttgggcttactaatgcccctgcaacttttcgatgtgcaataaatatggtgttggcacctttcctaaggaagtttgtgatggtatttttggatgatattctagtttatagtccaaactggcataaacatttggagcatcttagacttgtgttcactactttgaggcaacaccagtttttcttaaagaagtgtgtcttactgtcttgggaaagcaagaactcatttatctggatcatattatttcatttgaagggatggctactgacccactgaaaacagcagccatgctgcaatggcctcaacccactacggtgacagctcttaggggcttcctgggtttaacatgttgctacagatagtttgttaagggctatggtactattgccaaaccccttacaagatcgctgcagaaagggaagttccactggggagaggaggcacatcttgcatttgaaactctcaaaagggcaatgacaaccacacctgttctagctttgccagatttcacactgtcctttgtggttgaaactgatgcgtgtgatgtgggtttagggacagtcttaatgcagcaaggtagaccactggcatatttgagcaaggcccttggaagtaagaataaacatctctactatatttaaatttaaatgggagtttccccttcgtgagtcgtctcctccatcgagcgcagtgagcgaaatgaaataaaagtctaaaaatgagcgcggtgttgaggttcgaaccatcgccctccctcttctcacgcccaggttctaaccaccggagctcacaaccatctgtgttcaacaaagaatagatattgtaaatattctgaatatagaaactgcagtaacaaacgggtaactgactagtctatctatatatgagaaggaattcttggctctcattatggcagtagatagatggaggtcttgtttacaaagagctgagtttgaaataaggactggccatcagtgcctcagttttctgggagatcaggtgctccactttgaattgcaacgcaaggcaatgactaaattgatggggttacagtttaaagtggtgtacaagcagggaaaggataatgtggtggcagatgcactttccagggttggtcatttgatgtgcttacaagctgtcagtgaagtgcaacctttgtgggttcaggaaattgtaaattccatggtttaaaaggcgtcgcctaggcgacgcctaggcgtccaggcggagaaatgtcctaggcgtcggcgccgcccagagaaaactgtgtatggcgtccgcctaggcgtagtaggcgtctgggcgacgccttatcctccctgggcgtcgccttatcctctagggtttgcagacctgcgcgttttgggctttagggtttaggcgcgcgttttgggcttcttccactgtgcgcgcgcggcaaatctatttgtgcgtgcgcggctgctccctgcgcgcgcaaatctctctgtgctccctccctgcgtgcgctctctccctgcgcgcggcgactactgctcggc

SEQ ID NO: 45923 - DNA, 3083 bp, Zea Mays
ctccactcccctattccccacatcactccgcttttgcggccgcttgtggcggtgccttccacggggctgcggctgcgctccgccggagcgagcaaatatccttgcccccacgagaccctcgcacagtcgcacctctccgacgtgaccggcgccgtagaaccaccgggtcttcccttgtgctaccgtgttggcccagggattattcaagaacatggagagaaagagaaaccccattgtctttctggatgtatctgtaggtgatgagccagatgaaagaatgatctttgagttgttcgctgatgttgcaccccttgtgactgagaacttcagagctttatgcacaggtgagctgggaattggacacaagactaagaagccattatgttacaagggatcatcgttccaccgtgtcatcgaagggttcatggcacaaggaggtgacattgcgaaaggaaatgggtctggtggagaaaacatatatagtggaaaatctgcagatgaaacttgtgttctacctcatgatgatcgtggtctcttgacaacagcagatactggatccaaagctagtggctcccagttctgcattactttcaagcctaattctcatcttgacaggaagcacacagtttttggcaagcttgttgttggaagtgatgttctgaagagaatcgagcaagtagatgtgcaatcccctgattcaactcctgttgttccggttactatagtaaattgtggggagctcactgaccgtaaagatattggatctatgagaataggaattgataaaaagagggccgccaaatcaaagttgtcaaagggtatatcttctgatgaggaaagtaatgaaggacagcacaagggccgccgtaacaaatcttcaaaaaggagaaggaagaagagatatttttattcggagtcagatagctcttctgagtcggagactgaatcatctgattctgagagcgattctgatacttactcaagtgactcatctgatgtcagcagttcaagtgatgacaggcgaaggcgcagaaagagacattcgaagaaaaataaacgcaagcgttcaagaagaaagcatgaccaaaggcgtgaaagaaggcgtaggaagcgtgataggaaatcaaaacagaagtcaaaaagcaggataaagggtgacagtgaagctgaaagttcgagtgatagcagctctgaagatgctagaagcaagagacaccgccacgggcggaagtccaaggcatcatctcaagtttttgaggaaaatattgctgcagtgtctgctttgaaggatgccacgtcacctcaacaaaagagtggcataccaaacagtccagcacaagatgtctccccgctgcaaaatggggaaaactatacaaatggtgttaacgaatcaaaaattgaaaggaatgcagctgtcatgcctgttctaactggcaaccaaagcaaatctaggagccagagcatgagtgttaatcactcaatgagcaagagtatgagcatcagcccaagaagaagcccaatgaaaaggtcaattaccaccacaaagaggtcagttagcaggagccctgttcaccataatcgcagtggaagtcctgtcggtgctccccaaaaaagcgtgagcaggagttcagccagaaggcagagcatcagcaggagccctgctaggagcctcagcaagagcccacccagagatgcaagcagaagcccccacataagcaggactcctgttaaagctcacagaagaagcattagcaggagctcagctaggtccatggaacagagaagtctaagcaggagcctggagagaattcatgtacgaaaaagtgtcagcccaagaccaccattggcgaagccaaaaagcattacccgaacccctgtgacatctccattgcgaagcgttagccggagcccagctaggatttcaaggagcccacttaggccttctaggagaagccctatgagaagtccacgacggaacattcacagaagtctcagcaggagccctgcaagaatacttagaagtgtgagcagaagtccagtaagaggtggtcgacctcgccggaacattagcagaagtcccagtccacttcgcagggcattaacaccaccaaacaatggaaggagccgatctaggagtgattctcctgatgggtcacccaaacgcataagacgtggacgtggttttactcaacgctattcatttgcaagacaatatcgctcaccttccgctgatcgcttgcatcgttatggcggaagaaatgaccgtgacagatacatgggttaccggggttttcgccaccgatcacctcctcgacgttataggagcccctctagaggcagagtgtcatcgccaaggtacaggaggaggagccgaagcgcatcacgcagtcctgtccacagaggaaggagaggtgggtacaacaagagtcctgtacggagccgttcaccccccgccaggaaaaggtcacctagcgatcgtgcacggtcagtttctaggagccacctttctaggtcagtatcaaagtctccaccagtgcatcatccctccccacttgattctccatctctggagcgtgcaagtgatgggaaatctcggtccccatcaccgtctggtggaggcaagaaaggtttggtttcctacggtgatggcactcctgattcagctgggaagtaggtttccaccggatgtattgtactacctttggccattgtctcttgatcggtccagtgttacgtcactactgtagagaagagaacggttttggtccttgaggcgccccgtgtactggtgttgtcgctgtagaattgttacttaagttgtttgggatgatcgtcgttgtccttagattatcttaagacctagtactctgagcttagtttacgctcatgctgaacatgtagcagggcttcagcttaattaccattggtggaatttggatgttataatgtttgacgcatagagaatcattacattattttgatctcggagcacaataacatgtataattaataattaattccttctggaactatccaacactagcgtttctgcatgtatgcaataattcgcttggccgcgtcat

SEQ ID NO: 45924 - DNA, 3139 bp, Zea Mays
ctccactcccctattccccacatcactccgcttttgcggccgcttgtggcggtgccttccacggggctgcggctgcgctccgccggagcgagcaaatatccttgcccccacgagaccctcgcacagtcgcacctctccgacgtgaccggcgccgtagaaccaccgggtcttcccttgtgctaccgtgttggcccagggattattcaagaacatggagagaaagagaaaccccattgtctttctggatgtatctgtaggtgatgagccagatgaaagaatgatctttgagttgttcgctgatgttgcaccccttgtgactgagaacttcagagctttatgcacaggtgagctgggaattggacacaagactaagaagccattatgttacaagggatcatcgttccaccgtgtcatcgaagggttcatggcacaaggaggtgacattgcgaaaggaaatgggtctggtggagaaaacatatatagtggaaaatctgcagatgaaacttgtgttctacctcatgatgatcgtggtctcttgacaacagcagatactggatccaaagctagtggctcccagttctgcattactttcaagcctaattctcatcttgacaggaagcacacagtttttggcaagcttgttgttggaagtgatgttctgaagagaatcgagcaagtagatgtgcaatcccctgattcaactcctgttgttccggttactatagtaaattgtggggagctcactgaccgtaaagatattggatctatgagaataggaattgataaaaagagggccgccaaatcaaagttgtcaaagggtatatcttctgatgaggaaagtaatgaaggacagcacaagggccgccgtaacaaatcttcaaaaaggagaaggaagaagagatatttttattcggagtcagatagctcttctgagtcggagactgaatcatctgattctgagagcgattctgatacttactcaagtgactcatctgatgtcagcagttcaagtgatgacaggcgaaggcgcagaaagagacattcgaagaaaaataaacgcaagcgttcaagaagaaagcatgaccaaaggcgtgaaagaaggcgtaggaagcgtgataggaaatcaaaacagaagtcaaaaagcaggataaagggtgacagtgaagctgaaagttcgagtgatagcagctctgaagatgctagaagcaagagacaccgccacgggcggaagtccaaggcatcatctcaagtttttggtaatgcaatggcagtagttaatgcgacccaagcacaatcaagggacttcacaaaaaggaaaatattgctgcagtgtctgctttgaaggatgccacgtcacctcaacaaaagagtggcataccaaacagtccagcacaagatgtctccccgctgcaaaatggggaaaactatacaaatggtgttaacgaatcaaaaattgaaaggaatgcagctgtcatgcctgttctaactggcaaccaaagcaaatctaggagccagagcatgagtgttaatcactcaatgagcaagagtatgagcatcagcccaagaagaagcccaatgaaaaggtcaattaccaccacaaagaggtcagttagcaggagccctgttcaccataatcgcagtggaagtcctgtcggtgctccccaaaaaagcgtgagcaggagttcagccagaaggcagagcatcagcaggagccctgctaggagcctcagcaagagcccacccagagatgcaagcagaagcccccacataagcaggactcctgttaaagctcacagaagaagcattagcaggagctcagctaggtccatggaacagagaagtctaagcaggagcctggagagaattcatgtacgaaaaagtgtcagcccaagaccaccattggcgaagccaaaaagcattacccgaacccctgtgacatctccattgcgaagcgttagccggagcccagctaggatttcaaggagcccacttaggccttctaggagaagccctatgagaagtccacgacggaacattcacagaagtctcagcaggagccctgcaagaatacttagaagtgtgagcagaagtccagtaagaggtggtcgacctcgccggaacattagcagaagtcccagtccacttcgcagggcattaacaccaccaaacaatggaaggagccgatctaggagtgattctcctgatgggtcacccaaacgcataagacgtggacgtggttttactcaacgctattcatttgcaagacaatatcgctcaccttccgctgatcgcttgcatcgttatggcggaagaaatgaccgtgacagatacatgggttaccggggttttcgccaccgatcacctcctcgacgttataggagcccctctagaggcagagtgtcatcgccaaggtacaggaggaggagccgaagcgcatcacgcagtcctgtccacagaggaaggagaggtgggtacaacaagagtcctgtacggagccgttcaccccccgccaggaaaaggtcacctagcgatcgtgcacggtcagtttctaggagccacctttctaggtcagtatcaaagtctccaccagtgcatcatccctccccacttgattctccatctctggagcgtgcaagtgatgggaaatctcggtccccatcaccgtctggtggaggcaagaaaggtttggtttcctacggtgatggcactcctgattcagctgggaagtaggtttccaccggatgtattgtactacctttggccattgtctcttgatcggtccagtgttacgtcactactgtagagaagagaacggttttggtccttgaggcgccccgtgtactggtgttgtcgctgtagaattgttacttaagttgtttgggatgatcgtcgttgtccttagattatcttaagacctagtactctgagcttagtttacgctcatgctgaacatgtagcagggcttcagcttaattaccattggtggaatttggatgttataatgtttgacgcatagagaatcattacattattttgatctcggagcacaataacatgtataattaataattaattccttctggaactatccaacactagcgtttctgcatgtatgcaataattcgcttggccgcgtcat

SEQ ID NO: 45925 - DNA, 3054 bp, Zea Mays
ctccactcccctattccccacatcactccgcttttgcggccgcttgtggcggtgccttccacggggctgcggctgcgctccgccggagcgagcaaatatccttgcccccacgagaccctcgcacagtcgcacctctccgacgtgaccggcgccgtagaaccaccgggtcttcccttgtgaacatggagagaaagagaaaccccattgtctttctggatgtatctgtaggtgatgagccagatgaaagaatgatctttgagttgttcgctgatgttgcaccccttgtgactgagaacttcagagctttatgcacaggtgagctgggaattggacacaagactaagaagccattatgttacaagggatcatcgttccaccgtgtcatcgaagggttcatggcacaaggaggtgacattgcgaaaggaaatgggtctggtggagaaaacatatatagtggaaaatctgcagatgaaacttgtgttctacctcatgatgatcgtggtctcttgacaacagcagatactggatccaaagctagtggctcccagttctgcattactttcaagcctaattctcatcttgacaggaagcacacagtttttggcaagcttgttgttggaagtgatgttctgaagagaatcgagcaagtagatgtgcaatcccctgattcaactcctgttgttccggttactatagtaaattgtggggagctcactgaccgtaaagatattggatctatgagaataggaattgataaaaagagggccgccaaatcaaagttgtcaaagggtatatcttctgatgaggaaagtaatgaaggacagcacaagggccgccgtaacaaatcttcaaaaaggagaaggaagaagagatatttttattcggagtcagatagctcttctgagtcggagactgaatcatctgattctgagagcgattctgatacttactcaagtgactcatctgatgtcagcagttcaagtgatgacaggcgaaggcgcagaaagagacattcgaagaaaaataaacgcaagcgttcaagaagaaagcatgaccaaaggcgtgaaagaaggcgtaggaagcgtgataggaaatcaaaacagaagtcaaaaagcaggataaagggtgacagtgaagctgaaagttcgagtgatagcagctctgaagatgctagaagcaagagacaccgccacgggcggaagtccaaggcatcatctcaagtttttgaggaaaatattgctgcagtgtctgctttgaaggatgccacgtcacctcaacaaaagagtggcataccaaacagtccagcacaagatgtctccccgctgcaaaatggggaaaactatacaaatggtgttaacgaatcaaaaattgaaaggaatgcagctgtcatgcctgttctaactggcaaccaaagcaaatctaggagccagagcatgagtgttaatcactcaatgagcaagagtatgagcatcagcccaagaagaagcccaatgaaaaggtcaattaccaccacaaagaggtcagttagcaggagccctgttcaccataatcgcagtggaagtcctgtcggtgctccccaaaaaagcgtgagcaggagttcagccagaaggcagagcatcagcaggagccctgctaggagcctcagcaagagcccacccagagatgcaagcagaagcccccacataagcaggactcctgttaaagctcacagaagaagcattagcaggagctcagctaggtccatggaacagagaagtctaagcaggagcctggagagaattcatgtacgaaaaagtgtcagcccaagaccaccattggcgaagccaaaaagcattacccgaacccctgtgacatctccattgcgaagcgttagccggagcccagctaggatttcaaggagcccacttaggccttctaggagaagccctatgagaagtccacgacggaacattcacagaagtctcagcaggagccctgcaagaatacttagaagtgtgagcagaagtccagtaagaggtggtcgacctcgccggaacattagcagaagtcccagtccacttcgcagggcattaacaccaccaaacaatggaaggagccgatctaggagtgattctcctgatgggtcacccaaacgcataagacgtggacgtggttttactcaacgctattcatttgcaagacaatatcgctcaccttccgctgatcgcttgcatcgttatggcggaagaaatgaccgtgacagatacatgggttaccggggttttcgccaccgatcacctcctcgacgttataggagcccctctagaggcagagtgtcatcgccaaggtacaggaggaggagccgaagcgcatcacgcagtcctgtccacagaggaaggagaggtgggtacaacaagagtcctgtacggagccgttcaccccccgccaggaaaaggtcacctagcgatcgtgcacggtcagtttctaggagccacctttctaggtcagtatcaaagtctccaccagtgcatcatccctccccacttgattctccatctctggagcgtgcaagtgatgggaaatctcggtccccatcaccgtctggtggaggcaagaaaggtttggtttcctacggtgatggcactcctgattcagctgggaagtaggtttccaccggatgtattgtactacctttggccattgtctcttgatcggtccagtgttacgtcactactgtagagaagagaacggttttggtccttgaggcgccccgtgtactggtgttgtcgctgtagaattgttacttaagttgtttgggatgatcgtcgttgtccttagattatcttaagacctagtactctgagcttagtttacgctcatgctgaacatgtagcagggcttcagcttaattaccattggtggaatttggatgttataatgtttgacgcatagagaatcattacattattttgatctcggagcacaataacatgtataattaataattaattccttctggaactatccaacactagcgtttctgcatgtatgcaataattcgcttggccgcgtcat

SEQ ID NO: 45926 - DNA, 3807 bp, Zea Mays
ctccactcccctattccccacatcactccgcttttgcggccgcttgtggcggtgccttccacggggctgcggctgcgctccgccggagcgagcaaatatccttgcccccacgagaccctcgcacagtcgcacctctccgacgtgaccggcgccgtagaaccaccgggtcttcccttgtgggattattcaagaacatggagagaaagagaaaccccattgtctttctggatgtatctgtaggtgatgagccagatgaaagaatgatctttgagttgttcgctgatgttgcaccccttgtgactgagaacttcagagctttatgcacaggtgagctgggaattggacacaagactaagaagccattatgttacaagggatcatcgttccaccgtgtcatcgaagggttcatggcacaaggaggtgacattgcgaaaggaaatggtgagtttgcacaattagttcttcctttacattttgctatttctttcccttcccagaaaaaaagcagcaattcccctccccactttcacggcctctcattttttgtgttctcttatataccaatgttcttgtgtacgtcaacttatgggcttgcatgcacatagcactccctgtaagttgtgcagttatgggctacttatgataattgtgatgatttttgttttcatttctatatgttatcacaatgcccctctcttttgatttgatgattatgttgtgcgctcctcactagcatttgacgttcttttagattcatactcttttttaaatggagtagtttagcagtttttcatgtcatatatggttaaatggccttaatattggtattaaatttttcaagtttgcttatggttagtttgttttcatatgcaatgatttgttccaggatccagatttatactgtgcccacatttgtagattgctgtatttttgtctattaatgttacatacggtgatgcatgttaacatctttacttttttggtatatttttctgttgcacattagttctgtttgtttgatgtaaatctaccttgcatgtatagttgcagcttcatgtggtacatcttgtttttggaaatgactgattttaactatgttacagggtctggtggagaaaacatatatagtggaaaatctgcagatgaaacttgtgttctacctcatgatgatcgtggtctcttgacaacagcagatactggatccaaagctagtggctcccagttctgcattactttcaagcctaattctcatcttgacaggaagcacacagtttttggcaagcttgttgttggaagtgatgttctgaagagaatcgagcaagtagatgtgcaatcccctgattcaactcctgttgttccggttactatagtaaattgtggggagctcactgaccgtaaagatattggatctatgagaataggaattgataaaaagagggccgccaaatcaaagttgtcaaagggtatatcttctgatgaggaaagtaatgaaggacagcacaagggccgccgtaacaaatcttcaaaaaggagaaggaagaagagatatttttattcggagtcagatagctcttctgagtcggagactgaatcatctgattctgagagcgattctgatacttactcaagtgactcatctgatgtcagcagttcaagtgatgacaggcgaaggcgcagaaagagacattcgaagaaaaataaacgcaagcgttcaagaagaaagcatgaccaaaggcgtgaaagaaggcgtaggaagcgtgataggaaatcaaaacagaagtcaaaaagcaggataaagggtgacagtgaagctgaaagttcgagtgatagcagctctgaagatgctagaagcaagagacaccgccacgggcggaagtccaaggcatcatctcaagtttttgaggaaaatattgctgcagtgtctgctttgaaggatgccacgtcacctcaacaaaagagtggcataccaaacagtccagcacaagatgtctccccgctgcaaaatggggaaaactatacaaatggtgttaacgaatcaaaaattgaaaggaatgcagctgtcatgcctgttctaactggcaaccaaagcaaatctaggtttcctatacttcttcatacatcattctttgtgcttactgcttctggaagcggtgtttcatctgacattgataagcaggagccagagcatgagtgttaatcactcaatgagcaagagtatgagcatcagcccaagaagaagcccaatgaaaaggtcaattaccaccacaaagaggtcagttagcaggagccctgttcaccataatcgcagtggaagtcctgtcggtgctccccaaaaaagcgtgagcaggagttcagccagaaggcagagcatcagcaggagccctgctaggagcctcagcaagagcccacccagagatgcaagcagaagcccccacataagcaggactcctgttaaagctcacagaagaagcattagcaggagctcagctaggtccatggaacagagaagtctaagcaggagcctggagagaattcatgtacgaaaaagtgtcagcccaagaccaccattggcgaagccaaaaagcattacccgaacccctgtgacatctccattgcgaagcgttagccggagcccagctaggatttcaaggagcccacttaggccttctaggagaagccctatgagaagtccacgacggaacattcacagaagtctcagcaggagccctgcaagaatacttagaagtgtgagcagaagtccagtaagaggtggtcgacctcgccggaacattagcagaagtcccagtccacttcgcagggcattaacaccaccaaacaatggaaggagccgatctaggagtgattctcctgatgggtcacccaaacgcataagacgtggacgtggttttactcaacgctattcatttgcaagacaatatcgctcaccttccgctgatcgcttgcatcgttatggcggaagaaatgaccgtgacagatacatgggttaccggggttttcgccaccgatcacctcctcgacgttataggagcccctctagaggcagagtgtcatcgccaaggtacaggaggaggagccgaagcgcatcacgcagtcctgtccacagaggaaggagaggtgggtacaacaagagtcctgtacggagccgttcaccccccgccaggaaaaggtcacctagcgatcgtgcacggtcagtttctaggagccacctttctaggtcagtatcaaagtctccaccagtgcatcatccctccccacttgattctccatctctggagcgtgcaagtgatgggaaatctcggtccccatcaccgtctggtggaggcaagaaaggtttggtttcctacggtgatggcactcctgattcagctgggaagtaggtttccaccggatgtattgtactacctttggccattgtctcttgatcggtccagtgttacgtcactactgtagagaagagaacggttttggtccttgaggcgccccgtgtactggtgttgtcgctgtagaattgttacttaagttgtttgggatgatcgtcgttgtccttagattatcttaagacctagtactctgagcttagtttacgctcatgctgaacatgtagcagggcttcagcttaattaccattggtggaatttggatgttataatgtttgacgcatagagaatcattacattattttgatctcggagcacaataacatgtataattaataattaattccttctggaactatccaacactagcgtttctgcatgtatgcaataattcgcttggccgcgtcat

SEQ ID NO: 45927 - DNA, 3159 bp, Zea Mays
ctccactcccctattccccacatcactccgcttttgcggccgcttgtggcggtgccttccacggggctgcggctgcgctccgccggagcgagcaaatatccttgcccccacgagaccctcgcacagtcgcacctctccgacgtgaccggcgccgtagaaccaccgggtcttcccttgtgctaccgtgttggcccagggattattcaagaacatggagagaaagagaaaccccattgtctttctggatgtatctgtaggtgatgagccagatgaaagaatgatctttgagttgttcgctgatgttgcaccccttgtgactgagaacttcagagctttatgcacaggtgagctgggaattggacacaagactaagaagccattatgttacaagggatcatcgttccaccgtgtcatcgaagggttcatggcacaaggaggtgacattgcgaaaggaaatgggtctggtggagaaaacatatatagtggaaaatctgcagatgaaacttgtgttctacctcatgatgatcgtggtctcttgacaacagcagatactggatccaaagctagtggctcccagttctgcattactttcaagcctaattctcatcttgacaggaagcacacagtttttggcaagcttgttgttggaagtgatgttctgaagagaatcgagcaagtagatgtgcaatcccctgattcaactcctgttgttccggttactatagtaaattgtggggagctcactgaccgtaaagatattggatctatgagaataggaattgataaaaagagggccgccaaatcaaagttgtcaaagggtatatcttctgatgaggaaagtaatgaaggacagcacaagggccgccgtaacaaatcttcaaaaaggagaaggaagaagagatatttttattcggagtcagatagctcttctgagtcggagactgaatcatctgattctgagagcgattctgatacttactcaagtgactcatctgatgtcagcagttcaagtgatgacaggcgaaggcgcagaaagagacattcgaagaaaaataaacgcaagcgttcaagaagaaagcatgaccaaaggcgtgaaagaaggcgtaggaagcgtgataggaaatcaaaacagaagtcaaaaaggataaagggtgacagtgaagctgaaagttcgagtgatagcagctctgaagatgctagaagcaagagacaccgccacgggcggaagtccaaggcatcatctcaagtttttgaggaaaatattgctgcagtgtctgctttgaaggatgccacgtcacctcaacaaaagagtggcataccaaacagtccagcacaagatgtctccccgctgcaaaatggggaaaactatacaaatggtgttaacgaatcaaaaattgaaaggaatgcagctgtcatgcctgttctaactggcaaccaaagcaaatctaggtttcctatacttcttcatacatcattctttgtgcttactgcttctggaagcggtgtttcatctgacattgataagcaggagccagagcatgagtgttaatcactcaatgagcaagagtatgagcatcagcccaagaagaagcccaatgaaaaggtcaattaccaccacaaagaggtcagttagcaggagccctgttcaccataatcgcagtggaagtcctgtcggtgctccccaaaaaagcgtgagcaggagttcagccagaaggcagagcatcagcaggagccctgctaggagcctcagcaagagcccacccagagatgcaagcagaagcccccacataagcaggactcctgttaaagctcacagaagaagcattagcaggagctcagctaggtccatggaacagagaagtctaagcaggagcctggagagaattcatgtacgaaaaagtgtcagcccaagaccaccattggcgaagccaaaaagcattacccgaacccctgtgacatctccattgcgaagcgttagccggagcccagctaggatttcaaggagcccacttaggccttctaggagaagccctatgagaagtccacgacggaacattcacagaagtctcagcaggagccctgcaagaatacttagaagtgtgagcagaagtccagtaagaggtggtcgacctcgccggaacattagcagaagtcccagtccacttcgcagggcattaacaccaccaaacaatggaaggagccgatctaggagtgattctcctgatgggtcacccaaacgcataagacgtggacgtggttttactcaacgctattcatttgcaagacaatatcgctcaccttccgctgatcgcttgcatcgttatggcggaagaaatgaccgtgacagatacatgggttaccggggttttcgccaccgatcacctcctcgacgttataggagcccctctagaggcagagtgtcatcgccaaggtacaggaggaggagccgaagcgcatcacgcagtcctgtccacagaggaaggagaggtgggtacaacaagagtcctgtacggagccgttcaccccccgccaggaaaaggtcacctagcgatcgtgcacggtcagtttctaggagccacctttctaggtcagtatcaaagtctccaccagtgcatcatccctccccacttgattctccatctctggagcgtgcaagtgatgggaaatctcggtccccatcaccgtctggtggaggcaagaaaggtttggtttcctacggtgatggcactcctgattcagctgggaagtaggtttccaccggatgtattgtactacctttggccattgtctcttgatcggtccagtgttacgtcactactgtagagaagagaacggttttggtccttgaggcgccccgtgtactggtgttgtcgctgtagaattgttacttaagttgtttgggatgatcgtcgttgtccttagattatcttaagacctagtactctgagcttagtttacgctcatgctgaacatgtagcagggcttcagcttaattaccattggtggaatttggatgttataatgtttgacgcatagagaatcattacattattttgatctcggagcacaataacatgtataattaataattaattccttctggaactatccaacactagcgtttctgcatgtatgcaataattcgcttggccgcgtcat

SEQ ID NO: 45928 - DNA, 3460 bp, Zea Mays
ctcctccactcccctattccccacatcactccgcttttgcggccgcttgtggcggtgccttccacggggctgcggctgcgctccgccggagcgagcaaatatccttgcccccacgagaccctcgcacagtcgcacctctccgacgtgaccggcgccgtagaaccaccgggtcttcccttgtgggattattcaagaacatggagagaaagagaaaccccattgtctttctggatgtatctgtaggtgatgagccagatgaaagaatgatctttgagttgttcgctgatgttgcaccccttgtgactgagaacttcagagctttatgcacaggtgagctgggaattggacacaagactaagaagccattatgttacaagggatcatcgttccaccgtgtcatcgaagggttcatggcacaaggaggtgacattgcgaaaggaaatgggtctggtggagaaaacatatatagtggaaaatctgcaggtatcaaccttggtgtgaattcttttatatagcggagatgttgaataccaataacagaataaccttgcaaccttttatttgaggatttataatgttggttaccagtacatagtcaaatgctgtgttgttatgtgtctactgtctatattaggagtgtgttcaaattctaataatctatttcaagttactgcttttatctttttgtctgctactctgctttgctctgcggatctggagatagtatccaactgttctggtaagcactaaagcatgtagtatatctgtaatgacagtatattgtttgcatttcagatgaaacttgtgttctacctcatgatgatcgtggtctcttgacaacagcagatactggatccaaagctagtggctcccagttctgcattactttcaagcctaattctcatcttgacaggaagcacacagtttttggcaagcttgttgttggaagtgatgttctgaagagaatcgagcaagtagatgtgcaatcccctgattcaactcctgttgttccggttactatagtaaattgtggggagctcactgaccgtaaagatattggatctatgagaataggaattgataaaaagagggccgccaaatcaaagttgtcaaagggtatatcttctgatgaggaaagtaatgaaggacagcacaagggccgccgtaacaaatcttcaaaaaggagaaggaagaagagatatttttattcggagtcagatagctcttctgagtcggagactgaatcatctgattctgagagcgattctgatacttactcaagtgactcatctgatgtcagcagttcaagtgatgacaggcgaaggcgcagaaagagacattcgaagaaaaataaacgcaagcgttcaagaagaaagcatgaccaaaggcgtgaaagaaggcgtaggaagcgtgataggaaatcaaaacagaagtcaaaaagcaggataaagggtgacagtgaagctgaaagttcgagtgatagcagctctgaagatgctagaagcaagagacaccgccacgggcggaagtccaaggcatcatctcaagtttttgaggaaaatattgctgcagtgtctgctttgaaggatgccacgtcacctcaacaaaagagtggcataccaaacagtccagcacaagatgtctccccgctgcaaaatggggaaaactatacaaatggtgttaacgaatcaaaaattgaaaggaatgcagctgtcatgcctgttctaactggcaaccaaagcaaatctaggtttcctatacttcttcatacatcattctttgtgcttactgcttctggaagcggtgtttcatctgacattgataagcaggagccagagcatgagtgttaatcactcaatgagcaagagtatgagcatcagcccaagaagaagcccaatgaaaaggtcaattaccaccacaaagaggtcagttagcaggagccctgttcaccataatcgcagtggaagtcctgtcggtgctccccaaaaaagcgtgagcaggagttcagccagaaggcagagcatcagcaggagccctgctaggagcctcagcaagagcccacccagagatgcaagcagaagcccccacataagcaggactcctgttaaagctcacagaagaagcattagcaggagctcagctaggtccatggaacagagaagtctaagcaggagcctggagagaattcatgtacgaaaaagtgtcagcccaagaccaccattggcgaagccaaaaagcattacccgaacccctgtgacatctccattgcgaagcgttagccggagcccagctaggatttcaaggagcccacttaggccttctaggagaagccctatgagaagtccacgacggaacattcacagaagtctcagcaggagccctgcaagaatacttagaagtgtgagcagaagtccagtaagaggtggtcgacctcgccggaacattagcagaagtcccagtccacttcgcagggcattaacaccaccaaacaatggaaggagccgatctaggagtgattctcctgatgggtcacccaaacgcataagacgtggacgtggttttactcaacgctattcatttgcaagacaatatcgctcaccttccgctgatcgcttgcatcgttatggcggaagaaatgaccgtgacagatacatgggttaccggggttttcgccaccgatcacctcctcgacgttataggagcccctctagaggcagagtgtcatcgccaaggtacaggaggaggagccgaagcgcatcacgcagtcctgtccacagaggaaggagaggtgggtacaacaagagtcctgtacggagccgttcaccccccgccaggaaaaggtcacctagcgatcgtgcacggtcagtttctaggagccacctttctaggtcagtatcaaagtctccaccagtgcatcatccctccccacttgattctccatctctggagcgtgcaagtgatgggaaatctcggtccccatcaccgtctggtggaggcaagaaaggtttggtttcctacggtgatggcactcctgattcagctgggaagtaggtttccaccggatgtattgtactacctttggccattgtctcttgatcggtccagtgttacgtcactactgtagagaagagaacggttttggtccttgaggcgccccgtgtactggtgttgtcgctgtagaattgttacttaagttgtttgggatgatcgtcgttgtccttagattatcttaagacctagtactctgagcttagtttacgctcatgctgaacatgtagcagggcttcagcttaattaccattggtggaatttggatgttataatgtttgacgcatagagaatcattacattattttgatctcggagcacaataacatgtataattaataattaattccttctggaactatccaacactagcgtttctgcatgtatgcaataattcgcttggccgcgtcat

SEQ ID NO: 45929 - DNA, 3207 bp, Zea Mays
ctcctccactcccctattccccacatcactccgcttttgcggccgcttgtggcggtgccttccacggggctgcggctgcgctccgccggagcgagcaaatatccttgcccccacgagaccctcgcacagtcgcacctctccgacgtgaccggcgccgtagaaccaccgggtcttcccttgtgggattattcaagaacatggagagaaagagaaaccccattgtctttctggatgtatctgtaggtgatgagccagatgaaagaatgatctttgagttgttcgctgatgttgcaccccttgtgactgagaacttcagagctttatgcacaggtgagctgggaattggacacaagactaagaagccattatgttacaagggatcatcgttccaccgtgtcatcgaagggttcatggcacaaggaggtgacattgcgaaaggaaatgggtctggtggagaaaacatatatagtggaaaatctgcagatgaaacttgtgttctacctcatgatgatcgtggtctcttgacaacagcagatactggatccaaagctagtggctcccagttctgcattactttcaagcctaattctcatcttgacaggaagcacacagtttttggcaagcttgttgttggaagtgatgttctgaagagaatcgagcaagtagatgtgcaatcccctgattcaactcctgttgttccggttactatagtaaattgtggggagctcactgaccgtaaagatattggatctatgagaataggaattggtaattcttatcaactgattggaatttccgcagcacctattgctccatttgatataaagataaaaagagggccgccaaatcaaagttgtcaaagggtatatcttctgatgaggaaagtaatgaaggacagcacaagggccgccgtaacaaatcttcaaaaaggagaaggaagaagagatatttttattcggagtcagatagctcttctgagtcggagactgaatcatctgattctgagagcgattctgatacttactcaagtgactcatctgatgtcagcagttcaagtgatgacaggcgaaggcgcagaaagagacattcgaagaaaaataaacgcaagcgttcaagaagaaagcatgaccaaaggcgtgaaagaaggcgtaggaagcgtgataggaaatcaaaacagaagtcaaaaagcaggataaagggtgacagtgaagctgaaagttcgagtgatagcagctctgaagatgctagaagcaagagacaccgccacgggcggaagtccaaggcatcatctcaagtttttgaggaaaatattgctgcagtgtctgctttgaaggatgccacgtcacctcaacaaaagagtggcataccaaacagtccagcacaagatgtctccccgctgcaaaatggggaaaactatacaaatggtgttaacgaatcaaaaattgaaaggaatgcagctgtcatgcctgttctaactggcaaccaaagcaaatctaggtttcctatacttcttcatacatcattctttgtgcttactgcttctggaagcggtgtttcatctgacattgataagcaggagccagagcatgagtgttaatcactcaatgagcaagagtatgagcatcagcccaagaagaagcccaatgaaaaggtcaattaccaccacaaagaggtcagttagcaggagccctgttcaccataatcgcagtggaagtcctgtcggtgctccccaaaaaagcgtgagcaggagttcagccagaaggcagagcatcagcaggagccctgctaggagcctcagcaagagcccacccagagatgcaagcagaagcccccacataagcaggactcctgttaaagctcacagaagaagcattagcaggagctcagctaggtccatggaacagagaagtctaagcaggagcctggagagaattcatgtacgaaaaagtgtcagcccaagaccaccattggcgaagccaaaaagcattacccgaacccctgtgacatctccattgcgaagcgttagccggagcccagctaggatttcaaggagcccacttaggccttctaggagaagccctatgagaagtccacgacggaacattcacagaagtctcagcaggagccctgcaagaatacttagaagtgtgagcagaagtccagtaagaggtggtcgacctcgccggaacattagcagaagtcccagtccacttcgcagggcattaacaccaccaaacaatggaaggagccgatctaggagtgattctcctgatgggtcacccaaacgcataagacgtggacgtggttttactcaacgctattcatttgcaagacaatatcgctcaccttccgctgatcgcttgcatcgttatggcggaagaaatgaccgtgacagatacatgggttaccggggttttcgccaccgatcacctcctcgacgttataggagcccctctagaggcagagtgtcatcgccaaggtacaggaggaggagccgaagcgcatcacgcagtcctgtccacagaggaaggagaggtgggtacaacaagagtcctgtacggagccgttcaccccccgccaggaaaaggtcacctagcgatcgtgcacggtcagtttctaggagccacctttctaggtcagtatcaaagtctccaccagtgcatcatccctccccacttgattctccatctctggagcgtgcaagtgatgggaaatctcggtccccatcaccgtctggtggaggcaagaaaggtttggtttcctacggtgatggcactcctgattcagctgggaagtaggtttccaccggatgtattgtactacctttggccattgtctcttgatcggtccagtgttacgtcactactgtagagaagagaacggttttggtccttgaggcgccccgtgtactggtgttgtcgctgtagaattgttacttaagttgtttgggatgatcgtcgttgtccttagattatcttaagacctagtactctgagcttagtttacgctcatgctgaacatgtagcagggcttcagcttaattaccattggtggaatttggatgttataatgtttgacgcatagagaatcattacattattttgatctcggagcacaataacatgtataattaataattaattccttctggaactatccaacactagcgtttctgcatgtatgcaataattcgcttggccgcgtcat

SEQ ID NO: 45930 - DNA, 3110 bp, Zea Mays
cagggctctcagggagccaggctgccagggtacttggccgctgcgctcctccactcccctattccccacatcactccgcttttgcggccgcttgtggcggtgccttccacggggctgcggctgcgctccgccggagcgagcaaatatccttgcccccacgagaccctcgcacagtcgcacctctccgacgtgaccggcgccgtagaaccaccgggtcttcccttgtgggattattcaagaacatggagagaaagagaaaccccattgtctttctggatgtatctgtaggtgatgagccagatgaaagaatgatctttgagttgttcgctgatgttgcaccccttgtgactgagaacttcagagctttatgcacaggtgagctgggaattggacacaagactaagaagccattatgttacaagggatcatcgttccaccgtgtcatcgaagggttcatggcacaaggaggtgacattgcgaaaggaaatgggtctggtggagaaaacatatatagtggaaaatctgcagatgaaacttgtgttctacctcatgatgatcgtggtctcttgacaacagcagatactggatccaaagctagtggctcccagttctgcattactttcaagcctaattctcatcttgacaggaagcacacagtttttggcaagcttgttgttggaagtgatgttctgaagagaatcgagcaagtagatgtgcaatcccctgattcaactcctgttgttccggttactatagtaaattgtggggagctcactgaccgtaaagatattggatctatgagaataggaattgataaaaagagggccgccaaatcaaagttgtcaaagggtatatcttctgatgaggaaagtaatgaaggacagcacaagggccgccgtaacaaatcttcaaaaaggagaaggaagaagagatatttttattcggagtcagatagctcttctgagtcggagactgaatcatctgattctgagagcgattctgatacttactcaagtgactcatctgatgtcagcagttcaagtgatgacaggcgaaggcgcagaaagagacattcgaagaaaaataaacgcaagcgttcaagaagaaagcatgaccaaaggcgtgaaagaaggcgtaggaagcgtgataggaaatcaaaacagaagtcaaaaagataaagggtgacagtgaagctgaaagttcgagtgatagcagctctgaagatgctagaagcaagagacaccgccacgggcggaagtccaaggcatcatctcaagtttttgaggaaaatattgctgcagtgtctgctttgaaggatgccacgtcacctcaacaaaagagtggcataccaaacagtccagcacaagatgtctccccgctgcaaaatggggaaaactatacaaatggtgttaacgaatcaaaaattgaaaggaatgcagctgtcatgcctgttctaactggcaaccaaagcaaatctaggagccagagcatgagtgttaatcactcaatgagcaagagtatgagcatcagcccaagaagaagcccaatgaaaaggtcaattaccaccacaaagaggtcagttagcaggagccctgttcaccataatcgcagtggaagtcctgtcggtgctccccaaaaaagcgtgagcaggagttcagccagaaggcagagcatcagcaggagccctgctaggagcctcagcaagagcccacccagagatgcaagcagaagcccccacataagcaggactcctgttaaagctcacagaagaagcattagcaggagctcagctaggtccatggaacagagaagtctaagcaggagcctggagagaattcatgtacgaaaaagtgtcagcccaagaccaccattggcgaagccaaaaagcattacccgaacccctgtgacatctccattgcgaagcgttagccggagcccagctaggatttcaaggagcccacttaggccttctaggagaagccctatgagaagtccacgacggaacattcacagaagtctcagcaggagccctgcaagaatacttagaagtgtgagcagaagtccagtaagaggtggtcgacctcgccggaacattagcagaagtcccagtccacttcgcagggcattaacaccaccaaacaatggaaggagccgatctaggagtgattctcctgatgggtcacccaaacgcataagacgtggacgtggttttactcaacgctattcatttgcaagacaatatcgctcaccttccgctgatcgcttgcatcgttatggcggaagaaatgaccgtgacagatacatgggttaccggggttttcgccaccgatcacctcctcgacgttataggagcccctctagaggcagagtgtcatcgccaaggtacaggaggaggagccgaagcgcatcacgcagtcctgtccacagaggaaggagaggtgggtacaacaagagtcctgtacggagccgttcaccccccgccaggaaaaggtcacctagcgatcgtgcacggtcagtttctaggagccacctttctaggtcagtatcaaagtctccaccagtgcatcatccctccccacttgattctccatctctggagcgtgcaagtgatgggaaatctcggtccccatcaccgtctggtggaggcaagaaaggtttggtttcctacggtgatggcactcctgattcagctgggaagtaggtttccaccggatgtattgtactacctttggccattgtctcttgatcggtccagtgttacgtcactactgtagagaagagaacggttttggtccttgaggcgccccgtgtactggtgttgtcgctgtagaattgttacttaagttgtttgggatgatcgtcgttgtccttagattatcttaagacctagtactctgagcttagtttacgctcatgctgaacatgtagcagggcttcagcttaattaccattggtggaatttggatgttataatgtttgacgcatagagaatcattacattattttgatctcggagcacaataacatgtataattaataattaattccttctggaactatccaacactagcgtttctgcatgtatgcaataattcgcttggccgcgtcat

SEQ ID NO: 45931 - DNA, 3249 bp, Zea Mays
cagggctctcagggagccaggctgccagggtacttggccgctgcgctcctccactcccctattccccacatcactccgcttttgcggccgcttgtggcggtgccttccacggggctgcggctgcgctccgccggagcgagcaaatatccttgcccccacgagaccctcgcacagtcgcacctctccgacgtgaccggcgccgtagaaccaccgggtcttcccttgtgggattattcaagaacatggagagaaagagaaaccccattgtctttctggatgtatctgtaggtgatgagccagatgaaagaatgatctttgagttgttcgctgatgttgcaccccttgtgactgagaacttcagagctttatgcacaggtgagctgggaattggacacaagactaagaagccattatgttacaagggatcatcgttccaccgtgtcatcgaagggttcatggcacaaggaggtgacattgcgaaaggaaatgggtctggtggagaaaacatatatagtggaaaatctgcagatgaaacttgtgttctacctcatgatgatcgtggtctcttgacaacagcagatactggatccaaagctagtggctcccagttctgcattactttcaagcctaattctcatcttgacaggaagcacacagtttttggcaagcttgttgttggaagtgatgttctgaagagaatcgagcaagtagatgtgcaatcccctgattcaactcctgttgttccggttactatagtaaattgtggggagctcactgaccgtaaagatattggatctatgagaataggaattgataaaaagagggccgccaaatcaaagttgtcaaagggtatatcttctgatgaggaaagtaatgaaggacagcacaagggccgccgtaacaaatcttcaaaaaggagaaggaagaagagatatttttattcggagtcagatagctcttctgagtcggagactgaatcatctgattctgagagcgattctgatacttactcaagtgactcatctgatgtcagcagttcaagtgatgacaggcgaaggcgcagaaagagacattcgaagaaaaataaacgcaagcgttcaagaagaaagcatgaccaaaggcgtgaaagaaggcgtaggaagcgtgataggaaatcaaaacagaagtcaaaaagcaggataaagggtgacagtgaagctgaaagttcgagtgatagcagctctgaagatgctagaagcaagagacaccgccacgggcggaagtccaaggcatcatctcaagtttttggtaatgcaatggcagtagttaatgcgacccaagcacaatcaagggacttcacaaaaaggaaaatattgctgcagtgtctgctttgaaggatgccacgtcacctcaacaaaagagtggcataccaaacagtccagcacaagatgtctccccgctgcaaaatggggaaaactatacaaatggtgttaacgaatcaaaaattgaaaggaatgcagctgtcatgcctgttctaactggcaaccaaagcaaatctaggtttcctatacttcttcatacatcattctttgtgcttactgcttctggaagcggtgtttcatctgacattgataagcaggagccagagcatgagtgttaatcactcaatgagcaagagtatgagcatcagcccaagaagaagcccaatgaaaaggtcaattaccaccacaaagaggtcagttagcaggagccctgttcaccataatcgcagtggaagtcctgtcggtgctccccaaaaaagcgtgagcaggagttcagccagaaggcagagcatcagcaggagccctgctaggagcctcagcaagagcccacccagagatgcaagcagaagcccccacataagcaggactcctgttaaagctcacagaagaagcattagcaggagctcagctaggtccatggaacagagaagtctaagcaggagcctggagagaattcatgtacgaaaaagtgtcagcccaagaccaccattggcgaagccaaaaagcattacccgaacccctgtgacatctccattgcgaagcgttagccggagcccagctaggatttcaaggagcccacttaggccttctaggagaagccctatgagaagtccacgacggaacattcacagaagtctcagcaggagccctgcaagaatacttagaagtgtgagcagaagtccagtaagaggtggtcgacctcgccggaacattagcagaagtcccagtccacttcgcagggcattaacaccaccaaacaatggaaggagccgatctaggagtgattctcctgatgggtcacccaaacgcataagacgtggacgtggttttactcaacgctattcatttgcaagacaatatcgctcaccttccgctgatcgcttgcatcgttatggcggaagaaatgaccgtgacagatacatgggttaccggggttttcgccaccgatcacctcctcgacgttataggagcccctctagaggcagagtgtcatcgccaaggtacaggaggaggagccgaagcgcatcacgcagtcctgtccacagaggaaggagaggtgggtacaacaagagtcctgtacggagccgttcaccccccgccaggaaaaggtcacctagcgatcgtgcacggtcagtttctaggagccacctttctaggtcagtatcaaagtctccaccagtgcatcatccctccccacttgattctccatctctggagcgtgcaagtgatgggaaatctcggtccccatcaccgtctggtggaggcaagaaaggtttggtttcctacggtgatggcactcctgattcagctgggaagtaggtttccaccggatgtattgtactacctttggccattgtctcttgatcggtccagtgttacgtcactactgtagagaagagaacggttttggtccttgaggcgccccgtgtactggtgttgtcgctgtagaattgttacttaagttgtttgggatgatcgtcgttgtccttagattatcttaagacctagtactctgagcttagtttacgctcatgctgaacatgtagcagggcttcagcttaattaccattggtggaatttggatgttataatgtttgacgcatagagaatcattacattattttgatctcggagcacaataacatgtataattaataattaattccttctggaactatccaacactagcgtttctgcatgtatgcaataattcgcttggccgcgtcat

SEQ ID NO: 45932 - DNA, 3207 bp, Zea Mays
cacactgtcaccaccatgagggcccacatgcagtgcatccaggactagcattcaacgctccacgtgtcggggacagaactgtaattggccctgtcgcagggctctcagggagccaggctgccagggtacttggccgctgcgctcctccactcccctattccccacatcactccgcttttgcggccgcttgtggcggtgccttccacggggctgcggctgcgctccgccggagcgagcaaatatccttgcccccacgagaccctcgcacagtcgcacctctccgacgtgaccggcgccgtagaaccaccgggtcttcccttgtgggattattcaagaacatggagagaaagagaaaccccattgtctttctggatgtatctgtaggtgatgagccagatgaaagaatgatctttgagttgttcgctgatgttgcaccccttgtgactgagaacttcagagctttatgcacaggtgagctgggaattggacacaagactaagaagccattatgttacaagggatcatcgttccaccgtgtcatcgaagggttcatggcacaaggaggtgacattgcgaaaggaaatgggtctggtggagaaaacatatatagtggaaaatctgcagatgaaacttgtgttctacctcatgatgatcgtggtctcttgacaacagcagatactggatccaaagctagtggctcccagttctgcattactttcaagcctaattctcatcttgacaggaagcacacagtttttggcaagcttgttgttggaagtgatgttctgaagagaatcgagcaagtagatgtgcaatcccctgattcaactcctgttgttccggttactatagtaaattgtggggagctcactgaccgtaaagatattggatctatgagaataggaattgataaaaagagggccgccaaatcaaagttgtcaaagggtatatcttctgatgaggaaagtaatgaaggacagcacaagggccgccgtaacaaatcttcaaaaaggagaaggaagaagagatatttttattcggagtcagatagctcttctgagtcggagactgaatcatctgattctgagagcgattctgatacttactcaagtgactcatctgatgtcagcagttcaagtgatgacaggcgaaggcgcagaaagagacattcgaagaaaaataaacgcaagcgttcaagaagaaagcatgaccaaaggcgtgaaagaaggcgtaggaagcgtgataggaaatcaaaacagaagtcaaaaaggataaagggtgacagtgaagctgaaagttcgagtgatagcagctctgaagatgctagaagcaagagacaccgccacgggcggaagtccaaggcatcatctcaagtttttgaggaaaatattgctgcagtgtctgctttgaaggatgccacgtcacctcaacaaaagagtggcataccaaacagtccagcacaagatgtctccccgctgcaaaatggggaaaactatacaaatggtgttaacgaatcaaaaattgaaaggaatgcagctgtcatgcctgttctaactggcaaccaaagcaaatctaggagccagagcatgagtgttaatcactcaatgagcaagagtatgagcatcagcccaagaagaagcccaatgaaaaggtcaattaccaccacaaagaggtcagttagcaggagccctgttcaccataatcgcagtggaagtcctgtcggtgctccccaaaaaagcgtgagcaggagttcagccagaaggcagagcatcagcaggagccctgctaggagcctcagcaagagcccacccagagatgcaagcagaagcccccacataagcaggactcctgttaaagctcacagaagaagcattagcaggagctcagctaggtccatggaacagagaagtctaagcaggagcctggagagaattcatgtacgaaaaagtgtcagcccaagaccaccattggcgaagccaaaaagcattacccgaacccctgtgacatctccattgcgaagcgttagccggagcccagctaggatttcaaggagcccacttaggccttctaggagaagccctatgagaagtccacgacggaacattcacagaagtctcagcaggagccctgcaagaatacttagaagtgtgagcagaagtccagtaagaggtggtcgacctcgccggaacattagcagaagtcccagtccacttcgcagggcattaacaccaccaaacaatggaaggagccgatctaggagtgattctcctgatgggtcacccaaacgcataagacgtggacgtggttttactcaacgctattcatttgcaagacaatatcgctcaccttccgctgatcgcttgcatcgttatggcggaagaaatgaccgtgacagatacatgggttaccggggttttcgccaccgatcacctcctcgacgttataggagcccctctagaggcagagtgtcatcgccaaggtacaggaggaggagccgaagcgcatcacgcagtcctgtccacagaggaaggagaggtgggtacaacaagagtcctgtacggagccgttcaccccccgccaggaaaaggtcacctagcgatcgtgcacggtcagtttctaggagccacctttctaggtcagtatcaaagtctccaccagtgcatcatccctccccacttgattctccatctctggagcgtgcaagtgatgggaaatctcggtccccatcaccgtctggtggaggcaagaaaggtttggtttcctacggtgatggcactcctgattcagctgggaagtaggtttccaccggatgtattgtactacctttggccattgtctcttgatcggtccagtgttacgtcactactgtagagaagagaacggttttggtccttgaggcgccccgtgtactggtgttgtcgctgtagaattgttacttaagttgtttgggatgatcgtcgttgtccttagattatcttaagacctagtactctgagcttagtttacgctcatgctgaacatgtagcagggcttcagcttaattaccattggtggaatttggatgttataatgtttgacgcatagagaatcattacattattttgatctcggagcacaataacatgtataattaataattaattccttctggaactatccaacactagcgtttctgcatgtatgcaataattcgcttggccgcgtcat

SEQ ID NO: 45933 - DNA, 2396 bp, Zea Mays
cctgtcgcagggctctcagggagccaggctgccagggtacttggccgctgcgctcctccactcccctattccccacatcactccgcttttgcggccgcttgtggcggtgccttccacggggctgcggctgcgctccgccggagcgagcaaatatccttgcccccacgagaccctcgcacagtcgcacctctccgacgtgaccggcgccgtagaaccaccgggtcttcccttgtgggattattcaagaacatggagagaaagagaaaccccattgtctttctggatgtatctgtaggtgatgagccagatgaaagaatgatctttgagttgttcgctgatgttgcaccccttgtgactgagaacttcagagctttatgcacaggtgagctgggaattggacacaagactaagaagccattatgttacaagggatcatcgttccaccgtgtcatcgaagggttcatggcacaaggaggtgacattgcgaaaggaaatgggtctggtggagaaaacatatatagtggaaaatctgcagatgaaacttgtgttctacctcatgatgatcgtggtctcttgacaacagcagatactggatccaaagctagtggctcccagttctgcattactttcaagcctaattctcatcttgacaggaagcacacagtttttggcaagcttgttgttggaagtgatgttctgaagagaatcgagcaagtagatgtgcaatcccctgattcaactcctgttgttccggttactatagtaaattgtggggagctcactgaccgtaaagatattggatctatgagaataggaattgataaaaagagggccgccaaatcaaagttgtcaaagggtatatcttctgatgaggaaagtaatgaaggacagcacaagggccgccgtaacaaatcttcaaaaaggagaaggaagaagagatatttttattcggagtcagatagctcttctgagtcggagactgaatcatctgattctgagagcgattctgatacttactcaagtgactcatctgatgtcagcagttcaagtgatgacaggcgaaggcgcagaaagagacattcgaagaaaaataaacgcaagcgttcaagaagaaagcatgaccaaaggcgtgaaagaaggcgtaggaagcgtgataggaaatcaaaacagaagtcaaaaagcaggataaagggtgacagtgaagctgaaagttcgagtgatagcagctctgaagatgctagaagcaagagacaccgccacgggcggaagtccaaggcatcatctcaagtttttgaggaaaatattgctgcagtgtctgctttgaaggatgccacgtcacctcaacaaaagagtggcataccaaacagtccagcacaagatgtctccccgctgcaaaatggggaaaactatacaaatggtgttaacgaatcaaaaattgaaaggaatgcagctgtcatgcctgttctaactggcaaccaaagcaaatctaggagccagagcatgagtgttaatcactcaatgagcaagagtatgagcatcagcccaagaagaagcccaatgaaaaggtcaattaccaccacaaagaggtcagttagcaggagccctgttcaccataatcgcagtggaagtcctgtcggtgctccccaaaaaagcgtgagcaggagttcagccagaaggcagagcatcagcaggagccctgctaggagcctcagcaagagcccacccagagatgcaagcagaagcccccacataagcaggactcctgttaaagctcacagaagaagcattagcaggagctcagctaggtccatggaacagagaagtctaagcaggagcctggagagaattcatgtacgaaaaagtgtcagcccaagaccaccattggcgaagccaaaaagcattacccgaacccctgtgacatctccattgcgaagcgttagccggagcccagctaggatttcaaggagcccacttaggccttctaggagaagccctatgagaagtccacgacggaacattcacagaagtctcagcaggagccctgcaagaatacttagaagtgtgagcagaagtccagtaagaggtggtcgacctcgccggaacattagcagaagtcccagtccacttcgcagggcattaacaccaccaaacaatggaaggagccgatctaggagtgattctcctgatgggtcacccaaacgcataagacgtggacgtggttttactcaacgctattcatttgcaagacaatatcgctcaccttccgctgatcgcttgcatcgttatggcggaagaaatgaccgtgacagatacatgggttaccggggttttcgccaccgatcacctcctcgacgttataggagcccctctagaggcagagtgtcatcgccaagcag

SEQ ID NO: 45934 - DNA, 3523 bp, Zea Mays
gctagcgtcagcctcgtctcgctcgttttgctccgtctctcttcctcctcacttcccacccaccctcgttttgctccgtctctcttcctcctcacttcccacccaccctcgctcgttttgttctgtctctctttctcctcactccctccgtcgatcctctgcagcttgcatcggtcgaccagtagtcttccactgatttgaggctgtcatagtatgctctctgaccgtgctggcgggaggaaggagatgatttaagttctctgcgtttataaccagaaagaggaggataatccaatcatggtaactaaatagtaggtagtaatgtttcacggtaaatcacagtgctcgaatgcgatatgatctttgactcggagtattgaagactaatttagtttgagtttgagattagttgtttttgtcattaataaactcacattggcatctggttacgagctcactactagattttagatctccagttttggtgtacttttgctgcatgtgtctcccagagttgcagatttgcaggtagcacctgattcttttttatttttggattgagatacagtgaaatttatatttgcctgttcccaccatactgtaatatgaatacaaggatggcttgatctggcaagtgctcgccattctatgggcccatcatgcttttcgagtacactgtttgatcacaaggagcggtctgctgccactaaacttcaagttgttgatcatgatggcctgaaaaattatcgggtaaatgacttctctactatttgagttaactgatgctatctatctatcaacattgcagaactaattctagattttaggaatgcttttgtttctcttgaatttggttcctcggttcaagttttgtttttactgaagcatacatttatataaaattagaatgtcaattccatacacaaatcactgatgggtttttgcttgttggtagggatatgctcatatgccttggccttaatttaaactacttgtatgagatggagaaatgtcacaaaacacaggatgaagacgactccaggaatccacccatgcctctcagtgactcagtggcacaaacgacagcctagtcaggactaggagacgtcttcacatcacggagtagaccactcagcaacaacagtgcaacggtgttcggacttttgttcacatatgggagtgtttaagctcctgcacctagatttagaaacaccaccatgtaaaatagacaagacagtgcttttgcaaacatgatgctaccacgagacccgaactcatgtatggccaaacatgttaacatattttgtatgtcaccaaaacgcttatttacatcaatgagcgattatctgaactgttgaatgctcaccaaaatgcttatttctatttcctactgctacttgctcctttgaagccttcagcgatggaggcctccacagaagctactaggatggcctccagcttatgacctctcactgccgaccgcaccttcctcagaatatgttgcttcatcaccgccctctcagcagactggagtttcttgcacatgttcaatccctggatgtacctcgacaccgcgccgccgaaaggatcaccggctttctcaagggccacgagcttctcgacgatctgagaagcgagcattctctcgatacagggtttggttccaacctccgtgatgtccaccagaaattgcatggctagatccttggtcttcaaagacttgcggtccagcaagttcaccagtttctctatggttcttagttgcagaaatctttgcaagacaagggatccacccttcgcaaagacgatctgatggagagcgtagtacgctgaatcctggagctcatcgatgttgcactgcagcatgtcaatgagctcgtgaacaatattaagctccaggaacctatgcacgtatggctctcctccagtgcaggccaatttcatcaccaaaaaggcggtctgggacctcacctggttcttttcaacctctctgcgttgtagcagccaagccaacctatcaaacagatggcttcccagaaggaggatattatgaagaatcacctcaaatgattgttgaggctttggtgattgcggcacatttctgtcagataaaacaaatctttccaaactgatccgagcatgccagggcaaatgaagcagcactgcaggccctatgcacccttgaagtggagcaccaagttcacagaatgtttttagcgtgataatcgcgtggtgctgtgagatctcagaaccattgcccagaagcacaagaagtttattgtcaattcctgattcaatcattgtctcaacagccttcagctttccaacctttgtcagagatgcaagtgttgtaaacacaatttcatgccactgctcattttctgcagtcaagagatctgcaattcgaaccatgggaattcttgacaaaatttcatccgcaattgtggcatcaacatgctcagatatcttggtcagaacagaagagaggttggctagagttgaagtatcttcacaggcaccaagaagatcaattaatttatctatggaacctgctatttcaagagagtgagcaagatttatgtagtctgatggggaaaatataactgtaattgcggcagtgactgcaaaaataagatctagtgaccctatagaaattatctctgctattcgagggccaagtattttgctgaacccaattctatttgtctcaagttcagacagggatctgcatgccatgagagcttgagttgtgtttaccaataaaatctcgatgtccatgaattctagcagagaaaagaatgatcccatcttctgttcggctggccgtttcatacactctttgccaaaaacaaaaagccaaggagctactaatgccacattatatgaaatggaatcagataaaagagcacgagtggcatcatttgttttgttctccaggtaaagtgagaccatgtcatgcatatgatacaacggctggtcctccagtttgataataagtgatccttcgactagttttgaaaccacgagagagaacagtccgcactgctcaagcgctgaccaaatggattccagacaagcctcaggaacaggttcttcccaagagatagctgcaagagccatgaaaaaaattcttgaattttctggcattgcttctaagctgaactcaaaagatccaaatatggtcaacgtagtctccacatctttctcattgacgtatgaaactggaccaggtgcacatgtggcatatgttgagaggttggatatagctttctcccatttttccactctagtttccttcctcagagccttgcccatgacagcaactgtaaggggatggtgaccacatcgatccaacaagacttctgcgacaggctgtgaagtatagagaagttaaacattcaaaaaccatggtgtttggaatttttagttattctattttttcatgatgtatcttcttctaaaatatcttactttgcaagtttggcacaactactaattgaaaataaatatgtatataaaaaat

SEQ ID NO: 45935 - DNA, 3156 bp, Zea Mays
gctagcgtcagcctcgtctcgctcgttttgctccgtctctcttcctcctcacttcccacccaccctcgttttgctccgtctctcttcctcctcacttcccacccaccctcgctcgttttgttctgtctctctttctcctcactccctccgtcgatcctctgcagcttgcatcggtcgaccagtagtcttccactgtaatcgcctctcattattctttctgccacgctcctcttcgtccttactccctccgtcttgtctatctgtagccacttcgtcttcctacgtttttgccaggatttgaggctgtcatagtatgctctctgaccgtgctggcgggaggaaggagatgatttaagttctctgcgtttataaccagaaagaggaggataatccaatcatgatacagtgaaatttatatttgcctgttcccaccatactgtaatatgaatacaaggatggcttgatctggcaagtgctcgccattctatgggcccatcatgcttttcgagtacactgtttgatcacaaggagcggtctgctgccactaaacttcaagttgttgatcatgatggcctgaaaaattatcggggatatgctcatatgccttggccttaatttaaactacttgtatgagatggagaaatgtcacaaaacacaggatgaagacgactccaggaatccacccatgcctctcagtgactcagtggcacaaacgacagcctagtcaggactaggagacgtcttcacatcacggagtagaccactcagcaacaacagtgcaacggtgttcggacttttgttcacatatgggagtgtttaagctcctgcacctagatttagaaacaccaccatgtaaaatagacaagacagtgcttttgcaaacatgatgctaccacgagacccgaactcatgtatggccaaacatgttaacatattttgtatgtcaccaaaacgcttatttacatcaatgagcgattatctgaactgttgaatgctcaccaaaatgcttatttctatttcctactgctacttgctcctttgaagccttcagcgatggaggcctccacagaagctactaggatggcctccagcttatgacctctcactgccgaccgcaccttcctcagaatatgttgcttcatcaccgccctctcagcagactggagtttcttgcacatgttcaatccctggatgtacctcgacaccgcgccgccgaaaggatcaccggctttctcaagggccacgagcttctcgacgatctgagaagcgagcattctctcgatacagggtttggttccaacctccgtgatgtccaccagaaattgcatggctagatccttggtcttcaaagacttgcggtccagcaagttcaccagtttctctatggttcttagttgcagaaatctttgcaagacaagggatccacccttcgcaaagacgatctgatggagagcgtagtacgctgaatcctggagctcatcgatgttgcactgcagcatgtcaatgagctcgtgaacaatattaagctccaggaacctatgcacgtatggctctcctccagtgcaggccaatttcatcaccaaaaaggcggtctgggacctcacctggttcttttcaacctctctgcgttgtagcagccaagccaacctatcaaacagatggcttcccagaaggaggatattatgaagaatcacctcaaatgattgttgaggctttggtgattgcggcacatttctgtcagataaaacaaatctttccaaactgatccgagcatgccagggcaaatgaagcagcactgcaggccctatgcacccttgaagtggagcaccaagttcacagaatgtttttagcgtgataatcgcgtggtgctgtgagatctcagaaccattgcccagaagcacaagaagtttattgtcaattcctgattcaatcattgtctcaacagccttcagctttccaacctttgtcagagatgcaagtgttgtaaacacaatttcatgccactgctcattttctgcagtcaagagatctgcaattcgaaccatgggaattcttgacaaaatttcatccgcaattgtggcatcaacatgctcagatatcttggtcagaacagaagagaggttggctagagttgaagtatcttcacaggcaccaagaagatcaattaatttatctatggaacctgctatttcaagagagtgagcaagatttatgtagtctgatggggaaaatataactgtaattgcggcagtgactgcaaaaataagatctagtgaccctatagaaattatctctgctattcgagggccaagtattttgctgaacccaattctatttgtctcaagttcagacagggatctgcatgccatgagagcttgagttgtgtttaccaataaaatctcgatgtccatgaattctagcagagaaaagaatgatcccatcttctgttcggctggccgtttcatacactctttgccaaaaacaaaaagccaaggagctactaatgccacattatatgaaatggaatcagataaaagagcacgagtggcatcatttgttttgttctccaggtaaagtgagaccatgtcatgcatatgatacaacggctggtcctccagtttgataataagtgatccttcgactagttttgaaaccacgagagagaacagtccgcactgctcaagcgctgaccaaatggattccagacaagcctcaggaacaggttcttcccaagagatagctgcaagagccatgaaaaaaattcttgaattttctggcattgcttctaagctgaactcaaaagatccaaatatggtcaacgtagtctccacatctttctcattgacgtatgaaactggaccaggtgcacatgtggcatatgttgagaggttggatatagctttctcccatttttccactctagtttccttcctcagagccttgcccatgacagcaactgtaaggggatggtgaccacatcgatccaacaagacttctgcgacaggctgtgaagtatagagaagttaaacattcaaaaaccatggtgtttggaatttttagttattctattttttcatgatgtatcttcttctaaaatatcttactttgcaagtttggcacaactactaattgaaaataaatatgtatataaaaaat

SEQ ID NO: 45936 - DNA, 2999 bp, Zea Mays
gctagcgtcagcctcgtctcgctcgttttgctccgtctctcttcctcctcacttcccacccaccctcgttttgctccgtctctcttcctcctcacttcccacccaccctcgctcgttttgttctgtctctctttctcctcactccctccgtcgatcctctgcagcttgcatcggtcgaccagtagtcttccactgtaatcgcctctcattattctttctgccacgctcctcttcgtccttactccctccgtcttgtctatctgtagccacttcgtcttcctacgtttttgccaggatttgaggctgtcatagtatgctctctgaccgtgctggcgggaggaaggagatgatttaagttctctgcgtttataaccagaaagaggaggataatccaatcatgttttggtgtacttttgctgcatgtgtctcccagagttgcagatttgcagtgctcgccattctatgggcccatcatgcttttcgagtacactgtttgatcacaaggagcggtctgctgccactaaacttcaagttgttgatcatgatggcctgaaaaattatcggggatatgctcatatgccttggccttaatttaaactacttgtatgagatggagaaatgtcacaaaacacaggatgaagacgactccaggaatccacccatgcctctcagtgactcagtggcacaaacgacagcctagtcaggactaggagacgtcttcacatcacggagtagaccactcagcaacaacagtgcaacggtgttcggacttttgttcacatatgggagtgtttaagctcctgcacctagatttagaaacaccaccatgtaaaatagacaagacagtgcttttgcaaacatgatgctaccacgagacccgaactcatccttcagcgatggaggcctccacagaagctactaggatggcctccagcttatgacctctcactgccgaccgcaccttcctcagaatatgttgcttcatcaccgccctctcagcagactggagtttcttgcacatgttcaatccctggatgtacctcgacaccgcgccgccgaaaggatcaccggctttctcaagggccacgagcttctcgacgatctgagaagcgagcattctctcgatacagggtttggttccaacctccgtgatgtccaccagaaattgcatggctagatccttggtcttcaaagacttgcggtccagcaagttcaccagtttctctatggttcttagttgcagaaatctttgcaagacaagggatccacccttcgcaaagacgatctgatggagagcgtagtacgctgaatcctggagctcatcgatgttgcactgcagcatgtcaatgagctcgtgaacaatattaagctccaggaacctatgcacgtatggctctcctccagtgcaggccaatttcatcaccaaaaaggcggtctgggacctcacctggttcttttcaacctctctgcgttgtagcagccaagccaacctatcaaacagatggcttcccagaaggaggatattatgaagaatcacctcaaatgattgttgaggctttggtgattgcggcacatttctgtcagataaaacaaatctttccaaactgatccgagcatgccagggcaaatgaagcagcactgcaggccctatgcacccttgaagtggagcaccaagttcacagaatgtttttagcgtgataatcgcgtggtgctgtgagatctcagaaccattgcccagaagcacaagaagtttattgtcaattcctgattcaatcattgtctcaacagccttcagctttccaacctttgtcagagatgcaagtgttgtaaacacaatttcatgccactgctcattttctgcagtcaagagatctgcaattcgaaccatgggaattcttgacaaaatttcatccgcaattgtggcatcaacatgctcagatatcttggtcagaacagaagagaggttggctagagttgaagtatcttcacaggcaccaagaagatcaattaatttatctatggaacctgctatttcaagagagtgagcaagatttatgtagtctgatggggaaaatataactgtaattgcggcagtgactgcaaaaataagatctagtgaccctatagaaattatctctgctattcgagggccaagtattttgctgaacccaattctatttgtctcaagttcagacagggatctgcatgccatgagagcttgagttgtgtttaccaataaaatctcgatgtccatgaattctagcagagaaaagaatgatcccatcttctgttcggctggccgtttcatacactctttgccaaaaacaaaaagccaaggagctactaatgccacattatatgaaatggaatcagataaaagagcacgagtggcatcatttgttttgttctccaggtaaagtgagaccatgtcatgcatatgatacaacggctggtcctccagtttgataataagtgatccttcgactagttttgaaaccacgagagagaacagtccgcactgctcaagcgctgaccaaatggattccagacaagcctcaggaacaggttcttcccaagagatagctgcaagagccatgaaaaaaattcttgaattttctggcattgcttctaagctgaactcaaaagatccaaatatggtcaacgtagtctccacatctttctcattgacgtatgaaactggaccaggtgcacatgtggcatatgttgagaggttggatatagctttctcccatttttccactctagtttccttcctcagagccttgcccatgacagcaactgtaaggggatggtgaccacatcgatccaacaagacttctgcgacaggctgtgaagtatagagaagttaaacattcaaaaaccatggtgtttggaatttttagttattctattttttcatgatgtatcttcttctaaaatatcttactttgcaagtttggcacaactactaattgaaaataaatatgtatataaaaaat

SEQ ID NO: 45937 - DNA, 3318 bp, Zea Mays
gctagcgtcagcctcgtctcgctcgttttgctccgtctctcttcctcctcacttcccacccaccctcgttttgctccgtctctcttcctcctcacttcccacccaccctcgctcgttttgttctgtctctctttctcctcactccctccgtcgatcctctgcagcttgcatcggtcgaccagtagtcttccactgatttgaggctgtcatagtatgctctctgaccgtgctggcgggaggaaggagatgatttaagttctctgcgtttataaccagaaagaggaggataatccaatcatggtaactaaatagtaggtagtaatgtttcacggtaaatcacagtgctcgaatgcgatatgatctttgactcggagtattgaagactaatttagtttgagtttgagattagttgtttttgtcattaataaactcacattggcatctggttacgagctcactactagattttagatctccagttttggtgtacttttgctgcatgtgtctcccagagttgcagatttgcaggtagcacctgattcttttttatttttggattgagatacagtgaaatttatatttgcctgttcccaccatactgtaatatgaatacaaggatggcttgatctggcaagtgctcgccattctatgggcccatcatgcttttcgagtacactgtttgatcacaaggagcggtctgctgccactaaacttcaagttgttgatcatgatggcctgaaaaattatcggggatatgctcatatgccttggccttaatttaaactacttgtatgagatggagaaatgtcacaaaacacaggatgaagacgactccaggaatccacccatgcctctcagtgactcagtggcacaaacgacagcctagtcaggactaggagacgtcttcacatcacggagtagaccactcagcaacaacagtgcaacggtgttcggacttttgttcacatatgggagtgtttaagctcctgcacctagatttagaaacaccaccatgtaaaatagacaagacagtgcttttgcaaacatgatgctaccacgagacccgaactcatgtatggccaaacatgttaacatattttgtatgtcaccaaaacgcttatttacatcaatgagcgattatctgaactgttgaatgctcaccaaaatgcttatttctatttcctactgctacttgctcctttgaagccttcagcgatggaggcctccacagaagctactaggatggcctccagcttatgacctctcactgccgaccgcaccttcctcagaatatgttgcttcatcaccgccctctcagcagactggagtttcttgcacatgttcaatccctggatgtacctcgacaccgcgccgccgaaaggatcaccggctttctcaagggccacgagcttctcgacgatctgagaagcgagcattctctcgatacagggtttggttccaacctccgtgatgtccaccagaaattgcatggctagatccttggtcttcaaagacttgcggtccagcaagttcaccagtttctctatggttcttagttgcagaaatctttgcaagacaagggatccacccttcgcaaagacgatctgatggagagcgtagtacgctgaatcctggagctcatcgatgttgcactgcagcatgtcaatgagctcgtgaacaatattaagctccaggaacctatgcacgtatggctctcctccagtgcaggccaatttcatcaccaaaaaggcggtctgggacctcacctggttcttttcaacctctctgcgttgtagcagccaagccaacctatcaaacagatggcttcccagaaggaggatattatgaagaatcacctcaaatgattgttgaggctttggtgattgcggcacatttctgtcagataaaacaaatctttccaaactgatccgagcatgccagggcaaatgaagcagcactgcaggccctatgcacccttgaagtggagcaccaagttcacagaatgtttttagcgtgataatcgcgtggtgctgtgagatctcagaaccattgcccagaagcacaagaagtttattgtcaattcctgattcaatcattgtctcaacagccttcagctttccaacctttgtcagagatgcaagtgttgtaaacacaatttcatgccactgctcattttctgcagtcaagagatctgcaattcgaaccatgggaattcttgacaaaatttcatccgcaattgtggcatcaacatgctcagatatcttggtcagaacagaagagaggttggctagagttgaagtatcttcacaggcaccaagaagatcaattaatttatctatggaacctgctatttcaagagagtgagcaagatttatgtagtctgatggggaaaatataactgtaattgcggcagtgactgcaaaaataagatctagtgaccctatagaaattatctctgctattcgagggccaagtattttgctgaacccaattctatttgtctcaagttcagacagggatctgcatgccatgagagcttgagttgtgtttaccaataaaatctcgatgtccatgaattctagcagagaaaagaatgatcccatcttctgttcggctggccgtttcatacactctttgccaaaaacaaaaagccaaggagctactaatgccacattatatgaaatggaatcagataaaagagcacgagtggcatcatttgttttgttctccaggtaaagtgagaccatgtcatgcatatgatacaacggctggtcctccagtttgataataagtgatccttcgactagttttgaaaccacgagagagaacagtccgcactgctcaagcgctgaccaaatggattccagacaagcctcaggaacaggttcttcccaagagatagctgcaagagccatgaaaaaaattcttgaattttctggcattgcttctaagctgaactcaaaagatccaaatatggtcaacgtagtctccacatctttctcattgacgtatgaaactggaccaggtgcacatgtggcatatgttgagaggttggatatagctttctcccatttttccactctagtttccttcctcagagccttgcccatgacagcaactgtaaggggatggtgaccacatcgatccaacaagacttctgcgacaggctgtgaagtatagagaagttaaacattcaaaaaccatggtgtttggaatttttagttattctattttttcatgatgtatcttcttctaaaatatcttactttgcaagtttggcacaactactaattgaaaataaatatgtatataaaaaat

SEQ ID NO: 45938 - DNA, 3341 bp, Zea Mays
gctagcgtcagcctcgtctcgctcgttttgctccgtctctcttcctcctcacttcccacccaccctcgttttgctccgtctctcttcctcctcacttcccacccaccctcgctcgttttgttctgtctctctttctcctcactccctccgtcgatcctctgcagcttgcatcggtcgaccagtagtcttccactgtaatcgcctctcattattctttctgccacgctcctcttcgtccttactccctccgtcttgtctatctgtagccacttcgtcttcctacgtttttgccaggttagaaaaaggatttgaggctgtcatagtatgctctctgaccgtgctggcgggaggaaggagatgatttaagttctctgcgtttataaccagaaagaggaggataatccaatcatggtaactaaatagtaggtagtaatgtttcacggtaaatcacagtgctcgaatgcgatatgatctttgactcggagtattgaagactaatttagtttgagtttgagattagttgtttttgtcattaataaactcacattggcatctggttacgagctcactactagattttagatctccagttttggtgtacttttgctgcatgtgtctcccagagttgcagatttgcaggatggcttgatctggcaagtgctcgccattctatgggcccatcatgcttttcgagtacactgtttgatcacaaggagcggtctgctgccactaaacttcaagttgttgatcatgatggcctgaaaaattatcggggatatgctcatatgccttggccttaatttaaactacttgtatgagatggagaaatgtcacaaaacacaggatgaagacgactccaggaatccacccatgcctctcagtgactcagtggcacaaacgacagcctagtcaggactaggagacgtcttcacatcacggagtagaccactcagcaacaacagtgcaacggtgttcggacttttgttcacatatgggagtgtttaagctcctgcacctagatttagaaacaccaccatgtaaaatagacaagacagtgcttttgcaaacatgatgctaccacgagacccgaactcatgtatggccaaacatgttaacatattttgtatgtcaccaaaacgcttatttacatcaatgagcgattatctgaactgttgaatgctcaccaaaatgcttatttctatttcctactgctacttgctcctttgaagccttcagcgatggaggcctccacagaagctactaggatggcctccagcttatgacctctcactgccgaccgcaccttcctcagaatatgttgcttcatcaccgccctctcagcagactggagtttcttgcacatgttcaatccctggatgtacctcgacaccgcgccgccgaaaggatcaccggctttctcaagggccacgagcttctcgacgatctgagaagcgagcattctctcgatacagggtttggttccaacctccgtgatgtccaccagaaattgcatggctagatccttggtcttcaaagacttgcggtccagcaagttcaccagtttctctatggttcttagttgcagaaatctttgcaagacaagggatccacccttcgcaaagacgatctgatggagagcgtagtacgctgaatcctggagctcatcgatgttgcactgcagcatgtcaatgagctcgtgaacaatattaagctccaggaacctatgcacgtatggctctcctccagtgcaggccaatttcatcaccaaaaaggcggtctgggacctcacctggttcttttcaacctctctgcgttgtagcagccaagccaacctatcaaacagatggcttcccagaaggaggatattatgaagaatcacctcaaatgattgttgaggctttggtgattgcggcacatttctgtcagataaaacaaatctttccaaactgatccgagcatgccagggcaaatgaagcagcactgcaggccctatgcacccttgaagtggagcaccaagttcacagaatgtttttagcgtgataatcgcgtggtgctgtgagatctcagaaccattgcccagaagcacaagaagtttattgtcaattcctgattcaatcattgtctcaacagccttcagctttccaacctttgtcagagatgcaagtgttgtaaacacaatttcatgccactgctcattttctgcagtcaagagatctgcaattcgaaccatgggaattcttgacaaaatttcatccgcaattgtggcatcaacatgctcagatatcttggtcagaacagaagagaggttggctagagttgaagtatcttcacaggcaccaagaagatcaattaatttatctatggaacctgctatttcaagagagtgagcaagatttatgtagtctgatggggaaaatataactgtaattgcggcagtgactgcaaaaataagatctagtgaccctatagaaattatctctgctattcgagggccaagtattttgctgaacccaattctatttgtctcaagttcagacagggatctgcatgccatgagagcttgagttgtgtttaccaataaaatctcgatgtccatgaattctagcagagaaaagaatgatcccatcttctgttcggctggccgtttcatacactctttgccaaaaacaaaaagccaaggagctactaatgccacattatatgaaatggaatcagataaaagagcacgagtggcatcatttgttttgttctccaggtaaagtgagaccatgtcatgcatatgatacaacggctggtcctccagtttgataataagtgatccttcgactagttttgaaaccacgagagagaacagtccgcactgctcaagcgctgaccaaatggattccagacaagcctcaggaacaggttcttcccaagagatagctgcaagagccatgaaaaaaattcttgaattttctggcattgcttctaagctgaactcaaaagatccaaatatggtcaacgtagtctccacatctttctcattgacgtatgaaactggaccaggtgcacatgtggcatatgttgagaggttggatatagctttctcccatttttccactctagtttccttcctcagagccttgcccatgacagcaactgtaaggggatggtgaccacatcgatccaacaagacttctgcgacaggctgtgaagtatagagaagttaaacattcaaaaaccatggtgtttggaatttttagttattctattttttcatgatgtatcttcttctaaaatatcttactttgcaagtttggcacaactactaattgaaaataaatatgtatataaaaaat

SEQ ID NO: 45939 - DNA, 3557 bp, Zea Mays
gctagcgtcagcctcgtctcgctcgttttgctccgtctctcttcctcctcacttcccacccaccctcgttttgctccgtctctcttcctcctcacttcccacccaccctcgctcgttttgttctgtctctctttctcctcactccctccgtcgatcctctgcagcttgcatcggtcgaccagtagtcttccactgatttgaggctgtcatagtatgctctctgaccgtgctggcgggaggaaggagatgatttaagttctctgcgtttataaccagaaagaggaggataatccaatcatggtaactaaatagtaggtagtaatgtttcacggtaaatcacagtgctcgaatgcgatatgatctttgactcggagtattgaagactaatttagtttgagtttgagattagttgtttttgtcattaataaactcacattggcatctggttacgagctcactactagattttagatctccagttttggtgtacttttgctgcatgtgtctcccagagttgcagatttgcaggtagcacctgattcttttttatttttggattgagatacagtgaaatttatatttgcctgttcccaccatactgtaatatgaatacaaggatggcttgatctggcaagtgctcgccattctatgggcccatcatgcttttcgagtacactgtttgatcacaaggagcggtctgctgccactaaacttcaagttgttgatcatgatggcctgaaaaattatcggggatatgctcatatgccttggccttaatttaaactacttgtatgagatggagaaatgtcacaaaacacaggatgaagacgactccaggaatccacccatgcctctcagtgactcagtggcacaaacgacagcctagtcaggtaacacaataacatatcagccatatgctatacatgcatatactatgttatggaaataactccgaagagtatatcacattctaactagttatgtatgcaaacactaatgcaagacaaccatcttgctcgtcatgttggtgtggtgggggtcaaaagcgtcttgctgctgaaattgatggtataccgtacaagcatttacctttgatttttgctgacgttaatatgttgcttcactaaaggactaggagacgtcttcacatcacggagtagaccactcagcaacaacagtgcaacggtgttcggacttttgttcacatatgggagtgtttaagctcctgcacctagatttagaaacaccaccatgtaaaatagacaagacagtgcttttgcaaacatgatgctaccacgagacccgaactcatgtatggccaaacatgttaacatattttgtatgtcaccaaaacgcttatttacatcaatgagcgattatctgaactgttgaatgctcaccaaaatgcttatttctatttcctactgctacttgctcctttgaagccttcagcgatggaggcctccacagaagctactaggatggcctccagcttatgacctctcactgccgaccgcaccttcctcagaatatgttgcttcatcaccgccctctcagcagactggagtttcttgcacatgttcaatccctggatgtacctcgacaccgcgccgccgaaaggatcaccggctttctcaagggccacgagcttctcgacgatctgagaagcgagcattctctcgatacagggtttggttccaacctccgtgatgtccaccagaaattgcatggctagatccttggtcttcaaagacttgcggtccagcaagttcaccagtttctctatggttcttagttgcagaaatctttgcaagacaagggatccacccttcgcaaagacgatctgatggagagcgtagtacgctgaatcctggagctcatcgatgttgcactgcagcatgtcaatgagctcgtgaacaatattaagctccaggaacctatgcacgtatggctctcctccagtgcaggccaatttcatcaccaaaaaggcggtctgggacctcacctggttcttttcaacctctctgcgttgtagcagccaagccaacctatcaaacagatggcttcccagaaggaggatattatgaagaatcacctcaaatgattgttgaggctttggtgattgcggcacatttctgtcagataaaacaaatctttccaaactgatccgagcatgccagggcaaatgaagcagcactgcaggccctatgcacccttgaagtggagcaccaagttcacagaatgtttttagcgtgataatcgcgtggtgctgtgagatctcagaaccattgcccagaagcacaagaagtttattgtcaattcctgattcaatcattgtctcaacagccttcagctttccaacctttgtcagagatgcaagtgttgtaaacacaatttcatgccactgctcattttctgcagtcaagagatctgcaattcgaaccatgggaattcttgacaaaatttcatccgcaattgtggcatcaacatgctcagatatcttggtcagaacagaagagaggttggctagagttgaagtatcttcacaggcaccaagaagatcaattaatttatctatggaacctgctatttcaagagagtgagcaagatttatgtagtctgatggggaaaatataactgtaattgcggcagtgactgcaaaaataagatctagtgaccctatagaaattatctctgctattcgagggccaagtattttgctgaacccaattctatttgtctcaagttcagacagggatctgcatgccatgagagcttgagttgtgtttaccaataaaatctcgatgtccatgaattctagcagagaaaagaatgatcccatcttctgttcggctggccgtttcatacactctttgccaaaaacaaaaagccaaggagctactaatgccacattatatgaaatggaatcagataaaagagcacgagtggcatcatttgttttgttctccaggtaaagtgagaccatgtcatgcatatgatacaacggctggtcctccagtttgataataagtgatccttcgactagttttgaaaccacgagagagaacagtccgcactgctcaagcgctgaccaaatggattccagacaagcctcaggaacaggttcttcccaagagatagctgcaagagccatgaaaaaaattcttgaattttctggcattgcttctaagctgaactcaaaagatccaaatatggtcaacgtagtctccacatctttctcattgacgtatgaaactggaccaggtgcacatgtggcatatgttgagaggttggatatagctttctcccatttttccactctagtttccttcctcagagccttgcccatgacagcaactgtaaggggatggtgaccacatcgatccaacaagacttctgcgacaggctgtgaagtatagagaagttaaacattcaaaaaccatggtgtttggaatttttagttattctattttttcatgatgtatcttcttctaaaatatcttactttgcaagtttggcacaactactaattgaaaataaatatgtatataaaaaat

SEQ ID NO: 45940 - DNA, 3724 bp, Zea Mays
gctagcgtcagcctcgtctcgctcgttttgctccgtctctcttcctcctcacttcccacccaccctcgttttgctccgtctctcttcctcctcacttcccacccaccctcgctcgttttgttctgtctctctttctcctcactccctccgtcgatcctctgcagcttgcatcggtcgaccagtagtcttccactgtaatcgcctctcattattctttctgccacgctcctcttcgtccttactccctccgtcttgtctatctgtagccacttcgtcttcctacgtttttgccaggatttgaggctgtcatagtatgctctctgaccgtgctggcgggaggaaggaggtgtgtatatagttttcttgcattattttcctgtgactattctcatccctcctatatgttctttcagatgatttaagttctctgcgtttataaccagaaagaggaggataatccaatcatggtaactaaatagtaggtagtaatgtttcacggtaaatcacagtgctcgaatgcgatatgatctttgactcggagtattgaagactaatttagtttgagtttgagattagttgtttttgtcattaataaactcacattggcatctggttacgagctcactactagattttagatctccagttttggtgtacttttgctgcatgtgtctcccagagttgcagatttgcaggtagcacctgattcttttttatttttggattgagatacagtgaaatttatatttgcctgttcccaccatactgtaatatgaatacaaggatggcttgatctggcaagtgctcgccattctatgggcccatcatgcttttcgagtacactgtttgatcacaaggagcggtctgctgccactaaacttcaagttgttgatcatgatggcctgaaaaattatcggggatatgctcatatgccttggccttaatttaaactacttgtatgagatggagaaatgtcacaaaacacaggatgaagacgactccaggaatccacccatgcctctcagtgactcagtggcacaaacgacagcctagtcaggtaacacaataacatatcagccatatgctatacatgcatatactatgttatggaaataactccgaagagtatatcacattctaactagttatgtatgcaaacactaatgcaagacaaccatcttgctcgtcatgttggtgtggtgggggtcaaaagcgtcttgctgctgaaattgatggtataccgtacaagcatttacctttgatttttgctgacgttaatatgttgcttcactaaaggactaggagacgtcttcacatcacggagtagaccactcagcaacaacagtgcaacggtgttcggacttttgttcacatatgggagtgtttaagctcctgcacctagatttagaaacaccaccatgtaaaatagacaagacagtgcttttgcaaacatgatgctaccacgagacccgaactcatgtatggccaaacatgttaacatattttgtatgtcaccaaaacgcttatttacatcaatgagcgattatctgaactgttgaatgctcaccaaaatgcttatttctatttcctactgctacttgctcctttgaagccttcagcgatggaggcctccacagaagctactaggatggcctccagcttatgacctctcactgccgaccgcaccttcctcagaatatgttgcttcatcaccgccctctcagcagactggagtttcttgcacatgttcaatccctggatgtacctcgacaccgcgccgccgaaaggatcaccggctttctcaagggccacgagcttctcgacgatctgagaagcgagcattctctcgatacagggtttggttccaacctccgtgatgtccaccagaaattgcatggctagatccttggtcttcaaagacttgcggtccagcaagttcaccagtttctctatggttcttagttgcagaaatctttgcaagacaagggatccacccttcgcaaagacgatctgatggagagcgtagtacgctgaatcctggagctcatcgatgttgcactgcagcatgtcaatgagctcgtgaacaatattaagctccaggaacctatgcacgtatggctctcctccagtgcaggccaatttcatcaccaaaaaggcggtctgggacctcacctggttcttttcaacctctctgcgttgtagcagccaagccaacctatcaaacagatggcttcccagaaggaggatattatgaagaatcacctcaaatgattgttgaggctttggtgattgcggcacatttctgtcagataaaacaaatctttccaaactgatccgagcatgccagggcaaatgaagcagcactgcaggccctatgcacccttgaagtggagcaccaagttcacagaatgtttttagcgtgataatcgcgtggtgctgtgagatctcagaaccattgcccagaagcacaagaagtttattgtcaattcctgattcaatcattgtctcaacagccttcagctttccaacctttgtcagagatgcaagtgttgtaaacacaatttcatgccactgctcattttctgcagtcaagagatctgcaattcgaaccatgggaattcttgacaaaatttcatccgcaattgtggcatcaacatgctcagatatcttggtcagaacagaagagaggttggctagagttgaagtatcttcacaggcaccaagaagatcaattaatttatctatggaacctgctatttcaagagagtgagcaagatttatgtagtctgatggggaaaatataactgtaattgcggcagtgactgcaaaaataagatctagtgaccctatagaaattatctctgctattcgagggccaagtattttgctgaacccaattctatttgtctcaagttcagacagggatctgcatgccatgagagcttgagttgtgtttaccaataaaatctcgatgtccatgaattctagcagagaaaagaatgatcccatcttctgttcggctggccgtttcatacactctttgccaaaaacaaaaagccaaggagctactaatgccacattatatgaaatggaatcagataaaagagcacgagtggcatcatttgttttgttctccaggtaaagtgagaccatgtcatgcatatgatacaacggctggtcctccagtttgataataagtgatccttcgactagttttgaaaccacgagagagaacagtccgcactgctcaagcgctgaccaaatggattccagacaagcctcaggaacaggttcttcccaagagatagctgcaagagccatgaaaaaaattcttgaattttctggcattgcttctaagctgaactcaaaagatccaaatatggtcaacgtagtctccacatctttctcattgacgtatgaaactggaccaggtgcacatgtggcatatgttgagaggttggatatagctttctcccatttttccactctagtttccttcctcagagccttgcccatgacagcaactgtaaggggatggtgaccacatcgatccaacaagacttctgcgacaggctgtgaagtatagagaagttaaacattcaaaaaccatggtgtttggaatttttagttattctattttttcatgatgtatcttcttctaaaatatcttactttgcaagtttggcacaactactaattgaaaataaatatgtatataaaaaat

SEQ ID NO: 45941 - DNA, 1429 bp, Zea Mays
gttcagttgtgactatcactaaccaacctaacaaggtcaaaagtccttaaacagagtattcatctagattggcacagttttacatgtctgttcagttgtttaattatcgacacatggcgaatacattgtccctatacaggactgttaagagattaggaatacctgatgagcgaatcatacttatgttggcggacgatatggcctgtaacccaaggaacagctatcctgcccaagttttcaataatgagaaccaccagctaaatctctatggtgacaatgttgaggtcgattatcgagggtatgaggtgacagttgaaaatttcttgagagttttgactggccgacatgaaagtgctgtaccaagatcgaagcgtcttcttagtgatgaaggaagtcatatacttttgtacatgactggacatggtggtgatgaatttttgaagttccaagattctgaagagcttcagagccatgacttagcagatgctgtgaagcaaatgaaggagaagcatagatttaaagagctgctgataatggtagatacctgccaagctgctactctcttttcacagcttcagtcacctggtgttttggcgattggtagtagcatgaagggtgaaaactcttattctcaccatcttgattcagatgtaggtgtttctgttgtggataggtttacctattatacacttgctttctttgagaaactgaacatgtatagcaatgcctcactgaacagccttttcacctcatacaatccttccatgctgttgtctactgcatattatcgaatggatctttatgaacgtcccttaaatgaggtgcctgtgacaaatttttttggatcagtcatgaagactctccacactgattcagcctacacaggtttcttggctgcgcatgacaatgaaactccaatgtccacgggagataaccttgatgatcatttcatgttaaagggcagggctatcgcacgaagatcaaccatagaaaaggaggcacaattaacaccgcatggatggactgaagttctggctgaacagctggagggaaagaatactgatactgttgtgatgtatggtctgggagctatgggtatactgttggcactttcaacctggttatcaatgtaggcaccaaaaaagtgtggttcgtagtctcttacgctatccatctctggtccgcgtgcgagagagagaaaagagataatatgtttgggaggtcttttagattttttctcttggtttttaaattcattaacgatgattagagttctttagaaaatgctgtatgtagttctttagggattactgtgttatcgttttatttatttaacatgatcttttgggaaagacttgtgcatatggaagtttggttatcttgatagccatttgagtatcttgtctccgtgcaacttttgatatataac

SEQ ID NO: 45942 - DNA, 1699 bp, Zea Mays
cttggagttgggcctgcccacctcccggccggtccgccgcgcggttccagtttcgcctctcgtcgccggtcctggcgagccccgcctccttgatctccgaccagcagcttccccactgcccactccccagccccggacgtgcccttcgccggtgctgtcatggcgttcggccgacggagccccggatcctcgcggcaccctcccgcgctcaccatcgtcacggcgctactcctcgcctccctctacttcgccgccgcggcggcggctctatcgcccaccgacgcgatgcacaacaacaactgggccgtgctcgtgtgtacctcccgcttctggttaagaataatcatgcttcaaaagtcaagtgctttgagtaactatcttattccattttgttgccttttgtttcctttcaggactgttaagagattaggaatacctgatgagcgaatcatacttatgttggcggacgatatggcctgtaacccaaggaacagctatcctgcccaagttttcaataatgagaaccaccagctaaatctctatggtgacaatgttgaggtcgattatcgagggtatgaggtgacagttgaaaatttcttgagagttttgactggccgacatgaaagtgctgtaccaagatcgaagcgtcttcttagtgatgaaggaagtcatatacttttgtacatgactggacatggtggtgatgaatttttgaagttccaagattctgaagagcttcagagccatgacttagcagatgctgtgaagcaaatgaaggagaagcatagatttaaagagctgctgataatggtagatacctgccaagctgctactctcttttcacagcttcagtcacctggtgttttggcgattggtagtagcatgaagggtgaaaactcttattctcaccatcttgattcagatgtgtttctgttgtggataggtttacctattatacacttgctttctttgagaaactgaacatgtatagcaatgcctcactgaacagccttttcacctcatacaatccttccatgctgttgtctactgcatattatcgaatggatctttatgaacgtcccttaaatgaggtgcctgtgacaaatttttttggatcagtcatgaagactctccacactgattcagcctacacaggtttcttggctgcgcatgacaatgaaactccaatgtccacgggagataaccttgatgatcatttcatgttaaagggcagggctatcgcacgaagatcaaccatagaaaaggaggcacaattaacaccgcatggatggactgaagttctggctgaacagctggagggaaagaatactgatactgttgtgatgtatggtctgggagctatgggtatactgttggcactttcaacctggttatcaatgtaggcaccaaaaaagtgtggttcgtagtctcttacgctatccatctctggtccgcgtgcgagagagagaaaagagataatatgtttgggaggtcttttagattttttctcttggtttttaaattcattaacgatgattagagttctttagaaaatgctgtatgtagttctttagggattactgtgttatcgttttatttatttaacatgatcttttgggaaagacttgtgcatatggaagtttggttatcttgatagccatttgagtatcttgtctccgtgcaacttttgatatataac

SEQ ID NO: 45943 - DNA, 1660 bp, Zea Mays
cttggagttgggcctgcccacctcccggccggtccgccgcgcggttccagtttcgcctctcgtcgccggtcctggcgagccccgcctccttgatctccgaccagcagcttccccactgcccactccccagccccggacgtgcccttcgccggtgctgtcatggcgttcggccgacggagccccggatcctcgcggcaccctcccgcgctcaccatcgtcacggcgctactcctcgcctccctctacttcgccgccgcggcggcggctctatcgcccaccgacgcgatgcacaacaacaactgggccgtgctcgtgtgtacctcccgcttctggtttaattatcgacacatggcgaatacattgtccctatacaggactgttaagagattaggaatacctgatgagcgaatcatacttatgttggcggacgatatggcctgtaacccaaggaacagctatcctgcccaagttttcaataatgagaaccaccagctaaatctctatggtgacaatgttgaggtcgattatcgagggtatgaggtgacagttgaaaatttcttgagagttttgactggccgacatgaaagtgctgtaccaagatcgaagcgtcttcttagtgatgaaggaagtcatatacttttgtacatgactggacatggtggtgatgaatttttgaagttccaagattctgaagagcttcagagccatgacttagcagatgctgtgaagcaaatgaaggagaagcatagatttaaagagctgctgataatggtagatacctgccaagctgctactctcttttcacagcttcagtcacctggtgttttggcgattggtagtagcatgaagggtgaaaactcttattctcaccatcttgattcagatgtgtttctgttgtggataggtttacctattatacacttgctttctttgagaaactgaacatgtatagcaatgcctcactgaacagccttttcacctcatacaatccttccatgctgttgtctactgcatattatcgaatggatctttatgaacgtcccttaaatgaggtgcctgtgacaaatttttttggatcagtcatgaagactctccacactgattcagcctacacaggtttcttggctgcgcatgacaatgaaactccaatgtccacgggagataaccttgatgatcatttcatgttaaagggcagggctatcgcacgaagatcaaccatagaaaaggaggcacaattaacaccgcatggatggactgaagttctggctgaacagctggagggaaagaatactgatactgttgtgatgtatggtctgggagctatgggtatactgttggcactttcaacctggttatcaatgtaggcaccaaaaaagtgtggttcgtagtctcttacgctatccatctctggtccgcgtgcgagagagagaaaagagataatatgtttgggaggtcttttagattttttctcttggtttttaaattcattaacgatgattagagttctttagaaaatgctgtatgtagttctttagggattactgtgttatcgttttatttatttaacatgatcttttgggaaagacttgtgcatatggaagtttggttatcttgatagccatttgagtatcttgtctccgtgcaacttttgatatataac

SEQ ID NO: 45944 - DNA, 1659 bp, Zea Mays
ctccttctaccagcctgctccggtcctcttggagttgggcctgcccacctcccggccggtccgccgcgcggttccagtttcgcctctcgtcgccggtcctggcgagccccgcctccttgatctccgaccagcagcttccccactgcccactccccagccccggacgtgcccttcgccggtgctgtcatggcgttcggccgacggagccccggatcctcgcggcaccctcccgcgctcaccatcgtcacggcgctactcctcgcctccctctacttcgccgccgcggcggcggctctatcgcccaccgacgcgatgcacaacaacaactgggccgtgctcgtgtgtacctcccgcttctggtttaattatcgacacatggcgaatacattgtccctatacaggactgttaagagattaggaatacctgatgagcgaatcatacttatgttggcggacgatatggcctgtaacccaaggaacagctatcctgcccaagttttcaataatgagaaccaccagctaaatctctatggtgacaatgttgaggtcgattatcgagggtatgaggtgacagttgaaaatttcttgagagttttgactggccgacatgaaagtgctgtaccaagatcgaagcgtcttcttagtgatgaaggaagtcatatacttttgtacatgactggacatggtggtgatgaatttttgaagttccaagattctgaagagcttcagagccatgacttagcagatgctgtgaagcaaatgaaggagaagcatagatttaaagagctgctgataatggtagatacctgccaagctgctactctcttttcacagcttcagtcacctggtgttttggcgattggtagtagcatgaagggtgaaaactcttattctcaccatcttgattcagatgtgtttctgttgtggataggtttacctattatacacttgctttctttgagaaactgaacatgtatagcaatgcctcactgaacagccttttcacctcatacaatccttccatgctgttgtctactgcatattatcgaatggatctttatgaacgtcccttaaatgagtcatgaagactctccacactgattcagcctacacaggtttcttggctgcgcatgacaatgaaactccaatgtccacgggagataaccttgatgatcatttcatgttaaagggcagggctatcgcacgaagatcaaccatagaaaaggaggcacaattaacaccgcatggatggactgaagttctggctgaacagctggagggaaagaatactgatactgttgtgatgtatggtctgggagctatgggtatactgttggcactttcaacctggttatcaatgtaggcaccaaaaaagtgtggttcgtagtctcttacgctatccatctctggtccgcgtgcgagagagagaaaagagataatatgtttgggaggtcttttagattttttctcttggtttttaaattcattaacgatgattagagttctttagaaaatgctgtatgtagttctttagggattactgtgttatcgttttatttatttaacatgatcttttgggaaagacttgtgcatatggaagtttggttatcttgatagccatttgagtatcttgtctccgtgcaacttttgatatataac

SEQ ID NO: 45945 - DNA, 1764 bp, Zea Mays
gtccgagccggcccaggcctgctcgccgaggacgagatgctccgcgcttccttatcaacacgggccgctcgctctccttctaccagcctgctccggtcctcttggagttgggcctgcccacctcccggccggtccgccgcgcggttccagtttcgcctctcgtcgccggtcctggcgagccccgcctccttgatctccgaccagcagcttccccactgcccactccccagccccggacgtgcccttcgccggtgctgtcatggcgttcggccgacggagccccggatcctcgcggcaccctcccgcgctcaccatcgtcacggcgctactcctcgcctccctctacttcgccgccgcggcggcggctctatcgcccaccgacgcgatgcacaacaacaactgggccgtgctcgtgtgtacctcccgcttctggtttaattatcgacacatggcgaatacattgtccctatacaggactgttaagagattaggaatacctgatgagcgaatcatacttatgttggcggacgatatggcctgtaacccaaggaacagctatcctgcccaagttttcaataatgagaaccaccagctaaatctctatggtgacaatgttgaggtcgattatcgagggtatgaggtgacagttgaaaatttcttgagagttttgactggccgacatgaaagtgctgtaccaagatcgaagcgtcttcttagtgatgaaggaagtcatatacttttgtacatgactggacatggtggtgatgaatttttgaagttccaagattctgaagagcttcagagccatgacttagcagatgctgtgaagcaaatgaaggagaagcatagatttaaagagctgctgataatggtagatacctgccaagctgctactctcttttcacagcttcagtcacctggtgttttggcgattggtagtagcatgaagggtgaaaactcttattctcaccatcttgattcagatgtaggtgtttctgttgtggataggtttacctattatacacttgctttctttgagaaactgaacatgtatagcaatgcctcactgaacagccttttcacctcatacaatccttccatgctgttgtctactgcatattatcgaatggatctttatgaacgtcccttaaatgaggtgcctgtgacaaatttttttggatcagtcatgaagactctccacactgattcagcctacacaggtttcttggctgcgcatgacaatgaaactccaatgtccacgggagataaccttgatgatcatttcatgttaaagggcagggctatcgcacgaagatcaaccatagaaaaggaggcacaattaacaccgcatggatggactgaagttctggctgaacagctggagggaaagaatactgatactgttgtgatgtatggtctgggagctatgggtatactgttggcactttcaacctggttatcaatgtaggcaccaaaaaagtgtggttcgtagtctcttacgctatccatctctggtccgcgtgcgagagagagaaaagagataatatgtttgggaggtcttttagattttttctcttggtttttaaattcattaacgatgattagagttctttagaaaatgctgtatgtagttctttagggattactgtgttatcgttttatttatttaacatgatcttttgggaaagacttgtgcatatggaagtttggttatcttgatagccatttgagtatcttgtctccgtgcaacttttgatatataac

SEQ ID NO: 45946 - DNA, 1677 bp, Zea Mays
cagaggaggatgatgcattgtcacagttgtctaactgtgccctaacacagaccggagcgtcgcggcgctatctcctccgcggctctgcgcgcagtcgtgttggcaactgcagcggggcggcggcgtgcgtccctgctgtgagcttcatcgccccgtatcaagctagtttaggctgtcagcgggccacaacttcagccacacaacccggaactccgacaaccctcgcggctcgtgccgccctctcccgctcggtcgttcccatggatccaccgcaagagttggccgccgccggccgcaagcggcgccggcgaggaggcgtccggaaccgcaaaaggctttcctcgcagaaggggctccctccagcgactgcgcccccaacgccggcgtccccacctgtcaagcggcggcgcaaggacatcgctggacaggccgctgctatgccgaagagaggcaacacctcgagtctactggacaagatgcgtgcaaggttatctggtggccattttagaatgttaaacgagaagctatacacttgcagtggagaggatgcatttgactacttcaaaaacgaccctaatctttttgatgtggatatcaagagcagatgtcacactggcctgaacagccagtgaatgtaataatcaattggttgaagagtcagaatgcgtcatggactgttgctgattttggctgtggcaatgcagcagttgcaaaaaatctgaagaacaaggttttctccattgatctcgtttcagatgaaccttcagtgattgcttgtgatatggctcatactccattggagccatcctctatagatgttgcaatattttgtctttctttgatgggaatcaactatccaagttatttagaggaagcaaatagggttctcaaaccaagtggttggcttgttattgctgaagtgcgaagtaggctagacccgagcaacggaggtgctgatcctgaaaagttttctaaagccattatccagcttggcttttcgcttgtttcaaaggatgtgaaaaacagaatgttcattctgttctacttcaggaaaaaggaaaaaagtaaggtggcgaagagcatcgattggccacagctgaaaccgtgcttgtacaaacggcgatgagccgcttgtctcgtatccaccagtaatactgtagttgttgtagtagagctcttcaaaagtttcgtcaaaactgaaagtctagatttaggtccctccgtacctgtatggctgcatctgtgtgccacgctattccattattttccacattagctgcgtctttcatttgttggacctcacaagaaaagatcacatagggaacgatgcattgtttggaagcagatcatatataattcaagtctacttttcacatgctgcaaattttgtgtatggtccagcgaacgaacatctggaccgttttcatttttcaatctggaatctggatcagcttgaaggaagtgctatgaccttgaatacttgatgaacggaagcattcgatgaaccttgctaaacgggaagttgaaaagaactttgcaaggacttttggttttcaattgatctccatccccattcgacgttatgggtgaagggatgaaggccgagcggtcgaggcatcaagtgaagttgcggaccattggatgagtcgagtggcgatccgtgagggcaaggagccg

SEQ ID NO: 45947 - DNA, 1687 bp, Zea Mays
cagaggaggatgatgcattgtcacagttgtctaactgtgccctaacacagaccggagcgtcgcggcgctatctcctccgcggctctgcgcgcagtcgtgttggcaactgcagcggggcggcggcgtgcgtccctgctgtgagcttcatcgccccgtatcaagctagtttaggctgtcagcgggccacaacttcagccacacaacccggaactccgacaaccctcgcggctcgtgccgccctctcccgctcggtcgttcccatggatccaccgcaagagttggccgccgccggccgcaagcggcgccggcgaggaggcgtccggaaccgcaaaaggctttcctcgcagaaggggctccctccagcgactgcgcccccaacgccggcgtccccacctgtcaagcggcggcgcaaggacatcgctggacaggccgctgctatgccgaagagaggcaacacctcgagtctactggacaagatgcgtgcaaggttatctggtggccattttagaatgttaaacgagaagctatacacttgcagtggagaggatgcatttgactacttcaaaaacgaccctaatctttttgatgtgtatcatacaggatatcaagagcagatgtcacactggcctgaacagccagtgaatgtaataatcaattggttgaagagtcagaatgcgtcatggactgttgctgattttggctgtggcaatgcagcagttgcaaaaaatctgaagaacaaggttttctccattgatctcgtttcagatgaaccttcagtgattgcttgtgatatggctcatactccattggagccatcctctatagatgttgcaatattttgtctttctttgatgggaatcaactatccaagttatttagaggaagcaaatagggttctcaaaccaagtggttggcttgttattgctgaagtgcgaagtaggctagacccgagcaacggaggtgctgatcctgaaaagttttctaaagccattatccagcttggcttttcgcttgtttcaaaggatgtgaaaaacagaatgttcattctgttctacttcaggaaaaaggaaaaaagtaaggtggcgaagagcatcgattggccacagctgaaaccgtgcttgtacaaacggcgatgagccgcttgtctcgtatccaccagtaatactgtagttgttgtagtagagctcttcaaaagtttcgtcaaaactgaaagtctagatttaggtccctccgtacctgtatggctgcatctgtgtgccacgctattccattattttccacattagctgcgtctttcatttgttggacctcacaagaaaagatcacatagggaacgatgcattgtttggaagcagatcatatataattcaagtctacttttcacatgctgcaaattttgtgtatggtccagcgaacgaacatctggaccgttttcatttttcaatctggaatctggatcagcttgaaggaagtgctatgaccttgaatacttgatgaacggaagcattcgatgaaccttgctaaacgggaagttgaaaagaactttgcaaggacttttggttttcaattgatctccatccccattcgacgttatgggtgaagggatgaaggccgagcggtcgaggcatcaagtgaagttgcggaccattggatgagtcgagtggcgatccgtgagggcaaggagccg

SEQ ID NO: 45948 - DNA, 668 bp, Zea Mays
gcacagacttttatagccaaatggacgaccactaggagggaaactactccctgattatgactccattggagccatcctctatagatgttgcaatattttgtctttctttgatgggaatcaactatccaagttatttagaggaagcaaatagggttctcaaaccaagtggttggcttgttattgctgaagtgcgaagtaggctagacccgagcaacggaggtgctgatcctgaaaagttttctaaagccattatccagcttggcttttcgcttgtttcaaaggatgtgaaaaacagaatgttcattctgttctacttcaggaaaaaggaaaaaagtaaggtggcgaagagcatcgattggccacagctgaaaccgtgcttgtacaaacggcgatgagccgcttgtctcgtatccaccagtaatactgtagttgttgtagtagagctcttcaaaagtttcgtcaaaactgaaagtctagatttaggtccctccgtacctgtatggctgcatctgtgtgccacgctattccattattttccacattagctgcgtctttcatttgttggacctcacaagaaaagatcacatagggaacgatgcattgtttggaagcagatcatatataattcaagtctacttttcacatgctgcaaattttgtgtatggtcc

SEQ ID NO: 45949 - DNA, 1347 bp, Zea Mays
cagaggaggatgatgcattgtcacagttgtctaactgtgccctaacacagaccggagcgtcgcggcgctatctcctccgcggctctgcgcgcagtcgtgttggcaactgcagcggggcggcggcgtgcgtccctgctgtgagcttcatcgccccgtatcaagctagtttaggctgtcagcgggccacaacttcagccacacaacccggaactccgacaaccctcgcggctcgtgccgccctctcccgctcggtcgttcccatggatccaccgcaagagttggccgccgccggccgcaagcggcgccggcgaggaggcgtccggaaccgcaaaaggctttcctcgcagaaggggctccctccagcgactgcgcccccaacgccggcgtccccacctgtcaagcggcggcgcaaggacatcgctggacaggccgctgctatgccgaagagaggcaacacctcgagtctactggacaagatgcgtgcaaggttatctggtggccattttagaatgttaaacgagaagctatacacttgcaggatatcaagagcagatgtcacactggcctgaacagccagtgaatgtaataatcaattggttgaagagtcagaatgcgtcatggactgttgctgattttggctgtggcaatgcagcagttgcaaaaaatctgaagaacaaggttttctccattgatctcgtttcagatgaaccttcagtgattgcttgtgatatggctcatactccattggagccatcctctatagatgttgcaatattttgtctttctttgatgggaatcaactatccaagttatttagaggaagcaaatagggttctcaaaccaagtggttggcttgttattgctgaagtgcgaagtaggctagacccgagcaacggaggtgctgatcctgaaaagttttctaaagccattatccagcttggcttttcgcttgtttcaaaggatgtgaaaaacagaatgttcattctgttctacttcaggaaaaaggaaaaaagtaaggtggcgaagagcatcgattggccacagctgaaaccgtgcttgtacaaacggcgatgagccgcttgtctcgtatccaccagtaatactgtagttgttgtagtagagctcttcaaaagtttcgtcaaaactgaaagtctagatttaggtccctccgtacctgtatggctgcatctgtgtgccacgctattccattattttccacattagctgcgtctttcatttgttggacctcacaagaaaagatcacatagggaacgatgcattgtttggaagcagatcatatataattcaagtctacttttcacatgctgcaaattttgtgtatggtcc

SEQ ID NO: 45950 - DNA, 1187 bp, Zea Mays
cagaggaggatgatgcattgtcacagttgtctaactgtgccctaacacagaccggagcgtcgcggcgctatctcctccgcggctctgcgcgcagtcgtgttggcaactgcagcggggcggcggcgtgcgtccctgctgtgagcttcatcgccccgtatcaagctagtttaggctgtcagcgggccacaacttcagccacacaacccggaactccgacaaccctcgcggctcgtgccgccctctcccgctcggtcgttcccatggatccaccgcaagagttggccgccgccggccgcaagcggcgccggcgaggaggcgtccggaaccgcaaaaggctttcctcgcagaaggggctccctccagcgactgcgcccccaacgccggcgtccccacctgtcaagcggcggcgcaaggacatcgctggacaggccgctgctatgccgaagagaggcaacacctcgagtctactggacaagatgcgtgcaaggttatctggtggccattttagaatgttaaacgagaagctatacacttgcagtggagaggatgcatttgactacttcaaaaacgaccctaatctttttgatgtgtatcatacaggatatcaagagcagatgtcacactggcctgaacagccagtgaatgtaataatcaattggttgaagagtcagaatgcgtcatggactgttgctgattttggctgtggcaatgcagcagttgcaaaaaatctgaagaacaaggttttctccattgatctcgtttcagatgaaccttcagtgattgcttgtgatatggctcatgatgtgaaaaacagaatgttcattctgttctacttcaggaaaaaggaaaaaagtaaggtggcgaagagcatcgattggccacagctgaaaccgtgcttgtacaaacggcgatgagccgcttgtctcgtatccaccagtaatactgtagttgttgtagtagagctcttcaaaagtttcgtcaaaactgaaagtctagatttaggtccctccgtacctgtatggctgcatctgtgtgccacgctattccattattttccacattagctgcgtctttcatttgttggacctcacaagaaaagatcacatagggaacgatgcattgtttggaagcagatcatatataattcaagtctacttttcacatgctgcaaattttgtgtatggtcc

SEQ ID NO: 45951 - DNA, 1386 bp, Zea Mays
cagaggaggatgatgcattgtcacagttgtctaactgtgccctaacacagaccggagcgtcgcggcgctatctcctccgcggctctgcgcgcagtcgtgttggcaactgcagcggggcggcggcgtgcgtccctgctgtgagcttcatcgccccgtatcaagctagtttaggctgtcagcgggccacaacttcagccacacaacccggaactccgacaaccctcgcggctcgtgccgccctctcccgctcggtcgttcccatggatccaccgcaagagttggccgccgccggccgcaagcggcgccggcgaggaggcgtccggaaccgcaaaaggctttcctcgcagaaggggctccctccagcgactgcgcccccaacgccggcgtccccacctgtcaagcggcggcgcaaggacatcgctggacaggccgctgctatgccgaagagaggcaacacctcgagtctactggacaagatgcgtgcaaggttatctggtggccattttagaatgttaaacgagaagctatacacttgcagtggagaggatgcatttgactacttcaaaaacgaccctaatctttttgatgtgtatcatacaggatatcaagagcagatgtcacactggcctgaacagccagtgaatgtaataatcaattggttgaagagtcagaatgcgtcatggactgttgctgattttggctgtggcaatgcagcagttgcaaaaaatctgaagaacaaggttttctccattgatctcgtttcagatgaaccttcagtgattgcttgtgatatggctcatactccattggagccatcctctatagatgttgcaatattttgtctttctttgatgggaatcaactatccaagttatttagaggaagcaaatagggttctcaaaccaagtgcgaagtaggctagacccgagcaacggaggtgctgatcctgaaaagttttctaaagccattatccagcttggcttttcgcttgtttcaaaggatgtgaaaaacagaatgttcattctgttctacttcaggaaaaaggaaaaaagtaaggtggcgaagagcatcgattggccacagctgaaaccgtgcttgtacaaacggcgatgagccgcttgtctcgtatccaccagtaatactgtagttgttgtagtagagctcttcaaaagtttcgtcaaaactgaaagtctagatttaggtccctccgtacctgtatggctgcatctgtgtgccacgctattccattattttccacattagctgcgtctttcatttgttggacctcacaagaaaagatcacatagggaacgatgcattgtttggaagcagatcatatataattcaagtctacttttcacatgctgcaaattttgtgtatggtcc

SEQ ID NO: 45952 - DNA, 1626 bp, Zea Mays
cagaggaggatgatgcattgtcacagttgtctaactgtgccctaacacagaccggagcgtcgcggcgctatctcctccgcggctctgcgcgcagtcgtgttggcaactgcagcggggcggcggcgtgcgtccctgctgtgagcttcatcgccccgtatcaagctagtttaggctgtcagcgggccacaacttcagccacacaacccggaactccgacaaccctcgcggctcgtgccgccctctcccgctcggtcgttcccatggatccaccgcaagagttggccgccgccggccgcaagcggcgccggcgaggaggcgtccggaaccgcaaaaggctttcctcgcagaaggggctccctccagcgactgcgcccccaacgccggcgtccccacctgtcaagcggcggcgcaaggacatcgctggacaggccgctgctatgccgaagagaggcaacacctcgagtctactggacaagatgcgtgcaaggttatctggtggccattttagaatgttaaacgagaagctatacacttgcagtatcatacaggatatcaagagcagatgtcacactggcctgaacagccagtgaatgtaataatcaattggttgaagagtcagaatgcgtcatggactgttgctgattttggctgtggcaatgcagcagttgcaaaaaatctgaagaacaaggttttctccattgatctcgtttcagatgaaccttcagtgattgcttgtgatatggctcatactccattggagccatcctctatagatgttgcaatattttgtctttctttgatgggaatcaactatccaagttatttagaggaagcaaatagggttctcaaaccaagtggttggcttgttattgctgaagtgcgaagtaggctagacccgagcaacggaggtgctgatcctgaaaagttttctaaagccattatccagcttggcttttcgcttgtttcaaaggtttgtatgttttccaactgagttctagatttgaattgttattatgtagttgtacacaataagcgcctgtaagtactgaaacatgtggtgctaactagcattggttctctatggacccaatcaatctactttccaatctccagaattgcatatgtaaggtcgaccatatggccctattatggatgccttcctaggcccacactatcggcgatgcaagaagcatatgggcaagcattaggcatggtttcagagatgcagtcgaattggaagatgtgaaaaacagaatgttcattctgttctacttcaggaaaaaggaaaaaagtaaggtggcgaagagcatcgattggccacagctgaaaccgtgcttgtacaaacggcgatgagccgcttgtctcgtatccaccagtaatactgtagttgttgtagtagagctcttcaaaagtttcgtcaaaactgaaagtctagatttaggtccctccgtacctgtatggctgcatctgtgtgccacgctattccattattttccacattagctgcgtctttcatttgttggacctcacaagaaaagatcacatagggaacgatgcattgtttggaagcagatcatatataattcaagtctacttttcacatgctgcaaattttgtgtatggtcc

SEQ ID NO: 45953 - DNA, 3872 bp, Zea Mays
tgcccgtgtgccaggcgaaaaacgtagcctcgcactctcgcaggcggcggcgcatcgagaaacagggctgcggctgttgcttcttccacctctccggccatccggcggtccatcgttccgtgccggcggcctcccctcctacgcccctgccgattcttcaatcttcaccaacgtctgcgcgtagcaggctagcagtcggcacggcttcctcagatctgccggacgacttgctgttcgtcaccgactcaccagcaaccaacgtcagccatcagccggcagcaggggaagctgggcggagggtcattgcggcacggcgtccaggcgtacagaaggcaccagcaacagcccatggcaaacgccgcagatgaccctatggcagatgaagccggagtagaagatgccttcacacaggagatcaatcattcttcatgttctccttgtgtggctggtgctggattcaaccgatctagggaagagatgttagttgatttgctgtaaaaatcaatatgttaacagagatatatgatacatgctcctgcttgctcatgatgccggtttggtgccaaagctatcttcttgagacgggatggggatggaagaggctggtgccctacagacctggttatgttgagttgcatgtgttcaagaaataccttggggactatttcgaccataatcgtgaagcttttctttgtgccgagcagaagcctgatccatttggatggattgttgctgaaaagagtgccctgattgctgcagccaaatcgtgcctcaagatggagaaggcacttctcaggtactgtgctagctttctcactcctgacgacaaaaggctgatcctccggatcaaggaccaggcaaagcaaatgatccaatcagagggtgatcaatctttgattgtaactatatgcttggagtgtattgcgaaggaggccgagttaatgtacaattatttgccttgtgattttgacaccaccgaagaagtcgccgtctgcaataaggttcggcggtctgccttgaatcttatgctctacaaaggttctgaatctgctgttgctgctggtgccatgatggtgtgttcctgatactctctccattcattttataggctttattttgactatgcaaaaaccaatattctgctgtaaattctccctatagtattatgttggtagttacaaaatcatagtcagtagcaagtgcttttaattaggaattgttacgtaactcacattttatgggactaatgtctggtcaaagcatgaacttggatagtcaaaccacaccttataaatatgaatatagggagtaattgtgtattttttaatcctctgttatcctgtcaagcttctttaaccaaactgcaaaaacgatgtacttgaagggtatcacaacagaggctaagtccatttttgacttgcttagtcgagaccatgacgtggtcatggaagtttttacttgtgagagtataagggaacatacagcatcagttctgacccagcttgggaaggaatttgcttgcgagactgctactgtgaacagctcatcagcgcggcctatgggggtcagtgatgttagagatctgaactctgaagtatctggttcaatggaagactgtacgagtatggatggagcaaggttttaaagtcggctagtcgactctagtcgcctaagcaccgataaggtgactaatcgcgattagtcgtcgattagctcgattagtcgatcctagtcgactccctagtcgtcctatagtcgtccatctataacaggaccatatatatatatatatatactagattgcaaatctattgacaatattacaatgaaactgtagaatgaatgaatgatcatgttttcactaaaaggtaaagatcacttagacacttaccttggattggagtatacaacagcacactgcaagattagtaggacaacacttctggtatatctccagcagccttactagtgcaaaacgtcatatatctccaacaaagcaagcagaggagggcgtccagcaagcagaggagggcggcggcgcttacagcagcagcaagcagaggagggcggcgctcagagcagcagcaagcagaggagggcggcagcgctcagagcagcagcaagcagaggagggcggcggcgctcacagcagcagcaagcagaggagggcggcgctcagagcagcagcaagcagaggagggcggcagcgctcagagcagcagcaagcagagaagggcggcgacgctcacagcagcagcaagcagaggagggcggcgctcacagcagcagcaagcagaggagggcggcggcgctcagagcagcagcaagcaggggagggcggcggcgctcagagcagttagcagcaagcagatgaagcggtggcgctcaactccagctaggttaaagactgtaacggcattggcacagtttcaggcttttcagcccccctggtgggccggcccaaatagaaaagagcagcctggagcccaaaacaaagcacctagtcgagaacaaccctaatcggacgactaatcgccgactaatcgcgattagtcggacgactaggtttctagtcgccctaatcgcgtcggtggccctaatcggccttgcagcagcgataagtccgactaatcgcgactaatcgcgattagtcggacgactttaaaaccattccgatggagacaatggaaacaatccagttgttggagggggtggctaagaactcgaagaatttaaagttggtggagaaccacgaaaacgagaccagggttgccaccttgatgactgaaaataactagggccttgcagggaaaccttcgttgacttctgaggtactgaaggaatccaattcatgatgatgagctacattattcaagtttagcaactattgattgtgtttcccatcatgccttggatgtgtcaaaacttgaacacaccaatttgaagattatcataccctgcttatctatccacatacaaccaaccaaacaaaaatctgctggatcatcccatttgaaaacttgcaaccaaccaaacaagaatttggctcatgcaatccgtccaacctaatgagctaatacatgtaggagcatcattctatgattctatcctaaatccatggatggccctatcccatccaaccttgcctctccaacccatacggccatacaaacttgtgaccattcattgtaattctcatttcattgtcataagtgcgcctcgtttgacactgttgtttctctcgtcatcattggctttgtgtcggacacgttcatgataatttatctgcagcaacggtcaaatttatgaagctacaaggtgcaagttatgagctgctgtaactaaaaggatctctggtttcttttgagcagctgtctgttgtgtcaagttatgtgctacttgtaacactaaagtaccattttaccttatgacatgcagtgcttggttgttctgtcgtagttaaagaccgtgttgcaataagtgctagttctgtatgtttcctgggtttatgttatcaaatggttgcctggtttgcccactaatgtcatgttgctataagtattcctagctgttgagaaatgcgtgcgcgcgtgccgatcgttgtatcattgggtgcaacatcataggtcattgtagccaagggctatgaagaggggagtttcagatagtccaaaaacaccagggtacatagcaaatacgaaggttcttaggaaggaacagaagtgcgcaggccatttcgcgcaccatgaagcacccgcgatgagcagacgacaaccttggaacaaaacgaacctagagttcgaaggcggaccacactgcggatgatgtagcttatggacgtccacactgaggtctgaggatgaacgaaatag

SEQ ID NO: 45954 - DNA, 3882 bp, Zea Mays
tgcccgtgtgccaggcgaaaaacgtagcctcgcactctcgcaggcggcggcgcatcgagaaacagggctgcggctgttgcttcttccacctctccggccatccggcggtccatcgttccgtgccggcggcctcccctcctacgcccctgccgattcttcaatcttcaccaacgtctgcgcgtagcaggctagcagtcggcacggcttcctcagatctgccggacgacttgctgttcgtcaccgactcaccagcaaccaacgtcagccatcagccggcagcaggggaagctgggcggagggtcattgcggcacggcgtccaggcgtacagaaggcaccagcaacagcccatggcaaacgccgcagatgaccctatggcagatgaagccggagtagaagatgccttcacacaggagatcaatcattcgtacgtccctagataccatgtgttgagttggatggaaactgtggaggggatggtggccggtgtggcgtcgcttccgccggtgtatttgatactgaacagagagatatatgatacatgctcctgcttgctcatgatgccggtttggtgccaaagctatcttcttgagacgggatggggatggaagaggctggtgccctacagacctggttatgttgagttgcatgtgttcaagaaataccttggggactatttcgaccataatcgtgaagcttttctttgtgccgagcagaagcctgatccatttggatggattgttgctgaaaagagtgccctgattgctgcagccaaatcgtgcctcaagatggagaaggcacttctcaggtactgtgctagctttctcactcctgacgacaaaaggctgatcctccggatcaaggaccaggcaaagcaaatgatccaatcagagggtgatcaatctttgattgtaactatatgcttggagtgtattgcgaaggaggccgagttaatgtacaattatttgccttgtgattttgacaccaccgaagaagtcgccgtctgcaataaggttcggcggtctgccttgaatcttatgctctacaaaggttctgaatctgctgttgctgctggtgccatgatggtgtgttcctgatactctctccattcattttataggctttattttgactatgcaaaaaccaatattctgctgtaaattctccctatagtattatgttggtagttacaaaatcatagtcagtagcaagtgcttttaattaggaattgttacgtaactcacattttatgggactaatgtctggtcaaagcatgaacttggatagtcaaaccacaccttataaatatgaatatagggagtaattgtgtattttttaatcctctgttatcctgtcaagcttctttaaccaaactgcaaaaacgatgtacttgaagggtatcacaacagaggctaagtccatttttgacttgcttagtcgagaccatgacgtggtcatggaagtttttacttgtgagagtataagggaacatacagcatcagttctgacccagcttgggaaggaatttgcttgcgagactgctactgtgaacagctcatcagcgcggcctatgggggtcagtgatgttagagatctgaactctgaagtatctggttcaatggaagactgtacgagtatggatggagcaaggttttaaagtcggctagtcgactctagtcgcctaagcaccgataaggtgactaatcgcgattagtcgtcgattagctcgattagtcgatcctagtcgactccctagtcgtcctatagtcgtccatctataacaggaccatatatatatatatatatactagattgcaaatctattgacaatattacaatgaaactgtagaatgaatgaatgatcatgttttcactaaaaggtaaagatcacttagacacttaccttggattggagtatacaacagcacactgcaagattagtaggacaacacttctggtatatctccagcagccttactagtgcaaaacgtcatatatctccaacaaagcaagcagaggagggcgtccagcaagcagaggagggcggcggcgcttacagcagcagcaagcagaggagggcggcgctcagagcagcagcaagcagaggagggcggcagcgctcagagcagcagcaagcagaggagggcggcggcgctcacagcagcagcaagcagaggagggcggcgctcagagcagcagcaagcagaggagggcggcagcgctcagagcagcagcaagcagagaagggcggcgacgctcacagcagcagcaagcagaggagggcggcgctcacagcagcagcaagcagaggagggcggcggcgctcagagcagcagcaagcaggggagggcggcggcgctcagagcagttagcagcaagcagatgaagcggtggcgctcaactccagctaggttaaagactgtaacggcattggcacagtttcaggcttttcagcccccctggtgggccggcccaaatagaaaagagcagcctggagcccaaaacaaagcacctagtcgagaacaaccctaatcggacgactaatcgccgactaatcgcgattagtcggacgactaggtttctagtcgccctaatcgcgtcggtggccctaatcggccttgcagcagcgataagtccgactaatcgcgactaatcgcgattagtcggacgactttaaaaccattccgatggagacaatggaaacaatccagttgttggagggggtggctaagaactcgaagaatttaaagttggtggagaaccacgaaaacgagaccagggttgccaccttgatgactgaaaataactagggccttgcagggaaaccttcgttgacttctgaggtactgaaggaatccaattcatgatgatgagctacattattcaagtttagcaactattgattgtgtttcccatcatgccttggatgtgtcaaaacttgaacacaccaatttgaagattatcataccctgcttatctatccacatacaaccaaccaaacaaaaatctgctggatcatcccatttgaaaacttgcaaccaaccaaacaagaatttggctcatgcaatccgtccaacctaatgagctaatacatgtaggagcatcattctatgattctatcctaaatccatggatggccctatcccatccaaccttgcctctccaacccatacggccatacaaacttgtgaccattcattgtaattctcatttcattgtcataagtgcgcctcgtttgacactgttgtttctctcgtcatcattggctttgtgtcggacacgttcatgataatttatctgcagcaacggtcaaatttatgaagctacaaggtgcaagttatgagctgctgtaactaaaaggatctctggtttcttttgagcagctgtctgttgtgtcaagttatgtgctacttgtaacactaaagtaccattttaccttatgacatgcagtgcttggttgttctgtcgtagttaaagaccgtgttgcaataagtgctagttctgtatgtttcctgggtttatgttatcaaatggttgcctggtttgcccactaatgtcatgttgctataagtattcctagctgttgagaaatgcgtgcgcgcgtgccgatcgttgtatcattgggtgcaacatcataggtcattgtagccaagggctatgaagaggggagtttcagatagtccaaaaacaccagggtacatagcaaatacgaaggttcttaggaaggaacagaagtgcgcaggccatttcgcgcaccatgaagcacccgcgatgagcagacgacaaccttggaacaaaacgaacctagagttcgaaggcggaccacactgcggatgatgtagcttatggacgtccacactgaggtctgaggatgaacgaaatag

SEQ ID NO: 45955 - DNA, 3831 bp, Zea Mays
tgcccgtgtgccaggcgaaaaacgtagcctcgcactctcgcaggcggcggcgcatcgagaaacagggctgcggctgttgcttcttccacctctccggccatccggcggtccatcgttccgtgccggcggcctcccctcctacgcccctgccgattcttcaatcttcaccaacgtctgcgcgtagcaggctagcagtcggcacggcttcctcagatctgccggacgacttgctgttcgtcaccgactcaccagcaaccaacgtcagccatcagccggcagcaggggaagctgggcggagggtcattgcggcacggcgtccaggcgtacagaaggcaccagcaacagcccatggcaaacgccgcagatgaccctatggcagatgaagccggagtagaagatgccttcacacaggagatcaatcattcgtacgtccctagataccatgtgttgagttggatggaaactgtggaggggatggtggccggtgtggcgtcgcttccgccggtgtatttgatactgaacagagatcttcttgagacgggatggggatggaagaggctggtgccctacagacctggttatgttgagttgcatgtgttcaagaaataccttggggactatttcgaccataatcgtgaagcttttctttgtgccgagcagaagcctgatccatttggatggattgttgctgaaaagagtgccctgattgctgcagccaaatcgtgcctcaagatggagaaggcacttctcaggtactgtgctagctttctcactcctgacgacaaaaggctgatcctccggatcaaggaccaggcaaagcaaatgatccaatcagagggtgatcaatctttgattgtaactatatgcttggagtgtattgcgaaggaggccgagttaatgtacaattatttgccttgtgattttgacaccaccgaagaagtcgccgtctgcaataaggttcggcggtctgccttgaatcttatgctctacaaaggttctgaatctgctgttgctgctggtgccatgatggtgtgttcctgatactctctccattcattttataggctttattttgactatgcaaaaaccaatattctgctgtaaattctccctatagtattatgttggtagttacaaaatcatagtcagtagcaagtgcttttaattaggaattgttacgtaactcacattttatgggactaatgtctggtcaaagcatgaacttggatagtcaaaccacaccttataaatatgaatatagggagtaattgtgtattttttaatcctctgttatcctgtcaagcttctttaaccaaactgcaaaaacgatgtacttgaagggtatcacaacagaggctaagtccatttttgacttgcttagtcgagaccatgacgtggtcatggaagtttttacttgtgagagtataagggaacatacagcatcagttctgacccagcttgggaaggaatttgcttgcgagactgctactgtgaacagctcatcagcgcggcctatgggggtcagtgatgttagagatctgaactctgaagtatctggttcaatggaagactgtacgagtatggatggagcaaggttttaaagtcggctagtcgactctagtcgcctaagcaccgataaggtgactaatcgcgattagtcgtcgattagctcgattagtcgatcctagtcgactccctagtcgtcctatagtcgtccatctataacaggaccatatatatatatatatatactagattgcaaatctattgacaatattacaatgaaactgtagaatgaatgaatgatcatgttttcactaaaaggtaaagatcacttagacacttaccttggattggagtatacaacagcacactgcaagattagtaggacaacacttctggtatatctccagcagccttactagtgcaaaacgtcatatatctccaacaaagcaagcagaggagggcgtccagcaagcagaggagggcggcggcgcttacagcagcagcaagcagaggagggcggcgctcagagcagcagcaagcagaggagggcggcagcgctcagagcagcagcaagcagaggagggcggcggcgctcacagcagcagcaagcagaggagggcggcgctcagagcagcagcaagcagaggagggcggcagcgctcagagcagcagcaagcagagaagggcggcgacgctcacagcagcagcaagcagaggagggcggcgctcacagcagcagcaagcagaggagggcggcggcgctcagagcagcagcaagcaggggagggcggcggcgctcagagcagttagcagcaagcagatgaagcggtggcgctcaactccagctaggttaaagactgtaacggcattggcacagtttcaggcttttcagcccccctggtgggccggcccaaatagaaaagagcagcctggagcccaaaacaaagcacctagtcgagaacaaccctaatcggacgactaatcgccgactaatcgcgattagtcggacgactaggtttctagtcgccctaatcgcgtcggtggccctaatcggccttgcagcagcgataagtccgactaatcgcgactaatcgcgattagtcggacgactttaaaaccattccgatggagacaatggaaacaatccagttgttggagggggtggctaagaactcgaagaatttaaagttggtggagaaccacgaaaacgagaccagggttgccaccttgatgactgaaaataactagggccttgcagggaaaccttcgttgacttctgaggtactgaagcaggaatccaattcatgatgatgagctacattattcaagtttagcaactattgattgtgtttcccatcatgccttggatgtgtcaaaacttgaacacaccaatttgaagattatcataccctgcttatctatccacatacaaccaaccaaacaaaaatctgctggatcatcccatttgaaaacttgcaaccaaccaaacaagaatttggctcatgcaatccgtccaacctaatgagctaatacatgtaggagcatcattctatgattctatcctaaatccatggatggccctatcccatccaaccttgcctctccaacccatacggccatacaaacttgtgaccattcattgtaattctcatttcattgtcataagtgcgcctcgtttgacactgttgtttctctcgtcatcattggctttgtgtcggacacgttcatgataatttatctgcagcaacggtcaaatttatgaagctacaaggtgcaagttatgagctgctgtaactaaaaggatctctggtttcttttgagcagctgtctgttgtgtcaagttatgtgctacttgtaacactaaagtaccattttaccttatgacatgcagtgcttggttgttctgtcgtagttaaagaccgtgttgcaataagtgctagttctgtatgtttcctgggtttatgttatcaaatggttgcctggtttgcccactaatgtcatgttgctataagtattcctagctgttgagaaatgcgtgcgcgcgtgccgatcgttgtatcattgggtgcaacatcataggtcattgtagccaagggctatgaagaggggagtttcagatagtccaaaaacaccagggtacatagcaaatacgaaggttcttaggaaggaacagaagtgcgcaggccatttcgcgcaccatgaagcacccgcgatgagcagacgacaaccttggaacaaaacgaacctagagttcgaaggcggaccacactgcggatgatgtagcttatggacgtccacactgaggtctgaggatgaacgaaatag

SEQ ID NO: 45956 - DNA, 4832 bp, Zea Mays
tgcccgtgtgccaggcgaaaaacgtagcctcgcactctcgcaggcggcggcgcatcgagaaacagggctgcggctgttgcttcttccacctctccggccatccggcggtccatcgttccgtgccggcggcctcccctcctacgcccctgccgattcttcaatcttcaccaacgtctgcgcgtagcaggctagcagtcggcacggcttcctcagatctgccggacgacttgctgttcgtcaccgactcaccagcaaccaacgtcagccatcagccggcagcaggggaagctgggcggagggtcattgcggcacggcgtccaggcgtacagaaggcaccagcaacagcccatggcaaacgccgcagatgaccctatggcagatgaagccggagtagaagatgccttcacacaggagatcaatcattcgtacgtccctagataccatgtgttgagttggatggaaactgtggaggggatggtggccggtgtggcgtcgcttccgccggtgtatttgatactgaacagagagatatatgatacatgctcctgcttgctcatgatgccggtttggtgccaaagctatcttcttgagacgggatggggatggaagaggctggtgccctacagacctggttatgttgagttgcatgtgttcaagaaataccttggggactatttcgaccataatcgtgaagcttttctttgtgccgagcagaagcctgatccatttggatggattgttgctgaaaagagtgccctgattgctgcagccaaatcgtgcctcaagatggagaaggcacttctcaggtactgtgctagctttctcactcctgacgacaaaaggctgatcctccggatcaaggaccaggcaaagcaaatgatccaatcagagggtgatcaatctttgattgtaactatatgcttggagaagtcgccgtctgcaataaggttcggcggtctgccttgaatcttatgctctacaaaggttctgaatctgctgttgctgctggtgccatgatggtgtgttcctgatactctctccattcattttataggctttattttgactatgcaaaaaccaatattctgctgtaaattctccctatagtattatgttggtagttacaaaatcatagtcagtagcaagtgcttttaattaggaattgttacgtaactcacattttatgggactaatgtctggtcaaagcatgaacttggatagtcaaaccacaccttataaatatgaatatagggagtaattgtgtattttttaatcctctgttatcctgtcaagcttctttaaccaaactgcaaaaacgatgtacttgaagggtatcacaacagaggctaagtccatttttgacttgcttagtcgagaccatgacgtggtcatggaagtttttacttgtgagagtataagggaacatacagcatcagttctgacccagcttgggaaggaatttgcttgcgagactgctactgtgaacagctcatcagcgcggcctatgggggtcagtgatgttagagatctgaactctgaagtatctggttcaatggaagactgtacgagtatggatggagcaaggttttaaagtcggctagtcgactctagtcgcctaagcaccgataaggtgactaatcgcgattagtcgtcgattagctcgattagtcgatcctagtcgactccctagtcgtcctatagtcgtccatctataacaggaccatatatatatatatatatactagattgcaaatctattgacaatattacaatgaaactgtagaatgaatgaatgatcatgttttcactaaaaggtaaagatcacttagacacttaccttggattggagtatacaacagcacactgcaagattagtaggacaacacttctggtatatctccagcagccttactagtgcaaaacgtcatatatctccaacaaagcaagcagaggagggcgtccagcaagcagaggagggcggcggcgcttacagcagcagcaagcagaggagggcggcgctcagagcagcagcaagcagaggagggcggcagcgctcagagcagcagcaagcagaggagggcggcggcgctcacagcagcagcaagcagaggagggcggcgctcagagcagcagcaagcagaggagggcggcagcgctcagagcagcagcaagcagagaagggcggcgacgctcacagcagcagcaagcagaggagggcggcgctcacagcagcagcaagcagaggagggcggcggcgctcagagcagcagcaagcaggggagggcggcggcgctcagagcagttagcagcaagcagatgaagcggtggcgctcaactccagctaggttaaagactgtaacggcattggcacagtttcaggcttttcagcccccctggtgggccggcccaaatagaaaagagcagcctggagcccaaaacaaagcacctagtcgagaacaaccctaatcggacgactaatcgccgactaatcgcgattagtcggacgactaggtttctagtcgccctaatcgcgtcggtggccctaatcggccttgcagcagcgataagtccgactaatcgcgactaatcgcgattagtcggacgactttaaaaccattccgatggagacaatggaaacaatccagttgttggagggggtggctaagaactcgaagaatttaaagttggtggagaaccacgaaaacgagaccagggttgccacgtaagagaagactgcatcagcatcactacttgcctgttttgaaatttaatgtacctttcacggaagccctcactaacattaattgtttgtatgtttcatctcagcttgatgactgaaaataactagggccttgcagggaaaccttcgttgacttctgaggtactgaaggttagtgaagaggcagatgattacgttccaaataggaagtcttgaatactgctgtgacttgtgttttgaaatagatatagtattttctggttctcttgcaaacctcattgttgcagccctaacatttcatggtgtgtttgatttgtggggtgggggtggatgggagacggtcaacccattttttaaagttgttcagttagatgggatgcccaaccagtggggatattcccccgagatcttggatgggatgtccatgcaaatctggtggacagagtagtccatggccttgttgaatacttattgcgcgactggttgtggtcacctaatgtgccttttctttttgctccaattgttcccaatctcatccctcattaacctgtttctgactgggatgcgcacagcaattgggaaccagcaggccctctgtccagacgctggtgctttgtgctccgttgttgtgctgctgctccactggcgtttactagttctagtgccttttcactgatttgtccgcacagggatcctggtgctagtgcttggctgattgctgctgcccctgtgttctccctcaattcgtactgctcatgcaattcctggaggccctaggaattggttctgcagttgtacctgtaggctgtagctgccaatttagttcgattttgaatttggcaggtagttgttgtgcttgtttctagatgcaagagtgcttattgtttgtggtgtttgttattggaaattttggttggtggtagttatttgtccggaaaggttaatgcaatgctgtggcttgtcttgcttttagtcaatggtagtaagttgagtaaaatgttcatgtgtatgtgcagcttgtggtcggcagtgtgaaattttgacctctaattatttgttagtaatgtaattttctcagcaggaatccaattcatgatgatgagctacattattcaagtttagcaactattgattgtgtttcccatcatgccttggatgtgtcaaaacttgaacacaccaatttgaagattatcataccctgcttatctatccacatacaaccaaccaaacaaaaatctgctggatcatcccatttgaaaacttgcaaccaaccaaacaagaatttggctcatgcaatccgtccaacctaatgagctaatacatgtaggagcatcattctatgattctatcctaaatccatggatggccctatcccatccaaccttgcctctccaacccatacggccatacaaacttgtgaccattcattgtaattctcatttcattgtcataagtgcgcctcgtttgacactgttgtttctctcgtcatcattggctttgtgtcggacacgttcatgataatttatctgcagcaacggtcaaatttatgaagctacaaggtgcaagttatgagctgctgtaactaaaaggatctctggtttcttttgagcagctgtctgttgtgtcaagttatgtgctacttgtaacactaaagtaccattttaccttatgacatgcagtgcttggttgttctgtcgtagttaaagaccgtgttgcaataagtgctagttctgtatgtttcctgggtttatgttatcaaatggttgcctggtttgcccactaatgtcatgttgctataagtattcctagctgttgagaaatgcgtgcgcgcgtgccgatcgttgtatcattgggtgcaacatcataggtcattgtagccaagggctatgaagaggggagtttcagatagtccaaaaacaccagggtacatagcaaatacgaaggttcttaggaaggaacagaagtgcgcaggccatttcgcgcaccatgaagcacccgcgatgagcagacgacaaccttggaacaaaacgaacctagagttcgaaggcggaccacactgcggatgatgtagcttatggacgtccacactgaggtctgaggatgaacgaaatag

SEQ ID NO: 45957 - DNA, 3511 bp, Zea Mays
tgcccgtgtgccaggcgaaaaacgtagcctcgcactctcgcaggcggcggcgcatcgagaaacagggctgcggctgttgcttcttccacctctccggccatccggcggtccatcgttccgtgccggcggcctcccctcctacgcccctgccgattcttcaatcttcaccaacgtctgcgcgtagcaggctagcagtcggcacggcttcctcagatctgccggacgacttgctgttcgtcaccgactcaccagcaaccaacgtcagccatcagccggcagcaggggaagctgggcggagggtcattgcggcacggcgtccaggcgtacagaaggcaccagcaacagcccatggcaaacgccgcagatgaccctatggcagatgaagccggagtagaagatgccttcacacaggagatcaatcattcgtacgtccctagataccatgtgttgagttggatggaaactgtggaggggatggtggccggtgtggcgtcgcttccgccggtgtatttgatactgaacagagatcttcttgagacgggatggggatggaagaggctggtgccctacagacctggttatgttgagttgcatgtgttcaagaaataccttggggactatttcgaccataatcgtgaagcttttctttgtgccgagcagaagcctgatccatttggatggattgttgctgaaaagagtgccctgattgctgcagccaaatcgtgcctcaagatggagaaggcacttctcaggtactgtgctagctttctcactcctgacgacaaaaggctgatcctccggatcaaggaccaggcaaagcaaatgatccaatcagagggtgatcaatctttgattgtaactatatgcttggagtgtattgcgaaggaggccgagttaatgtacaattatttgccttgtgattttgacaccaccgaagaagtcgccgtctgcaataaggttcggcggtctgccttgaatcttatgctctacaaaggttctgaatctgctgttgctgctggtgccatgatgggtatcacaacagaggctaagtccatttttgacttgcttagtcgagaccatgacgtggtcatggaagtttttacttgtgagagtataagggaacatacagcatcagttctgacccagcttgggaaggaatttgcttgcgagactgctactgtgaacagctcatcagcgcggcctatgggtgatgttagagatctgaactctgaagtatctggttcaatggaagactgtacgagtatggatggagcaaggttttaaagtcggctagtcgactctagtcgcctaagcaccgataaggtgactaatcgcgattagtcgtcgattagctcgattagtcgatcctagtcgactccctagtcgtcctatagtcgtccatctataacaggaccatatatatatatatatatactagattgcaaatctattgacaatattacaatgaaactgtagaatgaatgaatgatcatgttttcactaaaaggtaaagatcacttagacacttaccttggattggagtatacaacagcacactgcaagattagtaggacaacacttctggtatatctccagcagccttactagtgcaaaacgtcatatatctccaacaaagcaagcagaggagggcgtccagcaagcagaggagggcggcggcgcttacagcagcagcaagcagaggagggcggcgctcagagcagcagcaagcagaggagggcggcagcgctcagagcagcagcaagcagaggagggcggcggcgctcacagcagcagcaagcagaggagggcggcgctcagagcagcagcaagcagaggagggcggcagcgctcagagcagcagcaagcagagaagggcggcgacgctcacagcagcagcaagcagaggagggcggcgctcacagcagcagcaagcagaggagggcggcggcgctcagagcagcagcaagcaggggagggcggcggcgctcagagcagttagcagcaagcagatgaagcggtggcgctcaactccagctaggttaaagactgtaacggcattggcacagtttcaggcttttcagcccccctggtgggccggcccaaatagaaaagagcagcctggagcccaaaacaaagcacctagtcgagaacaaccctaatcggacgactaatcgccgactaatcgcgattagtcggacgactaggtttctagtcgccctaatcgcgtcggtggccctaatcggccttgcagcagcgataagtccgactaatcgcgactaatcgcgattagtcggacgactttaaaaccattccgatggagacaatggaaacaatccagttgttggagggggtggctaagaactcgaagaatttaaagttggtggagaaccacgaaaacgagaccagggttgccaccttgatgactgaaaataactagggccttgcagggaaaccttcgttgacttctgaggtactgaaggaatccaattcatgatgatgagctacattattcaagtttagcaactattgattgtgtttcccatcatgccttggatgtgtcaaaacttgaacacaccaatttgaagattatcataccctgcttatctatccacatacaaccaaccaaacaaaaatctgctggatcatcccatttgaaaacttgcaaccaaccaaacaagaatttggctcatgcaatccgtccaacctaatgagctaatacatgtaggagcatcattctatgattctatcctaaatccatggatggccctatcccatccaaccttgcctctccaacccatacggccatacaaacttgtgaccattcattgtaattctcatttcattgtcataagtgcgcctcgtttgacactgttgtttctctcgtcatcattggctttgtgtcggacacgttcatgataatttatctgcagcaacggtcaaatttatgaagctacaaggtgcaagttatgagctgctgtaactaaaaggatctctggtttcttttgagcagctgtctgttgtgtcaagttatgtgctacttgtaacactaaagtaccattttaccttatgacatgcagtgcttggttgttctgtcgtagttaaagaccgtgttgcaataagtgctagttctgtatgtttcctgggtttatgttatcaaatggttgcctggtttgcccactaatgtcatgttgctataagtattcctagctgttgagaaatgcgtgcgcgcgtgccgatcgttgtatcattgggtgcaacatcataggtcattgtagccaagggctatgaagaggggagtttcagatagtccaaaaacaccagggtacatagcaaatacgaaggttcttaggaaggaacagaagtgcgcaggccatttcgcgcaccatgaagcacccgcgatgagcagacgacaaccttggaacaaaacgaacctagagttcgaaggcggaccacactgcggatgatgtagcttatggacgtccacactgaggtctgaggatgaacgaaatag

SEQ ID NO: 45958 - DNA, 3669 bp, Zea Mays
tgcccgtgtgccaggcgaaaaacgtagcctcgcactctcgcaggcggcggcgcatcgagaaacagggctgcggctgttgcttcttccacctctccggccatccggcggtccatcgttccgtgccggcggcctcccctcctacgcccctgccgattcttcaatcttcaccaacgtctgcgcgtagcaggctagcagtcggcacggcttcctcagatctgccggacgacttgctgttcgtcaccgactcaccagcaaccaacgtcagccatcagccggcagcaggggaagctgggcggagggtcattgcggcacggcgtccaggcgtacagaaggcaccagcaacagcccatggcaaacgatgaccctatggcagatgaagccggagtagaagatgccttcacacaggagatcaatcattcgtacgtccctagataccatgtgttgagttggatggaaactgtggaggggatggtggccggtgtggcgtcgcttccgccggtgtatttgatactgaacagagagatatatgatacatgctcctgcttgctcatgatgccggtttggtgccaaagctatcttcttgagacgggatggggatggaagaggctggtgccctacagacctggttatgttgagttgcatgtgttcaagaaataccttggggactatttcgaccataatcgtgaagcttttctttgtgccgagcagaagcctgatccatttggatggattgttgctgaaaagagtgccctgattgctgcagccaaatcgtgcctcaagatggagaaggcacttctcaggtactgtgctagctttctcactcctgacgacaaaaggctgatcctccggatcaaggaccaggcaaagcaaatgatccaatcagagggtgatcaatctttgattgtaactatatgcttggagtgtattgcgaaggaggccgagttaatgtacaattatttgccttgtgattttgacaccaccgaagaagtcgccgtctgcaataaggttcggcggtctgccttgaatcttatgctctacaaaggttctgaatctgctgttgctgctggtgccatgatgggtatcacaacagaggctaagtccatttttgacttgcttagtcgagaccatgacgtggtcatggaagtttttacttgtgagagtataagggaacatacagcatcagttctgacccagcttgggaaggaatttgcttgcgagactgctactgtgaacagctcatcagcgcggcctatgggggtcagtgatgttagagatctgaactctgaagtatctggttcaatggaagactgtacgagtatggatggagcaaggttttaaagtcggctagtcgactctagtcgcctaagcaccgataaggtgactaatcgcgattagtcgtcgattagctcgattagtcgatcctagtcgactccctagtcgtcctatagtcgtccatctataacaggaccatatatatatatatatatactagattgcaaatctattgacaatattacaatgaaactgtagaatgaatgaatgatcatgttttcactaaaaggtaaagatcacttagacacttaccttggattggagtatacaacagcacactgcaagattagtaggacaacacttctggtatatctccagcagccttactagtgcaaaacgtcatatatctccaacaaagcaagcagaggagggcgtccagcaagcagaggagggcggcggcgcttacagcagcagcaagcagaggagggcggcgctcagagcagcagcaagcagaggagggcggcagcgctcagagcagcagcaagcagaggagggcggcggcgctcacagcagcagcaagcagaggagggcggcgctcagagcagcagcaagcagaggagggcggcagcgctcagagcagcagcaagcagagaagggcggcgacgctcacagcagcagcaagcagaggagggcggcgctcacagcagcagcaagcagaggagggcggcggcgctcagagcagcagcaagcaggggagggcggcggcgctcagagcagttagcagcaagcagatgaagcggtggcgctcaactccagctaggttaaagactgtaacggcattggcacagtttcaggcttttcagcccccctggtgggccggcccaaatagaaaagagcagcctggagcccaaaacaaagcacctagtcgagaacaaccctaatcggacgactaatcgccgactaatcgcgattagtcggacgactaggtttctagtcgccctaatcgcgtcggtggccctaatcggccttgcagcagcgataagtccgactaatcgcgactaatcgcgattagtcggacgactttaaaaccattccgatggagacaatggaaacaatccagttgttggagggggtggctaagaactcgaagaatttaaagttggtggagaaccacgaaaacgagaccagggttgccacgtaagagaagactgcatcagcatcactacttgcctgttttgaaatttaatgtacctttcacggaagccctcactaacattaattgtttgtatgtttcatctcagcttgatgactgaaaataactagggccttgcagggaaaccttcgttgacttctgaggtactgaaggaatccaattcatgatgatgagctacattattcaagtttagcaactattgattgtgtttcccatcatgccttggatgtgtcaaaacttgaacacaccaatttgaagattatcataccctgcttatctatccacatacaaccaaccaaacaaaaatctgctggatcatcccatttgaaaacttgcaaccaaccaaacaagaatttggctcatgcaatccgtccaacctaatgagctaatacatgtaggagcatcattctatgattctatcctaaatccatggatggccctatcccatccaaccttgcctctccaacccatacggccatacaaacttgtgaccattcattgtaattctcatttcattgtcataagtgcgcctcgtttgacactgttgtttctctcgtcatcattggctttgtgtcggacacgttcatgataatttatctgcagcaacggtcaaatttatgaagctacaaggtgcaagttatgagctgctgtaactaaaaggatctctggtttcttttgagcagctgtctgttgtgtcaagttatgtgctacttgtaacactaaagtaccattttaccttatgacatgcagtgcttggttgttctgtcgtagttaaagaccgtgttgcaataagtgctagttctgtatgtttcctgggtttatgttatcaaatggttgcctggtttgcccactaatgtcatgttgctataagtattcctagctgttgagaaatgcgtgcgcgcgtgccgatcgttgtatcattgggtgcaacatcataggtcattgtagccaagggctatgaagaggggagtttcagatagtccaaaaacaccagggtacatagcaaatacgaaggttcttaggaaggaacagaagtgcgcaggccatttcgcgcaccatgaagcacccgcgatgagcagacgacaaccttggaacaaaacgaacctagagttcgaaggcggaccacactgcggatgatgtagcttatggacgtccacactgaggtctgaggatgaacgaaatag

SEQ ID NO: 45959 - DNA, 3724 bp, Zea Mays
tgcccgtgtgccaggcgaaaaacgtagcctcgcactctcgcaggcggcggcgcatcgagaaacagggctgcggctgttgcttcttccacctctccggccatccggcggtccatcgttccgtgccggcggcctcccctcctacgcccctgccgattcttcaatcttcaccaacgtctgcgcgtagcaggctagcagtcggcacggcttcctcagatctgccggacgacttgctgttcgtcaccgactcaccagcaaccaacgtcagccatcagccggcagcaggggaagctgggcggagggtcattgcggcacggcgtccaggcgtacagaaggcaccagcaacagcccatggcaaacgatgaagccggagtagaagatgccttcacacaggagatcaatcattcgtacgtccctagataccatgtgttgagttggatggaaactgtggaggggatggtggccggtgtggcgtcgcttccgccggtgtatttgatactgaacagagatcttcttgagacgggatggggatggaagaggctggtgccctacagacctgaagcctgatccatttggatggattgttgctgaaaagagtgccctgattgctgcagccaaatcgtgcctcaagatggagaaggcacttctcaggtactgtgctagctttctcactcctgacgacaaaaggctgatcctccggatcaaggaccaggcaaagcaaatgatccaatcagagggtgatcaatctttgattgtaactatatgcttggagtgtattgcgaaggaggccgagttaatgtacaattatttgccttgtgattttgacaccaccgaagaagtcgccgtctgcaataaggttcggcggtctgccttgaatcttatgctctacaaaggttctgaatctgctgttgctgctggtgccatgatggtgtgttcctgatactctctccattcattttataggctttattttgactatgcaaaaaccaatattctgctgtaaattctccctatagtattatgttggtagttacaaaatcatagtcagtagcaagtgcttttaattaggaattgttacgtaactcacattttatgggactaatgtctggtcaaagcatgaacttggatagtcaaaccacaccttataaatatgaatatagggagtaattgtgtattttttaatcctctgttatcctgtcaagcttctttaaccaaactgcaaaaacgatgtacttgaagggtatcacaacagaggctaagtccatttttgacttgcttagtcgagaccatgacgtggtcatggaagtttttacttgtgagagtataagggaacatacagcatcagttctgacccagcttgggaaggaatttgcttgcgagactgctactgtgaacagctcatcagcgcggcctatgggggtcagtgatgttagagatctgaactctgaagtatctggttcaatggaagactgtacgagtatggatggagcaaggttttaaagtcggctagtcgactctagtcgcctaagcaccgataaggtgactaatcgcgattagtcgtcgattagctcgattagtcgatcctagtcgactccctagtcgtcctatagtcgtccatctataacaggaccatatatatatatatatatactagattgcaaatctattgacaatattacaatgaaactgtagaatgaatgaatgatcatgttttcactaaaaggtaaagatcacttagacacttaccttggattggagtatacaacagcacactgcaagattagtaggacaacacttctggtatatctccagcagccttactagtgcaaaacgtcatatatctccaacaaagcaagcagaggagggcgtccagcaagcagaggagggcggcggcgcttacagcagcagcaagcagaggagggcggcgctcagagcagcagcaagcagaggagggcggcagcgctcagagcagcagcaagcagaggagggcggcggcgctcacagcagcagcaagcagaggagggcggcgctcagagcagcagcaagcagaggagggcggcagcgctcagagcagcagcaagcagagaagggcggcgacgctcacagcagcagcaagcagaggagggcggcgctcacagcagcagcaagcagaggagggcggcggcgctcagagcagcagcaagcaggggagggcggcggcgctcagagcagttagcagcaagcagatgaagcggtggcgctcaactccagctaggttaaagactgtaacggcattggcacagtttcaggcttttcagcccccctggtgggccggcccaaatagaaaagagcagcctggagcccaaaacaaagcacctagtcgagaacaaccctaatcggacgactaatcgccgactaatcgcgattagtcggacgactaggtttctagtcgccctaatcgcgtcggtggccctaatcggccttgcagcagcgataagtccgactaatcgcgactaatcgcgattagtcggacgactttaaaaccattccgatggagacaatggaaacaatccagttgttggagggggtggctaagaactcgaagaatttaaagttggtggagaaccacgaaaacgagaccagggttgccaccttgatgactgaaaataactagggccttgcagggaaaccttcgttgacttctgaggtactgaaggaatccaattcatgatgatgagctacattattcaagtttagcaactattgattgtgtttcccatcatgccttggatgtgtcaaaacttgaacacaccaatttgaagattatcataccctgcttatctatccacatacaaccaaccaaacaaaaatctgctggatcatcccatttgaaaacttgcaaccaaccaaacaagaatttggctcatgcaatccgtccaacctaatgagctaatacatgtaggagcatcattctatgattctatcctaaatccatggatggccctatcccatccaaccttgcctctccaacccatacggccatacaaacttgtgaccattcattgtaattctcatttcattgtcataagtgcgcctcgtttgacactgttgtttctctcgtcatcattggctttgtgtcggacacgttcatgataatttatctgcagcaacggtcaaatttatgaagctacaaggtgcaagttatgagctgctgtaactaaaaggatctctggtttcttttgagcagctgtctgttgtgtcaagttatgtgctacttgtaacactaaagtaccattttaccttatgacatgcagtgcttggttgttctgtcgtagttaaagaccgtgttgcaataagtgctagttctgtatgtttcctgggtttatgttatcaaatggttgcctggtttgcccactaatgtcatgttgctataagtattcctagctgttgagaaatgcgtgcgcgcgtgccgatcgttgtatcattgggtgcaacatcataggtcattgtagccaagggctatgaagaggggagtttcagatagtccaaaaacaccagggtacatagcaaatacgaaggttcttaggaaggaacagaagtgcgcaggccatttcgcgcaccatgaagcacccgcgatgagcagacgacaaccttggaacaaaacgaacctagagttcgaaggcggaccacactgcggatgatgtagcttatggacgtccacactgaggtctgaggatgaacgaaatag

SEQ ID NO: 45960 - DNA, 3989 bp, Zea Mays
tgcccgtgtgccaggcgaaaaacgtagcctcgcactctcgcaggcggcggcgcatcgagaaacagggctgcggctgttgcttcttccacctctccggccatccggcggtccatcgttccgtgccggcggcctcccctcctacgcccctgccgattcttcaatcttcaccaacgtctgcgcgtagcaggctagcagtcggcacggcttcctcagatctgccggacgacttgctgttcgtcaccgactcaccagcaaccaacgtcagccatcagccggcagcaggggaagctgggcggagggtcattgcggcacggcgtccaggcgtacagaaggcaccagcaacagcccatggcaaacgccgcagatgaccctatggcagatgaagccggagtagaagatgccttcacacaggagatcaatcattcgtacgtccctagataccatgtgttgagttggatggaaactgtggaggggatggtggccggtgtggcgtcgcttccgccggtgtatttgatactgaacagagagatatatgatacatgctcctgcttgctcatgatgccggtttggtgccaaagctatcttcttgagacgggatggggatggaagaggctggtgccctacagacctggttatgttgagttgcatgtgttcaagaaataccttggggactatttcgaccataatcgtgaagcttttctttgtgccgagcagaagcctgatccatttggatggattgttgctgaaaagagtgccctgattgctgcagccaaatcgtgcctcaagatggagaaggcacttctcaggtactgtgctagctttctcactcctgacgacaaaaggctgatcctccggatcaaggaccaggcaaagcaaatgatccaatcagagggtgatcaatctttgattgtaactatatgcttggagtgtattgcgaaggaggccgagttaatgtacaattatttgccttgtgattttgacaccaccgaagaagtcgccgtctgcaataaggttcggcggtctgccttgaatcttatgctctacaaaggttctgaatctgctgttgctgctggtgccatgatggtgtgttcctgatactctctccattcattttataggctttattttgactatgcaaaaaccaatattctgctgtaaattctccctatagtattatgttggtagttacaaaatcatagtcagtagcaagtgcttttaattaggaattgttacgtaactcacattttatgggactaatgtctggtcaaagcatgaacttggatagtcaaaccacaccttataaatatgaatatagggagtaattgtgtattttttaatcctctgttatcctgtcaagcttctttaaccaaactgcaaaaacgatgtacttgaagggtatcacaacagaggctaagtccatttttgacttgcttagtcgagaccatgacgtggtcatggaagtttttacttgtgagagtataagggaacatacagcatcagttctgacccagcttgggaaggaatttgcttgcgagactgctactgtgaacagctcatcagcgcggcctatgggggtcagtgatgttagagatctgaactctgaagtatctggttcaatggaagactgtacgagtatggatggagcaaggttttaaagtcggctagtcgactctagtcgcctaagcaccgataaggtgactaatcgcgattagtcgtcgattagctcgattagtcgatcctagtcgactccctagtcgtcctatagtcgtccatctataacaggaccatatatatatatatatatactagattgcaaatctattgacaatattacaatgaaactgtagaatgaatgaatgatcatgttttcactaaaaggtaaagatcacttagacacttaccttggattggagtatacaacagcacactgcaagattagtaggacaacacttctggtatatctccagcagccttactagtgcaaaacgtcatatatctccaacaaagcaagcagaggagggcgtccagcaagcagaggagggcggcggcgcttacagcagcagcaagcagaggagggcggcgctcagagcagcagcaagcagaggagggcggcagcgctcagagcagcagcaagcagaggagggcggcggcgctcacagcagcagcaagcagaggagggcggcgctcagagcagcagcaagcagaggagggcggcagcgctcagagcagcagcaagcagagaagggcggcgacgctcacagcagcagcaagcagaggagggcggcgctcacagcagcagcaagcagaggagggcggcggcgctcagagcagcagcaagcaggggagggcggcggcgctcagagcagttagcagcaagcagatgaagcggtggcgctcaactccagctaggttaaagactgtaacggcattggcacagtttcaggcttttcagcccccctggtgggccggcccaaatagaaaagagcagcctggagcccaaaacaaagcacctagtcgagaacaaccctaatcggacgactaatcgccgactaatcgcgattagtcggacgactaggtttctagtcgccctaatcgcgtcggtggccctaatcggccttgcagcagcgataagtccgactaatcgcgactaatcgcgattagtcggacgactttaaaaccattccgatggagacaatggaaacaatccagttgttggagggggtggctaagaactcgaagaatttaaagttggtggagaaccacgaaaacgagaccagggttgccacgtaagagaagactgcatcagcatcactacttgcctgttttgaaatttaatgtacctttcacggaagccctcactaacattaattgtttgtatgtttcatctcagcttgatgactgaaaataactagggccttgcagggaaaccttcgttgacttctgaggtactgaagcaggaatccaattcatgatgatgagctacattattcaagtttagcaactattgattgtgtttcccatcatgccttggatgtgtcaaaacttgaacacaccaatttgaagattatcataccctgcttatctatccacatacaaccaaccaaacaaaaatctgctggatcatcccatttgaaaacttgcaaccaaccaaacaagaatttggctcatgcaatccgtccaacctaatgagctaatacatgtaggagcatcattctatgattctatcctaaatccatggatggccctatcccatccaaccttgcctctccaacccatacggccatacaaacttgtgaccattcattgtaattctcatttcattgtcataagtgcgcctcgtttgacactgttgtttctctcgtcatcattggctttgtgtcggacacgttcatgataatttatctgcagcaacggtcaaatttatgaagctacaaggtgcaagttatgagctgctgtaactaaaaggatctctggtttcttttgagcagctgtctgttgtgtcaagttatgtgctacttgtaacactaaagtaccattttaccttatgacatgcagtgcttggttgttctgtcgtagttaaagaccgtgttgcaataagtgctagttctgtatgtttcctgggtttatgttatcaaatggttgcctggtttgcccactaatgtcatgttgctataagtattcctagctgttgagaaatgcgtgcgcgcgtgccgatcgttgtatcattgggtgcaacatcataggtcattgtagccaagggctatgaagaggggagtttcagatagtccaaaaacaccagggtacatagcaaatacgaaggttcttaggaaggaacagaagtgcgcaggccatttcgcgcaccatgaagcacccgcgatgagcagacgacaaccttggaacaaaacgaacctagagttcgaaggcggaccacactgcggatgatgtagcttatggacgtccacactgaggtctgaggatgaacgaaatag

SEQ ID NO: 45961 - DNA, 2387 bp, Zea Mays
tgcccgtgtgccaggcgaaaaacgtagcctcgcactctcgcaggcggcggcgcatcgagaaacagggctgcggctgttgcttcttccacctctccggccatccggcggtccatcgttccgtgccggcggcctcccctcctacgcccctgccgattcttcaatcttcaccaacgtctgcgcgtagcaggctagcagtcggcacggcttcctcagatctgccggacgacttgctgttcgtcaccgactcaccagcaaccaacgtcagccatcagccggcagcaggggaagctgggcggagggtcattgcggcacggcgtccaggcgtacagaaggcaccagcaacagcccatggcaaacgatgaccctatggcagatgaagccggagtagaagatgccttcacacaggagatcaatcattcgtacgtccctagataccatgtgttgagttggatggaaactgtggaggggatggtggccggtgtggcgtcgcttccgccggtgtatttgatactgaacagagatcttcttgagacgggatggggatggaagaggctggtgccctacagacctggttatgttgagttgcatgtgttcaagaaataccttggggactatttcgaccataatcgtgaagcttttctttgtgccgagcagaagcctgatccatttggatggattgttgctgaaaagagtgccctgattgctgcagccaaatcgtgcctcaagatggagaaggcacttctcaggtactgtgctagctttctcactcctgacgacaaaaggctgatcctccggatcaaggaccaggcaaagcaaatgatccaatcagagggtgatcaatctttgattgtaactatatgcttggagtgtattgcgaaggaggccgagttaatgtacaattatttgccttgtgattttgacaccaccgaagaagtcgccgtctgcaataaggttcggcggtctgccttgaatcttatgctctacaaaggttctgaatctgctgttgctgctggtgccatgatgggtatcacaacagaggctaagtccatttttgacttgcttagtcgagaccatgacgtggtcatggaagtttttacttgtgagagtataagggaacatacagcatcagttctgacccagcttgggaaggaatttgcttgcgagactgctactgtgaacagctcatcagcgcggcctatgggggtcagtgatgttagagatctgaactctgaagtatctggttcaatggaagactgtacgagtatggatggagcaaggttttaaagtcggctagtcgactctagtcgcctaagcaccgataagggaaaccttcgttgacttctgaggtactgaaggaatccaattcatgatgatgagctacattattcaagtttagcaactattgattgtgtttcccatcatgccttggatgtgtcaaaacttgaacacaccaatttgaagattatcataccctgcttatctatccacatacaaccaaccaaacaaaaatctgctggatcatcccatttgaaaacttgcaaccaaccaaacaagaatttggctcatgcaatccgtccaacctaatgagctaatacatgtaggagcatcattctatgattctatcctaaatccatggatggccctatcccatccaaccttgcctctccaacccatacggccatacaaacttgtgaccattcattgtaattctcatttcattgtcataagtgcgcctcgtttgacactgttgtttctctcgtcatcattggctttgtgtcggacacgttcatgataatttatctgcagcaacggtcaaatttatgaagctacaaggtgcaagttatgagctgctgtaactaaaaggatctctggtttcttttgagcagctgtctgttgtgtcaagttatgtgctacttgtaacactaaagtaccattttaccttatgacatgcagtgcttggttgttctgtcgtagttaaagaccgtgttgcaataagtgctagttctgtatgtttcctgggtttatgttatcaaatggttgcctggtttgcccactaatgtcatgttgctataagtattcctagctgttgagaaatgcgtgcgcgcgtgccgatcgttgtatcattgggtgcaacatcataggtcattgtagccaagggctatgaagaggggagtttcagatagtccaaaaacaccagggtacatagcaaatacgaaggttcttaggaaggaacagaagtgcgcaggccatttcgcgcaccatgaagcacccgcgatgagcagacgacaaccttggaacaaaacgaacctagagttcgaaggcggaccacactgcggatgatgtagcttatggacgtccacactgaggtctgaggatgaacgaaatag

SEQ ID NO: 45962 - DNA, 3647 bp, Zea Mays
tgcccgtgtgccaggcgaaaaacgtagcctcgcactctcgcaggcggcggcgcatcgagaaacagggctgcggctgttgcttcttccacctctccggccatccggcggtccatcgttccgtgccggcggcctcccctcctacgcccctgccgattcttcaatcttcaccaacgtctgcgcgtagcaggctagcagtcggcacggcttcctcagatctgccggacgacttgctgttcgtcaccgactcaccagcaaccaacgtcagccatcagccggcagcaggggaagctgggcggagggtcattgcggcacggcgtccaggcgtacagaaggcaccagcaacagcccatggcaaacgatgaagccggagtagaagatgccttcacacaggagatcaatcattcgtacgtccctagataccatgtgttgagttggatggaaactgtggaggggatggtggccggtgtggcgtcgcttccgccggtgtatttgatactgaacagagagatatatgatacatgctcctgcttgctcatgatgccggtttggtgccaaagctatcttcttgagacgggatggggatggaagaggctggtgccctacagacctggttatgttgagttgcatgtgttcaagaaataccttggggactatttcgaccataatcgtgaagcttttctttgtgccgagcagaagcctgatccatttggatggattgttgctgaaaagagtgccctgattgctgcagccaaatcgtgcctcaagatggagaaggcacttctcaggtactgtgctagctttctcactcctgacgacaaaaggctgatcctccggatcaaggaccaggcaaagcaaatgatccaatcagagggtgatcaatctttgattgtaactatatgcttggagtgtattgcgaaggaggccgagttaatgtacaattatttgccttgtgattttgacaccaccgaagaagtcgccgtctgcaataaggttcggcggtctgccttgaatcttatgctctacaaaggttctgaatctgctgttgctgctggtgccatgatggtgtgttcctgatactctctccattcattttataggctttattttgactatgcaaaaaccaatattctgctgtaaattctccctatagtattatgttggtagttacaaaatcatagtcagtagcaagtgcttttaattaggaattgttacgtaactcacattttatgggactaatgtctggtcaaagcatgaacttggatagtcaaaccacaccttataaatatgaatatagggagtaattgtgtattttttaatcctctgttatcctgtcaagcttctttaaccaaactgcaaaaacgatgtacttgaagggtatcacaacagaggctaagtccatttttgacttgcttagtcgagaccatgacgtggtcatggaagtttttacttgtgagagtataagggaacatacagcatcagttctgacccagcttgggaaggaatttgcttgcgagactgctactgtgaacagctcatcagcgcggcctatgggggtcagtgatgttagagatctgaactctgaagtatctggttcaatggaagactgtacgagtatggatggagcaaggttttaaagtcggctagtcgactctagtcgcctaagcaccgataagggaaaccttcgttgacttctgaggtactgaaggttagtgaagaggcagatgattacgttccaaataggaagtcttgaatactgctgtgacttgtgttttgaaatagatatagtattttctggttctcttgcaaacctcattgttgcagccctaacatttcatggtgtgtttgatttgtggggtgggggtggatgggagacggtcaacccattttttaaagttgttcagttagatgggatgcccaaccagtggggatattcccccgagatcttggatgggatgtccatgcaaatctggtggacagagtagtccatggccttgttgaatacttattgcgcgactggttgtggtcacctaatgtgccttttctttttgctccaattgttcccaatctcatccctcattaacctgtttctgactgggatgcgcacagcaattgggaaccagcaggccctctgtccagacgctggtgctttgtgctccgttgttgtgctgctgctccactggcgtttactagttctagtgccttttcactgatttgtccgcacagggatcctggtgctagtgcttggctgattgctgctgcccctgtgttctccctcaattcgtactgctcatgcaattcctggaggccctaggaattggttctgcagttgtacctgtaggctgtagctgccaatttagttcgattttgaatttggcaggtagttgttgtgcttgtttctagatgcaagagtgcttattgtttgtggtgtttgttattggaaattttggttggtggtagttatttgtccggaaaggttaatgcaatgctgtggcttgtcttgcttttagtcaatggtagtaagttgagtaaaatgttcatgtgtatgtgcagcttgtggtcggcagtgtgaaattttgacctctaattatttgttagtaatgtaattttctcagcaggaatccaattcatgatgatgagctacattattcaagtttagcaactattgattgtgtttcccatcatgccttggatgtgtcaaaacttgaacacaccaatttgaagattatcataccctgcttatctatccacatacaaccaaccaaacaaaaatctgctggatcatcccatttgaaaacttgcaaccaaccaaacaagaatttggctcatgcaatccgtccaacctaatgagctaatacatgtaggagcatcattctatgattctatcctaaatccatggatggccctatcccatccaaccttgcctctccaacccatacggccatacaaacttgtgaccattcattgtaattctcatttcattgtcataagtgcgcctcgtttgacactgttgtttctctcgtcatcattggctttgtgtcggacacgttcatgataatttatctgcagcaacggtcaaatttatgaagctacaaggtgcaagttatgagctgctgtaactaaaaggatctctggtttcttttgagcagctgtctgttgtgtcaagttatgtgctacttgtaacactaaagtaccattttaccttatgacatgcagtgcttggttgttctgtcgtagttaaagaccgtgttgcaataagtgctagttctgtatgtttcctgggtttatgttatcaaatggttgcctggtttgcccactaatgtcatgttgctataagtattcctagctgttgagaaatgcgtgcgcgcgtgccgatcgttgtatcattgggtgcaacatcataggtcattgtagccaagggctatgaagaggggagtttcagatagtccaaaaacaccagggtacatagcaaatacgaaggttcttaggaaggaacagaagtgcgcaggccatttcgcgcaccatgaagcacccgcgatgagcagacgacaaccttggaacaaaacgaacctagagttcgaaggcggaccacactgcggatgatgtagcttatggacgtccacactgaggtctgaggatgaacgaaatag

SEQ ID NO: 45963 - DNA, 3624 bp, Zea Mays
tgcccgtgtgccaggcgaaaaacgtagcctcgcactctcgcaggcggcggcgcatcgagaaacagggctgcggctgttgcttcttccacctctccggccatccggcggtccatcgttccgtgccggcggcctcccctcctacgcccctgccgattcttcaatcttcaccaacgtctgcgcgtagcaggctagcagtcggcacggcttcctcagatctgccggacgacttgctgttcgtcaccgactcaccagcaaccaacgtcagccatcagccggcagcaggggaagctgggcggagggtcattgcggcacggcgtccaggcgtacagaaggcaccagcaacagcccatggcaaacgccgcagatgaccctatggcagatgaagccggagtagaagatgccttcacacaggagatcaatcattcgtacgtccctagataccatgtgttgagttggatggaaactgtggaggggatggtggccggtgtggcgtcgcttccgccggtgtatttgatactgaacagagatcttcttgagacgggatggggatggaagaggctggtgccctacagacctggttatgttgagttgcatgtgttcaagaaataccttggggactatttcgaccataatcgtgaagcttttctttgtgccgagcagaagcctgatccatttggatggattgttgctgaaaagagtgccctgattgctgcagccaaatcgtgcctcaagatggagaaggcacttctcaggtactgtgctagctttctcactcctgacgacaaaaggctgatcctccggatcaaggaccaggcaaagcaaatgatccaatcagagggtgatcaatctttgattgtaactatatgcttggagtgtattgcgaaggaggccgagttaatgtacaattatttgccttgtgattttgacaccaccgaagaagtcgccgtctgcaataaggttcggcggtctgccttgaatcttatgctctacaaaggttctgaatctgctgttgctgctggtgccatgatgggtatcacaacagaggctaagtccatttttgacttgcttagtcgagaccatgacgtggtcatggaagtttttacttgtgagagtataagggaacatacagcatcagttctgacccagcttgggaaggaatttgcttgcgagactgctactgtgaacagctcatcagcgcggcctatgggggtcagtgatgttagagatctgaactctgaagtatctggttcaatggaagactgtacgagtatggatggagcaaggttttaaagtcggctagtcgactctagtcgcctaagcaccgataaggtgactaatcgcgattagtcgtcgattagctcgattagtcgatcctagtcgactccctagtcgtcctatagtcgtccatctataacaggaccatatatatatatatatatactagattgcaaatctattgacaatattacaatgaaactgtagaatgaatgaatgatcatgttttcactaaaaggtaaagatcacttagacacttaccttggattggagtatacaacagcacactgcaagattagtaggacaacacttctggtatatctccagcagccttactagtgcaaaacgtcatatatctccaacaaagcaagcagaggagggcgtccagcaagcagaggagggcggcggcgcttacagcagcagcaagcagaggagggcggcgctcagagcagcagcaagcagaggagggcggcagcgctcagagcagcagcaagcagaggagggcggcggcgctcacagcagcagcaagcagaggagggcggcgctcagagcagcagcaagcagaggagggcggcagcgctcagagcagcagcaagcagagaagggcggcgacgctcacagcagcagcaagcagaggagggcggcgctcacagcagcagcaagcagaggagggcggcggcgctcagagcagcagcaagcaggggagggcggcggcgctcagagcagttagcagcaagcagatgaagcggtggcgctcaactccagctaggttaaagactgtaacggcattggcacagtttcaggcttttcagcccccctggtgggccggcccaaatagaaaagagcagcctggagcccaaaacaaagcacctagtcgagaacaaccctaatcggacgactaatcgccgactaatcgcgattagtcggacgactaggtttctagtcgccctaatcgcgtcggtggccctaatcggccttgcagcagcgataagtccgactaatcgcgactaatcgcgattagtcggacgactttaaaaccattccgatggagacaatggaaacaatccagttgttggagggggtggctaagaactcgaagaatttaaagttggtggagaaccacgaaaacgagaccagggttgccacgtaagagaagactgcatcagcatcactacttgcctgttttgaaatttaatgtacctttcacggaagccctcactaacattaattgtttgtatgtttcatctcagcttgatgactgaaaataactagggccttgcagggaaaccttcgttgacttctgaggtactgaagcaggaatccaattcatgatgatgagctacattattcaagtttagcaactattgattgtgtttcccatcatgccttggatgtgtcaaaacttgaacacaccaatttgaagattatcataccctgcttatctatccacatacaaccaaccaaacaaaaatctgctggatcatcccatttgaaaacttgcaaccaaccaaacaagaatttggctcatgcaatccgtccaacctaatgagctaatacatgtaggagcatcattctatgattctatcctaaatccatggatggccctatcccatccaaccttgcctctccaacccatacggccatacaaacttgtgaccattcattgtaattctcatttcattgtcataagtgcgcctcgtttgacactgttgtttctctcgtcatcattggctttgtgtcggacacgttcatgataatttatctgcagcaacggtcaaatttatgaagctacaaggtgcaagttatgagctgctgtaactaaaaggatctctggtttcttttgagcagctgtctgttgtgtcaagttatgtgctacttgtaacactaaagtaccattttaccttatgacatgcagtgcttggttgttctgtcgtagttaaagaccgtgttgcaataagtgctagttctgtatgtttcctgggtttatgttatcaaatggttgcctggtttgcccactaatgtcatgttgctataagtattcctagctgttgagaaatgcgtgcgcgcgtgccgatcgttgtatcattgggtgcaacatcataggtcattgtagccaagggctatgaagaggggagtttcagatagtccaaaaacaccagggtacatagcaaatacgaaggttcttaggaaggaacagaagtgcgcaggccatttcgcgcaccatgaagcacccgcgatgagcagacgacaaccttggaacaaaacgaacctagagttcgaaggcggaccacactgcggatgatgtagcttatggacgtccacactgaggtctgaggatgaacgaaatag

SEQ ID NO: 45964 - DNA, 2450 bp, Zea Mays
tgcccgtgtgccaggcgaaaaacgtagcctcgcactctcgcaggcggcggcgcatcgagaaacagggctgcggctgttgcttcttccacctctccggccatccggcggtccatcgttccgtgccggcggcctcccctcctacgcccctgccgattcttcaatcttcaccaacgtctgcgcgtagcaggctagcagtcggcacggcttcctcagatctgccggacgacttgctgttcgtcaccgactcaccagcaaccaacgtcagccatcagccggcagcaggggaagctgggcggagggtcattgcggcacggcgtccaggcgtacagaaggcaccagcaacagcccatggcaaacgccgcagatgaccctatggcagatgaagccggagtagaagatgccttcacacaggagatcaatcattcgtacgtccctagataccatgtgttgagttggatggaaactgtggaggggatggtggccggtgtggcgtcgcttccgccggtgtatttgatactgaacagagagatatatgatacatgctcctgcttgctcatgatgccggtttggtgccaaagctatcttcttgagacgggatggggatggaagaggctggtgccctacagacctggttatgttgagttgcatgtgttcaagaaataccttggggactatttcgaccataatcgtgaagcttttctttgtgccgagcagaagcctgatccatttggatggattgttgctgaaaagagtgccctgattgctgcagccaaatcgtgcctcaagatggagaaggcacttctcaggtactgtgctagctttctcactcctgacgacaaaaggctgatcctccggatcaaggaccaggcaaagcaaatgatccaatcagagggtgatcaatctttgattgtaactatatgcttggagtgtattgcgaaggaggccgagttaatgtacaattatttgccttgtgattttgacaccaccgaagaagtcgccgtctgcaataaggttcggcggtctgccttgaatcttatgctctacaaaggttctgaatctgctgttgctgctggtgccatgatgggtatcacaacagaggctaagtccatttttgacttgcttagtcgagaccatgacgtggtcatggaagtttttacttgtgagagtataagggaacatacagcatcagttctgacccagcttgggaaggaatttgcttgcgagactgctactgtgaacagctcatcagcgcggcctatgggggtcagtgatgttagagatctgaactctgaagtatctggttcaatggaagactgtacgagtatggatggagcaaggttttaaagtcggctagtcgactctagtcgcctaagcaccgataagggaaaccttcgttgacttctgaggtactgaagcaggaatccaattcatgatgatgagctacattattcaagtttagcaactattgattgtgtttcccatcatgccttggatgtgtcaaaacttgaacacaccaatttgaagattatcataccctgcttatctatccacatacaaccaaccaaacaaaaatctgctggatcatcccatttgaaaacttgcaaccaaccaaacaagaatttggctcatgcaatccgtccaacctaatgagctaatacatgtaggagcatcattctatgattctatcctaaatccatggatggccctatcccatccaaccttgcctctccaacccatacggccatacaaacttgtgaccattcattgtaattctcatttcattgtcataagtgcgcctcgtttgacactgttgtttctctcgtcatcattggctttgtgtcggacacgttcatgataatttatctgcagcaacggtcaaatttatgaagctacaaggtgcaagttatgagctgctgtaactaaaaggatctctggtttcttttgagcagctgtctgttgtgtcaagttatgtgctacttgtaacactaaagtaccattttaccttatgacatgcagtgcttggttgttctgtcgtagttaaagaccgtgttgcaataagtgctagttctgtatgtttcctgggtttatgttatcaaatggttgcctggtttgcccactaatgtcatgttgctataagtattcctagctgttgagaaatgcgtgcgcgcgtgccgatcgttgtatcattgggtgcaacatcataggtcattgtagccaagggctatgaagaggggagtttcagatagtccaaaaacaccagggtacatagcaaatacgaaggttcttaggaaggaacagaagtgcgcaggccatttcgcgcaccatgaagcacccgcgatgagcagacgacaaccttggaacaaaacgaacctagagttcgaaggcggaccacactgcggatgatgtagcttatggacgtccacactgaggtctgaggatgaacgaaatag

SEQ ID NO: 45965 - DNA, 4130 bp, Zea Mays
tgcccgtgtgccaggcgaaaaacgtagcctcgcactctcgcaggcggcggcgcatcgagaaacagggctgcggctgttgcttcttccacctctccggccatccggcggtccatcgttccgtgccggcggcctcccctcctacgcccctgccgattcttcaatcttcaccaacgtctgcgcgtagcaggctagcagtcggcacggcttcctcagatctgccggacgacttgctgttcgtcaccgactcaccagcaaccaacgtcagccatcagccggcagcaggggaagctgggcggagggtcattgcggcacggcgtccaggcgtacagaaggcaccagcaacagcccatggcaaacgccgcagatgaccctatggcagatgaagccggagtagaagatgccttcacacaggagatcaatcattcgtacgtccctagataccatgtgttgagttggatggaaactgtggaggggatggtggccggtgtggcgtcgcttccgccggtgtatttgatactgaacagagatcttcttgagacgggatggggatggaagaggctggtgccctacagacctggttatgttgagttgcatgtgttcaagaaataccttggggactatttcgaccataatcgtgaagcttttctttgtgccgagcagaagcctgatccatttggatggattgttgctgaaaagagtgccctgattgctgcagccaaatcgtgcctcaagatggagaaggcacttctcaggtactgtgctagctttctcactcctgacgacaaaaggctgatcctccggatcaaggaccaggcaaagcaaatgatccaatcagagggtgatcaatctttgattgtaactatatgcttggagtgtattgcgaaggaggccgagttaatgtacaattatttgccttgtgattttgacaccaccgaagaagtcgccgtctgcaataaggttcggcggtctgccttgaatcttatgctctacaaaggttctgaatctgctgttgctgctggtgccatgatgggtatcacaacagaggctaagtccatttttgacttgcttagtcgagaccatgacgtggtcatggaagtttttacttgtgagagtataagggaacatacagcatcagttctgacccagcttgggaaggaatttgcttgcgagactgctactgtgaacagctcatcagcgcggcctatgggggtcagtgatgttagagatctgaactctgaagtatctggttcaatggaagactgtacgagtatggatggagcaaggttttaaagtcggctagtcgactctagtcgcctaagcaccgataaggtgactaatcgcgattagtcgtcgattagctcgattagtcgatcctagtcgactccctagtcgtcctatagtcgtccatctataacaggaccatatatatatatatatatactagattgcaaatctattgacaatattacaatgaaactgtagaatgaatgaatgatcatgttttcactaaaaggtaaagatcacttagacacttaccttggattggagtatacaacagcacactgcaagattagtaggacaacacttctggtatatctccagcagccttactagtgcaaaacgtcatatatctccaacaaagcaagcagaggagggcgtccagcaagcagaggagggcggcggcgcttacagcagcagcaagcagaggagggcggcgctcagagcagcagcaagcagaggagggcggcagcgctcagagcagcagcaagcagaggagggcggcggcgctcacagcagcagcaagcagaggagggcggcgctcagagcagcagcaagcagaggagggcggcagcgctcagagcagcagcaagcagagaagggcggcgacgctcacagcagcagcaagcagaggagggcggcgctcacagcagcagcaagcagaggagggcggcggcgctcagagcagcagcaagcaggggagggcggcggcgctcagagcagttagcagcaagcagatgaagcggtggcgctcaactccagctaggttaaagactgtaacggcattggcacagtttcaggcttttcagcccccctggtgggccggcccaaatagaaaagagcagcctggagcccaaaacaaagcacctagtcgagaacaaccctaatcggacgactaatcgccgactaatcgcgattagtcggacgactaggtttctagtcgccctaatcgcgtcggtggccctaatcggccttgcagcagcgataagtccgactaatcgcgactaatcgcgattagtcggacgactttaaaaccattccgatggagacaatggaaacaatccagttgttggagggggtggctaagaactcgaagaatttaaagttggtggagaaccacgaaaacgagaccagggttgccacgtaagagaagactgcatcagcatcactacttgcctgttttgaaatttaatgtacctttcacggaagccctcactaacattaattgtttgtatgtttcatctcagcttgatgactgaaaataactagggccttgcagggaaaccttcgttgacttctgaggtactgaagcaattgggaaccagcaggccctctgtccagacgctggtgctttgtgctccgttgttgtgctgctgctccactggcgtttactagttctagtgccttttcactgatttgtccgcacagggatcctggtgctagtgcttggctgattgctgctgcccctgtgttctccctcaattcgtactgctcatgcaattcctggaggccctaggaattggttctgcagttgtacctgtaggctgtagctgccaatttagttcgattttgaatttggcaggtagttgttgtgcttgtttctagatgcaagagtgcttattgtttgtggtgtttgttattggaaattttggttggtggtagttatttgtccggaaaggttaatgcaatgctgtggcttgtcttgcttttagtcaatggtagtaagttgagtaaaatgttcatgtgtatgtgcagcttgtggtcggcagtgtgaaattttgacctctaattatttgttagtaatgtaattttctcagcaggaatccaattcatgatgatgagctacattattcaagtttagcaactattgattgtgtttcccatcatgccttggatgtgtcaaaacttgaacacaccaatttgaagattatcataccctgcttatctatccacatacaaccaaccaaacaaaaatctgctggatcatcccatttgaaaacttgcaaccaaccaaacaagaatttggctcatgcaatccgtccaacctaatgagctaatacatgtaggagcatcattctatgattctatcctaaatccatggatggccctatcccatccaaccttgcctctccaacccatacggccatacaaacttgtgaccattcattgtaattctcatttcattgtcataagtgcgcctcgtttgacactgttgtttctctcgtcatcattggctttgtgtcggacacgttcatgataatttatctgcagcaacggtcaaatttatgaagctacaaggtgcaagttatgagctgctgtaactaaaaggatctctggtttcttttgagcagctgtctgttgtgtcaagttatgtgctacttgtaacactaaagtaccattttaccttatgacatgcagtgcttggttgttctgtcgtagttaaagaccgtgttgcaataagtgctagttctgtatgtttcctgggtttatgttatcaaatggttgcctggtttgcccactaatgtcatgttgctataagtattcctagctgttgagaaatgcgtgcgcgcgtgccgatcgttgtatcattgggtgcaacatcataggtcattgtagccaagggctatgaagaggggagtttcagatagtccaaaaacaccagggtacatagcaaatacgaaggttcttaggaaggaacagaagtgcgcaggccatttcgcgcaccatgaagcacccgcgatgagcagacgacaaccttggaacaaaacgaacctagagttcgaaggcggaccacactgcggatgatgtagcttatggacgtccacactgaggtctgaggatgaacgaaatag

SEQ ID NO: 45966 - DNA, 3828 bp, Zea Mays
tgcccgtgtgccaggcgaaaaacgtagcctcgcactctcgcaggcggcggcgcatcgagaaacagggctgcggctgttgcttcttccacctctccggccatccggcggtccatcgttccgtgccggcggcctcccctcctacgcccctgccgattcttcaatcttcaccaacgtctgcgcgtagcaggctagcagtcggcacggcttcctcagatctgccggacgacttgctgttcgtcaccgactcaccagcaaccaacgtcagccatcagccggcagcaggggaagctgggcggagggtcattgcggcacggcgtccaggcgtacagaaggcaccagcaacagcccatggcaaacgccgcagatgaccctatggcagatgaagccggagtagaagatgccttcacacaggagatcaatcattcgtacgtccctagataccatgtgttgagttggatggaaactgtggaggggatggtggccggtgtggcgtcgcttccgccggtgtatttgatactgaacagagatcttcttgagacgggatggggatggaagaggctggtgccctacagacctggttatgttgagttgcatgtgttcaagaaataccttggggactatttcgaccataatcgtgaagcttttctttgtgccgagcagaagcctgatccatttggatggattgttgctgaaaagagtgccctgattgctgcagccaaatcgtgcctcaagatggagaaggcacttctcaggtactgtgctagctttctcactcctgacgacaaaaggctgatcctccggatcaaggaccaggcaaagcaaatgatccaatcagagggtgatcaatctttgattgtaactatatgcttggagtgtattgcgaaggaggccgagttaatgtacaattatttgccttgtgattttgacaccaccgaagaagtcgccgtctgcaataaggttcggcggtctgccttgaatcttatgctctacaaaggttctgaatctgctgttgctgctggtgccatgatggtgtgttcctgatactctctccattcattttataggctttattttgactatgcaaaaaccaatattctgctgtaaattctccctatagtattatgttggtagttacaaaatcatagtcagtagcaagtgcttttaattaggaattgttacgtaactcacattttatgggactaatgtctggtcaaagcatgaacttggatagtcaaaccacaccttataaatatgaatatagggagtaattgtgtattttttaatcctctgttatcctgtcaagcttctttaaccaaactgcaaaaacgatgtacttgaagggtatcacaacagaggctaagtccatttttgacttgcttagtcgagaccatgacgtggtcatggaagtttttacttgtgagagtataagggaacatacagcatcagttctgacccagcttgggaaggaatttgcttgcgagactgctactgtgaacagctcatcagcgcggcctatgggggtcagtgatgttagagatctgaactctgaagtatctggttcaatggaagactgtacgagtatggatggagcaaggttttaaagtcggctagtcgactctagtcgcctaagcaccgataaggtgactaatcgcgattagtcgtcgattagctcgattagtcgatcctagtcgactccctagtcgtcctatagtcgtccatctataacaggaccatatatatatatatatatactagattgcaaatctattgacaatattacaatgaaactgtagaatgaatgaatgatcatgttttcactaaaaggtaaagatcacttagacacttaccttggattggagtatacaacagcacactgcaagattagtaggacaacacttctggtatatctccagcagccttactagtgcaaaacgtcatatatctccaacaaagcaagcagaggagggcgtccagcaagcagaggagggcggcggcgcttacagcagcagcaagcagaggagggcggcgctcagagcagcagcaagcagaggagggcggcagcgctcagagcagcagcaagcagaggagggcggcggcgctcacagcagcagcaagcagaggagggcggcgctcagagcagcagcaagcagaggagggcggcagcgctcagagcagcagcaagcagagaagggcggcgacgctcacagcagcagcaagcagaggagggcggcgctcacagcagcagcaagcagaggagggcggcggcgctcagagcagcagcaagcaggggagggcggcggcgctcagagcagttagcagcaagcagatgaagcggtggcgctcaactccagctaggttaaagactgtaacggcattggcacagtttcaggcttttcagcccccctggtgggccggcccaaatagaaaagagcagcctggagcccaaaacaaagcacctagtcgagaacaaccctaatcggacgactaatcgccgactaatcgcgattagtcggacgactaggtttctagtcgccctaatcgcgtcggtggccctaatcggccttgcagcagcgataagtccgactaatcgcgactaatcgcgattagtcggacgactttaaaaccattccgatggagacaatggaaacaatccagttgttggagggggtggctaagaactcgaagaatttaaagttggtggagaaccacgaaaacgagaccagggttgccaccttgatgactgaaaataactagggccttgcagggaaaccttcgttgacttctgaggtactgaaggaatccaattcatgatgatgagctacattattcaagtttagcaactattgattgtgtttcccatcatgccttggatgtgtcaaaacttgaacacaccaatttgaagattatcataccctgcttatctatccacatacaaccaaccaaacaaaaatctgctggatcatcccatttgaaaacttgcaaccaaccaaacaagaatttggctcatgcaatccgtccaacctaatgagctaatacatgtaggagcatcattctatgattctatcctaaatccatggatggccctatcccatccaaccttgcctctccaacccatacggccatacaaacttgtgaccattcattgtaattctcatttcattgtcataagtgcgcctcgtttgacactgttgtttctctcgtcatcattggctttgtgtcggacacgttcatgataatttatctgcagcaacggtcaaatttatgaagctacaaggtgcaagttatgagctgctgtaactaaaaggatctctggtttcttttgagcagctgtctgttgtgtcaagttatgtgctacttgtaacactaaagtaccattttaccttatgacatgcagtgcttggttgttctgtcgtagttaaagaccgtgttgcaataagtgctagttctgtatgtttcctgggtttatgttatcaaatggttgcctggtttgcccactaatgtcatgttgctataagtattcctagctgttgagaaatgcgtgcgcgcgtgccgatcgttgtatcattgggtgcaacatcataggtcattgtagccaagggctatgaagaggggagtttcagatagtccaaaaacaccagggtacatagcaaatacgaaggttcttaggaaggaacagaagtgcgcaggccatttcgcgcaccatgaagcacccgcgatgagcagacgacaaccttggaacaaaacgaacctagagttcgaaggcggaccacactgcggatgatgtagcttatggacgtccacactgaggtctgaggatgaacgaaatag

SEQ ID NO: 45967 - DNA, 2393 bp, Zea Mays
tgcccgtgtgccaggcgaaaaacgtagcctcgcactctcgcaggcggcggcgcatcgagaaacagggctgcggctgttgcttcttccacctctccggccatccggcggtccatcgttccgtgccggcggcctcccctcctacgcccctgccgattcttcaatcttcaccaacgtctgcgcgtagcaggctagcagtcggcacggcttcctcagatctgccggacgacttgctgttcgtcaccgactcaccagcaaccaacgtcagccatcagccggcagcaggggaagctgggcggagggtcattgcggcacggcgtccaggcgtacagaaggcaccagcaacagcccatggcaaacgccgcagatgaccctatggcagatgaagccggagtagaagatgccttcacacaggagatcaatcattcgtacgtccctagataccatgtgttgagttggatggaaactgtggaggggatggtggccggtgtggcgtcgcttccgccggtgtatttgatactgaacagagatcttcttgagacgggatggggatggaagaggctggtgccctacagacctggttatgttgagttgcatgtgttcaagaaataccttggggactatttcgaccataatcgtgaagcttttctttgtgccgagcagaagcctgatccatttggatggattgttgctgaaaagagtgccctgattgctgcagccaaatcgtgcctcaagatggagaaggcacttctcaggtactgtgctagctttctcactcctgacgacaaaaggctgatcctccggatcaaggaccaggcaaagcaaatgatccaatcagagggtgatcaatctttgattgtaactatatgcttggagtgtattgcgaaggaggccgagttaatgtacaattatttgccttgtgattttgacaccaccgaagaagtcgccgtctgcaataaggttcggcggtctgccttgaatcttatgctctacaaaggttctgaatctgctgttgctgctggtgccatgatgggtatcacaacagaggctaagtccatttttgacttgcttagtcgagaccatgacgtggtcatggaagtttttacttgtgagagtataagggaacatacagcatcagttctgacccagcttgggaaggaatttgcttgcgagactgctactgtgaacagctcatcagcgcggcctatgggggtcagtgatgttagagatctgaactctgaagtatctggttcaatggaagactgtacgagtatggatggagcaaggttttaaagtcggctagtcgactctagtcgcctaagcaccgataagggaaaccttcgttgacttctgaggtactgaaggaatccaattcatgatgatgagctacattattcaagtttagcaactattgattgtgtttcccatcatgccttggatgtgtcaaaacttgaacacaccaatttgaagattatcataccctgcttatctatccacatacaaccaaccaaacaaaaatctgctggatcatcccatttgaaaacttgcaaccaaccaaacaagaatttggctcatgcaatccgtccaacctaatgagctaatacatgtaggagcatcattctatgattctatcctaaatccatggatggccctatcccatccaaccttgcctctccaacccatacggccatacaaacttgtgaccattcattgtaattctcatttcattgtcataagtgcgcctcgtttgacactgttgtttctctcgtcatcattggctttgtgtcggacacgttcatgataatttatctgcagcaacggtcaaatttatgaagctacaaggtgcaagttatgagctgctgtaactaaaaggatctctggtttcttttgagcagctgtctgttgtgtcaagttatgtgctacttgtaacactaaagtaccattttaccttatgacatgcagtgcttggttgttctgtcgtagttaaagaccgtgttgcaataagtgctagttctgtatgtttcctgggtttatgttatcaaatggttgcctggtttgcccactaatgtcatgttgctataagtattcctagctgttgagaaatgcgtgcgcgcgtgccgatcgttgtatcattgggtgcaacatcataggtcattgtagccaagggctatgaagaggggagtttcagatagtccaaaaacaccagggtacatagcaaatacgaaggttcttaggaaggaacagaagtgcgcaggccatttcgcgcaccatgaagcacccgcgatgagcagacgacaaccttggaacaaaacgaacctagagttcgaaggcggaccacactgcggatgatgtagcttatggacgtccacactgaggtctgaggatgaacgaaatag

SEQ ID NO: 45968 - DNA, 3614 bp, Zea Mays
tgcccgtgtgccaggcgaaaaacgtagcctcgcactctcgcaggcggcggcgcatcgagaaacagggctgcggctgttgcttcttccacctctccggccatccggcggtccatcgttccgtgccggcggcctcccctcctacgcccctgccgattcttcaatcttcaccaacgtctgcgcgtagcaggctagcagtcggcacggcttcctcagatctgccggacgacttgctgttcgtcaccgactcaccagcaaccaacgtcagccatcagccggcagcaggggaagctgggcggagggtcattgcggcacggcgtccaggcgtacagaaggcaccagcaacagcccatggcaaacgccgcagatgaccctatggcagatgaagccggagtagaagatgccttcacacaggagatcaatcattcgtacgtccctagataccatgtgttgagttggatggaaactgtggaggggatggtggccggtgtggcgtcgcttccgccggtgtatttgatactgaacagagatcttcttgagacgggatggggatggaagaggctggtgccctacagacctggttatgttgagttgcatgtgttcaagaaataccttggggactatttcgaccataatcgtgaagcttttctttgtgccgagcagaagcctgatccatttggatggattgttgctgaaaagagtgccctgattgctgcagccaaatcgtgcctcaagatggagaaggcacttctcaggtactgtgctagctttctcactcctgacgacaaaaggctgatcctccggatcaaggaccaggcaaagcaaatgatccaatcagagggtgatcaatctttgattgtaactatatgcttggagtgtattgcgaaggaggccgagttaatgtacaattatttgccttgtgattttgacaccaccgaagaagtcgccgtctgcaataaggttcggcggtctgccttgaatcttatgctctacaaaggttctgaatctgctgttgctgctggtgccatgatggtgtgttcctgatactctctccattcattttataggctttattttgactatgcaaaaaccaatattctgctgtaaattctccctatagtattatgttggtagttacaaaatcatagtcagtagcaagtgcttttaattaggaattgttacgtaactcacattttatgggactaatgtctggtcaaagcatgaacttggatagtcaaaccacaccttataaatatgaatatagggagtaattgtgtattttttaatcctctgttatcctgtcaagcttctttaaccaaactgcaaaaacgatgtacttgaagggtatcacaacagaggctaagtccatttttgacttgcttagtcgagaccatgacgtggtcatggaagtttttacttgtgagagtataagggaacatacagcatcagttctgacccagcttgggaaggaatttgcttgcgagactgctactgtgaacagctcatcagcgcggcctatgggggtcagtgatgttagagatctgaactctgaagtatctggttcaatggaagactgtacgagtatggatggagcaaggttttaaagtcggctagtcgactctagtcgcctaagcaccgataagggaaaccttcgttgacttctgaggtactgaaggttagtgaagaggcagatgattacgttccaaataggaagtcttgaatactgctgtgacttgtgttttgaaatagatatagtattttctggttctcttgcaaacctcattgttgcagccctaacatttcatggtgtgtttgatttgtggggtgggggtggatgggagacggtcaacccattttttaaagttgttcagttagatgggatgcccaaccagtggggatattcccccgagatcttggatgggatgtccatgcaaatctggtggacagagtagtccatggccttgttgaatacttattgcgcgactggttgtggtcacctaatgtgccttttctttttgctccaattgttcccaatctcatccctcattaacctgtttctgactgggatgcgcacagcaattgggaaccagcaggccctctgtccagacgctggtgctttgtgctccgttgttgtgctgctgctccactggcgtttactagttctagtgccttttcactgatttgtccgcacagggatcctggtgctagtgcttggctgattgctgctgcccctgtgttctccctcaattcgtactgctcatgcaattcctggaggccctaggaattggttctgcagttgtacctgtaggctgtagctgccaatttagttcgattttgaatttggcaggtagttgttgtgcttgtttctagatgcaagagtgcttattgtttgtggtgtttgttattggaaattttggttggtggtagttatttgtccggaaaggttaatgcaatgctgtggcttgtcttgcttttagtcaatggtagtaagttgagtaaaatgttcatgtgtatgtgcagcttgtggtcggcagtgtgaaattttgacctctaattatttgttagtaatgtaattttctcagcaggaatccaattcatgatgatgagctacattattcaagtttagcaactattgattgtgtttcccatcatgccttggatgtgtcaaaacttgaacacaccaatttgaagattatcataccctgcttatctatccacatacaaccaaccaaacaaaaatctgctggatcatcccatttgaaaacttgcaaccaaccaaacaagaatttggctcatgcaatccgtccaacctaatgagctaatacatgtaggagcatcattctatgattctatcctaaatccatggatggccctatcccatccaaccttgcctctccaacccatacggccatacaaacttgtgaccattcattgtaattctcatttcattgtcataagtgcgcctcgtttgacactgttgtttctctcgtcatcattggctttgtgtcggacacgttcatgataatttatctgcagcaacggtcaaatttatgaagctacaaggtgcaagttatgagctgctgtaactaaaaggatctctggtttcttttgagcagctgtctgttgtgtcaagttatgtgctacttgtaacactaaagtaccattttaccttatgacatgcagtgcttggttgttctgtcgtagttaaagaccgtgttgcaataagtgctagttctgtatgtttcctgggtttatgttatcaaatggttgcctggtttgcccactaatgtcatgttgctataagtattcctagctgttgagaaatgcgtgcgcgcgtgccgatcgttgtatcattgggtgcaacatcataggtcattgtagccaagggctatgaagaggggagtttcagatagtccaaaaacaccagggtacatagcaaatacgaaggttcttaggaaggaacagaagtgcgcaggccatttcgcgcaccatgaagcacccgcgatgagcagacgacaaccttggaacaaaacgaacctagagttcgaaggcggaccacactgcggatgatgtagcttatggacgtccacactgaggtctgaggatgaacgaaatag

SEQ ID NO: 45969 - DNA, 4427 bp, Zea Mays
tgcccgtgtgccaggcgaaaaacgtagcctcgcactctcgcaggcggcggcgcatcgagaaacagggctgcggctgttgcttcttccacctctccggccatccggcggtccatcgttccgtgccggcggcctcccctcctacgcccctgccgattcttcaatcttcaccaacgtctgcgcgtagcaggctagcagtcggcacggcttcctcagatctgccggacgacttgctgttcgtcaccgactcaccagcaaccaacgtcagccatcagccggcagcaggggaagctgggcggagggtcattgcggcacggcgtccaggcgtacagaaggcaccagcaacagcccatggcaaacgccgcagatgaccctatggcagatgaagccggagtagaagatgccttcacacaggagatcaatcattcgtacgtccctagataccatgtgttgagttggatggaaactgtggaggggatggtggccggtgtggcgtcgcttccgccggtgtatttgatactgaacagagatcttcttgagacgggatggggatggaagaggctggtgccctacagacctggttatgttgagttgcatgtgttcaagaaataccttggggactatttcgaccataatcgtgaagcttttctttgtgccgagcagaagcctgatccatttggatggattgttgctgaaaagagtgccctgattgctgcagccaaatcgtgcctcaagatggagaaggcacttctcaggtactgtgctagctttctcactcctgacgacaaaaggctgatcctccggatcaaggaccaggcaaagcaaatgatccaatcagagggtgatcaatctttgattgtaactatatgcttggagtgtattgcgaaggaggccgagttaatgtacaattatttgccttgtgattttgacaccaccgaagaagtcgccgtctgcaataaggttcggcggtctgccttgaatcttatgctctacaaaggttctgaatctgctgttgctgctggtgccatgatgggtatcacaacagaggctaagtccatttttgacttgcttagtcgagaccatgacgtggtcatggaagtttttacttgtgagagtataagggaacatacagcatcagttctgacccagcttgggaaggaatttgcttgcgagactgctactgtgaacagctcatcagcgcggcctatgggggtcagtgatgttagagatctgaactctgaagtatctggttcaatggaagactgtacgagtatggatggagcaaggttttaaagtcggctagtcgactctagtcgcctaagcaccgataaggtgactaatcgcgattagtcgtcgattagctcgattagtcgatcctagtcgactccctagtcgtcctatagtcgtccatctataacaggaccatatatatatatatatatactagattgcaaatctattgacaatattacaatgaaactgtagaatgaatgaatgatcatgttttcactaaaaggtaaagatcacttagacacttaccttggattggagtatacaacagcacactgcaagattagtaggacaacacttctggtatatctccagcagccttactagtgcaaaacgtcatatatctccaacaaagcaagcagaggagggcgtccagcaagcagaggagggcggcggcgcttacagcagcagcaagcagaggagggcggcgctcagagcagcagcaagcagaggagggcggcagcgctcagagcagcagcaagcagaggagggcggcggcgctcacagcagcagcaagcagaggagggcggcgctcagagcagcagcaagcagaggagggcggcagcgctcagagcagcagcaagcagagaagggcggcgacgctcacagcagcagcaagcagaggagggcggcgctcacagcagcagcaagcagaggagggcggcggcgctcagagcagcagcaagcaggggagggcggcggcgctcagagcagttagcagcaagcagatgaagcggtggcgctcaactccagctaggttaaagactgtaacggcattggcacagtttcaggcttttcagcccccctggtgggccggcccaaatagaaaagagcagcctggagcccaaaacaaagcacctagtcgagaacaaccctaatcggacgactaatcgccgactaatcgcgattagtcggacgactaggtttctagtcgccctaatcgcgtcggtggccctaatcggccttgcagcagcgataagtccgactaatcgcgactaatcgcgattagtcggacgactttaaaaccattccgatggagacaatggaaacaatccagttgttggagggggtggctaagaactcgaagaatttaaagttggtggagaaccacgaaaacgagaccagggttgccaccttgatgactgaaaataactagggccttgcagggaaaccttcgttgacttctgaggtactgaaggttagtgaagaggcagatgattacgttccaaataggaagtcttgaatactgctgtgacttgtgttttgaaatagatatagtattttctggttctcttgcaaacctcattgttgcagccctaacatttcatggtgtgtttgatttgtggggtgggggtggatgggagacggtcaacccattttttaaagttgttcagttagatgggatgcccaaccagtggggatattcccccgagatcttggatgggatgtccatgcaaatctggtggacagagtagtccatggccttgttgaatacttattgcgcgactggttgtggtcacctaatgtgccttttctttttgctccaattgttcccaatctcatccctcattaacctgtttctgactgggatgcgcacagcaattgggaaccagcaggccctctgtccagacgctggtgctttgtgctccgttgttgtgctgctgctccactggcgtttactagttctagtgccttttcactgatttgtccgcacagggatcctggtgctagtgcttggctgattgctgctgcccctgtgttctccctcaattcgtactgctcatgcaattcctggaggccctaggaattggttctgcagttgtacctgtaggctgtagctgccaatttagttcgattttgaatttggcaggtagttgttgtgcttgtttctagatgcaagagtgcttattgtttgtggtgtttgttattggaaattttggttggtggtagttatttgtccggaaaggttaatgcaatgctgtggcttgtcttgcttttagtcaatggtagtaagttgagtaaaatgttcatgtgtatgtgcagcttgtggtcggcagtgtgaaattttgacctctaattatttgttagtaatgtaattttctcagcaggaatccaattcatgatgatgagctacattattcaagtttagcaactattgattgtgtttcccatcatgccttggatgtgtcaaaacttgaacacaccaatttgaagattatcataccctgcttatctatccacatacaaccaaccaaacaaaaatctgctggatcatcccatttgaaaacttgcaaccaaccaaacaagaatttggctcatgcaatccgtccaacctaatgagctaatacatgtaggagcatcattctatgattctatcctaaatccatggatggccctatcccatccaaccttgcctctccaacccatacggccatacaaacttgtgaccattcattgtaattctcatttcattgtcataagtgcgcctcgtttgacactgttgtttctctcgtcatcattggctttgtgtcggacacgttcatgataatttatctgcagcaacggtcaaatttatgaagctacaaggtgcaagttatgagctgctgtaactaaaaggatctctggtttcttttgagcagctgtctgttgtgtcaagttatgtgctacttgtaacactaaagtaccattttaccttatgacatgcagtgcttggttgttctgtcgtagttaaagaccgtgttgcaataagtgctagttctgtatgtttcctgggtttatgttatcaaatggttgcctggtttgcccactaatgtcatgttgctataagtattcctagctgttgagaaatgcgtgcgcgcgtgccgatcgttgtatcattgggtgcaacatcataggtcattgtagccaagggctatgaagaggggagtttcagatagtccaaaaacaccagggtacatagcaaatacgaaggttcttaggaaggaacagaagtgcgcaggccatttcgcgcaccatgaagcacccgcgatgagcagacgacaaccttggaacaaaacgaacctagagttcgaaggcggaccacactgcggatgatgtagcttatggacgtccacactgaggtctgaggatgaacgaaatag

SEQ ID NO: 45970 - DNA, 3303 bp, Zea Mays
tgcccgtgtgccaggcgaaaaacgtagcctcgcactctcgcaggcggcggcgcatcgagaaacagggctgcggctgttgcttcttccacctctccggccatccggcggtccatcgttccgtgccggcggcctcccctcctacgcccctgccgattcttcaatcttcaccaacgtctgcgcgtagcaggctagcagtcggcacggcttcctcagatctgccggacgacttgctgttcgtcaccgactcaccagcaaccaacgtcagccatcagccggcagcaggggaagctgggcggagggtcattgcggcacggcgtccaggcgtacagaaggcaccagcaacagcccatggcaaacgccgcagatgaccctatggcagatgaagccggagtagaagatgccttcacacaggagatcaatcattcgtacgtccctagataccatgtgttgagttggatggaaactgtggaggggatggtggccggtgtggcgtcgcttccgccggtgtatttgatactgaacagagatcttcttgagacgggatggggatggaagaggctggtgccctacagacctggttatgttgagttgcatgtgttcaagaaataccttggggactatttcgaccataatcgtgaagcttttctttgtgccgagcagaagcctgatccatttggatggattgttgctgaaaagagtgccctgattgctgcagccaaatcgtgcctcaagatggagaaggcacttctcaggtactgtgctagctttctcactcctgacgacaaaaggctgatcctccggatcaaggaccaggcaaagcaaatgatccaatcagagggtgatcaatctttgattgtaactatatgcttggagtgtattgcgaaggaggccgagttaatgtacaattatttgccttgtgattttgacaccaccgaagaagtcgccgtctgcaataaggttcggcggtctgccttgaatcttatgctctacaaaggttctgaatctgctgttgctgctggtgccatgatgggtatcacaacagaggctaagtccatttttgacttgcttagtcgagaccatgacgtggtcatggaagtttttacttgtgagagtataagggaacatacagcatcagttctgacccagcttgggaaggaatttgcttgcgagactgctactgtgaacagctcatcagcgcggcctatgggggtcagtgatgttagagatctgaactctgaagtatctggttcaatggaagactgtacgagtatggatggagcaaggttttaaagtcggctagtcgactctagtcgcctaagcaccgataagggaaaccttcgttgacttctgaggtactgaaggttagtgaagaggcagatgattacgttccaaataggaagtcttgaatactgctgtgacttgtgttttgaaatagatatagtattttctggttctcttgcaaacctcattgttgcagccctaacatttcatggtgtgtttgatttgtggggtgggggtggatgggagacggtcaacccattttttaaagttgttcagttagatgggatgcccaaccagtggggatattcccccgagatcttggatgggatgtccatgcaaatctggtggacagagtagtccatggccttgttgaatacttattgcgcgactggttgtggtcacctaatgtgccttttctttttgctccaattgttcccaatctcatccctcattaacctgtttctgactgggatgcgcacagcaattgggaaccagcaggccctctgtccagacgctggtgctttgtgctccgttgttgtgctgctgctccactggcgtttactagttctagtgccttttcactgatttgtccgcacagggatcctggtgctagtgcttggctgattgctgctgcccctgtgttctccctcaattcgtactgctcatgcaattcctggaggccctaggaattggttctgcagttgtacctgtaggctgtagctgccaatttagttcgattttgaatttggcaggtagttgttgtgcttgtttctagatgcaagagtgcttattgtttgtggtgtttgttattggaaattttggttggtggtagttatttgtccggaaaggttaatgcaatgctgtggcttgtcttgcttttagtcaatggtagtaagttgagtaaaatgttcatgtgtatgtgcagcttgtggtcggcagtgtgaaattttgacctctaattatttgttagtaatgtaattttctcagcaggaatccaattcatgatgatgagctacattattcaagtttagcaactattgattgtgtttcccatcatgccttggatgtgtcaaaacttgaacacaccaatttgaagattatcataccctgcttatctatccacatacaaccaaccaaacaaaaatctgctggatcatcccatttgaaaacttgcaaccaaccaaacaagaatttggctcatgcaatccgtccaacctaatgagctaatacatgtaggagcatcattctatgattctatcctaaatccatggatggccctatcccatccaaccttgcctctccaacccatacggccatacaaacttgtgaccattcattgtaattctcatttcattgtcataagtgcgcctcgtttgacactgttgtttctctcgtcatcattggctttgtgtcggacacgttcatgataatttatctgcagcaacggtcaaatttatgaagctacaaggtgcaagttatgagctgctgtaactaaaaggatctctggtttcttttgagcagctgtctgttgtgtcaagttatgtgctacttgtaacactaaagtaccattttaccttatgacatgcagtgcttggttgttctgtcgtagttaaagaccgtgttgcaataagtgctagttctgtatgtttcctgggtttatgttatcaaatggttgcctggtttgcccactaatgtcatgttgctataagtattcctagctgttgagaaatgcgtgcgcgcgtgccgatcgttgtatcattgggtgcaacatcataggtcattgtagccaagggctatgaagaggggagtttcagatagtccaaaaacaccagggtacatagcaaatacgaaggttcttaggaaggaacagaagtgcgcaggccatttcgcgcaccatgaagcacccgcgatgagcagacgacaaccttggaacaaaacgaacctagagttcgaaggcggaccacactgcggatgatgtagcttatggacgtccacactgaggtctgaggatgaacgaaatag

SEQ ID NO: 45971 - DNA, 3668 bp, Zea Mays
tgcccgtgtgccaggcgaaaaacgtagcctcgcactctcgcaggcggcggcgcatcgagaaacagggctgcggctgttgcttcttccacctctccggccatccggcggtccatcgttccgtgccggcggcctcccctcctacgcccctgccgattcttcaatcttcaccaacgtctgcgcgtagcaggctagcagtcggcacggcttcctcagatctgccggacgacttgctgttcgtcaccgactcaccagcaaccaacgtcagccatcagccggcagcaggggaagctgggcggagggtcattgcggcacggcgtccaggcgtacagaaggcaccagcaacagcccatggcaaacgccgcagatgaccctatggcagatgaagccggagtagaagatgccttcacacaggagatcaatcattcgtacgtccctagataccatgtgttgagttggatggaaactgtggaggggatggtggccggtgtggcgtcgcttccgccggtgtatttgatactgaacagagagatatatgatacatgctcctgcttgctcatgatgccggtttggtgccaaagctatcttcttgagacgggatggggatggaagaggctggtgccctacagacctggttatgttgagttgcatgtgttcaagaaataccttggggactatttcgaccataatcgtgaagcttttctttgtgccgagcagaagcctgatccatttggatggattgttgctgaaaagagtgccctgattgctgcagccaaatcgtgcctcaagatggagaaggcacttctcaggtactgtgctagctttctcactcctgacgacaaaaggctgatcctccggatcaaggaccaggcaaagcaaatgatccaatcagagggtgatcaatctttgattgtaactatatgcttggagtgtattgcgaaggaggccgagttaatgtacaattatttgccttgtgattttgacaccaccgaagaagtcgccgtctgcaataaggttcggcggtctgccttgaatcttatgctctacaaaggttctgaatctgctgttgctgctggtgccatgatggtgtgttcctgatactctctccattcattttataggctttattttgactatgcaaaaaccaatattctgctgtaaattctccctatagtattatgttggtagttacaaaatcatagtcagtagcaagtgcttttaattaggaattgttacgtaactcacattttatgggactaatgtctggtcaaagcatgaacttggatagtcaaaccacaccttataaatatgaatatagggagtaattgtgtattttttaatcctctgttatcctgtcaagcttctttaaccaaactgcaaaaacgatgtacttgaagggtatcacaacagaggctaagtccatttttgacttgcttagtcgagaccatgacgtggtcatggaagtttttacttgtgagagtataagggaacatacagcatcagttctgacccagcttgggaaggaatttgcttgcgagactgctactgtgaacagctcatcagcgcggcctatgggggtcagtgatgttagagatctgaactctgaagtatctggttcaatggaagactgtacgagtatggatggagcaaggttttaaagtcggctagtcgactctagtcgcctaagcaccgataagggaaaccttcgttgacttctgaggtactgaaggttagtgaagaggcagatgattacgttccaaataggaagtcttgaatactgctgtgacttgtgttttgaaatagatatagtattttctggttctcttgcaaacctcattgttgcagccctaacatttcatggtgtgtttgatttgtggggtgggggtggatgggagacggtcaacccattttttaaagttgttcagttagatgggatgcccaaccagtggggatattcccccgagatcttggatgggatgtccatgcaaatctggtggacagagtagtccatggccttgttgaatacttattgcgcgactggttgtggtcacctaatgtgccttttctttttgctccaattgttcccaatctcatccctcattaacctgtttctgactgggatgcgcacagcaattgggaaccagcaggccctctgtccagacgctggtgctttgtgctccgttgttgtgctgctgctccactggcgtttactagttctagtgccttttcactgatttgtccgcacagggatcctggtgctagtgcttggctgattgctgctgcccctgtgttctccctcaattcgtactgctcatgcaattcctggaggccctaggaattggttctgcagttgtacctgtaggctgtagctgccaatttagttcgattttgaatttggcaggtagttgttgtgcttgtttctagatgcaagagtgcttattgtttgtggtgtttgttattggaaattttggttggtggtagttatttgtccggaaaggttaatgcaatgctgtggcttgtcttgcttttagtcaatggtagtaagttgagtaaaatgttcatgtgtatgtgcagcttgtggtcggcagtgtgaaattttgacctctaattatttgttagtaatgtaattttctcagcaggaatccaattcatgatgatgagctacattattcaagtttagcaactattgattgtgtttcccatcatgccttggatgtgtcaaaacttgaacacaccaatttgaagattatcataccctgcttatctatccacatacaaccaaccaaacaaaaatctgctggatcatcccatttgaaaacttgcaaccaaccaaacaagaatttggctcatgcaatccgtccaacctaatgagctaatacatgtaggagcatcattctatgattctatcctaaatccatggatggccctatcccatccaaccttgcctctccaacccatacggccatacaaacttgtgaccattcattgtaattctcatttcattgtcataagtgcgcctcgtttgacactgttgtttctctcgtcatcattggctttgtgtcggacacgttcatgataatttatctgcagcaacggtcaaatttatgaagctacaaggtgcaagttatgagctgctgtaactaaaaggatctctggtttcttttgagcagctgtctgttgtgtcaagttatgtgctacttgtaacactaaagtaccattttaccttatgacatgcagtgcttggttgttctgtcgtagttaaagaccgtgttgcaataagtgctagttctgtatgtttcctgggtttatgttatcaaatggttgcctggtttgcccactaatgtcatgttgctataagtattcctagctgttgagaaatgcgtgcgcgcgtgccgatcgttgtatcattgggtgcaacatcataggtcattgtagccaagggctatgaagaggggagtttcagatagtccaaaaacaccagggtacatagcaaatacgaaggttcttaggaaggaacagaagtgcgcaggccatttcgcgcaccatgaagcacccgcgatgagcagacgacaaccttggaacaaaacgaacctagagttcgaaggcggaccacactgcggatgatgtagcttatggacgtccacactgaggtctgaggatgaacgaaatag

SEQ ID NO: 45972 - DNA, 4495 bp, Zea Mays
tgcccgtgtgccaggcgaaaaacgtagcctcgcactctcgcaggcggcggcgcatcgagaaacagggctgcggctgttgcttcttccacctctccggccatccggcggtccatcgttccgtgccggcggcctcccctcctacgcccctgccgattcttcaatcttcaccaacgtctgcgcgtagcaggctagcagtcggcacggcttcctcagatctgccggacgacttgctgttcgtcaccgactcaccagcaaccaacgtcagccatcagccggcagcaggggaagctgggcggagggtcattgcggcacggcgtccaggcgtacagaaggcaccagcaacagcccatggcaaacgccgcagatgaccctatggcagatgaagccggagtagaagatgccttcacacaggagatcaatcattcgtacgtccctagataccatgtgttgagttggatggaaactgtggaggggatggtggccggtgtggcgtcgcttccgccggtgtatttgatactgaacagagagatatatgatacatgctcctgcttgctcatgatgccggtttggtgccaaagctatcttcttgagacgggatggggatggaagaggctggtgccctacagacctggttatgttgagttgcatgtgttcaagaaataccttggggactatttcgaccataatcgtgaagcttttctttgtgccgagcagaagcctgatccatttggatggattgttgctgaaaagagtgccctgattgctgcagccaaatcgtgcctcaagatggagaaggcacttctcaggtactgtgctagctttctcactcctgacgacaaaaggctgatcctccggatcaaggaccaggcaaagcaaatgatccaatcagagggtgatcaatctttgattgtaactatatgcttggagtgtattgcgaaggaggccgagttaatgtacaattatttgccttgtgattttgacaccaccgaagaagtcgccgtctgcaataaggttcggcggtctgccttgaatcttatgctctacaaaggttctgaatctgctgttgctgctggtgccatgatggtgtgttcctgatactctctccattcattttataggctttattttgactatgcaaaaaccaatattctgctgtaaattctccctatagtattatgttggtagttacaaaatcatagtcagtagcaagtgcttttaattaggaattgttacgtaactcacattttatgggactaatgtctggtcaaagcatgaacttggatagtcaaaccacaccttataaatatgaatatagggagtaattgtgtattttttaatcctctgttatcctgtcaagcttctttaaccaaactgcaaaaacgatgtacttgaagggtatcacaacagaggctaagtccatttttgacttgcttagtcgagaccatgacgtggtcatggaagtttttacttgtgagagtataagggaacatacagcatcagttctgacccagcttgggaaggaatttgcttgcgagactgctactgtgaacagctcatcagcgcggcctatgggggtcagtgatgttagagatctgaactctgaagtatctggttcaatggaagactgtacgagtatggatggagcaaggttttaaagtcggctagtcgactctagtcgcctaagcaccgataaggtgactaatcgcgattagtcgtcgattagctcgattagtcgatcctagtcgactccctagtcgtcctatagtcgtccatctataacaggaccatatatatatatatatatactagattgcaaatctattgacaatattacaatgaaactgtagaatgaatgaatgatcatgttttcactaaaaggtaaagatcacttagacacttaccttggattggagtatacaacagcacactgcaagattagtaggacaacacttctggtatatctccagcagccttactagtgcaaaacgtcatatatctccaacaaagcaagcagaggagggcgtccagcaagcagaggagggcggcggcgcttacagcagcagcaagcagaggagggcggcgctcagagcagcagcaagcagaggagggcggcagcgctcagagcagcagcaagcagaggagggcggcggcgctcacagcagcagcaagcagaggagggcggcgctcagagcagcagcaagcagaggagggcggcagcgctcagagcagcagcaagcagagaagggcggcgacgctcacagcagcagcaagcagaggagggcggcgctcacagcagcagcaagcagaggagggcggcggcgctcagagcagcagcaagcaggggagggcggcggcgctcagagcagttagcagcaagcagatgaagcggtggcgctcaactccagctaggttaaagactgtaacggcattggcacagtttcaggcttttcagcccccctggtgggccggcccaaatagaaaagagcagcctggagcccaaaacaaagcacctagtcgagaacaaccctaatcggacgactaatcgccgactaatcgcgattagtcggacgactaggtttctagtcgccctaatcgcgtcggtggccctaatcggccttgcagcagcgataagtccgactaatcgcgactaatcgcgattagtcggacgactttaaaaccattccgatggagacaatggaaacaatccagttgttggagggggtggctaagaactcgaagaatttaaagttggtggagaaccacgaaaacgagaccagggttgccacgtaagagaagactgcatcagcatcactacttgcctgttttgaaatttaatgtacctttcacggaagccctcactaacattaattgtttgtatgtttcatctcagcttgatgactgaaaataactagggccttgcagggaaaccttcgttgacttctgaggtactgaagcaattgggaaccagcaggccctctgtccagacgctggtgctttgtgctccgttgttgtgctgctgctccactggcgtttactagttctagtgccttttcactgatttgtccgcacagggatcctggtgctagtgcttggctgattgctgctgcccctgtgttctccctcaattcgtactgctcatgcaattcctggaggccctaggaattggttctgcagttgtacctgtaggctgtagctgccaatttagttcgattttgaatttggcaggtagttgttgtgcttgtttctagatgcaagagtgcttattgtttgtggtgtttgttattggaaattttggttggtggtagttatttgtccggaaaggttaatgcaatgctgtggcttgtcttgcttttagtcaatggtagtaagttgagtaaaatgttcatgtgtatgtgcagcttgtggtcggcagtgtgaaattttgacctctaattatttgttagtaatgtaattttctcagcaggaatccaattcatgatgatgagctacattattcaagtttagcaactattgattgtgtttcccatcatgccttggatgtgtcaaaacttgaacacaccaatttgaagattatcataccctgcttatctatccacatacaaccaaccaaacaaaaatctgctggatcatcccatttgaaaacttgcaaccaaccaaacaagaatttggctcatgcaatccgtccaacctaatgagctaatacatgtaggagcatcattctatgattctatcctaaatccatggatggccctatcccatccaaccttgcctctccaacccatacggccatacaaacttgtgaccattcattgtaattctcatttcattgtcataagtgcgcctcgtttgacactgttgtttctctcgtcatcattggctttgtgtcggacacgttcatgataatttatctgcagcaacggtcaaatttatgaagctacaaggtgcaagttatgagctgctgtaactaaaaggatctctggtttcttttgagcagctgtctgttgtgtcaagttatgtgctacttgtaacactaaagtaccattttaccttatgacatgcagtgcttggttgttctgtcgtagttaaagaccgtgttgcaataagtgctagttctgtatgtttcctgggtttatgttatcaaatggttgcctggtttgcccactaatgtcatgttgctataagtattcctagctgttgagaaatgcgtgcgcgcgtgccgatcgttgtatcattgggtgcaacatcataggtcattgtagccaagggctatgaagaggggagtttcagatagtccaaaaacaccagggtacatagcaaatacgaaggttcttaggaaggaacagaagtgcgcaggccatttcgcgcaccatgaagcacccgcgatgagcagacgacaaccttggaacaaaacgaacctagagttcgaaggcggaccacactgcggatgatgtagcttatggacgtccacactgaggtctgaggatgaacgaaatag

SEQ ID NO: 45973 - DNA, 4515 bp, Zea Mays
tgcccgtgtgccaggcgaaaaacgtagcctcgcactctcgcaggcggcggcgcatcgagaaacagggctgcggctgttgcttcttccacctctccggccatccggcggtccatcgttccgtgccggcggcctcccctcctacgcccctgccgattcttcaatcttcaccaacgtctgcgcgtagcaggctagcagtcggcacggcttcctcagatctgccggacgacttgctgttcgtcaccgactcaccagcaaccaacgtcagccatcagccggcagcaggggaagctgggcggagggtcattgcggcacggcgtccaggcgtacagaaggcaccagcaacagcccatggcaaacgatgaccctatggcagatgaagccggagtagaagatgccttcacacaggagatcaatcattcgtacgtccctagataccatgtgttgagttggatggaaactgtggaggggatggtggccggtgtggcgtcgcttccgccggtgtatttgatactgaacagagagatatatgatacatgctcctgcttgctcatgatgccggtttggtgccaaagctatcttcttgagacgggatggggatggaagaggctggtgccctacagacctggttatgttgagttgcatgtgttcaagaaataccttggggactatttcgaccataatcgtgaagcttttctttgtgccgagcagaagcctgatccatttggatggattgttgctgaaaagagtgccctgattgctgcagccaaatcgtgcctcaagatggagaaggcacttctcaggtactgtgctagctttctcactcctgacgacaaaaggctgatcctccggatcaaggaccaggcaaagcaaatgatccaatcagagggtgatcaatctttgattgtaactatatgcttggagaagtcgccgtctgcaataaggttcggcggtctgccttgaatcttatgctctacaaaggttctgaatctgctgttgctgctggtgccatgatgggtatcacaacagaggctaagtccatttttgacttgcttagtcgagaccatgacgtggtcatggaagtttttacttgtgagagtataagggaacatacagcatcagttctgacccagcttgggaaggaatttgcttgcgagactgctactgtgaacagctcatcagcgcggcctatgggggtcagtgatgttagagatctgaactctgaagtatctggttcaatggaagactgtacgagtatggatggagcaaggttttaaagtcggctagtcgactctagtcgcctaagcaccgataaggtgactaatcgcgattagtcgtcgattagctcgattagtcgatcctagtcgactccctagtcgtcctatagtcgtccatctataacaggaccatatatatatatatatatactagattgcaaatctattgacaatattacaatgaaactgtagaatgaatgaatgatcatgttttcactaaaaggtaaagatcacttagacacttaccttggattggagtatacaacagcacactgcaagattagtaggacaacacttctggtatatctccagcagccttactagtgcaaaacgtcatatatctccaacaaagcaagcagaggagggcgtccagcaagcagaggagggcggcggcgcttacagcagcagcaagcagaggagggcggcgctcagagcagcagcaagcagaggagggcggcagcgctcagagcagcagcaagcagaggagggcggcggcgctcacagcagcagcaagcagaggagggcggcgctcagagcagcagcaagcagaggagggcggcagcgctcagagcagcagcaagcagagaagggcggcgacgctcacagcagcagcaagcagaggagggcggcgctcacagcagcagcaagcagaggagggcggcggcgctcagagcagcagcaagcaggggagggcggcggcgctcagagcagttagcagcaagcagatgaagcggtggcgctcaactccagctaggttaaagactgtaacggcattggcacagtttcaggcttttcagcccccctggtgggccggcccaaatagaaaagagcagcctggagcccaaaacaaagcacctagtcgagaacaaccctaatcggacgactaatcgccgactaatcgcgattagtcggacgactaggtttctagtcgccctaatcgcgtcggtggccctaatcggccttgcagcagcgataagtccgactaatcgcgactaatcgcgattagtcggacgactttaaaaccattccgatggagacaatggaaacaatccagttgttggagggggtggctaagaactcgaagaatttaaagttggtggagaaccacgaaaacgagaccagggttgccacgtaagagaagactgcatcagcatcactacttgcctgttttgaaatttaatgtacctttcacggaagccctcactaacattaattgtttgtatgtttcatctcagcttgatgactgaaaataactagggccttgcagggaaaccttcgttgacttctgaggtactgaaggttagtgaagaggcagatgattacgttccaaataggaagtcttgaatactgctgtgacttgtgttttgaaatagatatagtattttctggttctcttgcaaacctcattgttgcagccctaacatttcatggtgtgtttgatttgtggggtgggggtggatgggagacggtcaacccattttttaaagttgttcagttagatgggatgcccaaccagtggggatattcccccgagatcttggatgggatgtccatgcaaatctggtggacagagtagtccatggccttgttgaatacttattgcgcgactggttgtggtcacctaatgtgccttttctttttgctccaattgttcccaatctcatccctcattaacctgtttctgactgggatgcgcacagcaattgggaaccagcaggccctctgtccagacgctggtgctttgtgctccgttgttgtgctgctgctccactggcgtttactagttctagtgccttttcactgatttgtccgcacagggatcctggtgctagtgcttggctgattgctgctgcccctgtgttctccctcaattcgtactgctcatgcaattcctggaggccctaggaattggttctgcagttgtacctgtaggctgtagctgccaatttagttcgattttgaatttggcaggtagttgttgtgcttgtttctagatgcaagagtgcttattgtttgtggtgtttgttattggaaattttggttggtggtagttatttgtccggaaaggttaatgcaatgctgtggcttgtcttgcttttagtcaatggtagtaagttgagtaaaatgttcatgtgtatgtgcagcttgtggtcggcagtgtgaaattttgacctctaattatttgttagtaatgtaattttctcagcaggaatccaattcatgatgatgagctacattattcaagtttagcaactattgattgtgtttcccatcatgccttggatgtgtcaaaacttgaacacaccaatttgaagattatcataccctgcttatctatccacatacaaccaaccaaacaaaaatctgctggatcatcccatttgaaaacttgcaaccaaccaaacaagaatttggctcatgcaatccgtccaacctaatgagctaatacatgtaggagcatcattctatgattctatcctaaatccatggatggccctatcccatccaaccttgcctctccaacccatacggccatacaaacttgtgaccattcattgtaattctcatttcattgtcataagtgcgcctcgtttgacactgttgtttctctcgtcatcattggctttgtgtcggacacgttcatgataatttatctgcagcaacggtcaaatttatgaagctacaaggtgcaagttatgagctgctgtaactaaaaggatctctggtttcttttgagcagctgtctgttgtgtcaagttatgtgctacttgtaacactaaagtaccattttaccttatgacatgcagtgcttggttgttctgtcgtagttaaagaccgtgttgcaataagtgctagttctgtatgtttcctgggtttatgttatcaaatggttgcctggtttgcccactaatgtcatgttgctataagtattcctagctgttgagaaatgcgtgcgcgcgtgccgatcgttgtatcattgggtgcaacatcataggtcattgtagccaagggctatgaagaggggagtttcagatagtccaaaaacaccagggtacatagcaaatacgaaggttcttaggaaggaacagaagtgcgcaggccatttcgcgcaccatgaagcacccgcgatgagcagacgacaaccttggaacaaaacgaacctagagttcgaaggcggaccacactgcggatgatgtagcttatggacgtccacactgaggtctgaggatgaacgaaatag

SEQ ID NO: 45974 - DNA, 4896 bp, Zea Mays
tgcccgtgtgccaggcgaaaaacgtagcctcgcactctcgcaggcggcggcgcatcgagaaacagggctgcggctgttgcttcttccacctctccggccatccggcggtccatcgttccgtgccggcggcctcccctcctacgcccctgccgattcttcaatcttcaccaacgtctgcgcgtagcaggctagcagtcggcacggcttcctcagatctgccggacgacttgctgttcgtcaccgactcaccagcaaccaacgtcagccatcagccggcagcaggggaagctgggcggagggtcattgcggcacggcgtccaggcgtacagaaggcaccagcaacagcccatggcaaacgccgcagatgaccctatggcagatgaagccggagtagaagatgccttcacacaggagatcaatcattcgtacgtccctagataccatgtgttgagttggatggaaactgtggaggggatggtggccggtgtggcgtcgcttccgccggtgtatttgatactgaacagagagatatatgatacatgctcctgcttgctcatgatgccggtttggtgccaaagctatcttcttgagacgggatggggatggaagaggctggtgccctacagacctggttatgttgagttgcatgtgttcaagaaataccttggggactatttcgaccataatcgtgaagcttttctttgtgccgagcagaagcctgatccatttggatggattgttgctgaaaagagtgccctgattgctgcagccaaatcgtgcctcaagatggagaaggcacttctcaggtactgtgctagctttctcactcctgacgacaaaaggctgatcctccggatcaaggaccaggcaaagcaaatgatccaatcagagggtgatcaatctttgattgtaactatatgcttggagtgtattgcgaaggaggccgagttaatgtacaattatttgccttgtgattttgacaccaccgaagaagtcgccgtctgcaataaggttcggcggtctgccttgaatcttatgctctacaaaggttctgaatctgctgttgctgctggtgccatgatggtgtgttcctgatactctctccattcattttataggctttattttgactatgcaaaaaccaatattctgctgtaaattctccctatagtattatgttggtagttacaaaatcatagtcagtagcaagtgcttttaattaggaattgttacgtaactcacattttatgggactaatgtctggtcaaagcatgaacttggatagtcaaaccacaccttataaatatgaatatagggagtaattgtgtattttttaatcctctgttatcctgtcaagcttctttaaccaaactgcaaaaacgatgtacttgaagggtatcacaacagaggctaagtccatttttgacttgcttagtcgagaccatgacgtggtcatggaagtttttacttgtgagagtataagggaacatacagcatcagttctgacccagcttgggaaggaatttgcttgcgagactgctactgtgaacagctcatcagcgcggcctatgggggtcagtgatgttagagatctgaactctgaagtatctggttcaatggaagactgtacgagtatggatggagcaaggttttaaagtcggctagtcgactctagtcgcctaagcaccgataaggtgactaatcgcgattagtcgtcgattagctcgattagtcgatcctagtcgactccctagtcgtcctatagtcgtccatctataacaggaccatatatatatatatatatactagattgcaaatctattgacaatattacaatgaaactgtagaatgaatgaatgatcatgttttcactaaaaggtaaagatcacttagacacttaccttggattggagtatacaacagcacactgcaagattagtaggacaacacttctggtatatctccagcagccttactagtgcaaaacgtcatatatctccaacaaagcaagcagaggagggcgtccagcaagcagaggagggcggcggcgcttacagcagcagcaagcagaggagggcggcgctcagagcagcagcaagcagaggagggcggcagcgctcagagcagcagcaagcagaggagggcggcggcgctcacagcagcagcaagcagaggagggcggcgctcagagcagcagcaagcagaggagggcggcagcgctcagagcagcagcaagcagagaagggcggcgacgctcacagcagcagcaagcagaggagggcggcgctcacagcagcagcaagcagaggagggcggcggcgctcagagcagcagcaagcaggggagggcggcggcgctcagagcagttagcagcaagcagatgaagcggtggcgctcaactccagctaggttaaagactgtaacggcattggcacagtttcaggcttttcagcccccctggtgggccggcccaaatagaaaagagcagcctggagcccaaaacaaagcacctagtcgagaacaaccctaatcggacgactaatcgccgactaatcgcgattagtcggacgactaggtttctagtcgccctaatcgcgtcggtggccctaatcggccttgcagcagcgataagtccgactaatcgcgactaatcgcgattagtcggacgactttaaaaccattccgatggagacaatggaaacaatccagttgttggagggggtggctaagaactcgaagaatttaaagttggtggagaaccacgaaaacgagaccagggttgccacgtaagagaagactgcatcagcatcactacttgcctgttttgaaatttaatgtacctttcacggaagccctcactaacattaattgtttgtatgtttcatctcagcttgatgactgaaaataactagggccttgcagggaaaccttcgttgacttctgaggtactgaaggttagtgaagaggcagatgattacgttccaaataggaagtcttgaatactgctgtgacttgtgttttgaaatagatatagtattttctggttctcttgcaaacctcattgttgcagccctaacatttcatggtgtgtttgatttgtggggtgggggtggatgggagacggtcaacccattttttaaagttgttcagttagatgggatgcccaaccagtggggatattcccccgagatcttggatgggatgtccatgcaaatctggtggacagagtagtccatggccttgttgaatacttattgcgcgactggttgtggtcacctaatgtgccttttctttttgctccaattgttcccaatctcatccctcattaacctgtttctgactgggatgcgcacagcaattgggaaccagcaggccctctgtccagacgctggtgctttgtgctccgttgttgtgctgctgctccactggcgtttactagttctagtgccttttcactgatttgtccgcacagggatcctggtgctagtgcttggctgattgctgctgcccctgtgttctccctcaattcgtactgctcatgcaattcctggaggccctaggaattggttctgcagttgtacctgtaggctgtagctgccaatttagttcgattttgaatttggcaggtagttgttgtgcttgtttctagatgcaagagtgcttattgtttgtggtgtttgttattggaaattttggttggtggtagttatttgtccggaaaggttaatgcaatgctgtggcttgtcttgcttttagtcaatggtagtaagttgagtaaaatgttcatgtgtatgtgcagcttgtggtcggcagtgtgaaattttgacctctaattatttgttagtaatgtaattttctcagcaggaatccaattcatgatgatgagctacattattcaagtttagcaactattgattgtgtttcccatcatgccttggatgtgtcaaaacttgaacacaccaatttgaagattatcataccctgcttatctatccacatacaaccaaccaaacaaaaatctgctggatcatcccatttgaaaacttgcaaccaaccaaacaagaatttggctcatgcaatccgtccaacctaatgagctaatacatgtaggagcatcattctatgattctatcctaaatccatggatggccctatcccatccaaccttgcctctccaacccatacggccatacaaacttgtgaccattcattgtaattctcatttcattgtcataagtgcgcctcgtttgacactgttgtttctctcgtcatcattggctttgtgtcggacacgttcatgataatttatctgcagcaacggtcaaatttatgaagctacaaggtgcaagttatgagctgctgtaactaaaaggatctctggtttcttttgagcagctgtctgttgtgtcaagttatgtgctacttgtaacactaaagtaccattttaccttatgacatgcagtgcttggttgttctgtcgtagttaaagaccgtgttgcaataagtgctagttctgtatgtttcctgggtttatgttatcaaatggttgcctggtttgcccactaatgtcatgttgctataagtattcctagctgttgagaaatgcgtgcgcgcgtgccgatcgttgtatcattgggtgcaacatcataggtcattgtagccaagggctatgaagaggggagtttcagatagtccaaaaacaccagggtacatagcaaatacgaaggttcttaggaaggaacagaagtgcgcaggccatttcgcgcaccatgaagcacccgcgatgagcagacgacaaccttggaacaaaacgaacctagagttcgaaggcggaccacactgcggatgatgtagcttatggacgtccacactgaggtctgaggatgaacgaaatag

SEQ ID NO: 45975 - DNA, 4421 bp, Zea Mays
tgcccgtgtgccaggcgaaaaacgtagcctcgcactctcgcaggcggcggcgcatcgagaaacagggctgcggctgttgcttcttccacctctccggccatccggcggtccatcgttccgtgccggcggcctcccctcctacgcccctgccgattcttcaatcttcaccaacgtctgcgcgtagcaggctagcagtcggcacggcttcctcagatctgccggacgacttgctgttcgtcaccgactcaccagcaaccaacgtcagccatcagccggcagcaggggaagctgggcggagggtcattgcggcacggcgtccaggcgtacagaaggcaccagcaacagcccatggcaaacgatgaccctatggcagatgaagccggagtagaagatgccttcacacaggagatcaatcattcgtacgtccctagataccatgtgttgagttggatggaaactgtggaggggatggtggccggtgtggcgtcgcttccgccggtgtatttgatactgaacagagatcttcttgagacgggatggggatggaagaggctggtgccctacagacctggttatgttgagttgcatgtgttcaagaaataccttggggactatttcgaccataatcgtgaagcttttctttgtgccgagcagaagcctgatccatttggatggattgttgctgaaaagagtgccctgattgctgcagccaaatcgtgcctcaagatggagaaggcacttctcaggtactgtgctagctttctcactcctgacgacaaaaggctgatcctccggatcaaggaccaggcaaagcaaatgatccaatcagagggtgatcaatctttgattgtaactatatgcttggagtgtattgcgaaggaggccgagttaatgtacaattatttgccttgtgattttgacaccaccgaagaagtcgccgtctgcaataaggttcggcggtctgccttgaatcttatgctctacaaaggttctgaatctgctgttgctgctggtgccatgatgggtatcacaacagaggctaagtccatttttgacttgcttagtcgagaccatgacgtggtcatggaagtttttacttgtgagagtataagggaacatacagcatcagttctgacccagcttgggaaggaatttgcttgcgagactgctactgtgaacagctcatcagcgcggcctatgggggtcagtgatgttagagatctgaactctgaagtatctggttcaatggaagactgtacgagtatggatggagcaaggttttaaagtcggctagtcgactctagtcgcctaagcaccgataaggtgactaatcgcgattagtcgtcgattagctcgattagtcgatcctagtcgactccctagtcgtcctatagtcgtccatctataacaggaccatatatatatatatatatactagattgcaaatctattgacaatattacaatgaaactgtagaatgaatgaatgatcatgttttcactaaaaggtaaagatcacttagacacttaccttggattggagtatacaacagcacactgcaagattagtaggacaacacttctggtatatctccagcagccttactagtgcaaaacgtcatatatctccaacaaagcaagcagaggagggcgtccagcaagcagaggagggcggcggcgcttacagcagcagcaagcagaggagggcggcgctcagagcagcagcaagcagaggagggcggcagcgctcagagcagcagcaagcagaggagggcggcggcgctcacagcagcagcaagcagaggagggcggcgctcagagcagcagcaagcagaggagggcggcagcgctcagagcagcagcaagcagagaagggcggcgacgctcacagcagcagcaagcagaggagggcggcgctcacagcagcagcaagcagaggagggcggcggcgctcagagcagcagcaagcaggggagggcggcggcgctcagagcagttagcagcaagcagatgaagcggtggcgctcaactccagctaggttaaagactgtaacggcattggcacagtttcaggcttttcagcccccctggtgggccggcccaaatagaaaagagcagcctggagcccaaaacaaagcacctagtcgagaacaaccctaatcggacgactaatcgccgactaatcgcgattagtcggacgactaggtttctagtcgccctaatcgcgtcggtggccctaatcggccttgcagcagcgataagtccgactaatcgcgactaatcgcgattagtcggacgactttaaaaccattccgatggagacaatggaaacaatccagttgttggagggggtggctaagaactcgaagaatttaaagttggtggagaaccacgaaaacgagaccagggttgccaccttgatgactgaaaataactagggccttgcagggaaaccttcgttgacttctgaggtactgaaggttagtgaagaggcagatgattacgttccaaataggaagtcttgaatactgctgtgacttgtgttttgaaatagatatagtattttctggttctcttgcaaacctcattgttgcagccctaacatttcatggtgtgtttgatttgtggggtgggggtggatgggagacggtcaacccattttttaaagttgttcagttagatgggatgcccaaccagtggggatattcccccgagatcttggatgggatgtccatgcaaatctggtggacagagtagtccatggccttgttgaatacttattgcgcgactggttgtggtcacctaatgtgccttttctttttgctccaattgttcccaatctcatccctcattaacctgtttctgactgggatgcgcacagcaattgggaaccagcaggccctctgtccagacgctggtgctttgtgctccgttgttgtgctgctgctccactggcgtttactagttctagtgccttttcactgatttgtccgcacagggatcctggtgctagtgcttggctgattgctgctgcccctgtgttctccctcaattcgtactgctcatgcaattcctggaggccctaggaattggttctgcagttgtacctgtaggctgtagctgccaatttagttcgattttgaatttggcaggtagttgttgtgcttgtttctagatgcaagagtgcttattgtttgtggtgtttgttattggaaattttggttggtggtagttatttgtccggaaaggttaatgcaatgctgtggcttgtcttgcttttagtcaatggtagtaagttgagtaaaatgttcatgtgtatgtgcagcttgtggtcggcagtgtgaaattttgacctctaattatttgttagtaatgtaattttctcagcaggaatccaattcatgatgatgagctacattattcaagtttagcaactattgattgtgtttcccatcatgccttggatgtgtcaaaacttgaacacaccaatttgaagattatcataccctgcttatctatccacatacaaccaaccaaacaaaaatctgctggatcatcccatttgaaaacttgcaaccaaccaaacaagaatttggctcatgcaatccgtccaacctaatgagctaatacatgtaggagcatcattctatgattctatcctaaatccatggatggccctatcccatccaaccttgcctctccaacccatacggccatacaaacttgtgaccattcattgtaattctcatttcattgtcataagtgcgcctcgtttgacactgttgtttctctcgtcatcattggctttgtgtcggacacgttcatgataatttatctgcagcaacggtcaaatttatgaagctacaaggtgcaagttatgagctgctgtaactaaaaggatctctggtttcttttgagcagctgtctgttgtgtcaagttatgtgctacttgtaacactaaagtaccattttaccttatgacatgcagtgcttggttgttctgtcgtagttaaagaccgtgttgcaataagtgctagttctgtatgtttcctgggtttatgttatcaaatggttgcctggtttgcccactaatgtcatgttgctataagtattcctagctgttgagaaatgcgtgcgcgcgtgccgatcgttgtatcattgggtgcaacatcataggtcattgtagccaagggctatgaagaggggagtttcagatagtccaaaaacaccagggtacatagcaaatacgaaggttcttaggaaggaacagaagtgcgcaggccatttcgcgcaccatgaagcacccgcgatgagcagacgacaaccttggaacaaaacgaacctagagttcgaaggcggaccacactgcggatgatgtagcttatggacgtccacactgaggtctgaggatgaacgaaatag

SEQ ID NO: 45976 - DNA, 4836 bp, Zea Mays
tgcccgtgtgccaggcgaaaaacgtagcctcgcactctcgcaggcggcggcgcatcgagaaacagggctgcggctgttgcttcttccacctctccggccatccggcggtccatcgttccgtgccggcggcctcccctcctacgcccctgccgattcttcaatcttcaccaacgtctgcgcgtagcaggctagcagtcggcacggcttcctcagatctgccggacgacttgctgttcgtcaccgactcaccagcaaccaacgtcagccatcagccggcagcaggggaagctgggcggagggtcattgcggcacggcgtccaggcgtacagaaggcaccagcaacagcccatggcaaacgatgaccctatggcagatgaagccggagtagaagatgccttcacacaggagatcaatcattcgtacgtccctagataccatgtgttgagttggatggaaactgtggaggggatggtggccggtgtggcgtcgcttccgccggtgtatttgatactgaacagagatcttcttgagacgggatggggatggaagaggctggtgccctacagacctggttatgttgagttgcatgtgttcaagaaataccttggggactatttcgaccataatcgtgaagcttttctttgtgccgagcagaagcctgatccatttggatggattgttgctgaaaagagtgccctgattgctgcagccaaatcgtgcctcaagatggagaaggcacttctcaggtactgtgctagctttctcactcctgacgacaaaaggctgatcctccggatcaaggaccaggcaaagcaaatgatccaatcagagggtgatcaatctttgattgtaactatatgcttggagtgtattgcgaaggaggccgagttaatgtacaattatttgccttgtgattttgacaccaccgaagaagtcgccgtctgcaataaggttcggcggtctgccttgaatcttatgctctacaaaggttctgaatctgctgttgctgctggtgccatgatggtgtgttcctgatactctctccattcattttataggctttattttgactatgcaaaaaccaatattctgctgtaaattctccctatagtattatgttggtagttacaaaatcatagtcagtagcaagtgcttttaattaggaattgttacgtaactcacattttatgggactaatgtctggtcaaagcatgaacttggatagtcaaaccacaccttataaatatgaatatagggagtaattgtgtattttttaatcctctgttatcctgtcaagcttctttaaccaaactgcaaaaacgatgtacttgaagggtatcacaacagaggctaagtccatttttgacttgcttagtcgagaccatgacgtggtcatggaagtttttacttgtgagagtataagggaacatacagcatcagttctgacccagcttgggaaggaatttgcttgcgagactgctactgtgaacagctcatcagcgcggcctatgggggtcagtgatgttagagatctgaactctgaagtatctggttcaatggaagactgtacgagtatggatggagcaaggttttaaagtcggctagtcgactctagtcgcctaagcaccgataaggtgactaatcgcgattagtcgtcgattagctcgattagtcgatcctagtcgactccctagtcgtcctatagtcgtccatctataacaggaccatatatatatatatatatactagattgcaaatctattgacaatattacaatgaaactgtagaatgaatgaatgatcatgttttcactaaaaggtaaagatcacttagacacttaccttggattggagtatacaacagcacactgcaagattagtaggacaacacttctggtatatctccagcagccttactagtgcaaaacgtcatatatctccaacaaagcaagcagaggagggcgtccagcaagcagaggagggcggcggcgcttacagcagcagcaagcagaggagggcggcgctcagagcagcagcaagcagaggagggcggcagcgctcagagcagcagcaagcagaggagggcggcggcgctcacagcagcagcaagcagaggagggcggcgctcagagcagcagcaagcagaggagggcggcagcgctcagagcagcagcaagcagagaagggcggcgacgctcacagcagcagcaagcagaggagggcggcgctcacagcagcagcaagcagaggagggcggcggcgctcagagcagcagcaagcaggggagggcggcggcgctcagagcagttagcagcaagcagatgaagcggtggcgctcaactccagctaggttaaagactgtaacggcattggcacagtttcaggcttttcagcccccctggtgggccggcccaaatagaaaagagcagcctggagcccaaaacaaagcacctagtcgagaacaaccctaatcggacgactaatcgccgactaatcgcgattagtcggacgactaggtttctagtcgccctaatcgcgtcggtggccctaatcggccttgcagcagcgataagtccgactaatcgcgactaatcgcgattagtcggacgactttaaaaccattccgatggagacaatggaaacaatccagttgttggagggggtggctaagaactcgaagaatttaaagttggtggagaaccacgaaaacgagaccagggttgccacgtaagagaagactgcatcagcatcactacttgcctgttttgaaatttaatgtacctttcacggaagccctcactaacattaattgtttgtatgtttcatctcagcttgatgactgaaaataactagggccttgcagggaaaccttcgttgacttctgaggtactgaaggttagtgaagaggcagatgattacgttccaaataggaagtcttgaatactgctgtgacttgtgttttgaaatagatatagtattttctggttctcttgcaaacctcattgttgcagccctaacatttcatggtgtgtttgatttgtggggtgggggtggatgggagacggtcaacccattttttaaagttgttcagttagatgggatgcccaaccagtggggatattcccccgagatcttggatgggatgtccatgcaaatctggtggacagagtagtccatggccttgttgaatacttattgcgcgactggttgtggtcacctaatgtgccttttctttttgctccaattgttcccaatctcatccctcattaacctgtttctgactgggatgcgcacagcaattgggaaccagcaggccctctgtccagacgctggtgctttgtgctccgttgttgtgctgctgctccactggcgtttactagttctagtgccttttcactgatttgtccgcacagggatcctggtgctagtgcttggctgattgctgctgcccctgtgttctccctcaattcgtactgctcatgcaattcctggaggccctaggaattggttctgcagttgtacctgtaggctgtagctgccaatttagttcgattttgaatttggcaggtagttgttgtgcttgtttctagatgcaagagtgcttattgtttgtggtgtttgttattggaaattttggttggtggtagttatttgtccggaaaggttaatgcaatgctgtggcttgtcttgcttttagtcaatggtagtaagttgagtaaaatgttcatgtgtatgtgcagcttgtggtcggcagtgtgaaattttgacctctaattatttgttagtaatgtaattttctcagcaggaatccaattcatgatgatgagctacattattcaagtttagcaactattgattgtgtttcccatcatgccttggatgtgtcaaaacttgaacacaccaatttgaagattatcataccctgcttatctatccacatacaaccaaccaaacaaaaatctgctggatcatcccatttgaaaacttgcaaccaaccaaacaagaatttggctcatgcaatccgtccaacctaatgagctaatacatgtaggagcatcattctatgattctatcctaaatccatggatggccctatcccatccaaccttgcctctccaacccatacggccatacaaacttgtgaccattcattgtaattctcatttcattgtcataagtgcgcctcgtttgacactgttgtttctctcgtcatcattggctttgtgtcggacacgttcatgataatttatctgcagcaacggtcaaatttatgaagctacaaggtgcaagttatgagctgctgtaactaaaaggatctctggtttcttttgagcagctgtctgttgtgtcaagttatgtgctacttgtaacactaaagtaccattttaccttatgacatgcagtgcttggttgttctgtcgtagttaaagaccgtgttgcaataagtgctagttctgtatgtttcctgggtttatgttatcaaatggttgcctggtttgcccactaatgtcatgttgctataagtattcctagctgttgagaaatgcgtgcgcgcgtgccgatcgttgtatcattgggtgcaacatcataggtcattgtagccaagggctatgaagaggggagtttcagatagtccaaaaacaccagggtacatagcaaatacgaaggttcttaggaaggaacagaagtgcgcaggccatttcgcgcaccatgaagcacccgcgatgagcagacgacaaccttggaacaaaacgaacctagagttcgaaggcggaccacactgcggatgatgtagcttatggacgtccacactgaggtctgaggatgaacgaaatag

SEQ ID NO: 45977 - DNA, 4759 bp, Zea Mays
tgcccgtgtgccaggcgaaaaacgtagcctcgcactctcgcaggcggcggcgcatcgagaaacagggctgcggctgttgcttcttccacctctccggccatccggcggtccatcgttccgtgccggcggcctcccctcctacgcccctgccgattcttcaatcttcaccaacgtctgcgcgtagcaggctagcagtcggcacggcttcctcagatctgccggacgacttgctgttcgtcaccgactcaccagcaaccaacgtcagccatcagccggcagcaggggaagctgggcggagggtcattgcggcacggcgtccaggcgtacagaaggcaccagcaacagcccatggcaaacgccgcagatgaccctatggcagatgaagccggagtagaagatgccttcacacaggagatcaatcattcgtacgtccctagataccatgtgttgagttggatggaaactgtggaggggatggtggccggtgtggcgtcgcttccgccggtgtatttgatactgaacagagatcttcttgagacgggatggggatggaagaggctggtgccctacagacctgaagcctgatccatttggatggattgttgctgaaaagagtgccctgattgctgcagccaaatcgtgcctcaagatggagaaggcacttctcaggtactgtgctagctttctcactcctgacgacaaaaggctgatcctccggatcaaggaccaggcaaagcaaatgatccaatcagagggtgatcaatctttgattgtaactatatgcttggagtgtattgcgaaggaggccgagttaatgtacaattatttgccttgtgattttgacaccaccgaagaagtcgccgtctgcaataaggttcggcggtctgccttgaatcttatgctctacaaaggttctgaatctgctgttgctgctggtgccatgatggtgtgttcctgatactctctccattcattttataggctttattttgactatgcaaaaaccaatattctgctgtaaattctccctatagtattatgttggtagttacaaaatcatagtcagtagcaagtgcttttaattaggaattgttacgtaactcacattttatgggactaatgtctggtcaaagcatgaacttggatagtcaaaccacaccttataaatatgaatatagggagtaattgtgtattttttaatcctctgttatcctgtcaagcttctttaaccaaactgcaaaaacgatgtacttgaagggtatcacaacagaggctaagtccatttttgacttgcttagtcgagaccatgacgtggtcatggaagtttttacttgtgagagtataagggaacatacagcatcagttctgacccagcttgggaaggaatttgcttgcgagactgctactgtgaacagctcatcagcgcggcctatgggggtcagtgatgttagagatctgaactctgaagtatctggttcaatggaagactgtacgagtatggatggagcaaggttttaaagtcggctagtcgactctagtcgcctaagcaccgataaggtgactaatcgcgattagtcgtcgattagctcgattagtcgatcctagtcgactccctagtcgtcctatagtcgtccatctataacaggaccatatatatatatatatatactagattgcaaatctattgacaatattacaatgaaactgtagaatgaatgaatgatcatgttttcactaaaaggtaaagatcacttagacacttaccttggattggagtatacaacagcacactgcaagattagtaggacaacacttctggtatatctccagcagccttactagtgcaaaacgtcatatatctccaacaaagcaagcagaggagggcgtccagcaagcagaggagggcggcggcgcttacagcagcagcaagcagaggagggcggcgctcagagcagcagcaagcagaggagggcggcagcgctcagagcagcagcaagcagaggagggcggcggcgctcacagcagcagcaagcagaggagggcggcgctcagagcagcagcaagcagaggagggcggcagcgctcagagcagcagcaagcagagaagggcggcgacgctcacagcagcagcaagcagaggagggcggcgctcacagcagcagcaagcagaggagggcggcggcgctcagagcagcagcaagcaggggagggcggcggcgctcagagcagttagcagcaagcagatgaagcggtggcgctcaactccagctaggttaaagactgtaacggcattggcacagtttcaggcttttcagcccccctggtgggccggcccaaatagaaaagagcagcctggagcccaaaacaaagcacctagtcgagaacaaccctaatcggacgactaatcgccgactaatcgcgattagtcggacgactaggtttctagtcgccctaatcgcgtcggtggccctaatcggccttgcagcagcgataagtccgactaatcgcgactaatcgcgattagtcggacgactttaaaaccattccgatggagacaatggaaacaatccagttgttggagggggtggctaagaactcgaagaatttaaagttggtggagaaccacgaaaacgagaccagggttgccacgtaagagaagactgcatcagcatcactacttgcctgttttgaaatttaatgtacctttcacggaagccctcactaacattaattgtttgtatgtttcatctcagcttgatgactgaaaataactagggccttgcagggaaaccttcgttgacttctgaggtactgaaggttagtgaagaggcagatgattacgttccaaataggaagtcttgaatactgctgtgacttgtgttttgaaatagatatagtattttctggttctcttgcaaacctcattgttgcagccctaacatttcatggtgtgtttgatttgtggggtgggggtggatgggagacggtcaacccattttttaaagttgttcagttagatgggatgcccaaccagtggggatattcccccgagatcttggatgggatgtccatgcaaatctggtggacagagtagtccatggccttgttgaatacttattgcgcgactggttgtggtcacctaatgtgccttttctttttgctccaattgttcccaatctcatccctcattaacctgtttctgactgggatgcgcacagcaattgggaaccagcaggccctctgtccagacgctggtgctttgtgctccgttgttgtgctgctgctccactggcgtttactagttctagtgccttttcactgatttgtccgcacagggatcctggtgctagtgcttggctgattgctgctgcccctgtgttctccctcaattcgtactgctcatgcaattcctggaggccctaggaattggttctgcagttgtacctgtaggctgtagctgccaatttagttcgattttgaatttggcaggtagttgttgtgcttgtttctagatgcaagagtgcttattgtttgtggtgtttgttattggaaattttggttggtggtagttatttgtccggaaaggttaatgcaatgctgtggcttgtcttgcttttagtcaatggtagtaagttgagtaaaatgttcatgtgtatgtgcagcttgtggtcggcagtgtgaaattttgacctctaattatttgttagtaatgtaattttctcagcaggaatccaattcatgatgatgagctacattattcaagtttagcaactattgattgtgtttcccatcatgccttggatgtgtcaaaacttgaacacaccaatttgaagattatcataccctgcttatctatccacatacaaccaaccaaacaaaaatctgctggatcatcccatttgaaaacttgcaaccaaccaaacaagaatttggctcatgcaatccgtccaacctaatgagctaatacatgtaggagcatcattctatgattctatcctaaatccatggatggccctatcccatccaaccttgcctctccaacccatacggccatacaaacttgtgaccattcattgtaattctcatttcattgtcataagtgcgcctcgtttgacactgttgtttctctcgtcatcattggctttgtgtcggacacgttcatgataatttatctgcagcaacggtcaaatttatgaagctacaaggtgcaagttatgagctgctgtaactaaaaggatctctggtttcttttgagcagctgtctgttgtgtcaagttatgtgctacttgtaacactaaagtaccattttaccttatgacatgcagtgcttggttgttctgtcgtagttaaagaccgtgttgcaataagtgctagttctgtatgtttcctgggtttatgttatcaaatggttgcctggtttgcccactaatgtcatgttgctataagtattcctagctgttgagaaatgcgtgcgcgcgtgccgatcgttgtatcattgggtgcaacatcataggtcattgtagccaagggctatgaagaggggagtttcagatagtccaaaaacaccagggtacatagcaaatacgaaggttcttaggaaggaacagaagtgcgcaggccatttcgcgcaccatgaagcacccgcgatgagcagacgacaaccttggaacaaaacgaacctagagttcgaaggcggaccacactgcggatgatgtagcttatggacgtccacactgaggtctgaggatgaacgaaatag

SEQ ID NO: 45978 - DNA, 4585 bp, Zea Mays
tgcccgtgtgccaggcgaaaaacgtagcctcgcactctcgcaggcggcggcgcatcgagaaacagggctgcggctgttgcttcttccacctctccggccatccggcggtccatcgttccgtgccggcggcctcccctcctacgcccctgccgattcttcaatcttcaccaacgtctgcgcgtagcaggctagcagtcggcacggcttcctcagatctgccggacgacttgctgttcgtcaccgactcaccagcaaccaacgtcagccatcagccggcagcaggggaagctgggcggagggtcattgcggcacggcgtccaggcgtacagaaggcaccagcaacagcccatggcaaacgccgcagatgaccctatggcagatgaagccggagtagaagatgccttcacacaggagatcaatcattcgtacgtccctagataccatgtgttgagttggatggaaactgtggaggggatggtggccggtgtggcgtcgcttccgccggtgtatttgatactgaacagagagatatatgatacatgctcctgcttgctcatgatgccggtttggtgccaaagctatcttcttgagacgggatggggatggaagaggctggtgccctacagacctggttatgttgagttgcatgtgttcaagaaataccttggggactatttcgaccataatcgtgaagcttttctttgtgccgagcagaagcctgatccatttggatggattgttgctgaaaagagtgccctgattgctgcagccaaatcgtgcctcaagatggagaaggcacttctcaggtactgtgctagctttctcactcctgacgacaaaaggctgatcctccggatcaaggaccaggcaaagcaaatgatccaatcagagggtgatcaatctttgattgtaactatatgcttggagtgtattgcgaaggaggccgagttaatgtacaattatttgccttgtgattttgacaccaccgaagaagtcgccgtctgcaataaggttcggcggtctgccttgaatcttatgctctacaaaggttctgaatctgctgttgctgctggtgccatgatgggtatcacaacagaggctaagtccatttttgacttgcttagtcgagaccatgacgtggtcatggaagtttttacttgtgagagtataagggaacatacagcatcagttctgacccagcttgggaaggaatttgcttgcgagactgctactgtgaacagctcatcagcgcggcctatgggggtcagtgatgttagagatctgaactctgaagtatctggttcaatggaagactgtacgagtatggatggagcaaggttttaaagtcggctagtcgactctagtcgcctaagcaccgataaggtgactaatcgcgattagtcgtcgattagctcgattagtcgatcctagtcgactccctagtcgtcctatagtcgtccatctataacaggaccatatatatatatatatatactagattgcaaatctattgacaatattacaatgaaactgtagaatgaatgaatgatcatgttttcactaaaaggtaaagatcacttagacacttaccttggattggagtatacaacagcacactgcaagattagtaggacaacacttctggtatatctccagcagccttactagtgcaaaacgtcatatatctccaacaaagcaagcagaggagggcgtccagcaagcagaggagggcggcggcgcttacagcagcagcaagcagaggagggcggcgctcagagcagcagcaagcagaggagggcggcagcgctcagagcagcagcaagcagaggagggcggcggcgctcacagcagcagcaagcagaggagggcggcgctcagagcagcagcaagcagaggagggcggcagcgctcagagcagcagcaagcagagaagggcggcgacgctcacagcagcagcaagcagaggagggcggcgctcacagcagcagcaagcagaggagggcggcggcgctcagagcagcagcaagcaggggagggcggcggcgctcagagcagttagcagcaagcagatgaagcggtggcgctcaactccagctaggttaaagactgtaacggcattggcacagtttcaggcttttcagcccccctggtgggccggcccaaatagaaaagagcagcctggagcccaaaacaaagcacctagtcgagaacaaccctaatcggacgactaatcgccgactaatcgcgattagtcggacgactaggtttctagtcgccctaatcgcgtcggtggccctaatcggccttgcagcagcgataagtccgactaatcgcgactaatcgcgattagtcggacgactttaaaaccattccgatggagacaatggaaacaatccagttgttggagggggtggctaagaactcgaagaatttaaagttggtggagaaccacgaaaacgagaccagggttgccacgtaagagaagactgcatcagcatcactacttgcctgttttgaaatttaatgtacctttcacggaagccctcactaacattaattgtttgtatgtttcatctcagcttgatgactgaaaataactagggccttgcagggaaaccttcgttgacttctgaggtactgaaggttagtgaagaggcagatgattacgttccaaataggaagtcttgaatactgctgtgacttgtgttttgaaatagatatagtattttctggttctcttgcaaacctcattgttgcagccctaacatttcatggtgtgtttgatttgtggggtgggggtggatgggagacggtcaacccattttttaaagttgttcagttagatgggatgcccaaccagtggggatattcccccgagatcttggatgggatgtccatgcaaatctggtggacagagtagtccatggccttgttgaatacttattgcgcgactggttgtggtcacctaatgtgccttttctttttgctccaattgttcccaatctcatccctcattaacctgtttctgactgggatgcgcacagcaattgggaaccagcaggccctctgtccagacgctggtgctttgtgctccgttgttgtgctgctgctccactggcgtttactagttctagtgccttttcactgatttgtccgcacagggatcctggtgctagtgcttggctgattgctgctgcccctgtgttctccctcaattcgtactgctcatgcaattcctggaggccctaggaattggttctgcagttgtacctgtaggctgtagctgccaatttagttcgattttgaatttggcaggtagttgttgtgcttgtttctagatgcaagagtgcttattgtttgtggtgtttgttattggaaattttggttggtggtagttatttgtccggaaaggttaatgcaatgctgtggcttgtcttgcttttagtcaatggtagtaagttgagtaaaatgttcatgtgtatgtgcagcttgtggtcggcagtgtgaaattttgacctctaattatttgttagtaatgtaattttctcagcaggaatccaattcatgatgatgagctacattattcaagtttagcaactattgattgtgtttcccatcatgccttggatgtgtcaaaacttgaacacaccaatttgaagattatcataccctgcttatctatccacatacaaccaaccaaacaaaaatctgctggatcatcccatttgaaaacttgcaaccaaccaaacaagaatttggctcatgcaatccgtccaacctaatgagctaatacatgtaggagcatcattctatgattctatcctaaatccatggatggccctatcccatccaaccttgcctctccaacccatacggccatacaaacttgtgaccattcattgtaattctcatttcattgtcataagtgcgcctcgtttgacactgttgtttctctcgtcatcattggctttgtgtcggacacgttcatgataatttatctgcagcaacggtcaaatttatgaagctacaaggtgcaagttatgagctgctgtaactaaaaggatctctggtttcttttgagcagctgtctgttgtgtcaagttatgtgctacttgtaacactaaagtaccattttaccttatgacatgcagtgcttggttgttctgtcgtagttaaagaccgtgttgcaataagtgctagttctgtatgtttcctgggtttatgttatcaaatggttgcctggtttgcccactaatgtcatgttgctataagtattcctagctgttgagaaatgcgtgcgcgcgtgccgatcgttgtatcattgggtgcaacatcataggtcattgtagccaagggctatgaagaggggagtttcagatagtccaaaaacaccagggtacatagcaaatacgaaggttcttaggaaggaacagaagtgcgcaggccatttcgcgcaccatgaagcacccgcgatgagcagacgacaaccttggaacaaaacgaacctagagttcgaaggcggaccacactgcggatgatgtagcttatggacgtccacactgaggtctgaggatgaacgaaatag

SEQ ID NO: 45979 - DNA, 807 bp, Zea Mays
attgagtccacatgggatgggaataaccgagcgggcccttatgaaatcaattgcgagcagaggttgttttggttgtgcccagcctactccaataatagctgttgacaagcctacaaaaggtttaagaattcaaggacgctcagtaaaaaggcgcaacgtatcagacgacttttggagctcgagcccacacgaaatggagaatagtgccttgcaatcccggcacagtatgtcctcaatcagcacagcagcacagcctaatgatcagcatgtttctggaactagcagctccccaaatgagtttgtaaatcaaggtcttctactatggcaccagactagacagcagtggattggaaaccgaaggcttaattctcagggtcaacaaagtcaagaaccaaaaataagttgtaatgctacatacgaaagcctgctcggaagctcgaagccgttcccacaaccgacccctcttggtgaaatggtggattttctcgtggtcagctgggagcaggaaggcttgtacggttagagctggttattggaaggtgccgttggttagagctggttattggaaggtgccgtttgtaatcacgttattattcgctgaaatgtacgcagcttgagtaggctgcagaagtctgtgtcgtgttgaatgtggattgcctcggagacaggaacaggatgacaccccttttaagcaaatgtataaaatattcgttgtttttattactagtataattgtttgtgttcacagcgttcagtttacgagttcattgttctacactacagtactatgtataaagttcgttttcg

SEQ ID NO: 45980 - DNA, 807 bp, Zea Mays
tgaggattgagtccacatgggatgggaataaccgagcgggcccttatgaaatcaattgcgaggttgttttggttgtgcccagcctactccaataatagctgttgacaagcctacaaaaggtttaagaattcaaggacgctcagtaaaaaggcgcaacgtatcagacgacttttggagctcgagcccacacgaaatggagaatagtgccttgcaatcccggcacagtatgtcctcaatcagcacagcagcacagcctaatgatcagcatgtttctggaactagcagctccccaaatgagtttgtaaatcaaggtcttctactatggcaccagactagacagcagtggattggaaaccgaaggcttaattctcagggtcaacaaagtcaagaaccaaaaataagttgtaatgctacatacgaaagcctgctcggaagctcgaagccgttcccacaaccgacccctcttggtgaaatggtggattttctcgtggtcagctgggagcaggaaggcttgtacggttagagctggttattggaaggtgccgttggttagagctggttattggaaggtgccgtttgtaatcacgttattattcgctgaaatgtacgcagcttgagtaggctgcagaagtctgtgtcgtgttgaatgtggattgcctcggagacaggaacaggatgacaccccttttaagcaaatgtataaaatattcgttgtttttattactagtataattgtttgtgttcacagcgttcagtttacgagttcattgttctacactacagtactatgtataaagttcgttttcg

SEQ ID NO: 45981 - DNA, 1242 bp, Zea Mays
tgagctcttggcggtgatgtcatgggaatcaaagccatggacctaatgctgtcaaatcaaagagcccaacgagtggagacgaaggtcagacgaggaaaaaggctcccaattcttctcttcctaaggcacccattgtccaggtgtcccatggtgacgctggtgtcggcagtaataaagatggcaagaatgagtctcgctcatcttccgtggatgcaacattgctggatgactccaaggagaaaaggaaaactcaaaagccattagcacagctcttttccatcaaaagtgacgaagaacagtcaaatggtgagagtgcaaagcctcgaaaagttggcagcattccatcatatggtttcaccttcaagtgtgatgagagatctgaaaaaagaagagagttctattcgaagcttgaggagaagattcatgcaagagagttagaaataagcaatttgcaagcgaaatcaaaggaaactgaagaagcagaactcaaaatgctgagaaagagtttgaacttcaaggcaacaccaatgccaagcttctataaggaaccaactcctgtcaaggttgaattgaaaaagatccccccaacaagagccaaatcgccaaagtttggtcgttctaaaaacaagtccacaccagagactgaagaaaatgctaccgcggaccagcctgcccacctgagcctcgaggagaatgtttctcaaaccggtgtgaaaaaaccaaccccgttgaatccagcaaagaagccccagaggaagtcactccccagactgccatctgaagaaaccggtccgcttgatgccacctcaaggcaacttataaagagcgccaagctggatgcagttagtgctccggagacaggatcagctacaggacaggcacaactacaaggaagtcagacggaaacagattctggtcaggggccagttgaagctggagctaatcctgatgaacaagacgccagcgaacagagtgttgtttagtgaagatcacgatgaccaaaccagctgatttgtgatgtgcatggtgttcctcggctttgtataatatattgtgcttgcctgctagagtaacctgtagtctgtattatgttatgtgatatatactactactcctggtttattttcctggaattgagccgtatgttgcttatcaatctagatagcttttgttcatattctacagatatatatatatccaaattgtcccgagtcatttgcagttggtggcaagtgcgttcat

SEQ ID NO: 45982 - DNA, 891 bp, Zea Mays
aatcgtcattgtacgtgccatctgtatagaatatgcaccagggctatcctaaagaaacactggtgcgtttccttaaggctagagagtggaatgtagcaaaggctcataaaatgattgtagaatgtttgaattggaggattcaaaatgaaattgatagtgtgctagagaggcctatagtcccagtagatttatacaggtcaatacgtgattcacaacttattggcctgtcaggatacacaaaggagttttcaataggaaagttaatatgccgaatgaagatcgcactgaagaggttaaagtgttaacttatattgattgtcaaacttccacggaatgatgtcctactaactgcaacatgggttattaagggtctcccaatttttggcattggtgttggacatagcacatatgacaaagcttcggtccactactatgtgcaatctcatatccagattaacgagtaccgtgatcgtataattttgcctaggctgacacaacagtttgggcggcctgttaccagctgtataaaagtgctggatatgactggtttgaagctatcagcactaagccaaataaagatgttgacttccatatcgacagttgatgatctaaattaccctgaaaagacagagacctattatgtagtcaacgttccatacatattttctgcttgttggaaggtactatcagttacagccaacgctcggacctacggtttttagtaatttttttagcagaaaggaactgatgacagttaatttgagcatgccgctaggttgtgaagcccttattgcaggagaggacaaaaaagaaggtcaaagttttgactggctgcgggagagatgaacttctgaaggtaaatatattcttccttgcttgctgccttttcac

SEQ ID NO: 45983 - DNA, 777 bp, Zea Mays
atattcgggaatcgtcattgtacgtgccatctgtatagaatatgcaccagggctatcctaaagaaacactggtgcgtttccttaaggctagagagtggaatgtagcaaaggctcataaaatgattgtagaatgtttgaattggaggattcaaaatgaaattgatagtgtgctagagaggcctatagtcccagtagatttatacaggtcaatacgtgattcacaacttattggcctgtcaggatacacaaaggagggtctcccaatttttggcattggtgttggacatagcacatatgacaaagcttcggtccactactatgtgcaatctcatatccagattaacgagtaccgtgatcgtataattttgcctaggctgacacaacagtttgggcggcctgttaccagctgtataaaagtgctggatatgactggtttgaagctatcagcactaagccaaataaagatgttgacttccatatcgacagttgatgatctaaattaccctgaaaagacagagacctattatgtagtcaacgttccatacatattttctgcttgttggaaggtactatcagttacagccaacgctcggacctacggtttttagtaatttttttagcagaaaggaactgatgacagttaatttgagcatgccgctaggttgtgaagcccttattgcaggagaggacaaaaaagaaggtcaaagttttgactggctgcgggagagatgaacttctgaaggtaaatatattcttccttgcttgctgccttttcac

SEQ ID NO: 45984 - DNA, 1070 bp, Zea Mays
cgagcaaacagtcatacactgggacgcggagtcgcggacgcctgcgcgatcagcgaacggaagaccgtggaagcaaagaggcgcaagcgagcacggaacaaatacaccttcaggtggcctccctccgactgccgactgaatcttccacctcgcttcgcgcctccggctccgcgccgggcccgcataatctgtgctcgggatcgcctcttcccgcggcaaatgggggccgactccgaggacgccgtcaagcagctcagcctcctcatggagcaagtggaggccccgctgaagagatcgtttcagaatatgcaccagggctatcctaaagaaacactggtgcgtttccttaaggctagagagtggaatgtagcaaaggctcataaaatgattgtagaatgtttgaattggaggattcaaaatgaaattgatagtgtgctagagaggcctatagtcccagtagatttatacaggtcaatacgtgattcacaacttattggcctgtcaggatacacaaaggagttttcaataggaaagttaatatgccgaatgaagatcgcactgaagaggttaaagtgttaacttatattgattgtcaaacttccacggaatgatgtcctactaactgcaacatgggttattaagggtctcccaatttttggcattggtgttggacatagcacatatgacaaagcttcggtccactactatgtgcaatctcatatccagattaacgagtaccgtgatcgtataattttgcctaggctgacacaacagtttgggcggcctgttaccagctgtataaaagtgctggatatgactggtttgaagctatcagcactaagccaaataaagatgttgacttccatatcgacagttgatgatctaaattaccctgaaaagacagagacctattatgtagtcaacgttccatacatattttctgcttgttggaaggttgtgaagcccttattgcaggagaggacaaaaaagaaggtcaaagttttgactggctgcgggagagatgaacttctgaaggtaaatatattcttccttgcttgctgccttttcac

SEQ ID NO: 45985 - DNA, 947 bp, Zea Mays
cgagcaaacagtcatacactgggacgcggagtcgcggacgcctgcgcgatcagcgaacggaagaccgtggaagcaaagaggcgcaagcgagcacggaacaaatacaccttcaggtggcctccctccgactgccgactgaatcttccacctcgcttcgcgcctccggctccgcgccgggcccgcataatctgtgctcgggatcgcctcttcccgcggcaaatgggggccgactccgaggacgccgtcaagcagctcagcctcctcatggagcaagtggaggccccgctgaagagatcgtttcagaatatgcaccagggctatcctaaagaaacactggtgcgtttccttaaggctagagagtggaatgtagcaaaggctcataaaatgattgtagaatgtttgaattggaggattcaaaatgaaattgatagtgtgctagagaggcctatagtcccagtagatttatacaggtcaatacgtgattcacaacttattggcctgtcaggatacacaaaggagggtctcccaatttttggcattggtgttggacatagcacatatgacaaagcttcggtccactactatgtgcaatctcatatccagattaacgagtaccgtgatcgtataattttgcctaggctgacacaacagtttgggcggcctgttaccagctgtataaaagtgctggatatgactggtttgaagctatcagcactaagccaaataaagatgttgacttccatatcgacagttgatgatctaaattaccctgaaaagacagagacctattatgtagtcaacgttccatacatattttctgcttgttggaaggttgtgaagcccttattgcaggagaggacaaaaaagaaggtcaaagttttgactggctgcgggagagatgaacttctgaaggtaaatatattcttccttgcttgctgccttttcac

SEQ ID NO: 45986 - DNA, 926 bp, Zea Mays
cgagcaaacagtcatacactgggacgcggagtcgcggacgcctgcgcgatcagcgaacggaagaccgtggaagcaaagaggcgcaagcgagcacggaacaaatacaccttcaggtggcctccctccgactgccgactgaatcttccacctcgcttcgcgcctccggctccgcgccgggcccgcataatctgtgctcgggatcgcctcttcccgcggcaaatgggggccgactccgaggacgccgtcaagcagctcagcctcctcatggagcaagtggaggccccgctgaagagatcgtttcagaatatgcaccagggctatcctaaagaaacactggtgcgtttccttaaggctagagagtggaatgtagcaaaggctcataaaatgattgtagaatgtttgaattggaggattcaaaatgaaattgatagtgtgctagagaggcctatagtcccagtagatttatacaggtcaatacgtgattcacaacttattggcctgtcaggatacacaaaggagggtctcccaatttttggcattggtgttggacatagcacatatgacaaagcttcggtccactactatgtgcaatctcatatccagattaacgagtaccgtgatcgtataattttgcctaggctgacacaacagtttgggcggcctgttaccagctgtataaaagtgctggatatgactggtttgaagctatcagcactaagccaaataaagatgttgacttccatatcgacagttgatgatctaaattaccctgaaaagacagagacctattatgtagtcaacgttccatacatattttctgcttgttggaaggagaggacaaaaaagaaggtcaaagttttgactggctgcgggagagatgaacttctgaaggtaaatatattcttccttgcttgctgccttttcac

SEQ ID NO: 45987 - DNA, 964 bp, Zea Mays
cgagcaaacagtcatacactgggacgcggagtcgcggacgcctgcgcgatcagcgaacggaagaccgtggaagcaaagaggcgcaagcgagcacggaacaaatacaccttcaggtggcctccctccgactgccgactgaatcttccacctcgcttcgcgcctccggctccgcgccgggcccgcataatctgtgctcgggatcgcctcttcccgcggcaaatgggggccgactccgaggacgccgtcaagcagctcagcctcctcatggagcaagtggaggccccgctgaagagatcgtttcagaatatgcaccagggctatcctaaagaaacactggtgcgtttccttaaggctagagagtggaatgtagcaaaggctcataaaatgattgtagaatgtttgaattggaggattcaaaatgaaattgatagtgtgctagagggtctcccaatttttggcattggtgttggacatagcacatatgacaaagcttcggtccactactatgtgcaatctcatatccagattaacgagtaccgtgatcgtataattttgcctaggctgacacaacagtttgggcggcctgttaccagctgtataaaagtgctggatatgactggtttgaagctatcagcactaagccaaataaagatgttgacttccatatcgacagttgatgatctaaattaccctgaaaagacagagacctattatgtagtcaacgttccatacatattttctgcttgttggaaggtactatcagttacagccaacgctcggacctacggtttttagtaatttttttagcagaaaggaactgatgacagttaatttgagcatgccgctaggttgtgaagcccttattgcaggagaggacaaaaaagaaggtcaaagttttgactggctgcgggagagatgaacttctgaaggtaaatatattcttccttgcttgctgccttttcac

SEQ ID NO: 45988 - DNA, 1676 bp, Zea Mays
gtacgctgcagcggtgcagtctgcttttttttcttcgtccatcgccgcccccagcttatttctttctctctctcgtggcgacgccggggcggccgtcgctgccgcctacggtgcccaggtcttcctgcccccccttcgccggcgccgagcacgagaagggatgttgtcaagctccgcagtgtgtgcaagttctggctagagtgcgttgaagaacatagttttatggaccgtcacctgaataatgcttgccgctaccaccagtccattgcttgtttcacctcgcttgatcatggcctagtccacatgtacacattcgatcctgccacaatgaatttcagaagtgtggagctcgtgttctcaagtaggtttaacatgtcagccccctgcaacggcttggtgtgtgcctatgatataaaaggcgatgctgaggtcttgaatcccacaacaaggaagcatttgaggctcccagattcagcactcaagtcacggtctctttactctgaatattttgttggattcgtgcactccacaaaacagtacaaggtggtctctatccgtcaccatgtgcggttcttgacatttgaaatctgcactattggcacaccgtcgtggaggacaatacatgaatctgcagagctcctagtggcaacgaaggcagtcattgttaaagatggcatgtattggctacttctcgatgaggcttcctcctattcgtctcgagaaatcctgacgctcaacctgacagacgagaggttctcaaaaattgccatcccagatgctgtaaaaagccacaagttggaactattcgagggggaaggaaagctccgtttgttgtcgacacattccgatggatctagcaatatagtgtcagatatttgggtagcggacttggctggtgaagactggatccacttgcagactatcatccccctgacgcatctgggcataagcccgtttttccagctcaagacgaaggtcttcttcggcaaccagaagagactcctctgcgtagatcttcaggacggtacggtttcatacatcaacatgccttccggtgagactttgatatcctgtggcatgtttgtggagagctttgcgcctgccgcgacaggcctggtgagctcgactgcgtcatatggtgaccgctctcgtctggctgaaccgtccatggcggaccctgggccatctttccgtggcgcagggtcatcctcggcaagccgcggacggtcttctggtctcaccggatggtcctcagctgaccttgagcagtccttcaagagaacgaagaggacgacaaacatgcagtggaagatatcgaaacatagagcaatctaggagcgcctggcatggcctatggattaccctctagactgtacagcagctgtaattttttctgtaggtgggtgcaatgctgtacttgctcattgctatggtaccactggaagcaaccatggcaatggggcggggaatacaagaggaaatcaatcaataaatgtcaagatcaaggggtggctttgactataacccctcttttggtaaatgtctggtggtagtttgcttcgtacttgtataaactgtatctgtatgtgtgcgtcgcaatttgtaaacaaacaggacgagtataagtgttgcccagacatgttagaccatacaaactgaaggctctgaagttgaac

SEQ ID NO: 45989 - DNA, 1703 bp, Zea Mays
cgggcccgagctgcctgtacgctgcagcggtgcagtctgcttttttttcttcgtccatcgccgcccccagcttatttctttctctctctcgtggcgacgccggggcggccgtcgctgccgcctacggtgcccaggtcttcctgcccccccttcgccggcgccgagcacgagaagaattgtagttgcatcctaagcatggactgtaatagtgatgatcttgataagcagaatgaagtgacgggatctcgagtattcattcctcaagatgcccaaggggttatccttgcttttcttcctggcagggatgttgtcaagctccgcagtgtgtgcaagttctggctagagtgcgttgaagaacatagttttatggaccgtcacctgaataatgcttgccgctaccaccagtccattgcttgtttcacctcgcttgatcatggcctagtccacatgtacacattcgatcctgccacaatgaatttcagaagtgtggagctcgtgttctcaagtaggtttaacatgtcagccccctgcaacggcttggtgtgtgcctatgatataaaaggcgatgctgaggtcttgaatcccacaacaaggaagcatttgaggctcccagattcagcactcaagtcacggtctctttactctgaatattttgttggattcgtgcactccacaaaacagtacaaggtggtctctatccgtcaccatgtgcggttcttgacatttgaaatctgcactattggcacaccgtcgtggaggacaatacatgaatctgcagagctcctagtggcaacgaaggcagtcattgttaaagatggcatgtattggctacttctcgatgaggcttcctcctattcgtctcgagaaatcctgacgctcaacctgacagacgagaggttctcaaaaattgccatcccagatgctgtaaaaagccacaagttggaactattcgagggggaaggaaagctccgtttgttgtcgacacattccgatggatctagcaatatagtgtcagatatttgggtagcggacttggctggtgaagactggatccacttgcagactatcatccccctgacgcatctgggcataagcccgtttttccagctcaagacgaaggtcttcttcggcaaccagaagagactcctctgcgtagatcttcaggacggtacggtttcatacatcaacatgccttccggtgagactttgatatcctgtggcatgtttgtggagagctttgcgcctgccgcgacaggcctggtgagctcgactgcgtcatatgctgaccttgagcagtccttcaagagaacgaagaggacgacaaacatgcagtggaagatatcgaaacatagagcaatctaggagcgcctggcatggcctatggattaccctctagactgtacagcagctgtaattttttctgtaggtgggtgcaatgctgtacttgctcattgctatggtaccactggaagcaaccatggcaatggggcggggaatacaagaggaaatcaatcaataaatgtcaagatcaaggggtggctttgactataacccctcttttggtaaatgtctggtggtagtttgcttcgtacttgtataaactgtatctgtatgtgtgcgtcgcaatttgtaaacaaacaggacgagtataagtgttgcccagacatgttagaccatacaaactgaaggctctgaagttgaac

SEQ ID NO: 45990 - DNA, 2842 bp, Zea Mays
ccgtcaaccttctttctcgcgcccaaacaggagttctctcgttctaaaaaaagattgcgaaaggacatgaatcccatgaggatcgagcatatggaggagcctagttcttgatccaatctcccagcatgcttgacgaacgcgaagacgaacgtggggcgaacgctgcatgctaacgcggaagatggaggagcgcgtcgggtgcagcaatgccgcgacgtccttcgacgactccgccaccggcaggacggcgggcgccgcggcggcgcagtgctccacggtgtcggtgttcctcgccaagatcaacggcgccgcgcgccacgtcaccgccgtctggagcaagagcctcatcaaccagtccttcaccgtctccatcgaacggccgggcgacggcgacgggccggtcacccacagggtggagctgaagccgtggccgttctggagcaagaagggcggcaaggcgctcgacgtgggcggcggcgaccgcgtcgacatgttctgggacctgcgctcggccaagttcgcggcggcgggcagcagcccggagcctgccggcggctactacgtcgcgctggtcagcaacgacgaggtcgtcctcctgctcggcgactgcaagaaggacgcgtacaagcggaccaaggcccgcccgtcgctggaggacgccgtgctggtgtgccgccgggagagcgtgttcggccgccgcagcttcgcggcgcgcgcgcggctcgacgccaggaggagcaaggagcatgagatcgtcatcgagtacgcgctcgccgccgcgggctccagcagggacccggagatgtggatcacggtggacggctccgtgctgctgcatgtcaagagccttcagtggaagttccggggcaatgagacgctgctcgtcgacgaggagccggtgcaggtcatctgggacgtgcacgactggctcttcgccgggccgggcacgcaggcagtcttcgtcttcaagcccggcgcaccgccggagatccaagaggacagcggagggaacgccatccagggtgacgggactgacttctgcttcttccttcaggcatggaggacggaatgaggcggtgaaatttgaagggcaaggcaatgatcttgtcctcgcgctactgatctgttgatgtgaatgacattgaaagcgtatccagctttacaaatttgtaaccaggaacacttcgtcaatccaagtttctgtcactggaaatttaatccaagcacacaagatatacaactttctttttacactgcaatggaactgacgtaagatatcaggtacgtaagcaactgcgaagtgtttataactcatagcagatacaacaagagcacaagattcatatcgttggccctgatggccacatacattcactccaccagaaaagctgtgtagagcccaaagaactgcttattctagaacaagtcatgactatcatcatagcaactaatctctactctccatctctcccttgttaccaacgtagctgtgaactagtctatttcctccatctgcacagtggcactgcaatgtgcaatctcaaatacctgaacatggcaacaaaaatatgaaacaaaaaagaaggcgtgatgtctagatgatcatctatcattcactccatcacagcaacaccgccagctgcctttatctttgctatgatcgcttccgcttcctcctttgtgagcgattgcttcagaacgactggggccttctccaccagctccttggcctccttcagccccagatccgtaaacgtcctgatctccttgatgatcttgatcttcgcagcagcgtcgaacttctccaacctgacgtcgaagactgtcttctcggctttcttctcagcctttccagaacctgccccagagccgacctgggcaccgaaaccgaaaccctggccagataccgcctgtggcggctcctggttcagtctgaggagaagggctggagcaatctgtttgatctcctcgggagggagagcagcgatgcgatcagctagttccacgactttctccgaaggcggcggcataggcccgtaggggtcgtatacatcggggtacttgtacttcttagcacccatgtcctttgcagcctcagtgctgtatagatgagcccaaattgctgaaagacgactgccagaggatggttttgaaagacatagccgtcgtgctattgtacagagactcatcctaatatcagttattcagttatgtgagcgcaatattcttctcctgcaccataacaagcaagaatcagtacaaaatgagactttgaagaaaaacttccagatcagattgcaccctgaatccatgaacatctcgtagcatgcatatataagcatgtataggcatggtagtttaaagggatcagctacatataagtcacaaagccagtactgctagcgctaggtgacgttccggatcggagtcgccattttacaagtttttaaggtatctcatttaaaccaataaatagcataataagttaataacttgcgccagaaatgtatctctttcatatcaaaatttccccatccttttcccaacctcccagtttctgactttctgtaatctgcaccgggagcacaccgatatgcagtgcagcgagagcaacaaatacagcgaaactgcccaaggtcatctattcacgagcacgggatgatccagtacaggacatctgtggacatatgtgcaaccgataaagtttttttctcaaaaaaaaaacgaagtttctgcgtgtatacaaaacgtacgtatacgactgcgtcagatcccaatacacggagattaaggtttagggtttgggttactcggtttcggacagagcggggagggaagagac

SEQ ID NO: 45991 - DNA, 1632 bp, Zea Mays
agtcctctcaatccgcctcgcccgcagcgcccccccccccacttcctttccctctctcacggcggcggcgagatgaaggtaacggtaatgaccggcgacgagcagatcgtcaccctcgacgtcgaccgcgacgaatccgtggaaaatctcaaggcgctactcgaagtggagactcgggtgccgctgcggcagcagcagattcacttcaatgggaaggagatgcagaacacggagaagctcagcgccgctggggtccaggacggcgaccttgtcatgatgttttccaccagcgaaaggccatctcaggatggcttaagggtaaatcctgatggaactgctgtgaatcctcaagcttttcaacaacatgctcgaggtgattcacaacttatggcacagctccttcagaatgatcctcaactagcacaagctatccttggggatgacaccactgagctacagaatatcctgcggtcccgccaccaacaaagaacagaactaaaacgtaaacaagaagaagagcttgctttattgtatgctgatccttttgatgtggaagcccagaagaaaattgaagctgcaatccggcagaaaggcatagatgaaaattgggaggctgcattagagcacaatcctgaagcatttgcccgagtggtaatgctatatgtggatatggaggtcaatggtgtacctttgaaggcttttgttgacagcggagcgcaatcgactatcatatcaaaaagttgcgctgaacgttgcgggttgctgaggcttcttgatcagcggttccgagggattgctgttggagtcggtcaatcagagatactaggaagaatacatgtagccccaataaagattgggaatatattctatccttgttctttcaccgtattggatgctcctaatatggaattcctattcggacttgacatgctgcgaaagcatcagtgcatgattgacctaaaggacaatgttctcagagtgggaggtggcgaagtttcagtgcccttcttacaagagaaagacatccctgcacacatacgcaatgaagagaaactgtctaagttagggtctctcagccaagcaactggagagtcatcaaggacacgtgagggtactcccaatgcgctacaacaaacccctccagtaaccgtgaactaacttcaaatccactaccattcatttactcgcaggagctccagctgcaaaccctccacagggaggagattttgaagcgaaagtcacgaagcttgtggagctcggttttgacagggcgtcggtgacacaagcgctcaagttgttcaacgggaatgaggagcaagctgctgcgttcttgtttggtggttagactggtgggagcagccgttcctggctttgtgttcgctcaaccctttccagggttgagtacttgaatatttgatacgaaagtgattaaagtatttggatactgtttgtccagtgaaaggacttacttttagaggttttatgttttctcttgtttctgagaacaaacatttgttttctgtacctgatacatagactgatagacaccagaatggagacagaactgtgaagatttttttttattaagagtgtttatttgagccagcgaaagtgcgactagccgagtttgtt

SEQ ID NO: 45992 - DNA, 1112 bp, Zea Mays
caactttccttgtcggtcctgtggcaggcaggtccaagcaaggaggttttggcaccatacaagatcgtcgaaattgcggaaatgggaggtgtaattagtggtgactcaccaaggcacacctcgccggcatctaagttagagaagaagatggttgaagccatgcagcagagagcattaaaaggaacctcagtgaaatcattgaacagtgtcatcatgaaatttcctaagatcgacgagagtttgagaaaatgcaggactatctttcagcaatttgatgaagattccaatggtgaaatagatcagctggaacttaagcattgtttccaaaatttgggcattgaatcgactgaccaggagataaaagatctgtttcaggcatgtgacatttatgagaacatgggcatgaagttcaatgagttcattgtcttcctgtgccttgtttatcttctagatgatcctgcagtgtctgaagttagaaaaagaatggggttaggtagccttgaaccaacatttgaaacattggtcgagtcttttgtcttcttggacaagaacaaagatggatatgtcagcaagagcgagatgatacaagcaataaatgagactattggaggagagcgctcttctgggcgcataggcatgaaaagattcgaggagatggactgggacaagaatggaacggtgaccttcaaggaattccttttcgctttcactcactgggtggggatcaataatgaagaagacgaggacgaagaagaatgagcgtgtcggctgaaggagattcctttccgaatcgaccgagccagccagccagcccccctcaggggaggcctccagcagctccctcctgccgtggatcagaagcggtagagctcatgtgttctctgtgtgtgccgagctgatggtagatgttcatgttcgtataaatagaatgaaacactagccgtgtcaagggatttgctgataaaaaaaaaggttacgctggtcagacgctgctcagttaattaggttaccttgtcattaataaagtatttgcagtgtgtttggaaaatgtaaaactgcgaatggtactactaatcctctttacttcgaagttggttggttggcaggttgtc

SEQ ID NO: 45993 - DNA, 1697 bp, Zea Mays
ttcgtttgcgtcggattgcacccggaatcgttctagctaatcaaagtttatataaattagagaagcaatccggttaggaatcgttccgacccatcaattcgacacaaacgacaaggccttagctggaacgatttcgagtataatccgacacaaaggaagtgaaattccccaatactccatatgcgatgccaacgagaccaaaagtgaaaaattccccactcatgtttgctatatatataaatagcctcctcagtcctcccctcccgtagtcccgtctcctccacctttcactttccagttcaagtcaaaccacgttcctcgcggtcgcggaggctcacgccaagctcgctaaccgctcccctcctccctcactccctcgtctctccctctccccccgaatcctcgacacccaaagcccaaaccctagcacgggcagcggagctgcgtcgggcgaatggacctgcagctgcatgtcttctacagggcgctcgggctctcgttcgtcggcggcctcagcaccgccatcggtgcactgtttgtcgttttgaatcctgcccctaaccttaaagtgctcgggcttctacagggttttgctgctggacttatgctcagcatctcctttctagacctggcacacaatgccctgaattctattggcttcttgaaggggaacctctggttttttgcaggggttcttttcttcggtttcattattaagtttatcccagagccagatttttcgccaccagctgatccaagcgagaaagaggctgatgatggtgtatcaggtaaagatatgatgagaaaacatcgccggcaagtgctattcagtggtattatcactgctgttggaattagcttgcataatcttccagagggaatggctgtatttcttggatctgtcaagggtcttcatgtgggcctgaacttggctgttgctattgccttacataacataccagagggggttgctgtagctcttccaatctattttgctaccaaaagcaaaaaaaaggcattttatacggcagcattctctggtttggctgaaccactaggagtggttgctctttgttgtttccaagcagtttgaatcctgacattcttgaaggcctacttggatctgtgggtggtgtcatggctttcctcactttgcatgaaatgctgcctcttgcatttgactattgtggccagaagcaagctgtcaaagctgtctttgtgggcatggcctgcatgtctgcaagcttgtacttcttggaagtcagcttaccaaaggagataagcttgtagcatcgcgctgcaggtactgggaggccatagcctgtcagtagatcctgaattctaggaggaggaacagcacaataaaaccatgaacagtgactactggtgtgccgccattgatattgtccatcttaccgtgaaaggagggagaaactgcatttccccagaatgtattccccagattcctcgtgggaccatatgaaagaattgaaaaatgtactgtagtactctgtcgtccggcaatggaagcttcgaagtcgtcaactaaactatttctagcactctcgtcggttgacaatggaagattctatgtaaaaacccatcagatagatgttaacctttaatctttaatttcttaaaagtacattgaaataagatactttgctttcaaacaccccctatatttagtttgaacc

SEQ ID NO: 45994 - DNA, 1784 bp, Zea Mays
ttcgtttgcgtcggattgcacccggaatcgttctagctaatcaaagtttatataaattagagaagcaatccggttaggaatcgttccgacccatcaattcgacacaaacgacaaggccttagctggaacgatttcgagtataatccgacacaaaggaagtgaaattccccaatactccatatgcgatgccaacgagaccaaaagtgaaaaattccccactcatgtttgctatatatataaatagcctcctcagtcctcccctcccgtagtcccgtctcctccacctttcactttccagttcaagtcaaaccacgttcctcgcggtcgcggaggctcacgccaagctcgctaaccgctcccctcctccctcactccctcgtctctccctctccccccgaatcctcgacacccaaagcccaaaccctagcacgggcagcggagctgcgtcgggcgaatggacctgcagctgcatgtcttctacagggcgctcgggctctcgttcgtcggcggcctcagcaccgccatcggtgcactgtttgtcgttttgaatcctgcccctaaccttaaagtgctcgggcttctacagggttttgctgctggacttatgctcagcatctcctttctagacctggcacacaatgccctgaattctattggcttcttgaaggggaacctctgggtgagccataacctgcttatagttcttcaatccaagctcatctagcgttcatctgtccacataacaaggagcaactgcagttttttgcaggggttcttttcttcggtttcattattaagtttatcccagagccagatttttcgccaccagctgatccaagcgagaaagagcaggctgatgatggtgtatcaggtaaagatatgatgagaaaacatcgccggcaagtgctattcagtggtattatcactgctgttggaattagcttgcataatcttccagagggaatggctgtatttcttggatctgtcaagggtcttcatgtgggcctgaacttggctgttgctattgccttacataacataccagagggggttgctgtagctcttccaatctattttgctaccaaaagcaaaaaaaaggcattttatacggcagcattctctggtttggctgaaccactaggagtggttgctgtagctttgttgtttccaagcagtttgaatcctgacattcttgaaggcctacttggatctgtgggtggtgtcatggctttcctcactttgcatgaaatgctgcctcttgcatttgactattgtggccagaagcaagctgtcaaagctgtctttgtgggcatggcctgcatgtctgcaagcttgtacttcttggaagtcagcttaccaaaggagataagcttgtagcatcgcgctgcaggtactgggaggccatagcctgtcagtagatcctgaattctaggaggaggaacagcacaataaaaccatgaacagtgactactggtgtgccgccattgatattgtccatcttaccgtgaaaggagggagaaactgcatttccccagaatgtattccccagattcctcgtgggaccatatgaaagaattgaaaaatgtactgtagtactctgtcgtccggcaatggaagcttcgaagtcgtcaactaaactatttctagcactctcgtcggttgacaatggaagattctatgtaaaaacccatcagatagatgttaacctttaatctttaatttcttaaaagtacattgaaataagatactttgctttcaaacaccccctatatttagtttgaacc

SEQ ID NO: 45995 - DNA, 1729 bp, Zea Mays
ttcgtttgcgtcggattgcacccggaatcgttctagctaatcaaagtttatataaattagagaagcaatccggttaggaatcgttccgacccatcaattcgacacaaacgacaaggccttagctggaacgatttcgagtataatccgacacaaaggaagtgaaattccccaatactccatatgcgatgccaacgagaccaaaagtgaaaaattccccactcatgtttgctatatatataaatagcctcctcagtcctcccctcccgtagtcccgtctcctccacctttcactttccagttcaagtcaaaccacgttcctcgcggtcgcggaggctcacgccaagctcgctaaccgctcccctcctccctcactccctcgtctctccctctccccccgaatcctcgacacccaaagcccaaaccctagcacgggcagcggagctgcgtcgggcgaatggacctgcagctgcatgtcttctacagggcgctcgggctctcgttcgtcggcggcctcagcaccgccatcggtgcactgtttgtcgttttgaatcctgcccctaaccttaaagtgctcgggcttctacagggttttgctgctggacttatgctcagcatctcctttctagacctggcacacaatgccctgaattctattggcttcttgaaggggaacctctggttttttgcaggggttcttttcttcggtttcattattaagtttatcccagagccagatttttcgccaccagctgatccaagcgagaaagagttctctttgtttggcttgaggaaagcaggctgatgatggtgtatcaggtaaagatatgatgagaaaacatcgccggcaagtgctattcagtggtattatcactgctgttggaattagcttgcataatcttccagagggaatggctgtatttcttggatctgtcaagggtcttcatgtgggcctgaacttggctgttgctattgccttacataacataccagagggggttgctgtagctcttccaatctattttgctaccaaaagcaaaaaaaaggcattttatacggcagcattctctggtttggctgaaccactaggagtggttgctgtagctttgttgtttccaagcagtttgaatcctgacattcttgaaggcctacttggatctgtgggtggtgtcatggctttcctcactttgcatgaaatgctgcctcttgcatttgactattgtggccagaagcaagctgtcaaagctgtctttgtgggcatggcctgcatgtctgcaagcttgtacttcttggaagtcagcttaccaaaggagataagcttgtagcatcgcgctgcaggtactgggaggccatagcctgtcagtagatcctgaattctaggaggaggaacagcacaataaaaccatgaacagtgactactggtgtgccgccattgatattgtccatcttaccgtgaaaggagggagaaactgcatttccccagaatgtattccccagattcctcgtgggaccatatgaaagaattgaaaaatgtactgtagtactctgtcgtccggcaatggaagcttcgaagtcgtcaactaaactatttctagcactctcgtcggttgacaatggaagattctatgtaaaaacccatcagatagatgttaacctttaatctttaatttcttaaaagtacattgaaataagatactttgctttcaaacaccccctatatttagtttgaacc

SEQ ID NO: 45996 - DNA, 1451 bp, Zea Mays
ggggcgtgcacactgcagacttacaacggcgggaaattttccgctcgctcccgccgccgctctcccgtgtatatcccagtcgcctgcgacctccgttcctctttcccagtcgccccccagtccatcaccacttctccattcctctttcccagtgcccccagtccatcaccacatccgttcaaatgggccgcaaccgcaagggccgcaaggctagggtttcgcacgacgccgacgccgacgccgacgccgatggcagcgaggatgagagggccaccactgcgggcaggagcctctacgagattctaggagttgagaagaccgcttctcaacaagaaataaagaaggcgtatcacaaattggctctgcgcctccacccagataagaatcctggggatgaggaagccaaagagaagtttcagcagctgcagaaggcactggtgggagaagctgcaaacaatcttcaggagtacttcagaacaatgtacaagaaagtcacggaggctgacattgaagaatttgaagctaaatatagagggtcagattctgagaaaacggacttgaaggaactctacacaaaatataagggcaacatgaacaggcttttctgcgcaatgatttgctcagaaccaaagcttgattctcaccgcttcaaggatataattgacgaggcgattggtgaaggtgagctgaagtcaactaaggtgtatgagaaatgggctaaaaagatctcagggatggagccaccaacaaatccgctagagaggagagtgaagaagaggaagaacagtgaggagaatgatctgatactggctatctcacagcgcagggctgagcggaaaaaacagttcaactccatcctctcgaacatcatgtccaagtgtgactccaaggcgagcagctcggagcccacggaagaagagtttgagcaggcgcaacagaggctggagagcagaagggccaagaggcgcaagtgatgctgctgccagccttcttgccctatgctgaacattgtctgaagcttttggtgtgacctgattttaccagcatgcaagtgatgtttctaagacccagctcagtttgagcgtgtcagggtggggtgtgtgtcatatctcttgtcctctcacgatacactatgtcgtatggttatcggcttatcaccttgccgagagggaagctctatctgaacttttaattccgtagcatttggcaagtactagtagattgcaatgtaatgtttattctacggtgagctgcctgccagaagctggtcccacatgcaagggtccttaattattatccagtttgagaatgcagtttattgattctcgatggatactatgagcaaacaggttaagtgatggtctgagctttgttgtttcccaacccatacttaaagttcttgggagtacaatgatgagcatcgtaagaggataggtaaactgttgatctat

SEQ ID NO: 45997 - DNA, 1943 bp, Zea Mays
ctcctctccgcctggcgttacaacccccgcatgggaagcaacacagatggcggcggctacggcgatggcgcagaagcaccacggctcgcaccgcaaccggaacccttttctcctcggccacgttcaccgcctccgcccgacgatgacaacgacgaggctaaatgctgatgagctttacaagagaatcctacaggagattacaccatccgtgagtcaggatacatttttttggggacgtgttgcttatctgttcacggtgtaacattttctttaaggtagttctctgtttgcttagattgctgacagaagtttatatccgtacgtatcatgtggaccacaagcaagcattccgtcagcaaacagaagcgcttttggttagtgtttctgactgctatacggtcctttttcaaaaaattacggttgattcatttcaagtagattgttttcctcttaggctgctttaacaattatattttgttaaggaattcctcactttcccaagtttgtcttctctcagcagaaaaatgcaagccctagaaataaaatgtagcaacttttttctaagtaaatatggaagaaccaagctaaacaatattttttcgcatttagagatacctctcattagtctgcatttgtggcttcagtaatagttttcaaatgcactttgcatcccattaaacgttgcatttatgggcataaacacgagcaatgatgaaattgcgaaagtaaagtgctttgacttgtacacgtctctaaatcagtttgtccagtttagcatgaatctgccataatagcatcgctcaaagcatccacttgaatttttttgtgagagtcatgtttctttgtttttacgatactttcctatttaattattgtttagttggttttagctgaacaattaataagaagccacacatattatagaggaatttctgccaccttggatttttctacaaatccttcgcatccttttgtcgtacttaatttactcataaattttaggaatcttcaataaatgttccacattgatgctacaggttacatggtctccatgtgatatgtggtaatgtcagtcttaagttcttaacacaacttcttattttttattactactcattcatttgctctaaatactacacccaatttgttatatatttgtccaaacttactatgttaagaacaaaagcttaatcttataaaagtagtaaacctgattatttatgtggatatttcggctttcctggtatcatgggagatgatttgatcattcaatgtgtttgattcaaagggaaagtactatggtcatgttgttgcccgggttggtacaatggctgaggatcctataagattttacagaccattttgctattttttgtcaaaattaacaaaaagagttcttagtaggacctctgctattgtccaatggattgatttggtaattataattttgttggtaatagcatcacatactaagtgaagcatgataaccattggtatacaacaaagctcacaaagtgctctcgctgcattgcaacggctagatattgtgattatataatagatcttattgtgaggactcctaaaatctattatcaccagcatttctacttgagttaaatccttttgcaggtagccaatctaattggtattgcagtacaaagaatgaagtttgaagccatattgtactcgcagcagctacgacaaaagcaattgttcaatatactatgcagtggttatgttactgttggctcatgctgaagtatttgaactctacaactgcatcaaaattgtggctacactgtcaaactaaagttgtgttaataggttcatggctacaggagccagcgatttctgtgtaacatagccaaagagacatgatgatttatgatggtagcagataatctcagaatttcacgctcttcctggtctgcaaaaagctcata

SEQ ID NO: 45998 - DNA, 1674 bp, Zea Mays
atacaatcgtacatatagtacgttttattcgacaagcagcctctgcatgcaataatagtacaccccccgatttaattggactaatgcatgctgaggatggatcagatggagatgctgctggggatgcccctcccggtgactcccggcttggagaagggcttgagcagctcgtacggcacgatcccggcgccgcagcggttcttgaggtccaggttgttgttgcactcgtcgatgaacccctcgatctccttcatcctgccgccgaacttctcgaacgccgccttcaccatgggctccgccagccacgacggctccgcgaactcccccatgtactcctcgtcgggcgagtgcgacgagaggatgtccagcgtcgtcatgaccttgatggcctgcatctgcgtgggcagcatgtccagcagcgtcgtctccggctgcttgaggaacttctccatctcctcgcccggcccgccctcctccaccggcatgttcttccggatggtggtcggccggttggggaagtagccggcgaagtggtactggccgaagttgacggccgagtggtggccggaggtgacccacatgatggtggtcagcgtctccaccaggctgtcgcgggtgtccagcacgggccaccacggctcgtccttcttgtcgccgtgccccacgttgcgcacctcgtcccagaacgccctcagctcggggtcggcggccacggcctcgtcggacttgtagtagacgttgacgtactcggacgcccactgcctgatggagtcccagaccaggagcccgtcgtgggcgtaggggtagtccttgatggtgagctccagctccccgtcctccagccccttgggcgtgtcggacggcaggtatgactgcacagaaaagtaagcagccgtgagtgtcagtcagcatacatgcatgcacgcggtcaccatgctgatcgacgtacgtaccttgagggtgaagaagatgcgcttctccgggttgtcgaacttggagtgcacccaggagttgcagtcgaaggtgacggcggtgctgctgtcgccgccggtgacgagcttgatctccttgatgaagacctccttgtggtgctcgttctccaccagcaccgcgcccaccggcccgaacgacgccggcaccttgaactccgcctcgtagtggccctcccgcagcgtcttgtgcgcgtacgccgtcacccgcgtcttctccacgcccgactctgcagtgcaccaccacaccacatgcatgatgcatgcatgctcacaagctcagattttccctttattttctacggcgtacgtacgcgcgtagtcttctacgacaaactctcgtctagtcgtacgcgtatggtatggcgtcttgcagttcaagtccttttgtccattattgtggagagcatctatatttcttgcacacatatatttgaactatattctcacccctcattattgttatgataatcatcatccacacatctatatatatatatatatatatatatatatatatatatatatataaatccacggttcagtagtgattttcgtttagtcgctgtgagcaatataatggccatggatatatagtagccaccattattgttggatctagctcagctactaacagctaggatgcatgcatgcatggcgcccgcccatccgatccatacggccg

SEQ ID NO: 45999 - DNA, 3264 bp, Zea Mays
cttcctgcactcctctttttccctcccaaaaaccaaaatccctaaaccctaccggccacagcacctcgcaagcactcgcatcattccgcaggccacgccgggcgattcgccccgctacggctgccttgctcctccaatccgcgatcggggtacgtgatccaagcgcgatctcgcgggtcggcgcggaattgggagaggaattcaaacggtgtcggaagcgtgcggttccccggaagctcccagaacgttcggggcctccctgctccggtccgttatccggctacacaagacgacctaggatttctcaaggggttggcgcggtggatttgttgggcgcgcgcgcgagcggttggaatgggggcgccgcgccacctccttgacgtagcgatgctctgcgccttgttcgtctccgccgcgtccttcaccgacccccctgatgcgttaggacttttggggttatatcacacattggagtcgccgtggcaactttctggttggacattccagggcggtgacccatgtggtgagggtggtgggagtaaacactggcgaggcgtcttttgcaagggaccatccattgttgcaataaatattagtgggctcggagttggtggatggcttggcccagacctgctcaagtttcagtcattgaaaaagctggacatgagcttcaataacattgctggcgaaatcccgtccactttgcccccaaatgttgaatacttaaatctggcagccaacaagtttgaaggaaatataccatcatcattaccctggttgcgctccctgaaatatttgaactttagctacaataaactctctggagtaattggtgatgtttttgttaatatggatagcttagaaacgatggatctgtcattcaatgctttcaatagtgacctaccaagatcgtttagctcattgactagtcttcgctatctttatctacagcataacgagttcacaggatctgtgattttgttagcaggccttccattgtcatccctcaatattgaaaataatcacttcagtggctatgttcctggaacatttcagtccattcctgagctgaggattgatggaaaccaatttcaacctggattcaaacttgcatcctcgtcatttactaggaagacccctgcagctccacctcaatctttgcctccacctccacttcaatctccatctccatctccatctccactagcagctcagcagaaaccaaagcgaaggccaaaatctccaaagccttcttttgggtattcttctctgcaaaataatagtcaccataggaagtcacactctcgagtgacagctgctgcaatggctagtgccacatgtacagtatttgtactcctcgttgttggattggttctgagaagtcgaaaaagctgttcatgcagccccaagagcacctctaaccatgccaagactttaccagccaatatggaaacagtccctacagcgaatgaggtcttgtactcttggagttctctattgattggcagtgatacttcctctagtaatggcattacatctgaaagagttcccaaaataaaaagttggttcaaggcatctaaaaaacttctaactgcaaaacagtttccagctgcagacattctagcggctaccaaggacttcaatgaagaatgttttattggtgaaggtctcactggtcgagtttacagaggtgaattttctgatggccagctccttgctatcaagaggattgacatggtagatctgtcattgtcagaacaagatgaattaatggacatgctttggaatgtctccagattaaaacaccccaatatcagtgcgctcgtgggatattgtgtggagtttgaacattgtgcacttctatatgaatatgcagaaaatggctctcttgatgatattttgtttgcaccagccacaagatccatggctttgtcatggaaagctcggatgaagattgctcttggagttgcctatgctctggaatacatgcacttgacatattcccctccagttgcccatggaaacattaaagctagaaatattttgcttgatgctcagctcatgccctacctctgtgactgtgggttagccaagttaagccattttgttagcaccacgagaatgaaggattcagaagctatcatcagtgctaaaggctatgctgcccctgagcttagtgatcctggagcaaatgacatcaaagctgatatttacagttttggtgttattttgcttgtgcttttgactgggcaaaaggcttttgacagttcaagaaggcaaagtgatcagtttctagtagattgggcagctcctcatcttgatgatcttgattcattggaaagaattactgatccaagaataagtggctctatgccacctaaagctatctcttcattaggcattatcatcttgctttgcgtcaagcaatcaccagatctccgcccgcccatgacaatcataacggacaaattagtaaagcttgtcgaatcaacaggtcttcaaaagattagcacaacacgccacttggagattgatgctcaggatccctctttcataacaactcgaccttattttgagccgtcctctactgtcagtcagggtggaactgagagctgcatctcacggtgatgaatgcccgttcttcctctattcttctgggtcttatgctgccttatatagtcgatggcactccaagtatctcgagttctcaaccgtcgtcgcacctctttctgcatttcttatcatgccaattggtgatggtcaaagctgctgtgatgcaacgctctgactaccatggacgactggaatacaggtagacaccgccattgttatcaacggagaaaggactagaacaaaccccgccatcctgtcctggagaaactggttcaatcttggttagcggttacccgtacagttactactacttacgggagttctttgcccgtctatttgggacaagagtaacctgagctcgcgtggggatgatattttggatgctcttttctggtttgttcatatacgcagcaagcaagccttattaggattacttctcctaggatattttgttcttgcatgaaagtggtttgggtaggctttactattttgttagctactagattcaacatgttagtagctactttggtgaagatcttgtaactaacattcaagagacaaatgggtctatgttgttttattagttttgcgtcatgtaccttagggatacaagtgattataataaagttcaaggatacaagtgattataat

SEQ ID NO: 46000 - DNA, 3083 bp, Zea Mays
cctaaaccctaccggccacagcacctcgcaagcactcgcatcattccgcaggccacgccgggcgattcgccccgctacggctgccttgctcctccaatccgcgatcggggtacgtgatccaagcgcgatctcgcgggtcggcgcggaattgggagaggaattcaaacggtgtcggaagcgtgcggttccccggaagctcccagaacgttcggggcctccctgctccggtccgttatccggctacacaagacgacctaggatttctcaaggggttggcgcggtggatttgttgggcgcgcgcgcgagcggttggaatgggggcgccgcgccacctccttgacgtagcgatgctctgcgccttgttcgtctccgccgcgtccttcaccgacccccctgatgcgttaggacttttggggttatatcacacattggagtcgccgtggcaactttctggttggacattccagggcggtgacccatgtggtgagggtggtgggagtaaacactggcgaggcgtcttttgcaagggaccatccattgttgcaataaatattagtgggctcggagttggtggatggcttggcccagacctgctcaagtttcagtcattgaaaaagctggacatgagcttcaataacattgctggcgaaatcccgtccactttgcccccaaatgttgaatacttaaatctggcagccaacaagtttgaaggaaatataccatcatcattaccctggttgcgctccctgaaatatttgaactttagctacaataaactctctggagtaattggtgatgtttttgttaatatggatagcttagaaacgatggatctgtcattcaatgctttcaatagtgacctaccaagatcgtttagctcattgactagtcttcgctatctttatctacagcataacgagttcacaggatctgtgattttgttagcaggccttccattgtcatccctcaatattgaaaataatcacttcagtggctatgttcctggaacatttcagtccattcctgagctgaggattgatggaaaccaatttcaacctggattcaaacttgcatcctcgtcatttactaggaagacccctgcagctccacctcaatctttgcctccacctccacttcaatctccatctccatctccatctccactagcagctcagcagaaaccaaagcgaaggccaaaatctccaaagccttcttttgggtattcttctctgcaaaataatagtcaccataggaagtcacactctcgagtgacagctgctgcaatggctagtgccacatgtacagtatttgtactcctcgttgttggattggttctgagaagtcgaaaaagctgttcatgcagccccaagagcacctctaaccatgccaagactttaccagccaatatggaaacagtccctacagcgaatgaggtcttgtactcttggagttctctattgattggcagtgatacttcctctagtaatggcattacatctgaaagagttcccaaaataaaaagttggttcaaggcatctaaaaaacttctaactgcaaaacagtttccagctgcagacattctagcggctaccaaggacttcaatgaagaatgttttattggtgaaggtctcactggtcgagtttacagaggtgaattttctgatggccagctccttgctatcaagaggattgacatggtagatctgtcattgtcagaacaagatgaattaatggacatgctttggaatgtctccagattaaaacaccccaatatcagtgcgctcgtgggatattgtgtggagtttgaacattgtgcacttctatatgaatatgcagaaaatggctctcttgatgatattttgtttgcaccagccacaagatccatggctttgtcatggaaagctcggatgaagattgctcttggagttgcctatgctctggaatacatgcacttgacatattcccctccagttgcccatggaaacattaaagctagaaatattttgcttgatgctcagctcatgccctacctctgtgactgtgggttagccaagttaagccattttgttagcaccacgagaatgaaggattcagaagctatcatcagtgctaaaggctatgctgcccctgagcttagtgatcctggagcaaatgacatcaaagctgatatttacagttttggtgttattttgcttgtgcttttgactgggcaaaaggcttttgacagttcaagaaggcaaagtgatcagtttctagtagattgggcagctcctcatcttgatgatcttgattcattggaaagaattactgatccaagaataagtggctctatgccacctaaagctatctcttcattaggcattatcatcttgctttgcgtcaagcaatcaccagatctccgcccgcccatgacaatcataacggacaaattagtaaagcttgtcgaatcaacaggtcttcaaaagattagcacaacacgccacttggagattgatgctcaggatccctctttcataacaactcgaccttattttgagccgtcctctactgtcagtcagggtggaactgagagctgcatctcacggtgatgaatgcccgttcttcctctattcttctgggtcttatgctgccttatatagtcgatggcactccaagtatctcgagttctcaaccgtcgtcgcacctctttctgcatttcttatcatgccaattggtgatggtcaaagctgctgtgatgcaacgctctgactaccatggacgactggaatacaggtagacaccgccattgttatcaacggagaaaggactagaacaaaccccgccatcctgtcctggagaaactggttcaatcttggttagcggttacccgtacagttactactacttacgggagttctttgcccgtctatttgggacaagagtaacctgagctcgcgtggggatgatattttggatgctcttttctggtttgttcatatacgcagcaagcaagccttattaggcaacaatcttaggtccaattagagattgcatccaagatagatttaagttatctgattttaacactgatccaaatcgaagga

SEQ ID NO: 46001 - DNA, 2862 bp, Zea Mays
atggaatcacgcgggcgtgtgagcgcaggcaaagggggatggacgtggatgggcggcagcggcgttggtgcggcgacagagcgggtgagcgcagaaggggcggtgtggccgcgacattggggcgaacgagcgcagaagggggcaggcgacaaagtcagggcgagcacaacaagagcgttaggacttttggggttatatcacacattggagtcgccgtggcaactttctggttggacattccagggcggtgacccatgtggtgagggtggtgggagtaaacactggcgaggcgtcttttgcaagggaccatccattgttgcaataaatattagtgggctcggagttggtggatggcttggcccagacctgctcaagtttcagtcattgaaaaagctggacatgagcttcaataacattgctggcgaaatcccgtccactttgcccccaaatgttgaatacttaaatctggcagccaacaagtttgaaggaaatataccatcatcattaccctggttgcgctccctgaaatatttgaactttagctacaataaactctctggagtaattggtgatgtttttgttaatatggatagcttagaaacgatggatctgtcattcaatgctttcaatagtgacctaccaagatcgtttagctcattgactagtcttcgctatctttatctacagcataacgagttcacaggatctgtgattttgttagcaggccttccattgtcatccctcaatattgaaaataatcacttcagtggctatgttcctggaacatttcagtccattcctgagctgaggattgatggaaaccaatttcaacctggattcaaacttgcatcctcgtcatttactaggaagacccctgcagctccacctcaatctttgcctccacctccacttcaatctccatctccatctccatctccactagcagctcagcagaaaccaaagcgaaggccaaaatctccaaagccttcttttgggtattcttctctgcaaaataatagtcaccataggaagtcacactctcgagtgacagctgctgcaatggctagtgccacatgtacagtatttgtactcctcgttgttggattggttctgagaagtcgaaaaagctgttcatgcagccccaagagcacctctaaccatgccaagactttaccagccaatatggaaacagtccctacagcgaatgaggtcttgtactcttggagttctctattgattggcagtgatacttcctctagtaatggcattacatctgaaagagttcccaaaataaaaagttggttcaaggcatctaaaaaacttctaactgcaaaacagtttccagctgcagacattctagcggctaccaaggacttcaatgaagaatgttttattggtgaaggtctcactggtcgagtttacagaggtgaattttctgatggccagctccttgctatcaagaggattgacatggtagatctgtcattgtcagaacaagatgaattaatggacatgctttggaatgtctccagattaaaacaccccaatatcagtgcgctcgtgggatattgtgtggagtttgaacattgtgcacttctatatgaatatgcagaaaatggctctcttgatgatattttgtttgcaccagccacaagatccatggctttgtcatggaaagctcggatgaagattgctcttggagttgcctatgctctggaatacatgcacttgacatattcccctccagttgcccatggaaacattaaagctagaaatattttgcttgatgctcagctcatgccctacctctgtgactgtgggttagccaagttaagccattttgttagcaccacgagaatgaaggattcagaagctatcatcagtgctaaaggctatgctgcccctgagcttagtgatcctggagcaaatgacatcaaagctgatatttacagttttggtgttattttgcttgtgcttttgactgggcaaaaggcttttgacagttcaagaaggcaaagtgatcagtttctagtagattgggcagctcctcatcttgatgatcttgattcattggaaagaattactgatccaagaataagtggctctatgccacctaaagctatctcttcattaggcattatcatcttgctttgcgtcaagcaatcaccagatctccgcccgcccatgacaatcataacggacaaattagtaaagcttgtcgaatcaacaggtcttcaaaagattagcacaacacgccacttggagattgatgctcaggatccctctttcataacaactcgaccttattttgagccgtcctctactgtcagtcagggtggaactgagagctgcatctcacggtgatgaatgcccgttcttcctctattcttctgggtcttatgctgccttatatagtcgatggcactccaagtatctcgagttctcaaccgtcgtcgcacctctttctgcatttcttatcatgccaattggtgatggtcaaagctgctgtgatgcaacgctctgactaccatggacgactggaatacaggtagacaccgccattgttatcaacggagaaaggactagaacaaaccccgccatcctgtcctggagaaactggttcaatcttggttagcggttacccgtacagttactactacttacgggagttctttgcccgtctatttgggacaagagtaacctgagctcgcgtggggatgatattttggatgctcttttctggtttgttcatatacgcagcaagcaagccttattagattgtttgtactaggccacagagactgacagatggttgctacttctagtagggatatttttaatttttttgtcaaagtgttaaag

SEQ ID NO: 46002 - DNA, 2895 bp, Zea Mays
atggaatcacgcgggcgtgtgagcgcaggcaaagggggatggacgtggatgggcggcagcggcgttggtgcggcgacagagcgggtgagcgcagaaggggcggtgtggccgcgacattggggcgaacgagcgcagaagggggcaggcgacaaagtcagggcgagcacaacaagagcgttaggacttttggggttatatcacacattggagtcgccgtggcaactttctggttggacattccagggcggtgacccatgtggtgagggtggtgggagtaaacactggcgaggcgtcttttgcaagggaccatccattgttgcaataaatattagtgggctcggagttggtggatggcttggcccagacctgctcaagtttcagtcattgaaaaagcttttgtggtgcttttcttctcatgttgatgatagggacatgagcttcaataacattgctggcgaaatcccgtccactttgcccccaaatgttgaatacttaaatctggcagccaacaagtttgaaggaaatataccatcatcattaccctggttgcgctccctgaaatatttgaactttagctacaataaactctctggagtaattggtgatgtttttgttaatatggatagcttagaaacgatggatctgtcattcaatgctttcaatagtgacctaccaagatcgtttagctcattgactagtcttcgctatctttatctacagcataacgagttcacaggatctgtgattttgttagcaggccttccattgtcatccctcaatattgaaaataatcacttcagtggctatgttcctggaacatttcagtccattcctgagctgaggattgatggaaaccaatttcaacctggattcaaacttgcatcctcgtcatttactaggaagacccctgcagctccacctcaatctttgcctccacctccacttcaatctccatctccatctccatctccactagcagctcagcagaaaccaaagcgaaggccaaaatctccaaagccttcttttgggtattcttctctgcaaaataatagtcaccataggaagtcacactctcgagtgacagctgctgcaatggctagtgccacatgtacagtatttgtactcctcgttgttggattggttctgagaagtcgaaaaagctgttcatgcagccccaagagcacctctaaccatgccaagactttaccagccaatatggaaacagtccctacagcgaatgaggtcttgtactcttggagttctctattgattggcagtgatacttcctctagtaatggcattacatctgaaagagttcccaaaataaaaagttggttcaaggcatctaaaaaacttctaactgcaaaacagtttccagctgcagacattctagcggctaccaaggacttcaatgaagaatgttttattggtgaaggtctcactggtcgagtttacagaggtgaattttctgatggccagctccttgctatcaagaggattgacatggtagatctgtcattgtcagaacaagatgaattaatggacatgctttggaatgtctccagattaaaacaccccaatatcagtgcgctcgtgggatattgtgtggagtttgaacattgtgcacttctatatgaatatgcagaaaatggctctcttgatgatattttgtttgcaccagccacaagatccatggctttgtcatggaaagctcggatgaagattgctcttggagttgcctatgctctggaatacatgcacttgacatattcccctccagttgcccatggaaacattaaagctagaaatattttgcttgatgctcagctcatgccctacctctgtgactgtgggttagccaagttaagccattttgttagcaccacgagaatgaaggattcagaagctatcatcagtgctaaaggctatgctgcccctgagcttagtgatcctggagcaaatgacatcaaagctgatatttacagttttggtgttattttgcttgtgcttttgactgggcaaaaggcttttgacagttcaagaaggcaaagtgatcagtttctagtagattgggcagctcctcatcttgatgatcttgattcattggaaagaattactgatccaagaataagtggctctatgccacctaaagctatctcttcattaggcattatcatcttgctttgcgtcaagcaatcaccagatctccgcccgcccatgacaatcataacggacaaattagtaaagcttgtcgaatcaacaggtcttcaaaagattagcacaacacgccacttggagattgatgctcaggatccctctttcataacaactcgaccttattttgagccgtcctctactgtcagtcagggtggaactgagagctgcatctcacggtgatgaatgcccgttcttcctctattcttctgggtcttatgctgccttatatagtcgatggcactccaagtatctcgagttctcaaccgtcgtcgcacctctttctgcatttcttatcatgccaattggtgatggtcaaagctgctgtgatgcaacgctctgactaccatggacgactggaatacaggtagacaccgccattgttatcaacggagaaaggactagaacaaaccccgccatcctgtcctggagaaactggttcaatcttggttagcggttacccgtacagttactactacttacgggagttctttgcccgtctatttgggacaagagtaacctgagctcgcgtggggatgatattttggatgctcttttctggtttgttcatatacgcagcaagcaagccttattagattgtttgtactaggccacagagactgacagatggttgctacttctagtagggatatttttaatttttttgtcaaagtgttaaag

SEQ ID NO: 46003 - DNA, 2944 bp, Zea Mays
cctaaaccctaccggccacagcacctcgcaagcactcgcatcattccgcaggccacgccgggcgattcgccccgctacggctgccttgctcctccaatccgcgatcggggtacgtgatccaagcgcgatctcgcgggtcggcgcggaattgggagaggaattcaaacggtgtcggaagcgtgcggttccccggaagctcccagaacgttcggggcctccctgctccggtccgttatccggctacacaagacgacctaggatttctcaaggggttggcgcggtggatttgttgggcgcgcgcgcgagcggttggaatgggggcgccgcgccacctccttgacgtagcgatgctctgcgccttgttcgtctccgccgcgtccttcaccgacccccctgatgcgttaggacttttggggttatatcacacattggagtcgccgtggcaactttctggttggacattccagggcggtgacccatgtggtgagggtggtgggagtaaacactggcgaggcgtcttttgcaagggaccatccattgttgcaataaatattagtgggctcggagttggtggatggcttggcccagacctgctcaagtttcagtcattgaaaaagctggacatgagcttcaataacattgctggcgaaatcccgtccactttgcccccaaatgttgaatacttaaatctggcagccaacaagtttgaaggaaatataccatcatcattaccctggttgcgctccctgaaatatttgaactttagctacaataaactctctggagtaattggtgatgtttttgttaatatggatagcttagaaacgatggatctgtcattcaatgctttcaatagtgacctaccaagatcgtttagctcattgactagtcttcgctatctttatctacagcataacgagttcacaggatctgtgattttgttagcaggccttccattgtcatccctcaatattgaaaataatcacttcagtggctatgttcctggaacatttcagtccattcctgagctgaggattgatggaaaccaatttcaacctggattcaaacttgcatcctcgtcatttactaggaagacccctgcagctccacctcaatctttgcctccacctccacttcaatctccatctccatctccatctccactagcagctcagcagaaaccaaagcgaaggccaaaatctccaaagccttcttttgggtattcttctctgcaaaataatagtcaccataggaagtcacactctcgagtgacagctgctgcaatggctagtgccacatgtacagtatttgtactcctcgttgttggattggttctgagaagtcgaaaaagctgttcatgcagccccaagagcacctctaaccatgccaagactttaccagccaatatggaaacagtccctacagcgaatgaggtcttgtactcttggagttctctattgattggcagtgatacttcctctagtaatggcattacatctgaaagagttcccaaaataaaaagttggttcaaggcatctaaaaaacttctaactgcaaaacagtttccagctgcagacattctagcggctaccaaggacttcaatgaagaatgttttattggtgaaggtctcactggtcgagtttacagaggtgaattttctgatggccagctccttgctatcaagaggattgacatggtagatctgtcattgtcagaacaagatgaattaatggacatgctttggaatgtctccagattaaaacaccccaatatcagtgcgctcgtgggatattgtgtggagtttgaacattgtgcacttctatatgaatatgcagaaaatggctctcttgatgatattttgtttgcaccagccacaagatccatggctttgtcatggaaagctcggatgaagattgctcttggagttgcctatgctctggaaaggattcagaagctatcatcagtgctaaaggctatgctgcccctgagcttagtgatcctggagcaaatgacatcaaagctgatatttacagttttggtgttattttgcttgtgcttttgactgggcaaaaggcttttgacagttcaagaaggcaaagtgatcagtttctagtagattgggcagctcctcatcttgatgatcttgattcattggaaagaattactgatccaagaataagtggctctatgccacctaaagctatctcttcattaggcattatcatcttgctttgcgtcaagcaatcaccagatctccgcccgcccatgacaatcataacggacaaattagtaaagcttgtcgaatcaacaggtcttcaaaagattagcacaacacgccacttggagattgatgctcaggatccctctttcataacaactcgaccttattttgagccgtcctctactgtcagtcagggtggaactgagagctgcatctcacggtgatgaatgcccgttcttcctctattcttctgggtcttatgctgccttatatagtcgatggcactccaagtatctcgagttctcaaccgtcgtcgcacctctttctgcatttcttatcatgccaattggtgatggtcaaagctgctgtgatgcaacgctctgactaccatggacgactggaatacaggtagacaccgccattgttatcaacggagaaaggactagaacaaaccccgccatcctgtcctggagaaactggttcaatcttggttagcggttacccgtacagttactactacttacgggagttctttgcccgtctatttgggacaagagtaacctgagctcgcgtggggatgatattttggatgctcttttctggtttgttcatatacgcagcaagcaagccttattagattgtttgtactaggccacagagactgacagatggttgctacttctagtagggatatttttaatttttttgtcaaagtgttaaag

SEQ ID NO: 46004 - DNA, 2954 bp, Zea Mays
atggaatcacgcgggcgtgtgagcgcaggcaaagggggatggacgtggatgggcggcagcggcgttggtgcggcgacagagcgggtgagcgcagaaggggcggtgtggccgcgacattggggcgaacgagcgcagaagggggcaggcgacaaagtcagggcgagcacaacaagagcgttaggacttttggggttatatcacacattggagtcgccgtggcaactttctggttggacattccagggcggtgacccatgtggtgagggtggtgggagtaaacactggcgaggcgtcttttgcaagggaccatccattgttgcaataaatattagtgggctcggagttggtggatggcttggcccagacctgctcaagtttcagtcattgaaaaagctggacatgagcttcaataacattgctggcgaaatcccgtccactttgcccccaaatgttgaatacttaaatctggcagccaacaagtttgaaggaaatataccatcatcattaccctggttgcgctccctgaaatatttgaactttagctacaataaactctctggagtaattggtgatgtttttgttaatatggatagcttagaaacgatggatctgtcattcaatgctttcaatagtgacctaccaagatcgtttagctcattgactagtcttcgctatctttatctacagcataacgagttcacaggatctgtgattttgttagcaggccttccattgtcatccctcaatattgaaaataatcacttcagtggctatgttcctggaacatttcagtccattcctgagctgaggattgatggaaaccaatttcaacctggattcaaacttgcatcctcgtcatttactaggaagacccctgcagctccacctcaatctttgcctccacctccacttcaatctccatctccatctccatctccactagcagctcagcagaaaccaaagcgaaggccaaaatctccaaagccttcttttgggtattcttctctgcaaaataatagtcaccataggaagtcacactctcgagtgacagctgctgcaatggctagtgccacatgtacagtatttgtactcctcgttgttggattggttctgagaagtcgaaaaagctgttcatgcagccccaagagcacctctaaccatgccaagactttaccagccaatatggaaacagtccctacagcgaatgaggtcttgtactcttggagttctctattgattggcagtgatacttcctctagtaatggcattacatctgaaagagttcccaaaataaaaagttggttcaaggcatctaaaaaacttctaactgcaaaacagtttccagctgcagacattctagcggctaccaaggacttcaatgaagaatgttttattggtgaaggtctcactggtcgagtttacagaggtgaattttctgatggccagctccttgctatcaagaggattgacatggtagatctgtcattgtcagaacaagatgaattaatggacatgctttggaatgtctccagattaaaacaccccaatatcagtgcgctcgtgggatattgtgtggagtttgaacattgtgcacttctatatgaatatgcagaaaatggctctcttgatgatattttgtttgcaccagccacaagatccatggctttgtcatggaaagctcggatgaagattgctcttggagttgcctatgctctggaatacatgcacttgacatattcccctccagttgcccatggaaacattaaagctagaaatattttgcttgatgctcagctcatgccctacctctgtgactgtgggttagccaagttaagccattttgttagcaccacgagaatgaaggattcagaagctatcatcagtgctaaaggctatgctgcccctgagcttagtgatcctggagcaaatgacatcaaagctgatatttacagttttggtgttattttgcttgtgcttttgactgggcaaaaggcttttgacagttcaagaaggcaaagtgatcagtttctagtagattgggcagctcctcatcttgatgatcttgattcattggaaagaattactgatccaagaataagtggctctatgccacctaaagctatctcttcattaggcattatcatcttgctttgcgtcaagcaatcaccagatctccgcccgcccatgacaatcataacggacaaattagtaaagcttgtcgaatcaacaggtcttcaaaagattagcacaacacgccacttggagattgatgctcaggatccctctttcataacaactcgaccttattttgagccgtcctctactgtcagtcagggtggaactgagagctgcatctcacggtgatgaatgcccgttcttcctctattcttctgggtcttatgctgccttatatagtcgatggcactccaagtatctcgagttctcaaccgtcgtcgcacctctttctgcatttcttatcatgccaattggtgatggtcaaagctgctgtgatgcaacgctctgactaccatggacgactggaatacaggtagacaccgccattgttatcaacggagaaaggactagaacaaaccccgccatcctgtcctggagaaactggttcaatcttggttagcggttacccgtacagttactactacttacgggagttctttgcccgtctatttgggacaagagtaacctgagctcgcgtggggatgatattttggatgctcttttctggtttgttcatatacgcagcaagcaagccttattagattgccacccatgtgcttgggataagaatgtcatggccatttgcttcaaatgctttaaagcctccatcaccatagaatgttgttcgtgtctctacaacttgatccaagattgtaactagtgggtagtagtgaaaataacatgcggaggagtcacaaagtttttttttgaaaaatcag

SEQ ID NO: 46005 - DNA, 3218 bp, Zea Mays
cttcctgcactcctctttttccctcccaaaaaccaaaatccctaaaccctaccggccacagcacctcgcaagcactcgcatcattccgcaggccacgccgggcgattcgccccgctacggctgccttgctcctccaatccgcgatcggggtacgtgatccaagcgcgatctcgcgggtcggcgcggaattgggagaggaattcaaacggtgtcggaagcgtgcggttccccggaagctcccagaacgttcggggcctccctgctccggtccgttatccggctacacaagacgacctaggatttctcaaggggttggcgcggtggatttgttgggcgcgcgcgcgagcggttggaatgggggcgccgcgccacctccttgacgtagcgatgctctgcgccttgttcgtctccgccgcgtccttcaccgacccccctgatgcgttaggacttttggggttatatcacacattggagtcgccgtggcaactttctggttggacattccagggcggtgacccatgtggtgagggtggtgggagtaaacactggcgaggcgtcttttgcaagggaccatccattgttgcaataaatattagtgggctcggagttggtggatggcttggcccagacctgctcaagtttcagtcattgaaaaagctggacatgagcttcaataacattgctggcgaaatcccgtccactttgcccccaaatgttgaatacttaaatctggcagccaacaagtttgaaggaaatataccatcatcattaccctggttgcgctccctgaaatatttgaactttagctacaataaactctctggagtaattggtgatgtttttgttaatatggatagcttagaaacgatggatctgtcattcaatgctttcaatagtgacctaccaagatcgtttagctcattgactagtcttcgctatctttatctacagcataacgagttcacaggatctgtgattttgttagcaggccttccattgtcatccctcaatattgaaaataatcacttcagtggctatgttcctggaacatttcagtccattcctgagctgaggattgatggaaaccaatttcaacctggattcaaacttgcatcctcgtcatttactaggaagacccctgcagctccacctcaatctttgcctccacctccacttcaatctccatctccatctccatctccactagcagctcagcagaaaccaaagcgaaggccaaaatctccaaagccttcttttgggtattcttctctgcaaaataatagtcaccataggaagtcacactctcgagtgacagctgctgcaatggctagtgccacatgtacagtatttgtactcctcgttgttggattggttctgagaagtcgaaaaagctgttcatgcagccccaagagcacctctaaccatgccaagactttaccagccaatatggaaacagtccctacagcgaatgaggtcttgtactcttggagttctctattgattggcagtgatacttcctctagtaatggcattacatctgaaagagttcccaaaataaaaagttggttcaaggcatctaaaaaacttctaactgcaaaacagtttccagctgcagacattctagcggctaccaaggacttcaatgaagaatgttttattggtgaaggtctcactggtcgagtttacagaggtgaattttctgatggccagctccttgctatcaagaggattgacatggtagatctgtcattgtcagaacaagatgaattaatggacatgctttggaatgtctccagattaaaacaccccaatatcagtgcgctcgtgggatattgtgtggagtttgaacattgtgcacttctatatgaatatgcagaaaatggctctcttgatgatattttgtttgcaccagccacaagatccatggctttgtcatggaaagctcggatgaagattgctcttggagttgcctatgctctggaatacatgcacttgacatattcccctccagttgcccatggaaacattaaagctagaaatattttgcttgatgctcagctcatgccctacctctgtgactgtgggttagccaagttaagccattttgttagcaccacgagaatgaaggattcagaagctatcatcagtgctaaaggctatgctgcccctgagcttagtgatcctggagcaaatgacatcaaagctgatatttacagttttggtgttattttgcttgtgcttttgactgggcaaaaggcttttgacagttcaagaaggcaaagtgatcagtttctagtagattgggcagctcctcatcttgatgatcttgattcattggaaagaattactgatccaagaataagtggctctatgccacctaaagctatctcttcattaggcattatcatcttgctttgcgtcaagcaatcaccagatctccgcccgcccatgacaatcataacggacaaattagtaaagcttgtcgaatcaacaggtcttcaaaagattagcacaacacgccacttggagattgatgctcaggatccctctttcataacaactcgaccttattttgagccgtcctctactgtcagtcagggtggaactgagagctgcatctcacggtgatgaatgcccgttcttcctctattcttctgggtcttatgctgccttatatagtcgatggcactccaagtatctcgagttctcaaccgtcgtcgcacctctttctgcatttcttatcatgccaattggtgatggtcaaagctgctgtgatgcaacgctctgactaccatggacgactggaatacaggtagacaccgccattgttatcaacggagaaaggactagaacaaaccccgccatcctgtcctggagaaactggttcaatcttggttagcggttacccgtacagttactactacttacgggagttctttgcccgtctatttgggacaagagtaacctgagctcgcgtggggatgatattttggatgctcttttctggtttgttcatatacgcagcaagcaagccttattagattgccacccatgtgcttgggataagaatgtcatggccatttgcttcaaatgctttaaagcctccatcaccatagaatgttgttcgtgtctctacaacttgatccaagattgtaactagtgggtagtagtgaaaataacatgcggaggagtcacaaagtttttttttgaaaaatcag

SEQ ID NO: 46006 - DNA, 149 bp, Zea Mays
cccctgcccatctcttcctctctcaatttttgcagccaccaaaccctagccccccctcaatcccctcctcccaaggtgccaatccttgccgctcggatcatcgtctcgtggtgcgaatctccaaccgttttggtggagggaagaaggga

SEQ ID NO: 46007 - DNA, 240 bp, Zea Mays
atgttgctcttgtattatccaacagtcaaaagggggaaaaaactctataacgcatgtttaattattatcagccatggttgggaaaaaacagcaactgttaaaatcttcaggcagccttgttattgcagtagttctccagccactccatggtaacactcttcggcctctcaagtggcaggccaagggcacggtcccagatgagctgcatcataaataatcaaacaaaattagccagcagaa

SEQ ID NO: 46008 - DNA, 1082 bp, Zea Mays
attgaaattttccgtttgcacctaccgagaggtgacgacgagtgaggagtctgtgtgaccagtgctcgccgtcgtcccctgcctctggccctctgctagccgctaggcgacgggcctttcgccgggcgacgggcacaccgcccctgttaccatggcagcgatgaatactggtatgggaggtttaggtggcaggccgatacatccacaagcaaatccttttggaactgccttgcagggtgctggaccaggattgatccgtactgggctagaaacatatggcggaaggattttagattcaagttctgagtttatgcagagcaatataacacaatatttgtccgaccctcagtactactttcaagtcaacagccagtatgtgaggaacaaactgaaggtcatcttgttccctttcttgcacaggggtcactggacaagaataactgaaccagtaggaggaaggctatcctacaaacctccagtccaggatatcaatgcaccggacttgtacatccctttgatggcatttggcacctacattgtagctgctgggtatgccttgggtgttcttggaaggtttacccctgaggcactgaccctacagttttctaaagggatacttgggtggtttctgcaagtcgtcctcatcaaaggtctgctgtactccctgggaagcggcgaagctcccttgctggacatcgtggcgtatgctggatattgcttcgctggcacttcccttgcaatggtggcccgcatcttctggagctacctgtattacttcatcatgccatggttctgcctctgcacgggagtcttccttgtgaagaccatgaagagggttcttctgggcgggccaaggagctacgagagacaccccggccggaaccactacttcctgatcttcttggcggtcgtgcaattccccatgctgttctggctcggcaacatatgtggctgacctttgatcctattggtcgggccacagacctgtttcttcttcttcttcagaatagagttcaaacgtggagggaagcagcgagctttatttagggcctgtgttgtagttgtagagcagcaaggtgctt

SEQ ID NO: 46009 - DNA, 1163 bp, Zea Mays
ctgaattcggattgagatcccaacgttaccatggcagcgatgaatactggtatgggaggtttaggtggcaggccgatacatccacaagcaaatccttttggaactgccttgcagggtgctggaccaggattgatccgtactgggctagaaacatatggcggaaggattttagattcaagttctgagtttatgcagagcaatataacacaatatttgtccgaccctcagtactactttcaagtcaacagccagtatgtgaggaacaaactgaaggtcatcttgttccctttcttgcacaggggtcactggacaagaataactgaaccagtaggaggaaggctatcctacaaacctccagtccaggatatcaatgcaccggacttgtacatccctttgatggcatttggcacctacattgtagctgctgggtatgccttgggtgttcttggaaggtttacccctgaggcactgaccctacagttttctaaagggatacttgggtggtttctgcaagtcgtcctcatcaaaggtctgctgtactccctgggaagcggcgaagctcccttgctggacatcgtggcgtatgctggatattgcttcgctggcacttcccttgcaatggtggcccgcatcttctggagctacctgtattacttcatcatgccatggttctgcctctgcacgggagtcttccttgtgaagaccatgaagagggttcttctgggcgggccaaggagctacgagagacaccccggccggaaccactacttcctgatcttcttggcggtcgtgcaattccccatgctgttctggctcggcaacatatgtggctgacctttgatcctattggtcgggccacagacctgtttcttcttcttcttcagaataggcatgtgctacttctggcttgctgatgaatcttaggtttatcgtggagatggtacagaactattagctatagatatctgggcaatcgaattataaactgtttttgtttctgttagctatagaggcgaaaagtaaaaacgatcgtttgggataggataaagatgaactgcttcgtgtgtacccttttgtgtcacgagcggctagccacgaccctgcaatctgacttgttttttaatgatcactgctacttgatctttcagctttgggtcgatatt

SEQ ID NO: 46010 - DNA, 1151 bp, Zea Mays
ctgaattcggattgagatcccaacgcgatgaatactggtatgggaggtttaggtggcaggccgatacatccacaagcaaatccttttggaactgccttgcagggtgctggaccaggattgatccgtactgggctagaaacatatggcggaaggattttagattcaagttctgagtttatgcagagcaatataacacaatatttgtccgaccctcagtactactttcaagtcaacagccagtatgtgaggaacaaactgaaggtcatcttgttccctttcttgcacaggggtcactggacaagaataactgaaccagtaggaggaaggctatcctacaaacctccagtccaggatatcaatgcaccggacttgtacatccctttgatggcatttggcacctacattgtagctgctgggtatgccttgggtgttcttggaaggtttacccctgaggcactgaccctacagttttctaaagggatacttgggtggtttctgcaagtcgtcctcatcaaaggtctgctgtactccctgggaagcggcgaagctcccttgctggacatcgtggcgtatgctggatattgcttcgctggcacttcccttgcaatggtggcccgcatcttctggagctacctgtattacttcatcatgccatggttctgcctctgcacgggagtcttccttgtgaagaccatgaagagggttcttctgggcgggccaaggagctacgagagacaccccggccggaaccactacttcctgatcttcttggcggtcgtgcaattccccatgctgttctggctcggcaacatatgtggctgacctttgatcctattggtcgggccacagacctgtttcttcttcttcttcagaataggcatgtgctacttctggcttgctgatgaatcttaggtttatcgtggagatggtacagaactattagctatagatatctgggcaatcgaattataaactgtttttgtttctgttagctatagaggcgaaaagtaaaaacgatcgtttgggataggataaagatgaactgcttcgtgtgtacccttttgtgtcacgagcggctagccacgaccctgcaatctgacttgttttttaatgatcactgctacttgatctttcagctttgggtcgatatt

SEQ ID NO: 46011 - DNA, 1244 bp, Zea Mays
taagtctttgtgctagatgctatgtaaataataactaccggccgggcctgtctcctgctaacttcaagagagttgaaattactgaagatgcaaaaccagattggacagacaaagaaactcttcacttgcttgaggctgtcttgcattatggggaagactggaaaaaggtgtctgaacatgttagtagtcggtcagaaaaagattgtattgcaagatttataaggctaccttttggagaacagttcatgggacacaaggaggatagaatgaggtttgagaatactgatgacaatactgatgagcctggagcaaatgtctcaaaacgactacgtctcactccactagcagatgcaagcaatccgattatggctcaggttgcatttttatcagccattgtgggttccgatgttgcctcagctgcagcgcaagcagctatttctgcccaatcccgtgttgaccttaatgacggcgagattgaaacttcaataaatagcattaagcaagaagaatcatctcacacaaatgggctctcagccaacgtgttactgaaagaggcagctgctaatgcacgggcacaactcgagaaggaaaggaacagcatagagcaatctttatcaaacatagtagacgtccagatgaaggaaatccaagataaaatatgccggtttgagcagaaggagatgctgatggagaaagagcggcagcagctccattttctaagggatctacttttcacagaccaattggcagtcatgcagcatcaacaaaggagtccagctgtagccacagagtgcaagggtgatgagaagccaaagcccgtggctagcatgagttgatacgagtagatcctcagcgtagcatggtttcacttcagatgtagcattggagccgcgttcatccgcatctgccgttggtaggattggaactaatttaatatactacatataggccctggttctctattggatggtgtttctgttaaatttggcgtcccctttcccttcttgcaccacagatgcctggagtgcaagggaagttatgatgacgactaccgattaccacatgcttcactgcttgtgcgctaacacgttgatatctttgccagtggcgcaacaatcgtgtatttcttgaccaaaacatccacgcaaagctccggtagattcgatggtgactagcaaggaaatacatactctctgttaatttatattttatttgattttttgccctaagtttgactgactcgt

SEQ ID NO: 46012 - DNA, 1246 bp, Zea Mays
tataagtctttgtgctagatgctatgtaaataataactaccggccgggcctgtctcctgctaacttcaagagagttgaaattactgaagatgcaaaaccagattggacagacaaagaaactcttcacttgcttgaggctgtcttgcattatggggaagactggaaaaaggtgtctgaacatgttagtagtcggtcagaaaaagattgtattgcaagatttataaggctaccttttggagaacagttcatgggacacaaggaggatagaatgaggtttgagaatactgatgacaatactgatgagcctggagcaaatgtctcaaaacgactacgtctcactccactagcagatgcaagcaatccgattatggctcaggttgcatttttatcagccattgtgggttccgatgttgcctcagctgcagcgcaagcagctatttctgcccaatcccgtgttgaccttaatgacggcgagattgaaacttcaataaatagcattaagcaagaagaatcatctcacacaaatgggctctcagccaacgtgttactgaaagaggcagctgctaatgcacgggcacaactcgagaaggaaaggaacagcatagagcaatctttatcaaacatagtagacgtccagatgaaggaaatccaagataaaatatgccggtttgagcagaaggagatgctgatggagaaagagcggcagcagctccattttctaagggatctacttttcacagaccaattggcagtcatgcagcatcaacaaaggagtccagctgtagccacagagtgcaagggtgatgagaagccaaagcccgtggctagcatgagttgatacgagtagatcctcagcgtagcatggtttcacttcagatgtagcattggagccgcgttcatccgcatctgccgttggtaggattggaactaatttaatatactacatataggccctggttctctattggatggtgtttctgttaaatttggcgtcccctttcccttcttgcaccacagatgcctggagtgcaagggaagttatgatgacgactaccgattaccacatgcttcactgcttgtgcgctaacacgttgatatctttgccagtggcgcaacaatcgtgtatttcttgaccaaaacatccacgcaaagctccggtagattcgatggtgactagcaaggaaatacatactctctgttaatttatattttatttgattttttgccctaagtttgactgactcgt

SEQ ID NO: 46013 - DNA, 1930 bp, Zea Mays
atcttttatcgagtccaggccagcgaccgcgtttccgccttctcctccccttccacctccgatggccacaacggcgacaacgatggcgccggtgacggcgccggtggccacagccaacctcgaacctacaccaacacctctgcatccacgtcctgccgcgccacctcatctccgggcgctttccaccttggcccccgtcaagtcagaggctcctcccaccccctcgtcttctaccgccatcaccgccgcagccggagcggaggatccatcctacatcatcaccgtccctagttattcagcgtggttctcgttcgactccatccacgacacggagcgccgcctcctgccggagttcttcgtgggggaggccgccgcggcgtcagggtgccggggcccgcacgcgtacaagtactaccgcgactccctgatacggaggttccgggcgcggccgggtcgacggctcacgctcacggaggctcggaggggccttgttggcgacgtcggctcagtccgccgcgtcttcgatttccttgaggaatgggggcttatcaactacggtgctttgccatcggggtcaaagcaagctaaagagaagagggaagaggctgcacaacagtcctcgttgccttttggggcaattgcacccaggaagctctgtaccggttgccgcaccgtgtgtgggcttgcttactacgcctgcgacaaggcagatataagtctttgtgctagatgctatgtaaataataactaccggccgggcctgtctcctgctaacttcaagagagttgaaattactgaagatgcaaaaccagattggacagacaaagaaactcttcacttgcttgaggctgtcttgcattatggggaagactggaaaaaggtgtctgaacatgttagtagtcggtcagaaaaagattgtattgcaagatttataaggctaccttttggagaacagttcatgggacacaaggaggatagaatgaggtttgagaatactgatgacaatactgatgagcctggagcaaatgtctcaaaacgactacgtctcactccactagcagatgcaagcaatccgattatggctcaggttgcatttttatcagccattgtgggttccgatgttgcctcagctgcagcgcaagcagctatttctgcccaatcccgtgttgaccttaatgacggcgagattgaaacttcaataaatagcattaagcaagaagccaacgtgttactgaaagaggcagctgctaatgcacgggcacaactcgagaaggaaaggaacagcatagagcaatctttatcaaacatagtagacgtccagatgaaggaaatccaagataaaatatgccggtttgagcagaaggagatgctgatggagaaagagcggcagcagctccattttctaagggatctacttttcacagaccaattggcagtcatgcagcatcaacaaaggagtccagctgtagccacagagtgcaagggtgatgagaagccaaagcccgtggctagcatgagttgatacgagtagatcctcagcgtagcatggtttcacttcagatgtagcattggagccgcgttcatccgcatctgccgttggtaggattggaactaatttaatatactacatataggccctggttctctattggatggtgtttctgttaaatttggcgtcccctttcccttcttgcaccacagatgcctggagtgcaagggaagttatgatgacgactaccgattaccacatgcttcactgcttgtgcgctaacacgttgatatctttgccagtggcgcaacaatcgtgtatttcttgaccaaaacatccacgcaaagctccggtagattcgatggtgactagcaaggaaatacatactctctgttaatttatattttatttgattttttgccctaagtttgactgactcgt

SEQ ID NO: 46014 - DNA, 1953 bp, Zea Mays
atcttttatcgagtccaggccagcgaccgcgtttccgccttctcctccccttccacctccgatggccacaacggcgacaacgatggcgccggtgacggcgccggtggccacagccaacctcgaacctacaccaacacctctgcatccacgtcctgccgcgccacctcatctccgggcgctttccaccttggcccccgtcaagtcagaggctcctcccaccccctcgtcttctaccgccatcaccgccgcagccggagcggaggatccatcctacatcatcaccgtccctagttattcagcgtggttctcgttcgactccatccacgacacggagcgccgcctcctgccggagttcttcgtgggggaggccgccgcggcgtcagggtgccggggcccgcacgcgtacaagtactaccgcgactccctgatacggaggttccgggcgcggccgggtcgacggctcacgctcacggaggctcggaggggccttgttggcgacgtcggctcagtccgccgcgtcttcgatttccttgaggaatgggggcttatcaactacggtgctttgccatcggggtcaaagcaagctaaagagaagagggaagaggctgcacaacagtcctcgttgccttttggggcaattgcacccaggaagctctgtaccggttgccgcaccgtgtgtgggcttgcttactacgcctgcgacaagatataagtctttgtgctagatgctatgtaaataataactaccggccgggcctgtctcctgctaacttcaagagagttgaaattactgaagatgcaaaaccagattggacagacaaagaaactcttcacttgcttgaggctgtcttgcattatggggaagactggaaaaaggtgtctgaacatgttagtagtcggtcagaaaaagattgtattgcaagatttataaggctaccttttggagaacagttcatgggacacaaggaggatagaatgaggtttgagaatactgatgacaatactgatgagcctggagcaaatgtctcaaaacgactacgtctcactccactagcagatgcaagcaatccgattatggctcaggttgcatttttatcagccattgtgggttccgatgttgcctcagctgcagcgcaagcagctatttctgcccaatcccgtgttgaccttaatgacggcgagattgaaacttcaataaatagcattaagcaagaagaatcatctcacacaaatgggctctcagccaacgtgttactgaaagaggcagctgctaatgcacgggcacaactcgagaaggaaaggaacagcatagagcaatctttatcaaacatagtagacgtccagatgaaggaaatccaagataaaatatgccggtttgagcagaaggagatgctgatggagaaagagcggcagcagctccattttctaagggatctacttttcacagaccaattggcagtcatgcagcatcaacaaaggagtccagctgtagccacagagtgcaagggtgatgagaagccaaagcccgtggctagcatgagttgatacgagtagatcctcagcgtagcatggtttcacttcagatgtagcattggagccgcgttcatccgcatctgccgttggtaggattggaactaatttaatatactacatataggccctggttctctattggatggtgtttctgttaaatttggcgtcccctttcccttcttgcaccacagatgcctggagtgcaagggaagttatgatgacgactaccgattaccacatgcttcactgcttgtgcgctaacacgttgatatctttgccagtggcgcaacaatcgtgtatttcttgaccaaaacatccacgcaaagctccggtagattcgatggtgactagcaaggaaatacatactctctgttaatttatattttatttgattttttgccctaagtttgactgactcgt

SEQ ID NO: 46015 - DNA, 1782 bp, Zea Mays
ccatcttttatcgagtccaggccagcgaccgcgtttccgccttctcctccccttccacctccgatggccacaacggcgacaacgatggcgccggtgacggcgccggtggccacagccaacctcgaacctacaccaacacctctgcatccacgtcctgccgcgccacctcatctccgggcgctttccaccttggcccccgtcaagtcagaggctcctcccaccccctcgtcttctaccgccatcaccgccgcagccggagcggaggatccatcctacatcatcaccgtccctagttattcagcgtggttctcgttcgactccatccacgacacggagcgccgcctcctgccggagttcttcgtgggggaggccgccgcggcgtcagggtgccggggcccgcacgcgtacaagtactaccgcgactccctgatacggaggttccgggcgcggccgggtcgacggctcacgctcacggaggctcggaggggccttgttggcgacgtcggctcagtccgccgcgtcttcgatttccttgaggaatgggggcttatcaactacggtgctttgccatcggggtcaaagcaagctaaagagaagagggaagaggctgcacaacagtcctcgttgccttttggggcaattgcacccaggaagctctgtaccggttgccgcaccgtgtgtgggcttgcttactacgcctgcgacaaggcagatataagtctttgtgctagatgctatgtaaataataactaccggccgggcctgtctcctgctaacttcaagagagttgaaattactgaagatgcaaaaccagattggacagacaaagaaactcttcacttgcttgaggctgtcttgcattatggggaagactggaaaaagttcatgggacacaaggaggatagaatgaggtttgagaatactgatgacaatactgatgagcctggagcaaatgtctcaaaacgactacgtctcactccactagcagatgcaagcaatccgattatggctcaggttgcatttttatcagccattgtgggttccgatgttgcctcagctgcagcgcaagcagctatttctgcccaatcccgtgttgaccttaatgacggcgagattgaaacttcaataaatagcattaagcaagaagaatcatctcacacaaatgggctctcagccaacgtgttactgaaagaggcagctgctaatgcacgggcacaactcgagaaggaaaggaacagcatagagcaatctttatcaaacatagtagacgtccagatgaaggaaatccaagataaaatatgccggtttgagcagaaggagatgctgatggagaaagagcggcagcagctccattttctaagggatctacttttcacagaccaattggcagtcatgcagcatcaacaaaggagtccagctgtagccacagagtgcaagggtgatgagaagccaaagcccgtggctagcatgagttgatacgagtagatcctcagcgtagcatggtttcacttcagatgtagcattggagccgcgttcatccgcatctgccgttgatgcctggagtgcaagggaagttatgatgacgactaccgattaccacatgcttcactgcttgtgcgctaacacgttgatatctttgccagtggcgcaacaatcgtgtatttcttgaccaaaacatccacgcaaagctccggtagattcgatggtgactagcaaggaaatacatactctctgttaatttatattttatttgattttttgccctaagtttgactgactcgt

SEQ ID NO: 46016 - DNA, 673 bp, Zea Mays
gaatcccctcgaattcgaattgcaaccggtgccacacccacacccacacccacaccccacctcacatggcgtcgccgcaagcagacgaagagatagtggcggtgctcgacgaggagactctagcgctgatgggggtcagcaacgccgccaccgcagcgcgggtggcggtgggcgccgagtgggagaagttcaaggagaacgtgcggccgctcaagcgcgggcacgacgtgtccaaactcaaccacgcgctcgctcaaggcacacgccaatccctcccagcgcaccgctctcgtcgaagcccgcaaatgatcgaggcaatctacgagtaccgaggcgaggatccgctccaaccgtggctggactgcatcaagtgggtccaggagtcattcccgaccggcggcgacagtgcgtgcggaccttatggcacgacgagcgctacaaggacgacatccgctttctcaaagtgtggctggaatacgctgggaactgtgctgatgccgaggtgacatacaggttcctggaggccaaccagattgggcagggccatgccatctactacatggcttacgcatcgttgatggagtcaaagaacaagttgaggaaagctaatgagatctttgatcttggtatagctaggtgagattttcatgagacctatatatatatatatata

SEQ ID NO: 46017 - DNA, 699 bp, Zea Mays
gtcgaatcccctcgaattcgaattgcaaccggtgccacacccacacccacacccacaccccacctcacatggcgtcgccgcaagcagacgaagagatagtggcggtgctcgacgaggagactctagcgctgatgggggtcagcaacgccgccaccgcagcgcgggtggcggtgggcgccgagtgggagaagttcaaggagaacgtgcggccgctcaagcgcgggcacgacgtgtccaaactcaaccacgcgctcgctcaaggcacacgccaatccctcccagcgcaccgctctcgtcgaagcccgcaagttgattttcctgattcagaaagatgatcgaggcaatctacgagtaccgaggcgaggatccgctccaaccgtggctggactgcatcaagtgggtccaggagtcattcccgaccggcggcgacagtgcgtgcggaccttatggcacgacgagcgctacaaggacgacatccgctttctcaaagtgtggctggaatacgctgggaactgtgctgatgccgaggtgacatacaggttcctggaggccaaccagattgggcagggccatgccatctactacatggcttacgcatcgttgatggagtcaaagaacaagttgaggaaagctaatgagatctttgatcttggtatagctaggtgagattttcatgagacctatatatatatatatata

SEQ ID NO: 46018 - DNA, 6473 bp, Zea Mays
gtcagatttggggtgtgtgcgtagtcgccagaaactggatcgttctgtgttctgcctcctgggaaaatcgcctccattctgggaacgcaggaacaaccttgtcccttccttcacaaacaaaatatcaccgatggaccccagttgacagttgccaacttgccacattttgaggggggtcacttgcagaatactactctttatgatggaatgcagtttatgccagcatttgatcttgcccagtgttttggcatgagacaaaattttacttccatggatcaagatttaattgctgatggaaacgtaccacaaagatcagctcatttacgcagaagaagagatcttccacaaacatcaacattacccaaggttgcagtgaaccatgagttaggaagtgctggcacgtctatggatccatcattttttaacaatacaatcaaacaaagtcctagtgaaaacagaagttccttaaagcctccaatatttcttatggagaacagtaatcatcagccacatcatcatacagttgcactacctgttcaatatagtgattttttcattaccagcttgggagaaattgacaatcggacaagttaccacaattcataccagatatggccagttgggtttacgtcttactggcatgatagagttactggttcactgtttgagtgtgaagtgcacgatggagggaattttggacctttgtttaagatgagaaggttaccgtgttcagcattccaacttccggatgcatcaaccacagtgtgcctaaatgttgttaggaacgctgatacaatagaaacgaaggaaggtagtgatttgattgaagatactgccaatgatgctaatgataatatttctatgctcttatcagatttctctgagacgaatcaagatttcttatcatgtctaggtaatgatttggagggtaaagaaagtttagggtgcagtaatgtagaaactaaggatatgacagtgccagatgtgctgtcagatcctggctctttcagttgggcaccgaccaatgatgcaaatatgtatgacaaaattggtgacttcagttatgaaggaacatcaccttcctcagtctggaggatgatttcttgtgctatgatggaagcctgtgaaaaaatgtacaaggagcatggccatttggtattattctgcactcacagtagtgaaaaatctccatttgactatgaaagtggacctcagcgcactgatggtcctttcaatctattggctaagttttgctcatcaaatgggcctaaggtaccacagtttatagaaaaggagaatgatgtgcagtcaacttgtgcattacttaaagaatggctgtatccagacagaatcgggtttgatttggaatttgttcaagaatttgtggaatctcttcctaaatccggggcttgttcacactatcagttcttgtgtaacaggactggaattaactcttcactgacgattgcaagtggcacactggtagctgttaataaaaatagtccaatgcatgcgagacatggatctgtagtgagtgggccgcaggatcatgctcagcctagctcttctagcatccgtgagcttcctccaggaaatcctattagccgcaagcttgcaccagaattggctggggatgttttccagatattggagtttcttggacgatttgctgaaatcatcggcctgaaagaacttccttcaattgagcaagtagaagatgaactcattgacccatggccaatgcatccaaataaaaatgacatccacaactacatggatcacaatccaccgatgaattcacctgctaatgtttcttcatcgtactcgaatggcgaatcaggtataacttctattgaagaaatggtatatgtgtctattccagttgagacttcttcagcacgagaagctgctcaaaataagttggctgcccagacacttgggagatgtagtggtttagtgctgcctgagatccacattgcactcttgaaggttcttttcaccgaacttgtatctagagtcgcaatttttgtggatccaagcattgatttaaaagaatcaaaatccagacgaggaagaaaaagggacactgatactctaacaagagagttaaagattgatatgctgactgctaacaatttgacttggccggagttggctagaagatatattttagctgtttcttccatgagtggctgcatggatttatctgatatttctagtcgagaaggagtgaaattgttccgctgcctacaaggtgatggaggtatcctgtgtggagctctacccggggttgttggcatggagaaggatgcatcgctacttgcagaggctgaaacattgatatgcaattcttcagcaaatgaagggaataccgtctttatgatggattacaaggatactgatattgtagattctcctgaggagcctgctagtgacactacgttgccagattgggtgaaatcattggagcctgtgagaaaattgccaactaatgtgggaacaagaataaggaagtgtgtttatgaagctttggagagaaaacctccagaatgggcaaggaaaattttggagcactcaatcagtaaagaggtctacaagggtaatgcatctggaccaaccaagaaagctgttttatccgtcttgacagaggcatgccgtacaaaagtaccccagaatacagaaaaaccaagaaaagagagaaatattatctccatctcagaggctgtcctgaaaaagtgccgtattgccctgcggcgtgctatttcctctgatgaatcaaagcagtttgctaatttgcttggaacaactctaacaaattccaatgagaatgaagatgagggcatccttggatttcctggtatggtatcccgccctttggatttccgcacaattgatataaggttggctaagggagcttatcgcggatcttgggaggcttttcttgatgatgtacaagaagtaatttgtaatctgcaaactgcatttgctgatcgacctgaagtgctgataatggttgttgcactgtctgagagttttgagtcattgtataagacagaggtacaagaccttgttgagaaatttgacagatatctaagcaatgaaaatgatagctcagaaatccaccaggagctacaagatgctctcacggcagcaaacaataaactgccgaaagcaccatgggaggatggtgtctgcaaagtctgtggaatcgaccgtgatgacgagagcgttcttctatgtgataattgtgactctgaataccacacttattgcctgaacccaccactggcacgcataccgcttggaaactggtattgtccatcatgtactgcccaaactcatgttgcagtgcaagaacaaaagaagtgccttggggaggaagctcatgtttttattgagaaactcaacaagttagctgttgcgatggatgagaaagagtactgggagctaaccgtagcagagagaatctatttgctaaaatttctatgtgacgaattgcacaacacagctctcatcagagaacatctagatcagtgttcagacaagtcaaatgatctccagcagaaattacgtcacctgaattatgaactgaaagagttaaggtatcgggtagaaataaaaaatccttatgccacacaaagtagatggatgaaaaatgaccaagtaagcaatagttcaggactcgtggagaatcagcagcgtgctatgcccacagcctcagagcatcttgaagaggctgaacaggttaatgttggagttaacctgaacaaccctgctgaaggggttcctgctgcactattggatgtgggtaaaccttgcagtactgacaatggcatatccagcacatctgttattgaaggaaataaatctttggggctttcagaacaaccatcaaagataattactgaccagactgatcgggactctattgccgaaggatccaatagttgcgagaaatcattagttggcaaaagtggtacttgtgatccgaatgtgggagagactcatgctgctacagttatcaatgcaccaaatggagatttacctgatgaaaatgctatgacattgtcccaagataatattgaaacatcgacatctaaactggttgaccatgatgctgatatgaacgaatcaaataatttattggagaggatttcacagttgcatggttcaattagcacagtagagtcacagcttagtatggcatccttgagaggagagtgcctgggtagggattctgttggtcgattgtactgggttacaggaagaccttgtaagcgtcctcgtcttgttgcagatggaagcatgatgatacccaaggacagagacattagcatggttacaagccattctcagtcaacattcgatagaggttggaattcggcatcacttgttatttatgaatctgatgaagaaatgaagtgtcttgttgactggctaagggacattgatccaagggagaaggatctgaaagactctatcttgcactggcaaaagtctatttatcgccaggctagtttccccatcactgatcctccagtgtccaagttttcaaagagtgagccacttatggagcttccaaacaccaatgcttttatagttttggagcaaaagtatggtctgcaaacggatcaggacactagtgagctatccaaaaggagaggaacgaagtcaaggtcgggttctgaagaaagagtatatcgctgcgactgtttagagcctatatggccttctcgacaccattgcttaaattgtcatgaaacttatctcacattgatggaatatgaagggcataatggtggaaaatgcaccagcagtaacgactgtcctaatgaaagtaaagaaattgatgagccgaaactgaagggcagcaagtctgatataaaggaaaaagatcctgtagttcataattgttccgttgaaccatctaacagtggaaaattggagtcatgcccttatgactttgaagaaatttgtagaaaatttaccacaaatgattcaatcaaggagacggtgaaggagattgggctgcttggctcaaatggaattccatcttgtgtaccttcacctgcatatttccttgacccgccagttctgctaaatgaaagtaaaagaaatgacgataaaccaaatgattggacttcctcattgcaggaatgccaagctgtgtctgccaaaatgtcagggcaagagggatctcaagttggccaagatttttctggcaatgcaggtgatgaggagttgccaaaatctaagaagcctgtcagggatagtacttcagccaaggaagcaccttcaacagacatatccacaagattgctaactgttaatgggggattggttccagagtcatcactgatgcctgtaataggcaggaattttcatatcctgaagcagctaaagattaacttgcttgacatagaagcagctttgcctgaggaagcattcagagcctcaaagtctcagcaaataagaagacgttcatggcgtgcttttgtgaaggatgcagaattaatatcatatgtggtattggcaatcaatttcttgcagagcatgataaaagccgagtttctgaagaaagattggtggtactggtcctccttcactgcagctatcaagacaacaactgtatcatcgcttgcgctcaggatttacaccctcgacgactgcatcatgtacacaaaggatccagctccaaacctgcagccagctgacaatgcaaggtctggaaacaaggggaagaggaagaaagacatagattcatgagcatcgtaaccacaatgctcctggcttcccctgtagattctatctatctgcatttagaggcttctcagttctctggcagcataacaacgcggtcaggtagattggagatatagatggtagtggtcaggtagattggagatatagatggtagtgatacaggtcgcaacctatgtgtgacctctttcttactgtacattccagtgtcacagcaagggtgcagccatgatttgcccgtttcagtcttgtcctacttactggcctgccattgcgcgatatctgctgttgctaaggctcaatctctgtaaattctactcgagggatggcaccgggcaagtgctggtgtttaatctgttgcccgatgtgttgatctgttctaggggattagaggaggaatgctaggtcggtaggatttaccccatttctaccctgcttcattttattttagtggtggcagtgggtagtcgtagttttttcttttcttttcttttcagagctgggattgtttgatggatgtcccctgcggcatctgactgctttagggaatttgatacatgacgagtgtaatattttttttgacatagaagttgtaactaaaccgaaactaataatgatgaatgaaaatgaatccctgttcctttccccgtttcttcatgttggctggtcgcatgtgccattcaacttgggtgtggggaaaggttgagttgaac

SEQ ID NO: 46019 - DNA, 6366 bp, Zea Mays
cacagcccccctaactattccaccctctccgctcctgttcctaatcagtgccgccatcctgcttcgaacaacagggaagttgtagatctgcaaatcagtgcatcttgagacaaaatatcaccgatggaccccagttgacagttgccaacttgccacattttgaggggggtcacttgcagaatactactctttatgatggaatgcagtttatgccagcatttgatcttgcccagtgttttggcatgagacaaaattttacttccatggatcaagatttaattgctgatggaaacgtaccacaaagatcagctcatttacgcagaagaagagatcttccacaaacatcaacattacccaaggttgcagtgaaccatgagttaggaagtgctggcacgtctatggatccatcattttttaacaatacaatcaaacaaagtcctagtgaaaacagaagttccttaaagcctccaatatttcttatggagaacagtaatcatcagccacatcatcatacagttgcactacctgttcaatatagtgattttttcattaccagcttgggagaaattgacaatcggacaagttaccacaattcataccagatatggccagttgggtttacgtcttactggcatgatagagttactggttcactgtttgagtgtgaagtgcacgatggagggaattttggacctttgtttaagatgagaaggttaccgtgttcagcattccaacttccggatgcatcaaccacagtgtgcctaaatgttgttaggaacgctgatacaatagaaacgaaggaaggtagtgatttgattgaagatactgccaatgatgctaatgataatatttctatgctcttatcagatttctctgagacgaatcaagatttcttatcatgtctaggtaatgatttggagggtaaagaaagtttagggtgcagtaatgtagaaactaaggatatgacagtgccagatgtgctgtcagatcctggctctttcagttgggcaccgaccaatgatgcaaatatgtatgacaaaattggtgacttcagttatgaaggaacatcaccttcctcagtctggaggatgatttcttgtgctatgatggaagcctgtgaaaaaatgtacaaggagcatggccatttggtattattctgcactcacagtagtgaaaaatctccatttgactatgaaagtggacctcagcgcactgatggtcctttcaatctattggctaagttttgctcatcaaatgggcctaaggtaccacagtttatagaaaaggagaatgatgtgcagtcaacttgtgcattacttaaagaatggctgtatccagacagaatcgggtttgatttggaatttgttcaagaatttgtggaatctcttcctaaatccggggcttgttcacactatcagttcttgtgtaacaggactggaattaactcttcactgacgattgcaagtggcacactggtagctgttaataaaaatagtccaatgcatgcgagacatggatctgtagtgagtgggccgcaggatcatgctcagcctagctcttctagcatccgtgagcttcctccaggaaatcctattagccgcaagcttgcaccagaattggctggggatgttttccagatattggagtttcttggacgatttgctgaaatcatcggcctgaaagaacttccttcaattgagcaagtagaagatgaactcattgacccatggccaatgcatccaaataaaaatgacatccacaactacatggatcacaatccaccgatgaattcacctgctaatgtttcttcatcgtactcgaatggcgaatcaggtataacttctattgaagaaatggtatatgtgtctattccagttgagacttcttcagcacgagaagctgctcaaaataagttggctgcccagacacttgggagatgtagtggtttagtgctgcctgagatccacattgcactcttgaaggttcttttcaccgaacttgtatctagagtcgcaatttttgtggatccaagcattgatttaaaagaatcaaaatccagacgaggaagaaaaagggacactgatactctaacaagagagttaaagattgatatgctgactgctaacaatttgacttggccggagttggctagaagatatattttagctgtttcttccatgagtggctgcatggatttatctgatatttctagtcgagaaggagtgaaattgttccgctgcctacaaggtgatggaggtatcctgtgtggagctctacccggggttgttggcatggagaaggatgcatcgctacttgcagaggctgaaacattgatatgcaattcttcagcaaatgaagggaataccgtctttatgatggattacaaggatactgatattgtagattctcctgaggagcctgctagtgacactacgttgccagattgggtgaaatcattggagcctgtgagaaaattgccaactaatgtgggaacaagaataaggaagtgtgtttatgaagctttggagagaaaacctccagaatgggcaaggaaaattttggagcactcaatcagtaaagaggtctacaagggtaatgcatctggaccaaccaagctgttttatccgtcttgacagaggcatgccgtacaaaagtaccccagaatacagaaaaaccaagaaaagagagaaatattatctccatctcagaggctgtcctgaaaaagtgccgtattgccctgcggcgtgctatttcctctgatgaatcaaagcagtttgctaatttgcttggaacaactctaacaaattccaatgagaatgaagatgagggcatccttggatttcctggtatggtatcccgccctttggatttccgcacaattgatataaggttggctaagggagcttatcgcggatcttgggaggcttttcttgatgatgtacaagaagtaatttgtaatctgcaaactgcatttgctgatcgacctgaagtgctgataatggttgttgcactgtctgagagttttgagtcattgtataagacagaggtacaagaccttgttgagaaatttgacagatatctaagcaatgaaaatgatagctcagaaatccaccaggagctacaagatgctctcacggcagcaaacaataaactgccgaaagcaccatgggaggatggtgtctgcaaagtctgtggaatcgaccgtgatgacgagagcgttcttctatgtgataattgtgactctgaataccacacttattgcctgaacccaccactggcacgcataccgcttggaaactggtattgtccatcatgtactgcccaaactcatgttgcagtgcaagaacaaaagaagtgccttggggaggaagctcatgtttttattgagaaactcaacaagttagctgttgcgatggatgagaaagagtactgggagctaaccgtagcagagagaatctatttgctaaaatttctatgtgacgaattgcacaacacagctctcatcagagaacatctagatcagtgttcagacaagtcaaatgatctccagcagaaattacgtcacctgaattatgaactgaaagagttaaggtatcgggtagaaataaaaaatccttatgccacacaaagtagatggatgaaaaatgaccaagtaagcaatagttcaggactcgtggagaatcagcagcgtgctatgcccacagcctcagagcatcttgaagaggctgaacaggttaatgttggagttaacctgaacaaccctgctgaaggggttcctgctgcactattggatgtgggtaaaccttgcagtactgacaatggcatatccagcacatctgttattgaaggaaataaatctttggggctttcagaacaaccatcaaagataattactgaccagactgatcgggactctattgccgaaggatccaatagttgcgagaaatcattagttggcaaaagtggtacttgtgatccgaatgtgggagagactcatgctgctacagttatcaatgcaccaaatggagatttacctgatgaaaatgctatgacattgtcccaagataatattgaaacatcgacatctaaactggttgaccatgatgctgatatgaacgaatcaaataatttattggagaggatttcacagttgcatggttcaattagcacagtagagtcacagcttagtatggcatccttgagaggagagtgcctgggtagggattctgttggtcgattgtactgggttacaggaagaccttgtaagcgtcctcgtcttgttgcagatggaagcatgatgatacccaaggacagagacattagcatggttacaagccattctcagtcaacattcgatagaggttggaattcggcatcacttgttatttatgaatctgatgaagaaatgaagtgtcttgttgactggctaagggacattgatccaagggagaaggatctgaaagactctatcttgcactggcaaaagtctatttatcgccaggctagtttccccatcactgatcctccagtgtccaagttttcaaagagtgagccacttatggagcttccaaacaccaatgcttttatagttttggagcaaaagtatggtctgcaaacggatcaggacactagtgagctatccaaaaggagaggaacgaagtcaaggtcgggttctgaagaaagagtatatcgctgcgactgtttagagcctatatggccttctcgacaccattgcttaaattgtcatgaaacttatctcacattgatggaatatgaagggcataatggtggaaaatgcaccagcagtaacgactgtcctaatgaaagtaaagaaattgatgagccgaaactgaagggcagcaagtctgatataaaggaaaaagatcctgtagttcataattgttccgttgaaccatctaacagtggaaaattggagtcatgcccttatgactttgaagaaatttgtagaaaatttaccacaaatgattcaatcaaggagacggtgaaggagattgggctgcttggctcaaatggaattccatcttgtgaatgccaagctgtgtctgccaaaatgtcagggcaagagggatctcaagttggccaagatttttctggcaatgcaggtgatgaggagttgccaaaatctaagaagcctgtcagggatagtacttcagccaaggaagcaccttcaacagacatatccacaagattgctaactgttaatgggggattggttccagagtcatcactgatgcctgtaataggcaggaattttcatatcctgaagcagctaaagattaacttgcttgacatagaagcagctttgcctgaggaagcattcagagcctcaaagtctcagcaaataagaagacgttcatggcgtgcttttgtgaaggatgcagaattaatatcatatgtggtattggcaatcaatttcttgcagagcatgataaaagccgagtttctgaagaaagattggtggtactggtcctccttcactgcagctatcaagacaacaactgtatcatcgcttgcgctcaggatttacaccctcgacgactgcatcatgtacacaaaggatccagctccaaacctgcagccagctgacaatgcaaggtctggaaacaaggggaagaggaagaaagacatagattcatgagcatcgtaaccacaatgctcctggcttcccctgtagattctatctatctgcatttagaggcttctcagttctctggcagcataacaacgcggtcaggtagattggagatatagatggtagtggtcaggtagattggagatatagatggtagtgatacaggtcgcaacctatgtgtgacctctttcttactgtacattccagtgtcacagcaagggtgcagccatgatttgcccgtttcagtcttgtcctacttactggcctgccattgcgcgatatctgctgttgctaaggctcaatctctgtaaattctactcgagggatggcaccgggcaagtgctggtgtttaatctgttgcccgatgtgttgatctgttctaggggattagaggaggaatgctaggtcggtaggatttaccccatttctaccctgcttcattttattttagtggtggcagtgggtagtcgtagttttttcttttcttttcttttcagagctgggattgtttgatggatgtcccctgcggcatctgactgctttagggaatttgatacatgacgagtgtaatattttttttgacatagaagttgtaactaaaccgaaactaataatgatgaatgaaaatgaatccctgttcctttccccgtttcttcatgttggctggtcgcatgtgccattcaacttgggtgtggggaaaggttgagttgaac

SEQ ID NO: 46020 - DNA, 6662 bp, Zea Mays
aaccagtgtaactctggagaatttggtgggcctcatcagatatacttgcttgaacggtgacgtggattttgcgaataaaatatttatttaattaaggcaattttcttgctttatattgagctggtagaccaagtctatacaccggctttcccctctatatataccctatgcctgtctccttgagagaaagaaaaccctaagaattacacagcccccctaactattccaccctctccgctcctgttcctaatcagtgccgccatcctgcttcgaacaacagggaagttgtagatctgcaaatcagtgcatcttgagacaaaatatcaccgatggaccccagttgacagttgccaacttgccacattttgaggggggtcacttgcagaatactactctttatgatggaatgcagtttatgccagcatttgatcttgcccagtgttttggcatgagacaaaattttacttccatggatcaagatttaattgctgatggaaacgtaccacaaagatcagctcatttacgcagaagaagagatcttccacaaacatcaacattacccaaggttgcagtgaaccatgagttaggaagtgctggcacgtctatggatccatcattttttaacaatacaatcaaacaaagtcctagtgaaaacagaagttccttaaagcctccaatatttcttatggagaacagtaatcatcagccacatcatcatacagttgcactacctgttcaatatagtgattttttcattaccagcttgggagaaattgacaatcggacaagttaccacaattcataccagatatggccagttgggtttacgtcttactggcatgatagagttactggttcactgtttgagtgtgaagtgcacgatggagggaattttggacctttgtttaagatgagaaggttaccgtgttcagcattccaacttccggatgcatcaaccacagtgtgcctaaatgttgttaggaacgctgatacaatagaaacgaaggaaggtagtgatttgattgaagatactgccaatgatgctaatgataatatttctatgctcttatcagatttctctgagacgaatcaagatttcttatcatgtctaggtaatgatttggagggtaaagaaagtttagggtgcagtaatgtagaaactaaggatatgacagtgccagatgtgctgtcagatcctggctctttcagttgggcaccgaccaatgatgcaaatatgtatgacaaaattggtgacttcagttatgaaggaacatcaccttcctcagtctggaggatgatttcttgtgctatgatggaagcctgtgaaaaaatgtacaaggagcatggccatttggtattattctgcactcacagtagtgaaaaatctccatttgactatgaaagtggacctcagcgcactgatggtcctttcaatctattggctaagttttgctcatcaaatgggcctaaggtaccacagtttatagaaaaggagaatgatgtgcagtcaacttgtgcattacttaaagaatggctgtatccagacagaatcgggtttgatttggaatttgttcaagaatttgtggaatctcttcctaaatccggggcttgttcacactatcagttcttgtgtaacaggactggaattaactcttcactgacgattgcaagtggcacactggtagctgttaataaaaatagtccaatgcatgcgagacatggatctgtagtgagtgggccgcaggatcatgctcagcctagctcttctagcatccgtgagcttcctccaggaaatcctattagccgcaagcttgcaccagaattggctggggatgttttccagatattggagtttcttggacgatttgctgaaatcatcggcctgaaagaacttccttcaattgagcaagtagaagatgaactcattgacccatggccaatgcatccaaataaaaatgacatccacaactacatggatcacaatccaccgatgaattcacctgctaatgtttcttcatcgtactcgaatggcgaatcaggtataacttctattgaagaaatggtatatgtgtctattccagttgagacttcttcagcacgagaagctgctcaaaataagttggctgcccagacacttgggagatgtagtggtttagtgctgcctgagatccacattgcactcttgaaggttcttttcaccgaacttgtatctagagtcgcaatttttgtggatccaagcattgatttaaaagaatcaaaatccagacgaggaagaaaaagggacactgatactctaacaagagagttaaagattgatatgctgactgctaacaatttgacttggccggagttggctagaagatatattttagctgtttcttccatgagtggctgcatggatttatctgatatttctagtcgagaaggagtgaaattgttccgctgcctacaaggtgatggaggtatcctgtgtggagctctacccggggttgttggcatggagaaggatgcatcgaggctgaaacattgatatgcaattcttcagcaaatgaagggaataccgtctttatgatggattacaaggatactgatattgtagattctcctgaggagcctgctagtgacactacgttgccagattgggtgaaatcattggagcctgtgagaaaattgccaactaatgtgggaacaagaataaggaagtgtgtttatgaagctttggagagaaaacctccagaatgggcaaggaaaattttggagcactcaatcagtaaagaggtctacaagggtaatgcatctggaccaaccaagaaagctgttttatccgtcttgacagaggcatgccgtacaaaagtaccccagaatacagaaaaaccaagaaaagagagaaatattatctccatctcagaggctgtcctgaaaaagtgccgtattgccctgcggcgtgctatttcctctgatgaatcaaagcagtttgctaatttgcttggaacaactctaacaaattccaatgagaatgaagatgagggcatccttggatttcctggtatggtatcccgccctttggatttccgcacaattgatataaggttggctaagggagcttatcgcggatcttgggaggcttttcttgatgatgtacaagaagtaatttgtaatctgcaaactgcatttgctgatcgacctgaagtgctgataatggttgttgcactgtctgagagttttgagtcattgtataagacagaggtacaagaccttgttgagaaatttgacagatatctaagcaatgaaaatgatagctcagaaatccaccaggagctacaagatgctctcacggcagcaaacaataaactgccgaaagcaccatgggaggatggtgtctgcaaagtctgtggaatcgaccgtgatgacgagagcgttcttctatgtgataattgtgactctgaataccacacttattgcctgaacccaccactggcacgcataccgcttggaaactggtattgtccatcatgtactgcccaaactcatgttgcagtgcaagaacaaaagaagtgccttggggaggaagctcatgtttttattgagaaactcaacaagttagctgttgcgatggatgagaaagagtactgggagctaaccgtagcagagagaatctatttgctaaaatttctatgtgacgaattgcacaacacagctctcatcagagaacatctagatcagtgttcagacaagtcaaatgatctccagcagaaattacgtcacctgaattatgaactgaaagagttaaggtatcgggtagaaataaaaaatccttatgccacacaaagtagatggatgaaaaatgaccaagtaagcaatagttcaggactcgtggagaatcagcagcgtgctatgcccacagcctcagagcatcttgaagaggctgaacaggttaatgttggagttaacctgaacaaccctgctgaaggggttcctgctgcactattggatgtgggtaaaccttgcagtactgacaatggcatatccagcacatctgttattgaaggaaataaatctttggggctttcagaacaaccatcaaagataattactgaccagactgatcgggactctattgccgaaggatccaatagttgcgagaaatcattagttggcaaaagtggtacttgtgatccgaatgtgggagagactcatgctgctacagttatcaatgcaccaaatggagatttacctgatgaaaatgctatgacattgtcccaagataatattgaaacatcgacatctaaactggttgaccatgatgctgatatgaacgaatcaaataatttattggagaggatttcacagttgcatggttcaattagcacagtagagtcacagcttagtatggcatccttgagaggagagtgcctgggtagggattctgttggtcgattgtactgggttacaggaagaccttgtaagcgtcctcgtcttgttgcagatggaagcatgatgatacccaaggacagagacattagcatggttacaagccattctcagtcaacattcgatagaggttggaattcggcatcacttgttatttatgaatctgatgaagaaatgaagtgtcttgttgactggctaagggacattgatccaagggagaaggatctgaaagactctatcttgcactggcaaaagtctatttatcgccaggctagtttccccatcactgatcctccagtgtccaagttttcaaagagtgagccacttatggagcttccaaacaccaatgcttttatagttttggagcaaaagtatggtctgcaaacggatcaggacactagtgagctatccaaaaggagaggaacgaagtcaaggtcgggttctgaagaaagagtatatcgctgcgactgtttagagcctatatggccttctcgacaccattgcttaaattgtcatgaaacttatctcacattgatggaatatgaagggcataatggtggaaaatgcaccagcagtaacgactgtcctaatgaaagtaaagaaattgatgagccgaaactgaagggcagcaagtctgatataaaggaaaaagatcctgtagttcataattgttccgttgaaccatctaacagtggaaaattggagtcatgcccttatgactttgaagaaatttgtagaaaatttaccacaaatgattcaatcaaggagacggtgaaggagattgggctgcttggctcaaatggaattccatcttgtgtaccttcacctgcatatttccttgacccgccagttctgctaaatgaaagtaaaagaaatgacgataaaccaaatgattggacttcctcattgcaggaatgccaagctgtgtctgccaaaatgtcagggcaagagggatctcaagttggccaagatttttctggcaatgcaggtgatgaggagttgccaaaatctaagaagcctgtcagggatagtacttcagccaaggaagcaccttcaacagacatatccacaagattgctaactgttaatgggggattggttccagagtcatcactgatgcctgtaataggcaggaattttcatatcctgaagcagctaaagattaacttgcttgacatagaagcagctttgcctgaggaagcattcagagcctcaaagtctcagcaaataagaagacgttcatggcgtgcttttgtgaaggatgcagaattaatatcatatgtggtattggcaatcaatttcttgcagagcatgataaaagccgagtttctgaagaaagattggtggtactggtcctccttcactgcagctatcaagacaacaactgtatcatcgcttgcgctcaggatttacaccctcgacgactgcatcatgtacacaaaggatccagctccaaacctgcagccagctgacaatgcaaggtctggaaacaaggggaagaggaagaaagacatagattcatgagcatcgtaaccacaatgctcctggcttcccctgtagattctatctatctgcatttagaggcttctcagttctctggcagcataacaacgcggtcaggtagattggagatatagatggtagtggtcaggtagattggagatatagatggtagtgatacaggtcgcaacctatgtgtgacctctttcttactgtacattccagtgtcacagcaagggtgcagccatgatttgcccgtttcagtcttgtcctacttactggcctgccattgcgcgatatctgctgttgctaaggctcaatctctgtaaattctactcgagggatggcaccgggcaagtgctggtgtttaatctgttgcccgatgtgttgatctgttctaggggattagaggaggaatgctaggtcggtaggatttaccccatttctaccctgcttcattttattttagtggtggcagtgggtagtcgtagttttttcttttcttttcttttcagagctgggattgtttgatggatgtcccctgcggcatctgactgctttagggaatttgatacatgacgagtgtaatattttttttgacatagaagttgtaactaaaccgaaactaataatgatgaatgaaaatgaatccctgttcctttccccgtttcttcatgttggctggtcgcatgtgccattcaacttgggtgtggggaaaggttgagttgaac

SEQ ID NO: 46021 - DNA, 6750 bp, Zea Mays
gttaagtgcaaacttatccactcccgtgcgtccccttggatcaacatcatgtgacccagattagaagtttgcacggttgcacagaagggttggtttgcaccagatatgttcccctgattttgttctaaagaagtctgtaccagccttcaaacctggactggtgacaggggtttcatcacccccagactaaaatggtataaccagtgtaactctggagaatttggtgggcctcatcagatatacttgcttgaacggtgacgtggattttgcgaataaaatatttatttaattaaggcaattttcttgctttatattgagctggtagaccaagtctatacaccggctttcccctctatatataccctatgcctgtctccttgagagaaagaaaaccctaagaattacacagcccccctaactattccaccctctccgctcctgttcctaatcagtgccgccatcctgcttcgaacaacagggaagttgtagatctgcaaatcagtgcatcttgagacaaaatatcaccgatggaccccagttgacagttgccaacttgccacattttgaggggggtcacttgcagaatactactctttatgatggaatgcagtttatgccagcatttgatcttgcccagtgttttggcatgagacaaaattttacttccatggatcaagatttaattgctgatggaaacgtaccacaaagatcagctcatttacgcagaagaagagatcttccacaaacatcaacattacccaaggttgcagtgaaccatgagttaggaagtgctggcacgtctatggatccatcattttttaacaatacaatcaaacaaagtcctagtgaaaacagaagttccttaaagcctccaatatttcttatggagaacagtaatcatcagccacatcatcatacagttgcactacctgttcaatatagtgattttttcattaccagcttgggagaaattgacaatcggacaagttaccacaattcataccagatatggccagttgggtttacgtcttactggcatgatagagttactggttcactgtttgagtgtgaagtgcacgatggagggaattttggacctttgtttaagatgagaaggttaccgtgttcagcattccaacttccggatgcatcaaccacagtgtgcctaaatgttgttaggaacgctgatacaatagaaacgaaggaagatttctctgagacgaatcaagatttcttatcatgtctaggtaatgatttggagggtaaagaaagtttagggtgcagtaatgtagaaactaaggatatgacagtgccagatgtgctgtcagatcctggctctttcagttgggcaccgaccaatgatgcaaatatgtatgacaaaattggtgacttcagttatgaaggaacatcaccttcctcagtctggaggatgatttcttgtgctatgatggaagcctgtgaaaaaatgtacaaggagcatggccatttggtattattctgcactcacagtagtgaaaaatctccatttgactatgaaagtggacctcagcgcactgatggtcctttcaatctattggctaagttttgctcatcaaatgggcctaaggtaccacagtttatagaaaaggagaatgatgtgcagtcaacttgtgcattacttaaagaatggctgtatccagacagaatcgggtttgatttggaatttgttcaagaatttgtggaatctcttcctaaatccggggcttgttcacactatcagttcttgtgtaacaggactggaattaactcttcactgacgattgcaagtggcacactggtagctgttaataaaaatagtccaatgcatgcgagacatggatctgtagtgagtgggccgcaggatcatgctcagcctagctcttctagcatccgtgagcttcctccaggaaatcctattagccgcaagcttgcaccagaattggctggggatgttttccagatattggagtttcttggacgatttgctgaaatcatcggcctgaaagaacttccttcaattgagcaagtagaagatgaactcattgacccatggccaatgcatccaaataaaaatgacatccacaactacatggatcacaatccaccgatgaattcacctgctaatgtttcttcatcgtactcgaatggcgaatcagcacgagaagctgctcaaaataagttggctgcccagacacttgggagatgtagtggtttagtgctgcctgagatccacattgcactcttgaaggttcttttcaccgaacttgtatctagagtcgcaatttttgtggatccaagcattgatttaaaagaatcaaaatccagacgaggaagaaaaagggacactgatactctaacaagagagttaaagattgatatgctgactgctaacaatttgacttggccggagttggctagaagatatattttagctgtttcttccatgagtggctgcatggatttatctgatatttctagtcgagaaggagtgaaattgttccgctgcctacaaggtgatggaggtatcctgtgtggagctctacccggggttgttggcatggagaaggatgcatcgctacttgcagaggctgaaacattgatatgcaattcttcagcaaatgaagggaataccgtctttatgatggattacaaggatactgatattgtagattctcctgaggagcctgctagtgacactacgttgccagattgggtgaaatcattggagcctgtgagaaaattgccaactaatgtgggaacaagaataaggaagtgtgtttatgaagctttggagagaaaacctccagaatgggcaaggaaaattttggagcactcaatcagtaaagaggtctacaagggtaatgcatctggaccaaccaagaaagctgttttatccgtcttgacagaggcatgccgtacaaaagtaccccagaatacagaaaaaccaagaaaagagagaaatattatctccatctcagaggctgtcctgaaaaagtgccgtattgccctgcggcgtgctatttcctctgatgaatcaaagcagtttgctaatttgcttggaacaactctaacaaattccaatgagaatgaagatgagggcatccttggatttcctggtatggtatcccgccctttggatttccgcacaattgatataaggttggctaagggagcttatcgcggatcttgggaggcttttcttgatgatgtacaagaagtaatttgtaatctgcaaactgcatttgctgatcgacctgaagtgctgataatggttgttgcactgtctgagagttttgagtcattgtataagacagaggtacaagaccttgttgagaaatttgacagatatctaagcaatgaaaatgatagctcagaaatccaccaggagctacaagatgctctcacggcagcaaacaataaactgccgaaagcaccatgggaggatggtgtctgcaaagtctgtggaatcgaccgtgatgacgagagcgttcttctatgtgataattgtgactctgaataccacacttattgcctgaacccaccactggcacgcataccgcttggaaactggtattgtccatcatgtactgcccaaactcatgttgcagtgcaagaacaaaagaagtgccttggggaggaagctcatgtttttattgagaaactcaacaagttagctgttgcgatggatgagaaagagtactgggagctaaccgtagcagagagaatctatttgctaaaatttctatgtgacgaattgcacaacacagctctcatcagagaacatctagatcagtgttcagacaagtcaaatgatctccagcagaaattacgtcacctgaattatgaactgaaagagttaaggtatcgggtagaaataaaaaatccttatgccacacaaagtagatggatgaaaaatgaccaagtaagcaatagttcaggactcgtggagaatcagcagcgtgctatgcccacagcctcagagcatcttgaagaggctgaacaggttaatgttggagttaacctgaacaaccctgctgaaggggttcctgctgcactattggatgtgggtaaaccttgcagtactgacaatggcatatccagcacatctgttattgaaggaaataaatctttggggctttcagaacaaccatcaaagataattactgaccagactgatcgggactctattgccgaaggatccaatagttgcgagaaatcattagttggcaaaagtggtacttgtgatccgaatgtgggagagactcatgctgctacagttatcaatgcaccaaatggagatttacctgatgaaaatgctatgacattgtcccaagataatattgaaacatcgacatctaaactggttgaccatgatgctgatatgaacgaatcaaataatttattggagaggatttcacagttgcatggttcaattagcacagtagagtcacagcttagtatggcatccttgagaggagagtgcctgggtagggattctgttggtcgattgtactgggttacaggaagaccttgtaagcgtcctcgtcttgttgcagatggaagcatgatgatacccaaggacagagacattagcatggttacaagccattctcagtcaacattcgatagaggttggaattcggcatcacttgttatttatgaatctgatgaagaaatgaagtgtcttgttgactggctaagggacattgatccaagggagaaggatctgaaagactctatcttgcactggcaaaagtctatttatcgccaggctagtttccccatcactgatcctccagtgtccaagttttcaaagagtgagccacttatggagcttccaaacaccaatgcttttatagttttggagcaaaagtatggtctgcaaacggatcaggacactagtgagctatccaaaaggagaggaacgaagtcaaggtcgggttctgaagaaagagtatatcgctgcgactgtttagagcctatatggccttctcgacaccattgcttaaattgtcatgaaacttatctcacattgatggaatatgaagggcataatggtggaaaatgcaccagcagtaacgactgtcctaatgaaagtaaagaaattgatgagccgaaactgaagggcagcaagtctgatataaaggaaaaagatcctgtagttcataattgttccgttgaaccatctaacagtggaaaattggagtcatgcccttatgactttgaagaaatttgtagaaaatttaccacaaatgattcaatcaaggagacggtgaaggagattgggctgcttggctcaaatggaattccatcttgtgtaccttcacctgcatatttccttgacccgccagttctgctaaatgaaagtaaaagaaatgacgataaaccaaatgattggacttcctcattgcaggaatgccaagctgtgtctgccaaaatgtcagggcaagagggatctcaagttggccaagatttttctggcaatgcaggtgatgaggagttgccaaaatctaagaagcctgtcagggatagtacttcagccaaggaagcaccttcaacagacatatccacaagattgctaactgttaatgggggattggttccagagtcatcactgatgcctgtaataggcaggaattttcatatcctgaagcagctaaagattaacttgcttgacatagaagcagctttgcctgaggaagcattcagagcctcaaagtctcagcaaataagaagacgttcatggcgtgcttttgtgaaggatgcagaattaatatcatatgtggtattggcaatcaatttcttgcagagcatgataaaagccgagtttctgaagaaagattggtggtactggtcctccttcactgcagctatcaagacaacaactgtatcatcgcttgcgctcaggatttacaccctcgacgactgcatcatgtacacaaaggatccagctccaaacctgcagccagctgacaatgcaaggtctggaaacaaggggaagaggaagaaagacatagattcatgagcatcgtaaccacaatgctcctggcttcccctgtagattctatctatctgcatttagaggcttctcagttctctggcagcataacaacgcggtcaggtagattggagatatagatggtagtggtcaggtagattggagatatagatggtagtgatacaggtcgcaacctatgtgtgacctctttcttactgtacattccagtgtcacagcaagggtgcagccatgatttgcccgtttcagtcttgtcctacttactggcctgccattgcgcgatatctgctgttgctaaggctcaatctctgtaaattctactcgagggatggcaccgggcaagtgctggtgtttaatctgttgcccgatgtgttgatctgttctaggggattagaggaggaatgctaggtcggtaggatttaccccatttctaccctgcttcattttattttagtggtggcagtgggtagtcgtagttttttcttttcttttcttttcagagctgggattgtttgatggatgtcccctgcggcatctgactgctttagggaatttgatacatgacgagtgtaatattttttttgacatagaagttgtaactaaaccgaaactaataatgatgaatgaaaatgaatccctgttcctttccccgtttcttcatgttggctggtcgcatgtgccattcaacttgggtgtggggaaaggttgagttgaac

SEQ ID NO: 46022 - DNA, 6295 bp, Zea Mays
gcttcttcatgaagtcaaccatcctctcttgaagacaaaatatcaccgatggaccccagttgacagttgccaacttgccacattttgaggggggtcacttgcagaatactactctttatgatggaatgcagtttatgccagcatttgatcttgcccagtgttttggcatgagacaaaattttacttccatggatcaagatttaattgctgatggaaacgtaccacaaagatcagctcatttacgcagaagaagagatcttccacaaacatcaacattacccaaggttgcagtgaaccatgagttaggaagtgctggcacgtctatggatccatcattttttaacaatacaatcaaacaaagtcctagtgaaaacagaagttccttaaagcctccaatatttcttatggagaacagtaatcatcagccacatcatcatacagttgcactacctgttcaatatagtgattttttcattaccagcttgggagaaattgacaatcggacaagttaccacaattcataccagatatggccagttgggtttacgtcttactggcatgatagagttactggttcactgtttgagtgtgaagtgcacgatggagggaattttggacctttgtttaagatgagaaggttaccgtgttcagcattccaacttccggatgcatcaaccacagtgtgcctaaatgttgttaggaacgctgatacaatagaaacgaaggaaggtagtgatttgattgaagatactgccaatgatgctaatgataatatttctatgctcttatcagatttctctgagacgaatcaagatttcttatcatgtctaggtaatgatttggagggtaaagaaagtttagggtgcagtaatgtagaaactaaggatatgacagtgccagatgtgctgtcagatcctggctctttcagttgggcaccgaccaatgatgcaaatatgtatgacaaaattggtgacttcagttatgaaggaacatcaccttcctcagtctggaggatgatttcttgtgctatgatggaagcctgtgaaaaaatgtacaaggagcatggccatttggtattattctgcactcacagtagtgaaaaatctccatttgactatgaaagtggacctcagcgcactgatggtcctttcaatctattggctaagttttgctcatcaaatgggcctaaggtaccacagtttatagaaaaggagaatgatgtgcagtcaacttgtgcattacttaaagaatggctgtatccagacagaatcgggtttgatttggaatttgttcaagaatttgtggaatctcttcctaaatccggggcttgttcacactatcagttcttgtgtaacaggactggaattaactcttcactgacgattgcaagtggcacactggtagctgttaataaaaatagtccaatgcatgcgagacatggatctgtagtgagtgggccgcaggatcatgctcagcctagctcttctagcatccgtgagcttcctccaggaaatcctattagccgcaagcttgcaccagaattggctggggatgttttccagatattggagtttcttggacgatttgctgaaatcatcggcctgaaagaacttccttcaattgagcaagtagaagatgaactcattgacccatggccaatgcatccaaataaaaatgacatccacaactacatggatcacaatccaccgatgaattcacctgctaatgtttcttcatcgtactcgaatggcgaatcaggtataacttctattgaagaaatggtatatgtgtctattccagttgagacttcttcagcacgagaagctgctcaaaataagttggctgcccagacacttgggagatgtagtggtttagtgctgcctgagatccacattgcactcttgaaggttcttttcaccgaacttgtatctagagtcgcaatttttgtggatccaagcattgatttaaaagaatcaaaatccagacgaggaagaaaaagggacactgatactctaacaagagagttaaagattgatatgctgactgctaacaatttgacttggccggagttggctagaagatatattttagctgtttcttccatgagtggctgcatggatttatctgatatttctagtcgagaaggagtgaaattgttccgctgcctacaaggtgatggaggtatcctgtgtggagctctacccggggttgttggcatggagaaggatgcatcgctacttgcagaggctgaaacattgatatgcaattcttcagcaaatgaagggaataccgtctttatgatggattacaaggatactgatattgtagattctcctgaggagcctgctagtgacactacgttgccagattgggtgaaatcattggagcctgtgagaaaattgccaactaatgtgggaacaagaataaggaagtgtgtttatgaagctttggagagaaaacctccagaatgggcaaggaaaattttggagcactcaatcagtaaagaggtctacaagggtaatgcatctggaccaaccaagaaagctgttttatccgtcttgacagaggcatgccgtacaaaagtaccccagaatacagaaaaaccaagaaaagagagaaatattatctccatctcagaggctgtcctgaaaaagtgccgtattgccctgcggcgtgctatttcctctgatgaatcaaagcagtttgctaatttgcttggaacaactctaacaaattccaatgagaatgaagatgagggcatccttggatttcctggtatggtatcccgccctttggatttccgcacaattgatataaggttggctaagggagcttatcgcggatcttgggaggcttttcttgatgatgtacaagaagtaatttgtaatctgcaaactgcatttgctgatcgacctgaagtgctgataatggttgttgcactgtctgagagttttgagtcattgtataagacagaggtacaagaccttgttgagaaatttgacagatatctaagcaatgaaaatgatagctcagaaatccaccaggagctacaagatgctctcacggcagcaaacaataaactgccgaaagcaccatgggaggatggtgtctgcaaagtctgtggaatcgaccgtgatgacgagagcgttcttctatgtgataattgtgactctgaataccacacttattgcctgaacccaccactggcacgcataccgcttggaaactggtattgtccatcatgtactgcccaaactcatgttgcagtgcaagaacaaaagaagtgccttggggaggaagctcatgtttttattgagaaactcaacaagttagctgttgcgatggatgagaaagagtactgggagctaaccgtagcagagagaatctatttgctaaaatttctatgtgacgaattgcacaacacagctctcatcagagaacatctagatcagtgttcagacaagtcaaatgatctccagcagaaattacgtcacctgaattatgaactgaaagagttaaggtatcgggtagaaataaaaaatccttatgccacacaaagtagatggatgaaaaatgaccaagtaagcaatagttcaggactcgtggagaatcagcagcgtgctatgcccacagcctcagagcatcttgaagaggctgaacaggttaatgttggagttaacctgaacaaccctgctgaaggggttcctgctgcactattggatgtgggtaaaccttgcagtactgacaatggcatatccagcacatctgttattgaaggaaataaatctttggggctttcagaacaaccatcaaagataattactgaccagactgatcgggactctattgccgaaggatccaatagttgcgagaaatcattagttggcaaaagtggtacttgtgatccgaatgtgggagagactcatgctgctacagttatcaatgcaccaaatggagatttacctgatgaaaatgctatgacattgtcccaagataatattgaaacatcgacatctaaactggttgaccatgatgctgatatgaacgaatcaaataatttattggagaggatttcacagttgcatggttcaattagcacagtagagtcacagcttagtatggcatccttgagaggagagtgcctgggtagggattctgttggtcgattgtactgggttacaggaagaccttgtaagcgtcctcgtcttgttgcagatggaagcatgatgatacccaaggacagagacattagcatggttacaagccattctcagtcaacattcgatagaggttggaattcggcatcacttgttatttatgaatctgatgaagaaatgaagtgtcttgttgactggctaagggacattgatccaagggagaaggatctgaaagactctatcttgcactggcaaaagtctatttatcgccaggctagtttccccatcactgatcctccagtgtccaagttttcaaagagtgagccacttatggagcttccaaacaccaatgcttttatagttttggagcaaaagtatggtctgcaaacggatcaggacactagtgagctatccaaaaggagaggaacgaagtcaaggtcgggttctgaagaaagagtatatcgctgcgactgtttagagcctatatggccttctcgacaccattgcttaaattgtcatgaaacttatctcacattgatggaatatgaagggcataatggtggaaaatgcaccagcagtaacgactgtcctaatgaaagtaaagaaattgatgagccgaaactgaagggcagcaagtctgatataaaggaaaaagatcctgtagttcataattgttccgttgaaccatctaacagtggaaaattggagtcatgcccttatgactttgaagaaatttgtagaaaatttaccacaaatgattcaatcaaggagacggtgaaggagattgggctgcttggctcaaatggaattccatcttgtgaatgccaagctgtgtctgccaaaatgtcagggcaagagggatctcaagttggccaagatttttctggcaatgcaggtgatgaggagttgccaaaatctaagaagcctgtcagggatagtacttcagccaaggaagcaccttcaacagacatatccacaagattgctaactgttaatgggggattggttccagagtcatcactgatgcctgtaataggcaggaattttcatatcctgaagcagctaaagattaacttgcttgacatagaagcagctttgcctgaggaagcattcagagcctcaaagtctcagcaaataagaagacgttcatggcgtgcttttgtgaaggatgcagaattaatatcatatgtggtattggcaatcaatttcttgcagagcatgataaaagccgagtttctgaagaaagattggtggtactggtcctccttcactgcagctatcaagacaacaactgtatcatcgcttgcgctcaggatttacaccctcgacgactgcatcatgtacacaaaggatccagctccaaacctgcagccagctgacaatgcaaggtctggaaacaaggggaagaggaagaaagacatagattcatgagcatcgtaaccacaatgctcctggcttcccctgtagattctatctatctgcatttagaggcttctcagttctctggcagcataacaacgcggtcaggtagattggagatatagatggtagtggtcaggtagattggagatatagatggtagtgatacaggtcgcaacctatgtgtgacctctttcttactgtacattccagtgtcacagcaagggtgcagccatgatttgcccgtttcagtcttgtcctacttactggcctgccattgcgcgatatctgctgttgctaaggctcaatctctgtaaattctactcgagggatggcaccgggcaagtgctggtgtttaatctgttgcccgatgtgttgatctgttctaggggattagaggaggaatgctaggtcggtaggatttaccccatttctaccctgcttcattttattttagtggtggcagtgggtagtcgtagttttttcttttcttttcttttcagagctgggattgtttgatggatgtcccctgcggcatctgactgctttagggaatttgatacatgacgagtgtaatattttttttgacatagaagttgtaactaaaccgaaactaataatgatgaatgaaaatgaatccctgttcctttccccgtttcttcatgttggctggtcgcatgtgccattcaacttgggtgtggggaaaggttgagttgaac

SEQ ID NO: 46023 - DNA, 5929 bp, Zea Mays
gaggtgtcctaccacgtttcccaaagcatcgttgaagcaggtgtcatagcttcttcatgaagtcaaccatcctctcttgaagacaaaatatcaccgatggaccccagttgacagttgccaacttgccacattttgaggggggtcacttgcagaatactactctttatgatggaatgcagtttatgccagcatttgatcttgcccagtgttttggcatgagacaaaattttacttccatggatcaagatttaattgctgatggaaacgtaccacaaagatcagctcatttacgcagaagaagagatcttccacaaacatcaacattacccaaggttgcagtgaaccatgagttaggaagtgctggcacgtctatggatccatcattttttaacaatacaatcaaacaaagtcctagtgaaaacagaagttccttaaagcctccaatatttcttatggagaacagtaatcatcagccacatcatcatacagttgcactacctgttcaatatagtgattttttcattaccagcttgggagaaattgacaatcggacaagttaccacaattcataccagatatggccagttgggtttacgtcttactggcatgatagagttactggttcactgtttgagtgtgaagtgcacgatggagggaattttggacctttgtttaagatgagaaggttaccgtgttcagcattccaacttccggatgcatcaaccacagtgtgcctaaatgttgttaggaacgctgatacaatagaaacgaaggaaggtagtgatttgattgaagatactgccaatgatgctaatgataatatttctatgctcttatcagatttctctgagacgaatcaagatttcttatcatgtctaggtaatgatttggagggtaaagaaagtttagggtgcagtaatgtagaaactaaggatatgacagtgccagatgtgctgtcagatcctggctctttcagttgggcaccgaccaatgatgcaaatatgtatgacaaaattggtgacttcagttatgaaggaacatcaccttcctcagtctggaggatgatttcttgtgctatgatggaagcctgtgaaaaaatgtacaaggagcatggccatttggtattattctgcactcacagtagtgaaaaatctccatttgactatgaaagtggacctcagcgcactgatggtcctttcaatctattggctaagttttgctcatcaaatgggcctaaggtaccacagtttatagaaaaggagaatgatgtgcagtcaacttgtgcattacttaaagaatggctgtatccagacagaatcgggtttgatttggaatttgttcaagaatttgtggaatctcttcctaaatccggggcttgttcacactatcagttcttgtgtaacaggactggaattaactcttcactgacgattgcaagtggcacactggtagctgttaataaaaatagtccaatgcatgcgagacatggatctgtagtgagtgggccgcaggatcatgctcagcctagctcttctagcatccgtgagcttcctccaggaaatcctattagccgcaagcttgcaccagaattggctggggatgttttccagatattggagtttcttggacgatttgctgaaatcatcggcctgaaagaacttccttcaattgagcaagtagaagatgaactcattgacccatggccaatgcatccaaataaaaatgacatccacaactacatggatcacaatccaccgatgaattcacctgctaatgtttcttcatcgtactcgaatggcgaatcaggtgatggaggtatcctgtgtggagctctacccggggttgttggcatggagaaggatgcatcgctacttgcagaggctgaaacattgatatgcaattcttcagcaaatgaagggaataccgtctttatgatggattacaaggatactgatattgtagattctcctgaggagcctgctagtgacactacgttgccagattgggtgaaatcattggagcctgtgagaaaattgccaactaatgtgggaacaagaataaggaagtgtgtttatgaagctttggagagaaaacctccagaatgggcaaggaaaattttggagcactcaatcagtaaagaggtctacaagggtaatgcatctggaccaaccaagaaagctgttttatccgtcttgacagaggcatgccgtacaaaagtaccccagaatacagaaaaaccaagaaaagagagaaatattatctccatctcagaggctgtcctgaaaaagtgccgtattgccctgcggcgtgctatttcctctgatgaatcaaagcagtttgctaatttgcttggaacaactctaacaaattccaatgagaatgaagatgagggcatccttggatttcctggtatggtatcccgccctttggatttccgcacaattgatataaggttggctaagggagcttatcgcggatcttgggaggcttttcttgatgatgtacaagaagtaatttgtaatctgcaaactgcatttgctgatcgacctgaagtgctgataatggttgttgcactgtctgagagttttgagtcattgtataagacagaggtacaagaccttgttgagaaatttgacagatatctaagcaatgaaaatgatagctcagaaatccaccaggagctacaagatgctctcacggcagcaaacaataaactgccgaaagcaccatgggaggatggtgtctgcaaagtctgtggaatcgaccgtgatgacgagagcgttcttctatgtgataattgtgactctgaataccacacttattgcctgaacccaccactggcacgcataccgcttggaaactggtattgtccatcatgtactgcccaaactcatgttgcagtgcaagaacaaaagaagtgccttggggaggaagctcatgtttttattgagaaactcaacaagttagctgttgcgatggatgagaaagagtactgggagctaaccgtagcagagagaatctatttgctaaaatttctatgtgacgaattgcacaacacagctctcatcagagaacatctagatcagtgttcagacaagtcaaatgatctccagcagaaattacgtcacctgaattatgaactgaaagagttaaggtatcgggtagaaataaaaaatccttatgccacacaaagtagatggatgaaaaatgaccaagtaagcaatagttcaggactcgtggagaatcagcagcgtgctatgcccacagcctcagagcatcttgaagaggctgaacaggttaatgttggagttaacctgaacaaccctgctgaaggggttcctgctgcactattggatgtgggtaaaccttgcagtactgacaatggcatatccagcacatctgttattgaaggaaataaatctttggggctttcagaacaaccatcaaagataattactgaccagactgatcgggactctattgccgaaggatccaatagttgcgagaaatcattagttggcaaaagtggtacttgtgatccgaatgtgggagagactcatgctgctacagttatcaatgcaccaaatggagatttacctgatgaaaatgctatgacattgtcccaagataatattgaaacatcgacatctaaactggttgaccatgatgctgatatgaacgaatcaaataatttattggagaggatttcacagttgcatggttcaattagcacagtagagtcacagcttagtatggcatccttgagaggagagtgcctgggtagggattctgttggtcgattgtactgggttacaggaagaccttgtaagcgtcctcgtcttgttgcagatggaagcatgatgatacccaaggacagagacattagcatggttacaagccattctcagtcaacattcgatagaggttggaattcggcatcacttgttatttatgaatctgatgaagaaatgaagtgtcttgttgactggctaagggacattgatccaagggagaaggatctgaaagactctatcttgcactggcaaaagtctatttatcgccaggctagtttccccatcactgatcctccagtgtccaagttttcaaagagtgagccacttatggagcttccaaacaccaatgcttttatagttttggagcaaaagtatggtctgcaaacggatcaggacactagtgagctatccaaaaggagaggaacgaagtcaaggtcgggttctgaagaaagagtatatcgctgcgactgtttagagcctatatggccttctcgacaccattgcttaaattgtcatgaaacttatctcacattgatggaatatgaagggcataatggtggaaaatgcaccagcagtaacgactgtcctaatgaaagtaaagaaattgatgagccgaaactgaagggcagcaagtctgatataaaggaaaaagatcctgtagttcataattgttccgttgaaccatctaacagtggaaaattggagtcatgcccttatgactttgaagaaatttgtagaaaatttaccacaaatgattcaatcaaggagacggtgaaggagattgggctgcttggctcaaatggaattccatcttgtgaatgccaagctgtgtctgccaaaatgtcagggcaagagggatctcaagttggccaagatttttctggcaatgcaggtgatgaggagttgccaaaatctaagaagcctgtcagggatagtacttcagccaaggaagcaccttcaacagacatatccacaagattgctaactgttaatgggggattggttccagagtcatcactgatgcctgtaataggcaggaattttcatatcctgaagcagctaaagattaacttgcttgacatagaagcagctttgcctgaggaagcattcagagcctcaaagtctcagcaaataagaagacgttcatggcgtgcttttgtgaaggatgcagaattaatatcatatgtggtattggcaatcaatttcttgcagagcatgataaaagccgagtttctgaagaaagattggtggtactggtcctccttcactgcagctatcaagacaacaactgtatcatcgcttgcgctcaggatttacaccctcgacgactgcatcatgtacacaaaggatccagctccaaacctgcagccagctgacaatgcaaggtctggaaacaaggggaagaggaagaaagacatagattcatgagcatcgtaaccacaatgctcctggcttcccctgtagattctatctatctgcatttagaggcttctcagttctctggcagcataacaacgcggtcaggtagattggagatatagatggtagtggtcaggtagattggagatatagatggtagtgatacaggtcgcaacctatgtgtgacctctttcttactgtacattccagtgtcacagcaagggtgcagccatgatttgcccgtttcagtcttgtcctacttactggcctgccattgcgcgatatctgctgttgctaaggctcaatctctgtaaattctactcgagggatggcaccgggcaagtgctggtgtttaatctgttgcccgatgtgttgatctgttctaggggattagaggaggaatgctaggtcggtaggatttaccccatttctaccctgcttcattttattttagtggtggcagtgggtagtcgtagttttttcttttcttttcttttcagagctgggattgtttgatggatgtcccctgcggcatctgactgctttagggaatttgatacatgacgagtgtaatattttttttgacatagaagttgtaactaaaccgaaactaataatgatgaatgaaaatgaatccctgttcctttccccgtttcttcatgttggctggtcgcatgtgccattcaacttgggtgtggggaaaggttgagttgaac

SEQ ID NO: 46024 - DNA, 6991 bp, Zea Mays
cttccttaacctcagcgttgctttgctcgtgctgctctctgttccgccgctcgccacaaaacccctctcccctcacgctccccacccacctcctccccctcgaggcaatgccgagcgcccttaacctagcctgagttcgagctcaatccccattccgtcatggatcggccgccgcatctcgtcatcgacctcaacgaggccccgccgccgccgtcgagcgacaccccgccggcgcaggccccgtcgccgccgcaggagttggctccgcccgtccaagctcctcctcctcctcctcctccgccgccgccgccgcagtttcctcctctcctgccgccgcagctgcccctgggtgcgcccaaccaacaggtgcggctccagcaggaggccctcgacgtggtgcttcgggtccaccgccccctcgaactgaggaatacaccttttgggcccatagggaacgtgcccgccggcttgctccctggtctggggctgccgctgctccctctgcagccgccggcgcctcaccctggggaggcgggttggggcaacccgccggccccctgctcgtcctgcggtcgccaggagattctggggggaaccttggtctgcgacgcgtgtgacagggggttccatcccaactgcgtccgcgtctggccgcctctcttccccccgcccccgccacccggcccccctggcgcccggcggccccgtgccgccgccaacgaggactggatctgccctgcgtgtgagaggcgtggcgctcgctccacccgctggaagctaggtgcagttgagcttgacatcaacgctgctccgccagaggaccccgtcacagtcatcgccaatgacatccgcagacaaaatatcaccgatggaccccagttgacagttgccaacttgccacattttgaggggggtcacttgcagaatactactctttatgatggaatgcagtttatgccagcatttgatcttgcccagtgttttggcatgagacaaaattttacttccatggatcaagatttaattgctgatggaaacgtaccacaaagatcagctcatttacgcagaagaagagatcttccacaaacatcaacattacccaaggttgcagtgaaccatgagttaggaagtgctggcacgtctatggatccatcattttttaacaatacaatcaaacaaagtcctagtgaaaacagaagttccttaaagcctccaatatttcttatggagaacagtaatcatcagccacatcatcatacagttgcactacctgttcaatatagtgattttttcattaccagcttgggagaaattgacaatcggacaagttaccacaattcataccagatatggccagttgggtttacgtcttactggcatgatagagttactggttcactgtttgagtgtgaagtgcacgatggagggaattttggacctttgtttaagatgagaaggttaccgtgttcagcattccaacttccggatgcatcaaccacagtgtgcctaaatgttgttaggaacgctgatacaatagaaacgaaggaaggtagtgatttgattgaagatactgccaatgatgctaatgataatatttctatgctcttatcagatttctctgagacgaatcaagatttcttatcatgtctaggtaatgatttggagggtaaagaaagtttagggtgcagtaatgtagaaactaaggatatgacagtgccagatgtgctgtcagatcctggctctttcagttgggcaccgaccaatgatgcaaatatgtatgacaaaattggtgacttcagttatgaaggaacatcaccttcctcagtctggaggatgatttcttgtgctatgatggaagcctgtgaaaaaatgtacaaggagcatggccatttggtattattctgcactcacagtagtgaaaaatctccatttgactatgaaagtggacctcagcgcactgatggtcctttcaatctattggctaagttttgctcatcaaatgggcctaaggtaccacagtttatagaaaaggagaatgatgtgcagtcaacttgtgcattacttaaagaatggctgtatccagacagaatcgggtttgatttggaatttgttcaagaatttgtggaatctcttcctaaatccggggcttgttcacactatcagttcttgtgtaacaggactggaattaactcttcactgacgattgcaagtggcacactggtagctgttaataaaaatagtccaatgcatgcgagacatggatctgtagtgagtgggccgcaggatcatgctcagcctagctcttctagcatccgtgagcttcctccaggaaatcctattagccgcaagcttgcaccagaattggctggggatgttttccagatattggagtttcttggacgatttgctgaaatcatcggcctgaaagaacttccttcaattgagcaagtagaagatgaactcattgacccatggccaatgcatccaaataaaaatgacatccacaactacatggatcacaatccaccgatgaattcacctgctaatgtttcttcatcgtactcgaatggcgaatcaggtataacttctattgaagaaatggtatatgtgtctattccagttgagacttcttcagcacgagaagctgctcaaaataagttggctgcccagacacttgggagatgtagtggtttagtgctgcctgagatccacattgcactcttgaaggttcttttcaccgaacttgtatctagagtcgcaatttttgtggatccaagcattgatttaaaagaatcaaaatccagacgaggaagaaaaagggacactgatactctaacaagagagttaaagattgatatgctgactgctaacaatttgacttggccggagttggctagaagatatattttagctgtttcttccatgagtggctgcatggatttatctgatatttctagtcgagaaggagtgaaattgttccgctgcctacaaggtgatggaggtatcctgtgtggagctctacccggggttgttggcatggagaaggatgcatcgctacttgcagaggctgaaacattgatatgcaattcttcagcaaatgaagggaataccgtctttatgatggattacaaggatactgatattgtagattctcctgaggagcctgctagtgacactacgttgccagattgggtgaaatcattggagcctgtgagaaaattgccaactaatgtgggaacaagaataaggaagtgtgtttatgaagctttggagagaaaacctccagaatgggcaaggaaaattttggagcactcaatcagtaaagaggtctacaaggaaagctgttttatccgtcttgacagaggcatgccgtacaaaagtaccccagaatacagaaaaaccaagaaaagagagaaatattatctccatctcagaggctgtcctgaaaaagtgccgtattgccctgcggcgtgctatttcctctgatgaatcaaagcagtttgctaatttgcttggaacaactctaacaaattccaatgagaatgaagatgagggcatccttggatttcctggtaatttgtaatctgcaaactgcatttgctgatcgacctgaagtgctgataatggttgttgcactgtctgagagttttgagtcattgtataagacagaggtacaagaccttgttgagaaatttgacagatatctaagcaatgaaaatgatagctcagaaatccaccaggagctacaagatgctctcacggcagcaaacaataaactgccgaaagcaccatgggaggatggtgtctgcaaagtctgtggaatcgaccgtgatgacgagagcgttcttctatgtgataattgtgactctgaataccacacttattgcctgaacccaccactggcacgcataccgcttggaaactggtattgtccatcatgtactgcccaaactcatgttgcagtgcaagaacaaaagaagtgccttggggaggaagctcatgtttttattgagaaactcaacaagttagctgttgcgatggatgagaaagagtactgggagctaaccgtagcagagagaatctatttgctaaaatttctatgtgacgaattgcacaacacagctctcatcagagaacatctagatcagtgttcagacaagtcaaatgatctccagcagaaattacgtcacctgaattatgaactgaaagagttaaggtatcgggtagaaataaaaaatccttatgccacacaaagtagatggatgaaaaatgaccaagtaagcaatagttcaggactcgtggagaatcagcagcgtgctatgcccacagcctcagagcatcttgaagaggctgaacaggttaatgttggagttaacctgaacaaccctgctgaaggggttcctgctgcactattggatgtgggtaaaccttgcagtactgacaatggcatatccagcacatctgttattgaaggaaataaatctttggggctttcagaacaaccatcaaagataattactgaccagactgatcgggactctattgccgaaggatccaatagttgcgagaaatcattagttggcaaaagtggtacttgtgatccgaatgtgggagagactcatgctgctacagttatcaatgcaccaaatggagatttacctgatgaaaatgctatgacattgtcccaagataatattgaaacatcgacatctaaactggttgaccatgatgctgatatgaacgaatcaaataatttattggagaggatttcacagttgcatggttcaattagcacagtagagtcacagcttagtatggcatccttgagaggagagtgcctgggtagggattctgttggtcgattgtactgggttacaggaagaccttgtaagcgtcctcgtcttgttgcagatggaagcatgatgatacccaaggacagagacattagcatggttacaagccattctcagtcaacattcgatagaggttggaattcggcatcacttgttatttatgaatctgatgaagaaatgaagtgtcttgttgactggctaagggacattgatccaagggagaaggatctgaaagactctatcttgcactggcaaaagtctatttatcgccaggctagtttccccatcactgatcctccagtgtccaagttttcaaagagtgagccacttatggagcttccaaacaccaatgcttttatagttttggagcaaaagtatggtctgcaaacggatcaggacactagtgagctatccaaaaggagaggaacgaagtcaaggtcgggttctgaagaaagagtatatcgctgcgactgtttagagcctatatggccttctcgacaccattgcttaaattgtcatgaaacttatctcacattgatggaatatgaagggcataatggtggaaaatgcaccagcagtaacgactgtcctaatgaaagtaaagaaattgatgagccgaaactgaagggcagcaagtctgatataaaggaaaaagatcctgtagttcataattgttccgttgaaccatctaacagtggaaaattggagtcatgcccttatgactttgaagaaatttgtagaaaatttaccacaaatgattcaatcaaggagacggtgaaggagattgggctgcttggctcaaatggaattccatcttgtgaatgccaagctgtgtctgccaaaatgtcagggcaagagggatctcaagttggccaagatttttctggcaatgcaggtgatgaggagttgccaaaatctaagaagcctgtcagggatagtacttcagccaaggaagcaccttcaacagacatatccacaagattgctaactgttaatgggggattggttccagagtcatcactgatgcctgtaataggcaggaattttcatatcctgaagcagctaaagattaacttgcttgacatagaagcagctttgcctgaggaagcattcagagcctcaaagtctcagcaaataagaagacgttcatggcgtgcttttgtgaaggatgcagaattaatatcatatgtggtattggcaatcaatttcttgcagagcatgataaaagccgagtttctgaagaaagattggtggtactggtcctccttcactgcagctatcaagacaacaactgtatcatcgcttgcgctcaggatttacaccctcgacgactgcatcatgtacacaaaggatccagctccaaacctgcagccagctgacaatgcaaggtctggaaacaaggggaagaggaagaaagacatagattcatgagcatcgtaaccacaatgctcctggcttcccctgtagattctatctatctgcatttagaggcttctcagttctctggcagcataacaacgcggtcaggtagattggagatatagatggtagtggtcaggtagattggagatatagatggtagtgatacaggtcgcaacctatgtgtgacctctttcttactgtacattccagtgtcacagcaagggtgcagccatgatttgcccgtttcagtcttgtcctacttactggcctgccattgcgcgatatctgctgttgctaaggctcaatctctgtaaattctactcgagggatggcaccgggcaagtgctggtgtttaatctgttgcccgatgtgttgatctgttctaggggattagaggaggaatgctaggtcggtaggatttaccccatttctaccctgcttcattttattttagtggtggcagtgggtagtcgtagttttttcttttcttttcttttcagagctgggattgtttgatggatgtcccctgcggcatctgactgctttagggaatttgatacatgacgagtgtaatattttttttgacatagaagttgtaactaaaccgaaactaataatgatgaatgaaaatgaatccctgttcctttccccgtttcttcatgttggctggtcgcatgtgccattcaacttgggtgtggggaaaggttgagttgaac

SEQ ID NO: 46025 - DNA, 7312 bp, Zea Mays
cccacatcaaccctcatagcatccgctgcgctgtcccgaacacgcaccaggcttgccactccaggcacgcactgtcctttctcctttcccttccgtttcatccgggcgcatggacctgcgctgcgcggttcggctgcgctcccgtccgaatcgcgccccttccttaacctcagcgttgctttgctcgtgctgctctctgttccgccgctcgccacaaaacccctctcccctcacgctccccacccacctcctccccctcgaggcaatgccgagcgcccttaacctagcctgagttcgagctcaatccccattccgtcatggatcggccgccgcatctcgtcatcgacctcaacgaggccccgccgccgccgtcgagcgacaccccgccggcgcaggccccgtcgccgccgcaggagttggctccgcccgtccaagctcctcctcctcctcctcctccgccgccgccgccgcagtttcctcctctcctgccgccgcagctgcccctgggtgcgcccaaccaacaggtgcggctccagcaggaggccctcgacgtggtgcttcgggtccaccgccccctcgaactgaggaatacaccttttgggcccatagggaacgtgcccgccggcttgctccctggtctggggctgccgctgctccctctgcagccgccggcgcctcaccctggggaggcgggttggggcaacccgccggccccctgctcgtcctgcggtcgccaggagattctggggggaaccttggtctgcgacgcgtgtgacagggggttccatcccaactgcgtccgcgtctggccgcctctcttccccccgcccccgccacccggcccccctggcgcccggcggccccgtgccgccgccaacgaggactggatctgccctgcgtgtgagaggcgtggcgctcgctccacccgctggaagctaggtgcagttgagcttgacatcaacgctgctccgccagaggaccccgtcacagtcatcgccaatgacatccgcagacaaaatatcaccgatggaccccagttgacagttgccaacttgccacattttgaggggggtcacttgcagaatactactctttatgatggaatgcagtttatgccagcatttgatcttgcccagtgttttggcatgagacaaaattttacttccatggatcaagatttaattgctgatggaaacgtaccacaaagatcagctcatttacgcagaagaagagatcttccacaaacatcaacattacccaaggttgcagtgaaccatgagttaggaagtgctggcacgtctatggatccatcattttttaacaatacaatcaaacaaagtcctagtgaaaacagaagttccttaaagcctccaatatttcttatggagaacagtaatcatcagccacatcatcatacagttgcactacctgttcaatatagtgattttttcattaccagcttgggagaaattgacaatcggacaagttaccacaattcataccagatatggccagttgggtttacgtcttactggcatgatagagttactggttcactgtttgagtgtgaagtgcacgatggagggaattttggacctttgtttaagatgagaaggttaccgtgttcagcattccaacttccggatgcatcaaccacagtgtgcctaaatgttgttaggaacgctgatacaatagaaacgaaggaaggtagtgatttgattgaagatactgccaatgatgctaatgataatatttctatgctcttatcagatttctctgagacgaatcaagatttcttatcatgtctaggtaatgatttggagggtaaagaaagtttagggtgcagtaatgtagaaactaaggatatgacagtgccagatgtgctgtcagatcctggctctttcagttgggcaccgaccaatgatgcaaatatgtatgacaaaattggtgacttcagttatgaaggaacatcaccttcctcagtctggaggatgatttcttgtgctatgatggaagcctgtgaaaaaatgtacaaggagcatggccatttggtattattctgcactcacagtagtgaaaaatctccatttgactatgaaagtggacctcagcgcactgatggtcctttcaatctattggctaagttttgctcatcaaatgggcctaaggtaccacagtttatagaaaaggagaatgatgtgcagtcaacttgtgcattacttaaagaatggctgtatccagacagaatcgggtttgatttggaatttgttcaagaatttgtggaatctcttcctaaatccggggcttgttcacactatcagttcttgtgtaacaggactggaattaactcttcactgacgattgcaagtggcacactggtagctgttaataaaaatagtccaatgcatgcgagacatggatctgtagtgagtgggccgcaggatcatgctcagcctagctcttctagcatccgtgagcttcctccaggaaatcctattagccgcaagcttgcaccagaattggctggggatgttttccagatattggagtttcttggacgatttgctgaaatcatcggcctgaaagaacttccttcaattgagcaagtagaagatgaactcattgacccatggccaatgcatccaaataaaaatgacatccacaactacatggatcacaatccaccgatgaattcacctgctaatgtttcttcatcgtactcgaatggcgaatcagcacgagaagctgctcaaaataagttggctgcccagacacttgggagatgtagtggtttagtgctgcctgagatccacattgcactcttgaaggttcttttcaccgaacttgtatctagagtcgcaatttttgtggatccaagcattgatttaaaagaatcaaaatccagacgaggaagaaaaagggacactgatactctaacaagagagttaaagattgatatgctgactgctaacaatttgacttggccggagttggctagaagatatattttagctgtttcttccatgagtggctgcatggatttatctgatatttctagtcgagaaggagtgaaattgttccgctgcctacaaggtgatggaggtatcctgtgtggagctctacccggggttgttggcatggagaaggatgcatcgctacttgcagaggctgaaacattgatatgcaattcttcagcaaatgaagggaataccgtctttatgatggattacaaggatactgatattgtagattctcctgaggagcctgctagtgacactacgttgccagattgggtgaaatcattggagcctgtgagaaaattgccaactaatgtgggaacaagaataaggaagtgtgtttatgaagctttggagagaaaacctccagaatgggcaaggaaaattttggagcactcaatcagtaaagaggtctacaagggtaatgcatctggaccaaccaagaaagctgttttatccgtcttgacagaggcatgccgtacaaaagtaccccagaatacagaaaaaccaagaaaagagagaaatattatctccatctcagaggctgtcctgaaaaagtgccgtattgccctgcggcgtgctatttcctctgatgaatcaaagcagtttgctaatttgcttggaacaactctaacaaattccaatgagaatgaagatgagggcatccttggatttcctggtatggtatcccgccctttggatttccgcacaattgatataaggttggctaagggagcttatcgcggatcttgggaggcttttcttgatgatgtacaagaagtaatttgtaatctgcaaactgcatttgctgatcgacctgaagtgctgataatggttgttgcactgtctgagagttttgagtcattgtataagacagaggtacaagaccttgttgagaaatttgacagatatctaagcaatgaaaatgatagctcagaaatccaccaggagctacaagatgctctcacggcagcaaacaataaactgccgaaagcaccatgggaggatggtgtctgcaaagtctgtggaatcgaccgtgatgacgagagcgttcttctatgtgataattgtgactctgaataccacacttattgcctgaacccaccactggcacgcataccgcttggaaactggtattgtccatcatgtactgcccaaactcatgttgcagtgcaagaacaaaagaagtgccttggggaggaagctcatgtttttattgagaaactcaacaagttagctgttgcgatggatgagaaagagtactgggagctaaccgtagcagagagaatctatttgctaaaatttctatgtgacgaattgcacaacacagctctcatcagagaacatctagatcagtgttcagacaagtcaaatgatctccagcagaaattacgtcacctgaattatgaactgaaagagttaaggtatcgggtagaaataaaaaatccttatgccacacaaagtagatggatgaaaaatgaccaagtaagcaatagttcaggactcgtggagaatcagcagcgtgctatgcccacagcctcagagcatcttgaagaggctgaacaggttaatgttggagttaacctgaacaaccctgctgaaggggttcctgctgcactattggatgtgggtaaaccttgcagtactgacaatggcatatccagcacatctgttattgaaggaaataaatctttggggctttcagaacaaccatcaaagataattactgaccagactgatcgggactctattgccgaaggatccaatagttgcgagaaatcattagttggcaaaagtggtacttgtgatccgaatgtgggagagactcatgctgctacagttatcaatgcaccaaatggagatttacctgatgaaaatgctatgacattgtcccaagataatattgaaacatcgacatctaaactggttgaccatgatgctgatatgaacgaatcaaataatttattggagaggatttcacagttgcatggttcaattagcacagtagagtcacagcttagtatggcatccttgagaggagagtgcctgggtagggattctgttggtcgattgtactgggttacaggaagaccttgtaagcgtcctcgtcttgttgcagatggaagcatgatgatacccaaggacagagacattagcatggttacaagccattctcagtcaacattcgatagaggttggaattcggcatcacttgttatttatgaatctgatgaagaaatgaagtgtcttgttgactggctaagggacattgatccaagggagaaggatctgaaagactctatcttgcactggcaaaagtctatttatcgccaggctagtttccccatcactgatcctccagtgtccaagttttcaaagagtgagccacttatggagcttccaaacaccaatgcttttatagttttggagcaaaagtatggtctgcaaacggatcaggacactagtgagctatccaaaaggagaggaacgaagtcaaggtcgggttctgaagaaagagtatatcgctgcgactgtttagagcctatatggccttctcgacaccattgcttaaattgtcatgaaacttatctcacattgatggaatatgaagggcataatggtggaaaatgcaccagcagtaacgactgtcctaatgaaagtaaagaaattgatgagccgaaactgaagggcagcaagtctgatataaaggaaaaagatcctgtagttcataattgttccgttgaaccatctaacagtggaaaattggagtcatgcccttatgactttgaagaaatttgtagaaaatttaccacaaatgattcaatcaaggagacggtgaaggagattgggctgcttggctcaaatggaattccatcttgtgtaccttcacctgcatatttccttgacccgccagttctgctaaatgaaagtaaaagaaatgacgataaaccaaatgattggacttcctcattgcaggaatgccaagctgtgtctgccaaaatgtcagggcaagagggatctcaagttggccaagatttttctggcaatgcaggtgatgaggagttgccaaaatctaagaagcctgtcagggatagtacttcagccaaggaagcaccttcaacagacatatccacaagattgctaactgttaatgggggattggttccagagtcatcactgatgcctgtaataggcaggaattttcatatcctgaagcagctaaagattaacttgcttgacatagaagcagctttgcctgaggaagcattcagagcctcaaagtctcagcaaataagaagacgttcatggcgtgcttttgtgaaggatgcagaattaatatcatatgtggtattggcaatcaatttcttgcagagcatgataaaagccgagtttctgaagaaagattggtggtactggtcctccttcactgcagctatcaagacaacaactgtatcatcgcttgcgctcaggatttacaccctcgacgactgcatcatgtacacaaaggatccagctccaaacctgcagccagctgacaatgcaaggtctggaaacaaggggaagaggaagaaagacatagattcatgagcatcgtaaccacaatgctcctggcttcccctgtagattctatctatctgcatttagaggcttctcagttctctggcagcataacaacgcggtcaggtagattggagatatagatggtagtggtcaggtagattggagatatagatggtagtgatacaggtcgcaacctatgtgtgacctctttcttactgtacattccagtgtcacagcaagggtgcagccatgatttgcccgtttcagtcttgtcctacttactggcctgccattgcgcgatatctgctgttgctaaggctcaatctctgtaaattctactcgagggatggcaccgggcaagtgctggtgtttaatctgttgcccgatgtgttgatctgttctaggggattagaggaggaatgctaggtcggtaggatttaccccatttctaccctgcttcattttattttagtggtggcagtgggtagtcgtagttttttcttttcttttcttttcagagctgggattgtttgatggatgtcccctgcggcatctgactgctttagggaatttgatacatgacgagtgtaatattttttttgacatagaagttgtaactaaaccgaaactaataatgatgaatgaaaatgaatccctgttcctttccccgtttcttcatgttggctggtcgcatgtgccattcaacttgggtgtggggaaaggttgagttgaac

SEQ ID NO: 46026 - DNA, 1617 bp, Zea Mays
ccacgatatttttcgtcggggtcgtcgtcgtctgcaccgaagatggcgagcgcgacggcgccctccaagcgaaacgccgctttccactagttcggcattccaccgctatactgctccctctcctcttcccaggctatatcgagctcccttccatctcctcctccctcgccgccgatgggtgtggctatttagtagagcagtgcgcgccatgtgtccgccactggctcacggtcacggacctccctcctcttttcttctattgcctgttcatcccgcccatgcctcctcgttcttcctctccaccgccgctcgcactgatccctcttcttgctgccggtcgcgggcaggcgatggctctgggtgtgcatggctcggatgaagtacaccagcgctgccatcggcttacatgcgccagatttcgaggtctgtgtgtcattttggcaccgcacaaccctctcctccttcggccaagacggcacctggacgacgatgtcacgcgtacctctgcgtcgcgcgctatgcgctgctgctcctccggccagtgcagagactggaagacgatgccaccgtgattggccatgacttggtccacgcacataaactgtttgatggtacatcgcactggaatgtgttgttaataagaaagaacaagggtgatgcagtaccttctgttgctactcagttgtgcaggttaatttctgctggcaaggattggtatgggagtttcaaagggaggatgcagtaacttctattgctacttcgctgtaactcagaagacactgtttccagctagcgtgaaggataattctgctcacaaactgaatactctgtttacttactattatcaagtcatttttactgttcgttctccagcggttcacaactttattcttggcagacaacatccgataggttgttttcacctttcaactgagacaacatggtgggcaggcgatgttcttcaacatgcccacatgagcgctgcctccattttctgttggaagacatagagcatatgtcatcagcctccataaaataatgacttgaatccatggtagattcaccatgcaacaacaaatgaagatcatatataaagcatatggctctccaaactcccattcaaggttaggcaaacccaaatccagtagtaggtctccactcacatagtcaaggtacatttgttcatgatccaactacatatctgatatctaggctctgaccgttcaaggacatctacacaacctcgacaactctttgaagaagcgaaagggaaatgtgcccttgggccatttctagtcattttgacgattaaatgctcaacacattactatgaaataacaatctcggtatgagcatgagcataggctgtgatcgagacaaattgaagatgcaagtccaaaagaacacttgttgggtttgagttttttcatacattgcaaatcctattgaaacagaggaacaaatgtatgattctagcacttagtcaattgttttagtgtctaacaatgttcatctaagtactagagaattcttcaagtcgagacaaattgaaggaaatgagtttggctaagtctggccaaacatgggccagtctaggcctcatctgactgtccggcg

SEQ ID NO: 46027 - DNA, 1799 bp, Zea Mays
ctcctcgcgactcaagaagccacgatatttttcgtcggggtcgtcgtcgtctgcaccgaagatggcgagcgcgacggcgccctccaagcgaaacgccgctttccactagttcggcattccaccgctatactgctccctctcctcttcccaggctatatcgagctcccttccatctcctcctccctcgccgccgatgggtgtggctatttagtagagcagtgcgcgccatgtgtccgccactggctcacggtcacggacctccctcctcttttcttctattgcctgttcatcccgcccatgcctcctcgttcttcctctccaccgccgctcgcactgatccctcttcttgctgccggtcgcgggcaggcgatggctctgggtgtgcatggctcggatgaagtacaccagcgctgccatcggcttacatgcgccagatttcgaggtctgtgtgtcattttggcaccgcacaaccctctcctccttcggccaagacggcacctggacgacgatgtcacgcgtacctctgcgtcgcgcgctatgcgctgctgctcctccggccagtgcagagactggaagacgatgccaccgtgattggccatgacttggtccacgcacataaactgtttgatgttgtgcaggttaatttctgctggcaaggattggtatgggagtttcaaagggaggatgcagtaacttctattgctacttcgctgtaactcagaagacactgtttccagctagcgtgaaggataattctgctcacaaactgaatactctgtttacttactattatcaagtcatttttactgttcgttctccagcggttcacaactttattcttggcagacaacatccgataggttgttttcacctttcaactgagacaacatggtgggcaggcgatgttcttcaacatgcccacatgagcgctgcctccattttctgttggaagacatagagcatatgtcatcagcctccataaaataatgacttgaatccatggtagattcaccatgcaacaacaaatgaagatcatatataaagcatatggctctccaaactcccattcaaggttaggcaaacccaaatccagtagtaggtctccactcacatagtcaaggtacatttgttcatgatccaactacatatctgatatctaggctctgaccggtacgttcccgttccaaatttctccatactttacctacattatgtgaaaggttttttacttttgaatgatcacacatagtttccacttagcttcagatacagtgtaagggtgcataattgtcacgtgtaagtctccatttacttagtttatgacatacattttcaaaatgccacaccttttttttaccatagtacataaaggtgaataacttttatacattatttatgttgtagttcaaggacatctacacaacctcgacaactctttgaagaagcgaaagggaaatgtgcccttgggccatttctagtcattttgacgattaaatgctcaacacattactatgaaataacaatctcggtatgagcatgagcataggctgtgatcgagacaaattgaagatgcaagtccaaaagaacacttgttgggtttgagttttttcatacattgcaaatcctattgaaacagaggaacaaatgtatgattctagcacttagtcaattgttttagtgtctaacaatgttcatctaagtactagagaattcttcaagtcgagacaaattgaaggaaatgagtttggctaagtctggccaaacatgggccagtctaggcctcatctgactgtccggcg

SEQ ID NO: 46028 - DNA, 1364 bp, Zea Mays
atggcgtatggttcttctcgcttccttatttttttctctctctctaaaatccatatcaaatgggctcaagttgggcccactgacctaggccaggccaggcccaacccaacgtttccagtgtctcaaaaaccaaccggacgacgacccggcggtcctcacccagtcgtcacccccacggacccttctcaagaaccacttccgccattgcctgcttcgtgcttcttcccaatggcgggtatcgccggcgacgatcccttcggtttcgactccgactccgactccggggacgacggcccggtctgctacgacccattcgaagactgtgatggcgacggggacgaggacgaggacgcgggacttgtcggcggccactttgcgctcagctacgggggcggcgggcagtatcgcatctcagatttcgctttccgcggcggcgaaggagacggaggcgacgtcctcgtgggccagcgccagggacccctgtcctcccacgacgaacccattctcgaaaccctaggccgctcattcgactccgacggaggtctcagccaattctacccccacctctttcctgcatcgcaactcgtcgaggacacctccggggaggaggaggaggaggaggagatgatttcccgaaatgctctgggcggcgtagggtccgaattcgagcggggagcggtcgatgaggagactgccgacgacgacgaggacgggatcgtgctcatgctgaacgggtttaccctcgattcggggccgcctgttggtggcttccagggcccggtggacgccgttgaggaggccaccagcgacgacgatgtgggcgaggtgggtgggctcatgctcagcgggttcgacctccgagcgccagcgccacacgccacgcggcccttccgaatggtggtgggcggcgaggacaccgactccgacgacgccgacctcaacctcgtcgacgctctcgcgcgccgcgtcagggaggctacacggcggctgccggcatcccgtgcggtggtggacggcttaccggaggttgcgctcagcgaccaggaggcctcgcacggctgcgctgtgtgcaaggatgccgttgtggcggggcagagtgtccttaggctcccctgcaaccactacttccatggggagtgcatccgcccgtggcttgccatcaggaacacctgtcctgtctgccggttccagctcccaacgggtgacgctgctgagtatgattcgccacggagcacgactggtggtgttgttgtgtctgtgccgcaacaacacagcgcaccagcacagcatcggggtagatctcaagattttctatccaatatggtgcctatgctgtttccagtttgcatctgaagaatgaaatg

SEQ ID NO: 46029 - DNA, 1192 bp, Zea Mays
aatattctaagacacctggtggacgctgttctcacgaagcccgccgttcggagttctacaatcccaaatagcatcgtcatcgcaaaatgcaggcgctcctactccccgcgcgggccgcgccgccgccgccggcgatccttcggcagcgtgcggtttccgcgtccacgtgtgcgtcgcagggctgccgcctcctactcggtgcctctggttgtctcagctgtggggtaagatctcggctgcgcctcacagtggtggcggcgtcatcgtcctcgtcgggaccgctatacccgacgcctccacccaccgaggaggaggtggagcgggtcaagctcgagcaggttatgaggagactagagaaaacagcaaggtatttcaagaatttgggtaccctggggttctggtcccagttggtgtgcacaattgtctctgctggaattttggcattctctacagttgtaacggggaaggtgacagcaccctttacattctatgcgactgctgctggtattgctgctgcttttatctcatccttctggtcatttggttacatccgtctctctgaaaggcttagaagaacatcaaaggaacctgctaaggcttcagcgaacaccatcctgtcgcatttcctcgggctggcgagctccctggagctgctgcgctcggtgtcgctgcctccagcagaagctgccgcccctgccggggcctgagccatggcccgtgggcggcagggtcaaggaagaaccttcgttccctcggcggcggcggctctggtagacgtagacgctctcgctgttgctgctccggattgtgtgtacagctcgcatcaagcttggtacatactacacacacatcgatgccttgcccttcggttcagctggaaccaacgtgtctgtctgcctagttcccgccgggcgtgaggcgagctcttgcatgagcacttgcgagttgcgaatcacatgatgtgtgtggcgcatgtttgctgtacaagtgagcgactgggttccctcctagtcattgtacccgcttcgctggtcgggtataaaaaacggacagtataaatatccattttttatacggattcgggcccctttaagtctagtttgggaacaccatttttctaacggagtgtttggatcccttcattttagaagaattggaatttactaaataaagtaacttatttagtttggaa

SEQ ID NO: 46030 - DNA, 1367 bp, Zea Mays
aatattctaagacacctggtggacgctgttctcacgaagcccgccgttcggagttctacaatcccaaatagcatcgtcatcgcaaaatgcaggcgctcctactccccgcgcgggccgcgccgccgccgccggcgatccttcggcagcgtgcggtttccgcgtccacgtgtgcgtcgcagggctgccgcctcctactcggtgcctctggttgtctcagctgtggggtaagatctcggctgcgcctcacagtggtggcggcgtcatcgtcctcgtcgggaccgctatacccgacgcctccacccaccgaggaggaggtggagcgggtcaagctcgagcaggttatgaggagactagagaaaacagcaaggtatttcaagaatttgggtaccctggggttctggtcccagttggtgtgcacaattgtctctgctggaattttggcattctctacagttgtaacggggaaggtgacagcaccctttacattctatgcgactgctgctggtattgctgctgcttttatctcatccttctggtcatttggttacatccgtctctctgaaaggcttagaagaacatcaaaggaacctgctaagcctgaaaaatggcattgtgctgaatattctcgggatgggcgccgctgttctgggcatgcaagccaccgttggtgctttggtagcaaaagctctcacaacctctgcagttccctattatcaggctgctgctccaggccaaagccctgtgttggccttagatgttttcctagttcaggcttcagcgaacaccatcctgtcgcatttcctcgggctggcgagctccctggagctgctgcgctcggtgtcgctgcctccagcagaagctgccgcccctgccggggcctgagccatggcccgtgggcggcagggtcaaggaagaaccttcgttccctcggcggcggcggctctggtagacgtagacgctctcgctgttgctgctccggattgtgtgtacagctcgcatcaagcttggtacatactacacacacatcgatgccttgcccttcggttcagctggaaccaacgtgtctgtctgcctagttcccgccgggcgtgaggcgagctcttgcatgagcacttgcgagttgcgaatcacatgatgtgtgtggcgcatgtttgctgtacaagtgagcgactgggttccctcctagtcattgtacccgcttcgctggtcgggtataaaaaacggacagtataaatatccattttttatacggattcgggcccctttaagtctagtttgggaacaccatttttctaacggagtgtttggatcccttcattttagaagaattggaatttactaaataaagtaacttatttagtttggaa

SEQ ID NO: 46031 - DNA, 1282 bp, Zea Mays
aatattctaagacacctggtggacgctgttctcacgaagcccgccgttcggagttctacaatcccaaatagcatcgtcatcgcaaaatgcaggcgctcctactccccgcgcgggccgcgccgccgccgccggcgatccttcggcagcgtgcggtttccgcgtccacgtgtgcgtcgcagggctgccgcctcctactcggtgcctctggttgtctcagctgtggggttatgaggagactagagaaaacagcaaggtatttcaagaatttgggtaccctggggttctggtcccagttggtgtgcacaattgtctctgctggaattttggcattctctacagttgtaacggggaaggtgacagcaccctttacattctatgcgactgctgctggtattgctgctgcttttatctcatccttctggtcatttggttacatccgtctctctgaaaggcttagaagaacatcaaaggaacctgctaaggctcctccacgcgccgatgttgttaatagcctgaaaaatggcattgtgctgaatattctcgggatgggcgccgctgttctgggcatgcaagccaccgttggtgctttggtagcaaaagctctcacaacctctgcagttccctattatcaggctgctgctccaggccaaagccctgtgttggccttagatgttttcctagttcaggcttcagcgaacaccatcctgtcgcatttcctcgggctggcgagctccctggagctgctgcgctcggtgtcgctgcctccagcagaagctgccgcccctgccggggcctgagccatggcccgtgggcggcagggtcaaggaagaaccttcgttccctcggcggcggcggctctggtagacgtagacgctctcgctgttgctgctccggattgtgtgtacagctcgcatcaagcttggtacatactacacacacatcgatgccttgcccttcggttcagctggaaccaacgtgtctgtctgcctagttcccgccgggcgtgaggcgagctcttgcatgagcacttgcgagttgcgaatcacatgatgtgtgtggcgcatgtttgctgtacaagtgagcgactgggttccctcctagtcattgtacccgcttcgctggtcgggtataaaaaacggacagtataaatatccattttttatacggattcgggcccctttaagtctagtttgggaacaccatttttctaacggagtgtttggatcccttcattttagaagaattggaatttactaaataaagtaacttatttagtttggaa

SEQ ID NO: 46032 - DNA, 1270 bp, Zea Mays
cttgtacagttttggagtattttctagcatggagatcttccgacctcagaaggaacatggtttagcgcagtctggtttgaaaggaaaatttaagattacaacaagatgtctatggcttgataatggaagattgttggacgcactctacaaagcagctcatgctgcattgtcaagctgtcctgtgaattgtccacttagtcacatggagaggatggtagctgaaatcttgaggaaaatggtacggaagtatagtgggaagaggcctgacgtcattgcggttgctatggagaacaccacagcaagtttctcagaacacctcgatgctaaatcatctggaaattttggaccttcctcagctactagccatctgagcatgagtccagctatgagtcttgaaggcagttataaaacacacccagacaacccagaggtggaagctgaagaaacccttcctgaggccgcgagaacagcaccggatgatgcaaccacaagttccaatggtgaagcattcttctcttcagatttacatcagcctaaaacattggagcacttctgggagtcattcaaatctcctacagctgttaaaattgcacggattgtcaatggggggaagaagcaaaatcttggcaagattggcataatgggtaaggactcatcaatccagtcagctcccgctccagctaaatcttcaaaaaagaacaagtggaaacctgaggaaatcaagagcttaatacagatgcgtggcgagatgaatgagagatttcagagcgtgaaaggaagaatgatcctgtgggaggagatttccgacaacatgttgaagcaaggaataagtcgtactccggcacagtgcaaatcgctttggacatcgttagttcagaaatacgaggaaagcaaggacgcggagagcatgaagacgtggccgtatttcttggccatggataggatcctatcgcagcaaggggaaatggcaaccaaaggatagagaaggctgtagcttagtggtagacgtttattagaacatttgatatgttgtagcagagcccagtcagtgtagtgaggatataagatgaaatgtactgtgtacaggtactgaggtacagcacctggcaatttattgggaccggattcccttgttctgagtaaggtcgacggtcggtagctcgagatcgagatggcgatttactgtgcgtgtgcatcaatatacatgcttgcggaccacgcttagatcatcagtgtatctgacgtgtcatcgtcaagagtactacattcc

SEQ ID NO: 46033 - DNA, 2258 bp, Zea Mays
ggtcattccagcactcgattcaacaacaccgatttttgcatcatctttcaccatggagctaataaagaagcgtttgaaggagttcgggatcttcctctcatcaaggcttaaggttttaagaattaaaaagagatttcaggctggaccttttgaagttgaacccatccgtgtaactcattcaattcctgactgttgtggcttagtgcttcgttgtggtgatggcataattttccatactggtgactggaaaattgatgaatcaccagtggatggaaaaaattttgaccgacaagcattggaggaactctctaaagaaggtgttactcttatgatgagtgactcaacaaatgttctatcccctggaagatcaatcagcgaatctgttgttgctggttcattgttgcgacatatttcggaagcaaaaggaagagtaattacgacacagtttgcctcaaacatacatcgaattgggagcatcaaagctgctgcagatttaactggtcgaaaaatggtatttgttggaatgtcactcaggacataccttgaagctgctttcaaggatggaaaggcaccactggatccatcaaccttgatcaaggtagaggatatggatgcgtatgcccctaaagatcttttggttgtcactacaggttcacaaggagagccacgtgcagctctgaatcttgcatcttatgggggaagtcacgctcttaaactatcaaaagaggatgtccttctttattcagctaaggttattcctggaaatgagacacgggtaatgaagatgatgaatcgtctcactgatcttggcccaaaaattatcatgggtaaagattctggcctgcatacctctgggcatgcctaccgagaggagctggaggaagttcttcggattgttaaaccacaacatttcttgcctgttcatggagaactcctatttctcaaagaacatgaatcacttggaagatcaactggcatacggcacacaactgtaataaaaaatggagaaatgcttggtgtatcgcatctaagaaacagaagagttttgtccaatgggtttgtttcattagggaaggaggatcttcagctcatgtatagtgatggtgataaggcttttggtacatccactgatctctgcattgatgagagactgagaatcgcatctgatggcattatttttgtcagcatggagatcttccgacctcagaaggaacatggtttagcgcagtctggtttgaaaggaaaatttaagattacaacaagatgtctatggcttgataatggaagattgttggacgcactctacaaagcagctcatgctgcattgtcaagctgtcctgtgaattgtccacttagtcacatggagaggatggtagctgaaatcttgaggaaaatggtacggaagtatagtgggaagaggcctgacgtcattgcggttgctatggagaacaccacagcaagtttctcagaacacctcgatgctaaatcatctggaaattttggaccttcctcagctactagccatctgagcatgagtccagctatgagtcttgaaggcagttataaaacacacccagacaacccagaggtggaagctgaagaaacccttcctgaggccgcgagaacagcaccggatgatgcaaccacaagttccaatgctgttaaaattgcacggattgtcaatggggggaagaagcaaaatcttggcaagattggcataatggatgcgtggcgagatgaatgagagatttcagagcgtgaaaggaagaatgatcctgtgggaggagatttccgacaacatgttgaagcaaggaataagtcgtactccggcacagtgcaaatcgctttggacatcgttagttcagaaatacgaggaaagcaaggacgcggagagcatgaagacgtggccgtatttcttggccatggataggatcctatcgcagcaaggggaaatggcaaccaaaggatagagaaggctgtagcttagtggtagacgtttattagaacatttgatatgttgtagcagagcccagtcagtgtagtgaggatataagatgaaatgtactgtgtacaggtactgaggtacagcacctggcaatttattgggaccggattcccttgttctgagtaaggtcgacggtcggtagctcgagatcgagatggcgatttactgtgcgtgtgcatcaatatacatgcttgcggaccacgcttagatcatcagtgtatctgacgtgtcatcgtcaagagtactacattcc

SEQ ID NO: 46034 - DNA, 2465 bp, Zea Mays
cttatttccttcaaacatttttactgttaataggtcattccagcactcgattcaacaacaccgatttttgcatcatctttcaccatggagctaataaagaagcgtttgaaggagttcgggatcttcctctcatcaaggcttaaggttttaagaattaaaaagagatttcaggctggaccttttgaagttgaacccatccgtgtaactcattcaattcctgactgttgtggcttagtgcttcgttgtggtgatggcataattttccatactggtgactggaaaattgatgaatcaccagtggatggaaaaaattttgaccgacaagcattggaggaactctctaaagaaggtgttactcttatgatgagtgactcaacaaatgttctatcccctggaagatcaatcagcgaatctgttgttgctggttcattgttgcgacatatttcggaagcaaaaggaagagtaattacgacacagtttgcctcaaacatacatcgaattgggagcatcaaagctgctgcagatttaactggtcgaaaaatgaacaggtatttgttggaatgtcactcaggacataccttgaagctgctttcaaggatggaaaggcaccactggatccatcaaccttgatcaaggtagaggatatggatgcgtatgcccctaaagatcttttggttgtcactacaggttcacaaggagagccacgtgcagctctgaatcttgcatcttatgggggaagtcacgctcttaaactatcaaaagaggatgtccttctttattcagctaaggttattcctggaaatgagacacgggtaatgaagatgatgaatcgtctcactgatcttggcccaaaaattatcatgggtaaagattctggcctgcatacctctgggcatgcctaccgagaggagctggaggaagttcttcggattgttaaaccacaacatttcttgcctgttcatggagaactcctatttctcaaagaacatgaatcacttggaagatcaactggcatacggcacacaactgtaataaaaaatggagaaatgcttggtgtatcgcatctaagaaacagaagagttttgtccaatgggtttgtttcattagggaaggaggatcttcagctcatgtatagtgatggtgataaggcttttggtacatccactgatctctgcattgatgagagactgagaatcgcatctgatggcattatttttgtcagcatggagatcttccgacctcagaaggaacatggtttagcgcagtctggtttgaaaggaaaatttaagattacaacaagatgtctatggcttgataatggaagattgttggacgcactctacaaagcagctcatgctgcattgtcaagctgtcctgtgaattgtccacttagtcacatggagaggatggtagctgaaatcttgaggaaaatggtacggaagtatagtgggaagaggcctgacgtcattgcggttgctatggagaacaccacagcaagtttctcagaacacctcgatgctaaatcatctggaaattttggaccttcctcagctactagccatctgagcatgagtccagctatgagtcttgaaggcagttataaaacacacccagacaacccagaggtggaagctgaagaaacccttcctgaggccgcgagaacagcaccggatgatgcaaccacaagttccaatggtgaagcattcttctcttcagatttacatcagcctaaaacattggagcacttctgggagtcattcaaatctcctacagctgttaaaattgcacggattgtcaatggggggaagaagcaaaatcttggcaagattggcataatgggtaaggactcatcaatccagtcagctcccgctccagctaaatcttcaaaaaagaacaagtggaaacctgaggaaatcaagagcttaatacagatgcgtggcgagatgaatgagagatttcagagcgtgaaaggaagaatgatcctgtgggaggagatttccgacaacatgttgaagcaaggaataagtcgtactccggcacagtgcaaatcgctttggacatcgttagttcagaaatacgaggaaagcaaggacgcggagagcatgaagacgtggccgtatttcttggccatggataggatcctatcgcagcaaggggaaatggcaaccaaaggatagagaaggctgtagcttagtggtagacgtttattagaacatttgatatgttgtagcagagcccagtcagtgtagtgaggatataagatgaaatgtactgtgtacaggtactgaggtacagcacctggcaatttattgggaccggattcccttgttctgagtaaggtcgacggtcggtagctcgagatcgagatggcgatttactgtgcgtgtgcatcaatatacatgcttgcggaccacgcttagatcatcagtgtatctgacgtgtcatcgtcaagagtactacattcc

SEQ ID NO: 46035 - DNA, 2294 bp, Zea Mays
atcataagctcttatttccttcaaacatttttactgttaataggtcattccagcactcgattcaacaacaccgatttttgcatcatctttcaccatggagctaataaagaagcgtttgaaggagttcgggatcttcctctcatcaaggcttaaggttttaagaattaaaaagagatttcaggctggaccttttgaagttgaacccatccgtgtaactcattcaattcctgactgttgtggcttagtgcttcgttgtggtgatggcataattttccatactggtgactggaaaattgatgaatcaccagtggatggaaaaaattttgaccgacaagcattggaggaactctctaaagaaggtgttactcttatgatgagtgactcaacaaatgttctatcccctggaagatcaatcagcgaatctgttgttgctggttcattgttgcgacatatttcggaagcaaaaggaagagtaattacgacacagtttgcctcaaacatacatcgaattgggagcatcaaagctgctgcagatttaactggtcgaaaaatggtatttgttggaatgtcactcaggacataccttgaagctgctttcaaggatggaaaggcaccactggatccatcaaccttgatcaaggtagaggatatggatgcgtatgcccctaaagatcttttggttgtcactacaggttcacaaggagagccacgtgcagctctgaatcttgcatcttatgggggaagtcacgctcttaaactatcaaaagaggatgtccttctttattcagctaaggttattcctggaaatgagacacgggtaatgaagatgatgaatcgtctcactgatcttggcccaaaaattatcatgggtaaagattctggcctgcatacctctgggcatgcctaccgagaggagctggaggaagttcttcggattgttaaaccacaacatttcttgcctgttcatggagaactcctatttctcaaagaacatgaatcacttggaagatcaactggcatacggcacacaactgtaataaaaaatggagaaatgcttggtgtatcgcatctaagaaacagaagagttttgtccaatgggtttgtttcattagggaaggaggatcttcagcatggagatcttccgacctcagaaggaacatggtttagcgcagtctggtttgaaaggaaaatttaagattacaacaagatgtctatggcttgataatggaagattgttggacgcactctacaaagcagctcatgctgcattgtcaagctgtcctgtgaattgtccacttagtcacatggagaggatggtagctgaaatcttgaggaaaatggtacggaagtatagtgggaagaggcctgacgtcattgcggttgctatggagaacaccacagcaagtttctcagaacacctcgatgctaaatcatctggaaattttggaccttcctcagctactagccatctgagcatgagtccagctatgagtcttgaaggcagttataaaacacacccagacaacccagaggtggaagctgaagaaacccttcctgaggccgcgagaacagcaccggatgatgcaaccacaagttccaatgctgttaaaattgcacggattgtcaatggggggaagaagcaaaatcttggcaagattggcataatgggtaaggactcatcaatccagtcagctcccgctccagctaaatcttcaaaaaagaacaagtggaaacctgaggaaatcaagagcttaatacagatgcgtggcgagatgaatgagagatttcagagcgtgaaaggaagaatgatcctgtgggaggagatttccgacaacatgttgaagcaaggaataagtcgtactccggcacagtgcaaatcgctttggacatcgttagttcagaaatacgaggaaagcaaggacgcggagagcatgaagacgtggccgtatttcttggccatggataggatcctatcgcagcaaggggaaatggcaaccaaaggatagagaaggctgtagcttagtggtagacgtttattagaacatttgatatgttgtagcagagcccagtcagtgtagtgaggatataagatgaaatgtactgtgtacaggtactgaggtacagcacctggcaatttattgggaccggattcccttgttctgagtaaggtcgacggtcggtagctcgagatcgagatggcgatttactgtgcgtgtgcatcaatatacatgcttgcggaccacgcttagatcatcagtgtatctgacgtgtcatcgtcaagagtactacattcc

SEQ ID NO: 46036 - DNA, 1736 bp, Zea Mays
ctcagaaaacccctcaaattctccgctcccttcgatccacccccgcatcgcaaggagtcctccacttcactcctcctgcccacttccggtgatggccggccgcctcacgggcgccgccgcgtcctcaccgctttcccgcgcgctcctcctcctcgccgcgctcgggctcttctccatctccttcctctcactccgctccctccgccccgcggcggaccccgcgctcgcggccgccgccgacaagtcccgccccctcctccggctccactcctcttcgacggtgtatcactctccggaggcgttcgcggtggggtacgcggagatggagcggagcttcaaggtgtacatctacccggacggcgaccccaaaacattctaccagactcctcgcaagctcacggggaagtacgccagcgagggctacttcttccagaacatccgagagagccggttccgcaccgatgaccccgaccaggcgcacctctttttcgtccccatatcgccccacaagatgcgcggcaagggtacttcatatgagaatatgacggtgatagttaaggactacgtagaaggtttgataaacaagtatccttactggaacaggacactaggagcagaccacttcttcgtcacctgccatgatgtgggtgtgagagcatttgaaggacttaaattcatggtgaaaaactctattagagttgtatgttcgccaagctataatgttgactttataccgcataaggatattgcccttcctcaagtactgcagccgtttgccctacacgaaggaggaaatgatattgacaacagggtaattcttggcttttgggctggccatcgcaattccaaaataagggttatcctagcacgagtttgggagaatgacacagaacttgctatcagcaacaatcggatcagtagagctattggagagctagtttatcagaagcagttttaccgtaccaagttctgtatctgtcctggtggttcacaagttaacagtgcacgtatatctgactcaatacactatggttgtgttcctgttatacttagggagagagatgtgtatcaactgaagaatatcttgaaatctatatcacaggaggagtttatttcattgcataaatcgctagttcaggtgcagaaacactttgtgtggcattcacctcccgtctcctacgatgcattccacatggttatgtatgaactgtggttgcgtcataatgtaattaagtactgaagcctctcagcctcttgagttttgattgataacccaaatgactgatctatcagaaagacactaccaagtctgacagcctgctgttgctaccttgaaaacggcaatttggttatttgctctttgaatatccagctggatggatcattgaatataatgttagctatgcatggtgcaacgaagagcatgtccaagaaagagttggccgctgtccagcatatatgacaaaactgtagtcctggttaattgatagattagctgattcttttaacaatagttagccttctcatatttcaatcttttcttatatttcacagaacagcttggttgattgtatgtagtttccccgtgcatttttttttgttcaatggcttcaggcatgtaaggttgtctcacataacaacgttttgcacggctatatgtacggtctgctggagagagcctaagtaatgcatgtataatacaatattattgataagaaacatagtttaattccttc

SEQ ID NO: 46037 - DNA, 1451 bp, Zea Mays
acgcagggtggctaggagttgagtcgtgcagaagagacaaaggtcctcacttggctaagctagacacgtacgagtgcaggaaacaagataagtcgcggtttgcgacggcgagaagcgccggatgagtgtccactgtccacaagtccagattccaattccagtccgatcgtgagctcagctcagctccgctagtcctctccccgcacgcaccaccaccagcagcagtccagcaccatgggcggcgccctgctcctcacgctgctcctcgcggccgtgcccctctccttgggcggcggcggcggcgcgcacccgggctactccgacgacgacgagagcgcctgcacggtggacgcgggcgcggagctgctgcggcggatggaggagcgcgggcccgacaggcgcatcatcgacatcacgcacgcggtcgtgccggacctgccggcgttcgccacgggggcggtcgcggggcccatgctgcgcctcagggagtccatggcggacgggtccgagtacaacctgtcggagctgcggatggagtgccacaccggcacgcacgtcgacgcgcctggccacatcaaccaggcccacttcgccgccggcctcgacgtcgacacgctcgacctccacgtcctcaacggacctgcattgctagttgatgtgccaagaaacacaaatataacagcgatggaattcctaaacatcccgagaggggttcgccgagttctgttcagaacactgaacactgacaggaagttgatgtggaggaagggaggtgacatgagctacgttgggtttacagaggatggcgcgcagtggttagtcgacaacaccgacataaagctagttggagttgacggtctgtcagtggcatcatttgatcacctgatctctgcccacgtggtctttttcaaaaccccggatataatccctgttgagagcctgaatctggacgacatcgaggcggggatatacatgctgcactgtctacctctcaggctggtcggagccgagggtgcaccgaccagatgcatcctcatcaagtgatcgttcctcggccggcctgctcttgctgccttgctggaggtggcgacactggaccatgccagctgagctggtgctccgtcgtgggtcgcgtggccaatatttggctcgcatgcagtcgtcgatctatatggaacagaacactgcatgcctatgtagatacgcttgtatggacaataaaggaaccgcagtacttctgtcgatgaaatacttttgggtgagccggtaatctaaaacaccaggcctacaggttaagctggaggccctggaaggctgaggctagcggctggggatggatccagatttttattcgaatgctatttttttggtcatatttctttgattgtaaacaaataacatatatgattttctatatctctactactctatatgagtccagtgtaggcgtg

SEQ ID NO: 46038 - DNA, 1062 bp, Zea Mays
tcaacgcttaaaaagtaaaaaccctccggcggcggtggggttcctgttcctccggtggaagctcccggcgctcaaatccggcgaaagaaaagaggggaaagaggcaggagccggctcaaatggacagcggaagcgattccgacggcgctcccgaggagctcaccgccgtccagggtgttgagaagcacgaagagatcagtcaagttgagaaggatagtgccatcagagtaacacgggaaggaaaggagcggaggaaacgctgggcccaacgaagaacatcctctaaaccagataagaaggcaccaaaggaagtagtagaagatgaaggtaccaaacaaagcgaggagacagatactatgcctggaatgctccccactagtgtaattgaaattctagcagctcgtgagaagcaaaccttcgcatcagattctgaggaagaaaatgtaaagcagaaggtccagaaaaggaagaagaggatgaaaactgctgggcctgaaactattctgctgaaagatgtccggtcaacacagcacgtgaagaacgcccttgatttcttggagcaaaggaaaaaacaggttccgagatcaaatgcagttttgaagaatgccagtaaggctttgcgtctcctatcttcgaaagcagatatggtcgagatactttggaccgatgtatttgaatggaatcgatctggcacgtgagatgtgatgcagtatatcctttggtgtggaagtgtgatgattagcacacgtgtgagttttagttatctatttttgtggatttgcgctgcaaatttctgaagaaaactctgaaagatctccaaattttgatagccatgtggcacttcttgtatcagactatcagagggttgtcgtgttgacttgttgtatactctttctattaccattcgtctggagatgttttacctgtgctctgttgggtgcatttgtatctttttaaggttagtttggaaacacaagggattttcattttcctatggagaattagttcattttcccctgtgaaaattgtaatccattggaaaaacggtgttcccaaactcgc

SEQ ID NO: 46039 - DNA, 1178 bp, Zea Mays
caaatctgcgtgtgccaaatgcttaaaacccatctttcgacaaaatttcaaagcccagcacatataccccgctcaaaggcctcggagttcggtctcctctcttccgttgtgtcaacggctcaacgcttaaaaagtaaaaaccctccggcggcggtggggttcctgttcctccggtggaagctcccggcgctcaaatccggcgaaagaaaagaggggaaagaggcaggagccggctcaaatggacagcggaagcgattccgacggcgctcccgaggagctcaccgccgtccagggtgttgagaagcacgaagagatcagtcaagttgagaaggatagtgccatcagagtaacacgggaaggaaaggagcggaggaaacgctgggcccaacgaagaacatcctctaaaccagataagaaggcaccaaaggaagtagtagaagatgaaggtaccaaacaaagcgaggagacagatactatgcctggaatgctccccactagtgtaattgaaattctagcagctcgtgagaagcaaaccttcgcatcagattctgaggaagaaaatgtaaagcagaaggtccagaaaaggaagaagaggatgaaaactgctgggcctgaaactattctgctgaaagatgtccggtcaacacagcacgtgaagaacgcccttgatttcttggagcaaaggaaaaaacaggttccgagatcaaatgcagttttgaagaatgccagtaaggctttgcgtctcctatcttcgaaagatatggtcgagatactttggaccgatgtatttgaatggaatcgatctggcacgtgagatgtgatgcagtatatcctttggtgtggaagtgtgatgattagcacacgtgtgagttttagttatctatttttgtggatttgcgctgcaaatttctgaagaaaactctgaaagatctccaaattttgatagccatgtggcacttcttgtatcagactatcagagggttgtcgtgttgacttgttgtatactctttctattaccattcgtctggagatgttttacctgtgctctgttgggtgcatttgtatctttttaaggttagtttggaaacacaagggattttcattttcctatggagaattagttcattttcccctgtgaaaattgtaatccattggaaaaacggtgttcccaaactcgc

SEQ ID NO: 46040 - DNA, 775 bp, Zea Mays
ctcagtttagagatgaatctgtgctatttgatgtgctagattctgcataatgaaatctttacatctggtggagaccagaatttgattactaggattctgggcaaaagcgaagatgaaactaatcctgagaacaaagatgatggagagtccgatgatgataatgatgatgaaggagacgatgatgatgctgaaaacgaggaggaagatgatggtggtgatgagggatcagatgacaatgagaatgaggaagatgacgatggagatgatgatgatcctgcagccaatggcgaagggggaagcgatgacgacgaagatgatggtggagaggatgaagaggatgatgacgacgacgacgatgatggggacgatggcaatgaggaagaggaggaagaatctgaagaggatgatgatgatgatgaagtcccccaaccacctactaaaaagaggaaatgatcaacggctgcgacgagtggttgcttacacgcaggaatgctgcctgttcgtccctgcgcagcagtttactgtttagtgggtagagttttttagcttggtcgtggacaattcatagcctagtttggaaacaaaaaagaaacatttaattgtgcatgtactattaaaccattcctttaatcatgtatctcagattgctatcatggtttctaaattgtgtttgcctaagttttgtattgcaatttaacaatgttcttgtgcaacctgatggtcgtggtacgttatgcctggttgcaaggatagatcagaatttctggatgaatct

SEQ ID NO: 46041 - DNA, 812 bp, Zea Mays
gttcaactccctgtgggagtgaatttcgggctggggttgaaaatattccccttgtatgccccacccaaaagcacagattctgcataatgaaatctttacatctggtggagaccagaatttgattactaggattctgggcaaaagcgaagatgaaactaatcctgagaacaaagatgatggagagtccgatgatgataatgatgatgaaggagacgatgatgatgctgaaaacgaggaggaagatgatggtggtgatgagggatcagatgacaatgagaatgaggaagatgacgatggagatgatgatgatcctgcagccaatggcgaagggggaagcgatgacgacgaagatgatggtggagaggatgaagaggatgatgacgacgacgacgatgatggggacgatggcaatgaggaagaggaggaagaatctgaagaggatgatgatgatgatgaagtcccccaaccacctactaaaaagaggaaatgatcaacggctgcgacgagtggttgcttacacgcaggaatgctgcctgttcgtccctgcgcagcagtttactgtttagtgggtagagttttttagcttggtcgtggacaattcatagcctagtttggaaacaaaaaagaaacatttaattgtgcatgtactattaaaccattcctttaatcatgtatctcagattgctatcatggtttctaaattgtgtttgcctaagttttgtattgcaatttaacaatgttcttgtgcaacctgatggtcgtggtacgttatgcctggttgcaaggatagatcagaatttctggatgaatct

SEQ ID NO: 46042 - DNA, 873 bp, Zea Mays
aaccctaacttaagctgcttgtgttcggatctgatctgaaaatcatagctgctttgggtatggaggcgctgtttgggagcaataaccatggcggccacaaggccgctgatttggcctcgcttataattacccaggttgccttggaggtgccaaggttacttgggctccttgccatgaatttgattactaggattctgggcaaaagcgaagatgaaactaatcctgagaacaaagatgatggagagtccgatgatgataatgatgatgaaggagacgatgatgatgctgaaaacgaggaggaagatgatggtggtgatgagggatcagatgacaatgagaatgaggaagatgacgatggagatgatgatgatcctgcagccaatggcgaagggggaagcgatgacgacgaagatgatggtggagaggatgaagaggatgatgacgacgacgacgatgatggggacgatggcaatgaggaagaggaggaagaatctgaagaggatgatgatgatgatgaagtcccccaaccacctactaaaaagaggaaatgatcaacggctgcgacgagtggttgcttacacgcaggaatgctgcctgttcgtccctgcgcagcagtttactgtttagtgggtagagttttttagcttggtcgtggacaattcatagcctagtttggaaacaaaaaagaaacatttaattgtgcatgtactattaaaccattcctttaatcatgtatctcagattgctatcatggtttctaaattgtgtttgcctaagttttgtattgcaatttaacaatgttcttgtgcaacctgatggtcgtggtacgttatgcctggttgcaaggatagatcagaatttctggatgaatct

SEQ ID NO: 46043 - DNA, 958 bp, Zea Mays
gcacaccccttctcttcccttcctgccatgcgaaaccgagcacccgaaccctaacttaagctgcttgtgttcggatctgatctgaaaatcatagctgctttgggtatggaggcgctgtttgggagcaataaccatggcggccacaaggccgctgatttggcctcgcttataattacccaggttgccttggaggtgccaaggttacttgggctccttgccatgattctgcataatgaaatctttacatctggtggagaccagaatttgattactaggattctgggcaaaagcgaagatgaaactaatcctgagaacaaagatgatggagagtccgatgatgataatgatgatgaaggagacgatgatgatgctgaaaacgaggaggaagatgatggtggtgatgagggatcagatgacaatgagaatgaggaagatgacgatggagatgatgatgatcctgcagccaatggcgaagggggaagcgatgacgacgaagatgatggtggagaggatgaagaggatgatgacgacgacgacgatgatggggacgatggcaatgaggaagaggaggaagaatctgaagaggatgatgatgatgatgaagtcccccaaccacctactaaaaagaggaaatgatcaacggctgcgacgagtggttgcttacacgcaggaatgctgcctgttcgtccctgcgcagcagtttactgtttagtgggtagagttttttagcttggtcgtggacaattcatagcctagtttggaaacaaaaaagaaacatttaattgtgcatgtactattaaaccattcctttaatcatgtatctcagattgctatcatggtttctaaattgtgtttgcctaagttttgtattgcaatttaacaatgttcttgtgcaacctgatggtcgtggtacgttatgcctggttgcaaggatagatcagaatttctggatgaatct

SEQ ID NO: 46044 - DNA, 1044 bp, Zea Mays
gaacgcataccgcatgtcctctctcctgtgttgctcgcctccccaactccccgtcgcgctttctcctagtgaggctactgggtgaccgccgcctctgccgccctacgccaggttccaggtcttcgtcactccctttcattatcttcgtcgtctcattcgccggcgacgagcacccaccagctgctttgggtatggaggcgctgtttgggagcaataaccatggcggccacaaggccgctgatttggcctcgcttataattacccaggttgccttggaggtgccaaggttacttgggctccttgccatgattctgcataatgaaatctttacatctggtggagaccagaatttgattactaggattctgggcaaaagcgaagatgaaactaatcctgagaacaaagatgatggagagtccgatgatgataatgatgatgaaggagacgatgatgatgctgaaaacgaggaggaagatgatggtggtgatgagggatcagatgacaatgagaatgaggaagatgacgatggagatgatgatgatcctgcagccaatggcgaagggggaagcgatgacgacgaagatgatggtggagaggatgaagaggatgatgacgacgacgacgatgatggggacgatggcaatgaggaagaggaggaagaatctgaagaggatgatgatgatgatgaagtcccccaaccacctactaaaaagaggaaatgatcaacggctgcgacgagtggttgcttacacgcaggaatgctgcctgttcgtccctgcgcagcagtttactgtttagtgggtagagttttttagcttggtcgtggacaattcatagcctagtttggaaacaaaaaagaaacatttaattgtgcatgtactattaaaccattcctttaatcatgtatctcagattgctatcatggtttctaaattgtgtttgcctaagttttgtattgcaatttaacaatgttcttgtgcaacctgatggtcgtggtacgttatgcctggttgcaaggatagatcagaatttctggatgaatct

SEQ ID NO: 46045 - DNA, 916 bp, Zea Mays
gaacgcataccgcatgtcctctctcctgtgttgctcgcctccccaactccccgtcgcgctttctcctagtgaggctactgggtgaccgccgcctctgccgccctacgccaggttccaggtcttcgtcactccctttcattatcttcgtcgtctcattcgccggcgacgagcacccaccagattctgcataatgaaatctttacatctggtggagaccagaatttgattactaggattctgggcaaaagcgaagatgaaactaatcctgagaacaaagatgatggagagtccgatgatgataatgatgatgaaggagacgatgatgatgctgaaaacgaggaggaagatgatggtggtgatgagggatcagatgacaatgagaatgaggaagatgacgatggagatgatgatgatcctgcagccaatggcgaagggggaagcgatgacgacgaagatgatggtggagaggatgaagaggatgatgacgacgacgacgatgatggggacgatggcaatgaggaagaggaggaagaatctgaagaggatgatgatgatgatgaagtcccccaaccacctactaaaaagaggaaatgatcaacggctgcgacgagtggttgcttacacgcaggaatgctgcctgttcgtccctgcgcagcagtttactgtttagtgggtagagttttttagcttggtcgtggacaattcatagcctagtttggaaacaaaaaagaaacatttaattgtgcatgtactattaaaccattcctttaatcatgtatctcagattgctatcatggtttctaaattgtgtttgcctaagttttgtattgcaatttaacaatgttcttgtgcaacctgatggtcgtggtacgttatgcctggttgcaaggatagatcagaatttctggatgaatct

SEQ ID NO: 46046 - DNA, 656 bp, Zea Mays
aggacactcaactcttatgaagggcatggcaatatgtgacaactctaagaataagctgaggtaataactcctgcagttaatcaacacaatattatttttcttaatttaggtatgatacaaatggcaaaattaatcatctcagtggaagtgatctgcaaatttaatcacaagcaaaatatagtttaaactttaaaggaacaacactgatctggggcattactacattgactacagagcatccaccacaactcgcgtatattttgttttcttaggatatggcacaaaccgatcaacatctattctttccattacccaacagagatggaaccaatattactttgcaattgggaatacaagagagaagatatctgatgcaatctaactctatctaaaagaggaggtacaaagataaaaactatagctaaacatacttcgaatcagtacacttttctaacagttagttgcacatgtcaatgactttcatcgagatctagttttaccgctgctacatcatatgcaaactaacaatggaaggtcaaattctttctgaatgtaacttacttgattccaacaggcgcattgagaacaattgatccaaatgcattaaggaatgctcctggaatgggtggggaaaaagatgtgtagtaaaatcagag

SEQ ID NO: 46047 - DNA, 2438 bp, Zea Mays
cctgtctcttcagtcttcagttcaccaccagcagccctcagaacatccgattacccgaaggcccccctcagtccccctcagcccgcagtagccgtacacctcccagttccgcggcccaagctctgctcaagccgatcgagcgaggctaaggcccagatcctacgatggcgatcaccgtgggaattgccgacgccccttacatcctcgtgggcccacccgaggctcgccagagccactccgccgccctggccactggggccgcgctagcgccgacgcgggaggagttcccagacctgacggacgcgttctccaacgagttcgccgcgctcgcggcggcggcggggccgggcgggaaggcgctcaccgagaacttctcccccacgttcgtgtcctcgggggacccctgcctcgacttcttcttccacgtggtgcccggcacgccggccgcctccgtggagtcgctcctgggcgccgcctgggcggccgacccggacaccgcgctccgcctcgtggccaacctccgcggcgtgcgcgggagcggcaagtccgaccgcgagggcttctacgcctccgcgctctggctccacgcgcggcatccgcgcacgctggcccaaaacgccgcctccctcgccgatttcggctacctcaaggacctccccgagctgctccaccgcatcgtgcacggcggggtgtccaccaggaccccaggcaagaaggcacgcctaaccaccaagtgcagccgaggccggggccgccgcgtctgcttcggcaaccgtacgcgttgcagccgcgcggaacgggccgccacgcgcgtcggctcaacggaggagcgcgtcgcggccagcctggagcgcgaccggggactcgcggccgcggccgtggtggcgcgccggaccaggagagcggaggccgctgcgagggcggtcgagatgtacagtaacgaccccgcctaccggttcctgcacgaccgcacggccgacctcttcgcggggctcatcgcggaggacatgcgcaagctcgcggccggcaaggtccgggagttctctctcgccgccaagtggtgcccgtcgctggactcctcctacgaccactccacgctcatctgtgaggccgtcgcgcgtcgcctcttccccaagggctccgcgcccgagctcgccgcggacctcgcggacgagcactacgcgtaccgcgcgcgcgagcggctccgcagggtggcgctcgtgccgctccgccgcgcgctcaagctccccgaggtcttcatctcggcgcgcgcgtgggagtcggttaggtacacccgcgtcgcctccgtggccatgaagaactacacggacctcttcctcaagcacgacgccgaccgcttcaacgcctacctcgccgacgtcaagtccggcaagaagcggatcgccgcgggcgcgctgctcccgcacgagatcatcgcctccctcgaaaaccacagcggtggcgaagtggccgacctgcagtggcagcgcatggtcgacgacatgcgcgcgctcggcaagctgagcaactgcgtcgccgtgtgcgacgtgtccgggagcatgtacggccgtcccatggaggtgtgcgtggccctcggcctcctcgtgtccgagctcagcgacgacccatggcgcggccgcgtggtcaccttcagcaggcggccggagctccacaggatcgccggcgagaccctctccgagaagacaaggttcatccaaagcatggcctggggcacgaacaccgacttccaggcggtgttcgacaagatcctcgaggtggccgttggcgccaggctggcgccggagcggatggtgcgtcgcgtgttcgtgttcagcgacatggagttcgaccaggcgacggagaacccgtgggagacggactacgaggcgatcgtgcgcaagttcacggaggctgggtacggtgcggccgtgccggaggtggtgttctggaacctgagggactccaaggccatgccggtggaggccgggcagaaaggggtggcgcttgtcagtgggttctccaagaacctgctcaaggtgttcctcgacggcggcggcatcgtcgcccccagggctgtcatggagaaggccatcgcggggccggagtacaacaagctgaccgtcattgactgaagtcgaagaagcacgccatgagaccgcacatccaaggccgtgcctgagatttcggggcctgggcgaaatattatatgggctcttttaacccagctatatatatagacatgagagtatatgaactaaaatatagcttatgttatattgatatttaattattattataaatattaaatatattttaattataaagtatagttaacggttaagcgagaaaacaaatttattacgtctaattaattaatgattagcaaatgtttaatgtagcatcatatgagtaaatcataaactaattaggtttaatag

SEQ ID NO: 46048 - DNA, 4279 bp, Zea Mays
cttggtccacttctctattctcctccgccgtccttccgttcgtctcgatgctaacgctactgctcgtcattctcccttcccacacgtagtagaaaaaaaaacccatccatcccgcttccttgattcagcctaggacgactgaatcaaacccatacgtgatcggaggagttggattgcctcccgcctctcggaggtcgcttccatctattaatcaagaaattccaaacttctcgcccaaatccgtgcggacttggtgaagcagggtaaattgggccaggagacgtcggtcccggccacggagtccccctccccttcaggccgttcttgttgggggagataaaaggattcggtgcgtctgatcggaggcgtgggagagaaggcctcggcagacgttgttggctcgtgctcttcttcgacggacggaggctgtcgtgctggagaggttaaagtgtttggtgtttcgtgttgaactgtgcgcgtgcggtggttgcttcgtttggtggtatatggtagaactgtagattttgatctggactgcgtgaagcaaaagaagggaaaaaaaaaaagaagattcggttttggagtgaagttgtggctagtcgggaatcgcaaggaagatgagttccgggtcggcggtgacaggcggtggtgcggaggaggcggcggcggtgccgctggggcagaagctgattgtgcacgtggcggagaacggccacaccttggagttccagtgcggcggcgacacgctcgtcgaggccatccagcactccatccagctccactgcgaaataccccctgccgatcagctcctcctctgcggcaacatctccctcgacggcgccaacgcgctcgccacctacaagcttccgcgggacgaccgtgaggtcttcctctacaacaaggcccggctccttgcggactcccggcccccggcgccggagtccctctacatccctgagccaaatattcctccgccgccccggccgcagggctcaccaccttcggacgcatctgcagaccccgcgctgaaggcgctggtatcctatgaaacaagattcagatatcacttccaggtcgccaatgcggtgtatcaatctagtttggcaaaatttgagctgtgcaggcggcttctgcgggaggggcaggtccaggagcgagcgctggacacagcagggagcaacctagagcacacattccggaaactctcacagaggtattcagaatttttgcggtgcttcacacaacagcaccgttcacatgttgagatgctggccaatttcgagagagatgtgcagaagctgcgtgctgttaggctgcacccagccctgcaaagtgaggggcggcattgcttgatggaccttctcaaggaaaatgacctgaggaaattggctgacgaatgcttctgctcacataagaagtttgaggttaaggtgtcacagctgaaggcaaacttcttggagctgaagaagagggtggaaggcttattccatgccatgagctcaggtgggtgcaaggatgttgagaagctgataaaggagcaccagggagtcattggtgaccagaagatcatcatgcaagctctaagcaaagatgtggacacctcaaagaagcttgttgatgactgctcaagttgccagctatctgcttctctccgtcctcatgatgcagtctcagcggttggccgtatctacgaagtgcatgaaaaggataacttgcccagtatacgggattttgatcagaggcttacaaaattgcttgagaaatgcaaggacaagaagaatgaaatgaatactttggtccatgtttgcatgcaaagagtaaaatcttctcagattagtatcaaaggcatgatgagtgaactcgttgcattccaagaggtgatgggtcatcaagaagattttgataatctgaaaatagtcagtggcttgggtcatgcatatagagcttgtgtcgccgaggtagccaggaggaaatcgtattttaagctgtatactggattggctggaaaatatgctgaaacgttggcaatcgagtgtcaaaacgagaaaacaagacgagaggattttcataggacatggagcaggtacattccagatgatgtcatgtgttccatgggactctttgattctccaagccagtgtgatgtaaaagttgctccttttgatcttgatcttcttcccattgatgttgatgatgtggaaaagcttgctccccagtctatactgggttcttttttaaaatctgagagatcacagctagcaaagcctttgctaagcaattctaccagtggaaatttgaacaaatctgaacaacattctctgagtgctgatgataagatggatttccaagattttctggggggctatgatactattgacattgcaggaactagtaagttagaagtggaaaatgccaggctaaaagcagaacttgcttctgcaattgcaattctctgcggtgctggatatggatatgagtctattgacgaagggcaaattgatgctgtattgaaaaaagcaagggaaaaaactgctgaggcacttgctgcaaaggatgagtttgcttaccagcttcagtcattgctcactgcaaagcaggaaaaatgcttggcatatgagaagcggatccaggatcttgaggaacgcttaaccaaccagtacatgcaaggtcacatggtgtcgggaagcaaaggcatgtctgattccctgctttctgcatttaaaagtaatgagtgcaacctggatttatctgaaggcaggcaaccccaaatacgtgatgaatcaagtgtggccatggatgaggtctcttcaacatctgaacagccatctaaacaaacagaaggtggcgatgagaatatgactgacatttcgggtgcactgaacttgcagttgatcgattcagcagcatgtactaatctggatgctttcatgacagaactgccacgtgataatgaacacaagattgtaaacatcaataaggaaggacacatgttgacacaacttactatggctgatacttctgatgttcctatagaagatcctcttagcaacttaaactcaagaactgatgatcatcatgccctagagttgagggataaggagctccttgtgtcagagctgcaaaacacgcttgatcaaaaatcaaaacagttgggtgaaactgaaattaaacttagtgccatgatggatgaggttaattctctgaagaaagaacttgaacaaacccggggccttcttgatgaatctcagatgaattgtgcgcaccttgaaaactgtttacatgaagcaagagaagaggcccgaacaaacaaatgttcagctgacagaagggctgttgagtatgatgctctgcggtcgtctgctttgaggatacatggtttgttcgaaaggctaaataactgcatcactgcaccaggtgtgactggctttgcagagtcactgcattctttggctgcctccttggcaagctctgtaaagaaggatgaagctgataccactgttcagtttcaacaatgcatcaagatcctggcggacaaagtttatttactgacacgacagagtgctgagctgctagaacgctattcagctatgcaggcagtacatggaggtatcacaaaagagctggatgagaagaaagagctgattaagaatctctacaataaacttcaacaagaaaaacagcaaagagaagatatcatttggtcggtttgaagtccatgagcttgctgtctttttccgaaaccctgctgggcactatgaggcgatcaaccggaactgctcaaactattatctgtctgaggaatctgttgccttattcacggagcaacactcgcagcacccagtgtacataatcgggcaaatcgttcatattgagcggcgcgtagcgcgtccagaccagatgggaggagctccacgccctgatagcagtggcggccatcggtcgcccgcatccatgctcaacccctacaacctacctgggggctgtgagtacttcgtggtgactgttgccatgctgcctgatgctgccagttaaaacaaaacaccttcctgatcctgcctgacaattggctgttgaaatgaagggagaaaactgtcaaagtgtcaactgtatatatactaaaatttattgccatttgactctcaattctcagttgattcctcaagtgttgtttgtatgtatggtcatattcactgtgtaaataaactcggctactaatgctaggcatctcttcgttcaaactatttattctcctcaatgccaaatcacatactgattttat

SEQ ID NO: 46049 - DNA, 2404 bp, Zea Mays
ctccttcgaagcgacctcgctctgacggctcgattggcctaaccttgtctgccacaacgaaaagaacattatatttagatgagcctattgttcccgatttggtttgtgaaaaatgcaaactaaaaacatttaaaagcaagggatcacagtcgacattattacaaagttctcacactcatgcttaaaggatactaaaaaaaagacagaatcagtttgccatccatatatacgagaaaatcaagtggcccagttggttgcaactacttttcaactgaagaagcagataggttttaggtgtgtgataagccattccaccagcagatagtatatactacgcggtggcccacacgtacgccaattcaggacacaacagaagcgagcaagggaaacggatcgatacatccgatccgacgacggcgttacgtacctcaagctcgtcgttttccttggacagcgcctcgcaagctccctgtagatcccgcatctcctgcacacacacagccaagcaagaacaacaggccggagtcagtagaaccgccaccgggacataatcgagagcacagcacctgagatgaggagcggtgtgtgactgtgacctcgcggagcctctcgttgtccacggcgagtgaccgcaccagctgctgcatctccggcagcctctgcatgataatgagaggtagattttaggtcacaggaccatcttgctgacaatgaggtagatgttgctgacaatgaggtagattttttgttggctttgtcctaaagattccactttgcgttgttcaccctcctagctagcctcctccccctctcaccctctcaaatttcaaacgcagacagatatatagctgttgctgctggtgacttctaagggtgtgtttggtttgacttttggctttggcttttgcccccctaaaagtcaaaagccaaccaaagggctggatccaggaagcagctttttctaaaagccgactttcccgtagtgcaaatctgaaagcaccactggatctgcttttagtggcttttcggatggaactgtgaaaacatatatcgaagattttttaacgacttttagtggtttccaccaaacggtttttagctttttaacagcttacagcctacagcaactttttccacagctcacagcccacagcaacttttttcacagccacagcccaaccaaacagaccctaaaactagtgcagggttagttcaaccaccaccaaccaagaagcttttccttacgaacaggcgcggcacaagacttcctcctttccgatccgttgaccagcaaagcgcgtcggggaaacagttttctcgtctccctcgcgccagctcaccagccacacgacacgctgaatcaccgtgcgagttgactgacgtgttcgagtgtgtcacctgtatgtgtgtgtgtgagagagagagatagcaatagcacgggggctctcaccagtttcttccgcggtcgctggccggcgaggcgtggaagcggcggggtcgggaagatgagctgcggccggtcggtggctcccacctgcagcgagaggaaagggagcgccccacatgagtccgcgaccaatcagcgagcgcatagacagatccgacgaaagactggcatgtccccgcgcgagcaaggggtgctccacgctcccaccaccacacgagcaattgcgccgggggataaaaaaggacggccgaaaatgaccggactgcccccggtaaaaagaagcgctccgtcgggatcgggaccccaggggcagctctggcctctggcgaagtggcgaacctggcggcacggaagccgtggtggaagggcccagcttcggccgcaccgcacaccaccgactctcatcacgacttgccctaattacccctcatccgagtacgcaagagtcaaccaccggcgcataaatgaatttattaggaaaacacacgcggacggagacaccgtgaagaaaaaaaaactgcagaactctttttttttcttctctgtctcccttcccttcccttgccctaatcaccacgaagaaaaaaaacttggcgtccgcgtcaagaaaacttgtagggctcgaaatagtagagacgatgtcgaggtcgaggcgagcagcgtaacaggtccgtatggaagtgtggatctgagactgagaggcaaagagttccgtggtggatgagatgagagaacgaaggaaatgatttttcgctgaccgctaggggcaggttcgtcacgctaaccaaaaaagggaagggaagagagagacagagagagagagagagggggtactggtggtgggggagggagaagaaaccaaaccagcacggcggcggcggcggcagttgagaggagacagaagacgaacaggggggaggtgggcgtcagccgtcagccgtcagccgtcagcgtccc

SEQ ID NO: 46050 - DNA, 150 bp, Zea Mays
gtcctgcagaagcagaacatatagagcactgtactagtagcagactagcagcagcatgtacatgcgcagatcagatggatgatgaatggtcaatatcgtcgtgttagtgatctgattattattgtatgtgaacctaatggagtgattttg

SEQ ID NO: 46051 - DNA, 1913 bp, Zea Mays
tgatgttttagcctctcaagatgtttgcaagctgtttcttgattaatattatattgttttgtttcctaaagaagtgcaggcctgatgcagtgatgagaactgtctcactgagccaccagctcacgggttcgaagcagcctgtccgcatttgcgggagaaggcttgcctcggtttatccctttctcaggccccactcttgtgggagcctcatgcactgggtctgcccctttttgtattgtttactaaagtatcatagatgccacacttgttcaactgatcattgaatatcaaattggttgtttttatatcagtcattttacacagtaatttggttaatgaccctccccctccccctccctctccaccataaccctgttgcagccctttcgccacacactctattgattgatcttgttttgttcttcagctgctttgatttctgatccttaggatttcttctggattgctcataatcatgctatcgagaatatgatgctgtttcagtatcttgtcaacacacttgaagcagattttgtgcctcgccaaattgcaaccaaagagtcactagactgggtgattttcagagagtctctcttaagtatgcttctgggatcacgaaagctcgtgttcaaatcttttgtgaagaactgcatgtgtattctactcaaccagtattaccatgaagctaaagatgattatgaagacatcataccttctgaaagagaaactgaatcaacatcttatcacaatttctccctaaactatttgtcctttgagttaaaaaagacactcatttctctcaggaaattatttgtgatggttatgaaacttgacttgaccaggaaagaagcagacacattagggttaacctcaagagctgacagattcagaaactctatcatggatattattttggatgaactaacttacaacagcagttatttatccccatttctcttggcctttgtggaacggaagtggaaattggagattattttgcagtacttttcaaaatattgtggcaagggcgcagtccgtactcgaaggtctgataattcacaagaagatttgaaactggaaaatgttctgaatttctttgtgacagccacaagtgcaaaagctattgtcagaaagatgagtgcagaaattgcccagcttcttttaacacatgcttaccaggcgtgcctttctgctgaagatgccaacagcaattctgctgatacacccgaaaaagttggagctactctccaagagatatcttccaacttcatagctgcttttcaaaacatcaggaaagttagcccggatatccagatatcaccgttcgagaaagaagctctgtttactgctgcaacgttggttaggaaattgaagagcaaagaaaggtttaagcaagagggaactccaggacttgctgcatgatggcgcgaagctcctgttgaaggctgctaatgcaaagatcaatccgcagacgccgagcgaggatggtgggcactgaggtgttgtcatgttggatgatctttgaatcttttgaggggctgctgatgtcttgtgtttcctgttgctgaaataagtgagaagtggctgagaacttagctgttatgtgtgtgtttctggtttgtttcagtttataaacattgagttgtttggtggtgtgacctgaatcaggtcagtttctggtgttttatcccttctagatcttagcccttggtgctttgctagacgtggataagaacaattgtatttctgttatgcaagtaatagaaatggagtgatctccgttcgaaaaaaaatgtgcaagtgagtctcttgattattagatcatgatctaattgtaggtataagtataaccgtttgttagggttttttttctataaatctacacgagctggtgatggaagggtttaaatgtt

SEQ ID NO: 46052 - DNA, 1843 bp, Zea Mays
tgatgttttagcctctcaagatgtttgcaagctgtttcttgattaatattatattgttttgtttcctaaagaagtgcaggcctgatgcagtgatgagaactgtctcactgagccaccagctcacgggttcgaagcagcctgtccgcatttgcgggagaaggcttgcctcggtttatccctttctcaggccccactcttgtgggagcctcatgcactgggtctgcccctttttgtattgtttactaaagtatcatagatgccacacttgttcaactgatcattgaatatcaaattggttgtttttatatcagtcattttacacagtaatttggttaatgaccctccccctccccctccctctccaccataaccctgttgcagccctttcgccacacactctattgattgatcttgttttgttcttcagctgctttgatttctgatccttaggatttcttctggattgctcataatcatgctatcgagaatatgatgctgtttcagtatcttgtcaacacacttgaagcagattttgtgcctcgccaaattgcaaccaaagagtcactagactgggtgattttcagagagtctctcttaagtatgcttctgggatcacgaaagctcgtgttcaaatcttttgtgaagaactgcatgtgtattctactcaaccagtattaccatgaagctaaagatgattatgaagacatcataccttctgaaagagaaactgaatcaacatcttatcacaatttctccctaaactatttgtcctttgagttaaaaaagacactcatttctctcaggaaattatttgtgatggttatgaaacttgacttgaccaggaaagaagcagacacattagggttaacctcaagagctgacagattcaggcctttgtggaacggaagtggaaattggagattattttgcagtacttttcaaaatattgtggcaagggcgcagtccgtactcgaaggtctgataattcacaagaagatttgaaactggaaaatgttctgaatttctttgtgacagccacaagtgcaaaagctattgtcagaaagatgagtgcagaaattgcccagcttcttttaacacatgcttaccaggcgtgcctttctgctgaagatgccaacagcaattctgctgatacacccgaaaaagttggagctactctccaagagatatcttccaacttcatagctgcttttcaaaacatcaggaaagttagcccggatatccagatatcaccgttcgagaaagaagctctgtttactgctgcaacgttggttaggaaattgaagagcaaagaaaggtttaagcaagagggaactccaggacttgctgcatgatggcgcgaagctcctgttgaaggctgctaatgcaaagatcaatccgcagacgccgagcgaggatggtgggcactgaggtgttgtcatgttggatgatctttgaatcttttgaggggctgctgatgtcttgtgtttcctgttgctgaaataagtgagaagtggctgagaacttagctgttatgtgtgtgtttctggtttgtttcagtttataaacattgagttgtttggtggtgtgacctgaatcaggtcagtttctggtgttttatcccttctagatcttagcccttggtgctttgctagacgtggataagaacaattgtatttctgttatgcaagtaatagaaatggagtgatctccgttcgaaaaaaaatgtgcaagtgagtctcttgattattagatcatgatctaattgtaggtataagtataaccgtttgttagggttttttttctataaatctacacgagctggtgatggaagggtttaaatgtt

SEQ ID NO: 46053 - DNA, 2611 bp, Zea Mays
tgatgttttagcctctcaagatgtttgcaagctgtttcttgattaatattatattgttttgtttcctaaagaagtgcaggcctgatgcagtgatgagaactgtctcactgagccaccagctcacgggttcgaagcagcctgtccgcatttgcgggagaaggcttgcctcggtttatccctttctcaggccccactcttgtgggagcctcatgcactgggtctgcccctttttgtattgtttactaaagtatcatagatgccacacttgttcaactgatcattgaatatcaaattggttgtttttatatcagtcattttacacagtaatttggttaatgaccctccccctccccctccctctccaccataaccctgttgcagccctttcgccacacactctattgattgatcttgttttgttcttcagctgctttgatttctgatccttaggatttcttctggattgctcataatcatgtgagtgatgctagataaactgctcagaagaataaataataaagggattgtatcaaatgtctgcattagtttccctgtttggttttctgcaattagtaataagttacaccaacctttgactttaaaacgagaagcttatatttgtattattttgttaatcaaagtaagctaatgtttgcgtctatctgacagctggaattgggttctactcaccagatctatctgacaactgcattagtttcccttggagacgaattttcaggcttggttaaaaaatctcctcattgtgcctcatccgctctcggttacgatgttctgtgcgccagcatccggttgggccgttgcatagtggacggttgacgtcggcccgttagtgatgggaggctagggttcgggtattttctcggccgggaccattgtttcggactcctattaatattataccggcagggtggtcatttcctccatggcccgagtttttttagatctctgtttgactattgcatttcgtggatgagtctagaaagtgatttgttttcttcattgcattttgtggatgggcctaaaaaataatatttttatctttttcatgcgtcacaaagtaatctgtttttatctctttcattgcatttttctagtttatctgattatttgcctctagacttgaaatttgagttaatttctgttctatgacctaggctatcgagaatatgatgctgtttcagtatcttgtcaacacacttgaagcagattttgtgcctcgccaaattgcaaccaaagagtcactagactgggtgattttcagagagtctctcttaagtatgcttctgggatcacgaaagctcgtgttcaaatcttttgtgaagaactgcatgtgtattctactcaaccagtattaccatgaagctaaagatgattatgaagacatcataccttctgaaagagaaactgaatcaacatcttatcacaatttctccctaaactatttgtcctttgagttaaaaaagacactcatttctctcaggaaattatttgtgatggttatgaaacttgacttgaccaggaaagaagcagacacattagggttaacctcaagagctgacagattcagaaactctatcatggatattattttggatgaactaacttacaacagcagttatttatccccatttctcttggcctttgtggaacggaagtggaaattggagattattttgcagtacttttcaaaatattgtggcaagggcgcagtccgtactcgaaggtctgataattcacaagaagatttgaaactggaaaatgttctgaatttctttgtgacagccacaagtgcaaaagctattgtcagaaagatgagtgcagaaattgcccagcttcttttaacacatgcttaccaggcgtgcctttctgctgaagatgccaacagcaattctgctgatacacccgaaaaagttggagctactctccaagagatatcttccaacttcatagctgcttttcaaaacatcaggaaagttagcccggatatccagatatcaccgttcgagaaagaagctctgtttactgctgcaacgttggttaggaaattgaagagcaaagaaaggtttaagcaagagggaactccaggacttgctgcatgatggcgcgaagctcctgttgaaggctgctaatgcaaagatcaatccgcagacgccgagcgaggatggtgggcactgaggtgttgtcatgttggatgatctttgaatcttttgaggggctgctgatgtcttgtgtttcctgttgctgaaataagtgagaagtggctgagaacttagctgttatgtgtgtgtttctggtttgtttcagtttataaacattgagttgtttggtggtgtgacctgaatcaggtcagtttctggtgttttatcccttctagatcttagcccttggtgctttgctagacgtggataagaacaattgtatttctgttatgcaagtaatagaaatggagtgatctccgttcgaaaaaaaatgtgcaagtgagtctcttgattattagatcatgatctaattgtaggtataagtataaccgtttgttagggttttttttctataaatctacacgagctggtgatggaagggtttaaatgtt

SEQ ID NO: 46054 - DNA, 1086 bp, Zea Mays
gaaaaagtaaatagaaagcaacgctgttaactccacatatcttttgctcattttactgtgatcctttagaagcttgttcttgcacttttaattctagacaaataatcccttgaataattataacaggcctttgtggaacggaagtggaaattggagattattttgcagtacttttcaaaatattgtggcaagtccgtactcgaaggtctgataattcacaagaagatttgaaactggaaaatgttctgaatttctttgtgacagccacaagtgcaaaagctattgtcagaaagatgagtgcagaaattgcccagcttcttttaacacatgcttaccaggcgtgcctttctgctgaagatgccaacagcaattctgctgatacacccgaaaaagttggagctactctccaagagatatcttccaacttcatagctgcttttcaaaacatcaggaaagttagcccggatatccagatatcaccgttcgagaaagaagctctgtttactgctgcaacgttggttaggaaattgaagagcaaagaaaggtagagctgaggcccccgcttagggctggtttggtggacatggaattggagaggatccaacgggggagtaatcccctccttattcaaatttaaatagggaggagattcctcccacgtggattccctcaaattccctgtccaccaaatcagcttttaggatgtgataggttcagatggtgtagctttctggccactggtatcatcaagttgtttcatattttgggttatgtgtcacggttacggaattaccccgcctccagtagccagtgtccgcctcccctagtagactagcggtactggtctactggaaagttgaaggtacataacttatgcggctgttgcatatttacgagtggtggcatgtgtcgggaatatggtcttagaacctgattgtgggtcatctgatcaacccaacctaacccacccaaaacatcctgatttagggtgagtttgggtgaagagtggagaagaatgaagtcctattttctaaatctttagttctcaacaaagaacagtggagcgacttcgtgtttggtttgaga

SEQ ID NO: 46055 - DNA, 1857 bp, Zea Mays
tgatgttttagcctctcaagatgtttgcaagctgtttcttgattaatattatattgttttgtttcctaaagaagtgcaggcctgatgcagtgatgagaactgtctcactgagccaccagctcacgggttcgaagcagcctgtccgcatttgcgggagaaggcttgcctcggtttatccctttctcaggccccactcttgtgggagcctcatgcactgggtctgcccctttttgtattgtttactaaagtatcatagatgccacacttgttcaactgatcattgaatatcaaattggttgtttttatatcagtcattttacacagtaatttggttaatgaccctccccctccccctccctctccaccataaccctgttgcagccctttcgccacacactctattgattgatcttgttttgttcttcagctgctttgatttctgatccttaggatttcttctggattgctcataatcatgctatcgagaatatgatgctgtttcagtatcttgtcaacacacttgaagcagattttgtgcctcgccaaattgcaaccaaagagtcactagactgggtgattttcagagagtctctcttaagtatgcttctgggatcacgaaagctcgtgttcaaatcttttgtgaagaactgcatgtgtattctactcaaccagtattaccatgaagctaaagatgattatgaagacatcataccttctgaaagagaaactgaatcaacatcttatcacaatttctccctaaactatttgtcctttgagttaaaaaagacactcatttctctcaggaaattatttgtgatggttatgaaacttgacttgaccaggaaagaagcagacacattagggttaacctcaagagctgacagattcaggcctttgtggaacggaagtggaaattggagattattttgcagtacttttcaaaatattgtggcaagggcgcagtccgtactcgaaggtctgataattcacaagaagatttgaaactggaaaatgttctgaatttctttgtgacagccacaagtgcaaaagctattgtcagaaagatgagtgcagaaattgcccagcttcttttaacacatgcttaccaggcgtgcctttctgctgaagatgccaacagcaattctgctgatacacccgaaaaagttggagctactctccaagagatatcttccaacttcatagctgcttttcaaaacatcaggaaagttagcccggatatccagatatcaccgttcgagaaagaagctctgtttactgctgcaacgttggttaggaaattgaagagcaaagaaaggtagagctgaggcccccgcttagggctggtttggtggacatggaattggagaggatccaacgggggagtaatcccctccttattcaaatttaaatagggaggagattcctcccacgtggattccctcaaattccctgtccaccaaatcagcttttaggatgtgataggttcagatggtgtagctttctggccactggtatcatcaagttgtttcatattttgggttatgtgtcacggttacggaattaccccgcctccagtagccagtgtccgcctcccctagtagactagcggtactggtctactggaaagttgaaggtacataacttatgcggctgttgcatatttacgagtggtggcatgtgtcgggaatatggtcttagaacctgattgtgggtcatctgatcaacccaacctaacccacccaaaacatcctgatttagggtgagtttgggtgaagagtggagaagaatgaagtcctattttctaaatctttagttctcaacaaagaacagtggagcgacttcgtgtttggtttgaga

SEQ ID NO: 46056 - DNA, 1927 bp, Zea Mays
tgatgttttagcctctcaagatgtttgcaagctgtttcttgattaatattatattgttttgtttcctaaagaagtgcaggcctgatgcagtgatgagaactgtctcactgagccaccagctcacgggttcgaagcagcctgtccgcatttgcgggagaaggcttgcctcggtttatccctttctcaggccccactcttgtgggagcctcatgcactgggtctgcccctttttgtattgtttactaaagtatcatagatgccacacttgttcaactgatcattgaatatcaaattggttgtttttatatcagtcattttacacagtaatttggttaatgaccctccccctccccctccctctccaccataaccctgttgcagccctttcgccacacactctattgattgatcttgttttgttcttcagctgctttgatttctgatccttaggatttcttctggattgctcataatcatgctatcgagaatatgatgctgtttcagtatcttgtcaacacacttgaagcagattttgtgcctcgccaaattgcaaccaaagagtcactagactgggtgattttcagagagtctctcttaagtatgcttctgggatcacgaaagctcgtgttcaaatcttttgtgaagaactgcatgtgtattctactcaaccagtattaccatgaagctaaagatgattatgaagacatcataccttctgaaagagaaactgaatcaacatcttatcacaatttctccctaaactatttgtcctttgagttaaaaaagacactcatttctctcaggaaattatttgtgatggttatgaaacttgacttgaccaggaaagaagcagacacattagggttaacctcaagagctgacagattcagaaactctatcatggatattattttggatgaactaacttacaacagcagttatttatccccatttctcttggcctttgtggaacggaagtggaaattggagattattttgcagtacttttcaaaatattgtggcaagggcgcagtccgtactcgaaggtctgataattcacaagaagatttgaaactggaaaatgttctgaatttctttgtgacagccacaagtgcaaaagctattgtcagaaagatgagtgcagaaattgcccagcttcttttaacacatgcttaccaggcgtgcctttctgctgaagatgccaacagcaattctgctgatacacccgaaaaagttggagctactctccaagagatatcttccaacttcatagctgcttttcaaaacatcaggaaagttagcccggatatccagatatcaccgttcgagaaagaagctctgtttactgctgcaacgttggttaggaaattgaagagcaaagaaaggtagagctgaggcccccgcttagggctggtttggtggacatggaattggagaggatccaacgggggagtaatcccctccttattcaaatttaaatagggaggagattcctcccacgtggattccctcaaattccctgtccaccaaatcagcttttaggatgtgataggttcagatggtgtagctttctggccactggtatcatcaagttgtttcatattttgggttatgtgtcacggttacggaattaccccgcctccagtagccagtgtccgcctcccctagtagactagcggtactggtctactggaaagttgaaggtacataacttatgcggctgttgcatatttacgagtggtggcatgtgtcgggaatatggtcttagaacctgattgtgggtcatctgatcaacccaacctaacccacccaaaacatcctgatttagggtgagtttgggtgaagagtggagaagaatgaagtcctattttctaaatctttagttctcaacaaagaacagtggagcgacttcgtgtttggtttgaga

SEQ ID NO: 46057 - DNA, 2378 bp, Zea Mays
ccagagccagagctgctagctctcaatctatctgtctctctccctctatgcccggccccccttcaatgccttcaacttcaagtcaagtcttctttaattaacaacaaggccaccaccacattcaaacgcacacgtacataggggcagctagctcgctcttggttccttttcctccgtcgttgctcaggtccctcctcctgcacacccagagtgtgcatgcgtgagagtacatatatatagtaggagaatgatgatgatgaacaccagcgccgccatgtcgccaccaagtaccgacgtcgtcgtcgacgacttctccctcggcgccatgcatcagccgtacgtcgtcggcttccacgccgacgccggcatgcgcatcatgcccagcgtcgtcgtcgataggccgctgctccagcagaacaccgacctattagaagagtacgacagtttcgacttcgcggccacggggctactaccgttaccgttccaagaactacctggtctcctgccccccgcgaattacctgccgctgccaacgccaagcatggccatgtcgccgccgtcgctgaggctgctgacgctcccgggcgtgccagtgcctacggcggcggcggatgtcgtgtacggcggattgggcgggggcggcgcgggagggccgtcgttcctgaagcgggagcacggcgtcggcagcggcggcgggaggatcggcggcctgaacctaggacgccgcacctacttcacccccgccgccgtggaccggctgctcggcggcggcctaggcggcgtgggcctcggcatgagcgtgctggggctcggggtcggcgccgctcaccaccaccagcagcagccgccgcggtgccaggccgagggctgcaaggccgacctctccgccgccaagcactaccaccgccgccacaaggtctgcgagttccacaccaaggccagcgccgtcgccgccgccggcaagcagcagcgcttctgccagcaatgcagcaggtttcatgtgcttgcggagtttgacgaggccaagaggagctgccggaagcggctcaccgagcacaaccgacgccgccggaagccgatcagcgcacagggcaataatgaccactcgtcgccgccaccgccggcgccaaagaaagcggatacttgcataaccacctcgtacaacgatgaccccaagagtaagaagcattcgagatcatgcatctagctgtgatgtcatcagcatgcatatataatctctgcactcaaagatattctatagctagctaactccacatgcacctcgatgctacttcaccagtatcagtttcatcgtcacatcgtctgacctgacgtacatgcattgcacatgcaatcatgcgtacgtgcacggcgccaaagtttcgtcgtacgtacgcgtgtgcgtacgggtacgtgtgtgggatcaattcgcagctgcctcagtgcctgtgcctccacactagatcgatatacagattgatatgatgcaacccctgctgcatcatcagatccatttgtgctgcatcaatatgcttcgagcaccatatgcattcgcaaagttatttttgtatgccgcaacgtatgtactgacgtgcccaatatcatcattattgtacgtacaacgagctagtagcaggtgcgagcaacacggctgcagccatctcgccgaatggcggcagcggcggcggcagctgcctcgacgtcctggacaacggccagataacgagcagcgcgacggcggcggcaccgacggcgctatctctggcagcgccgcccccgccgctgcatcacgagctgcatcacgagaaggacgggagcctggactccgtgctgatgcagcggcgggttcattattggtccatggccggcggcgggacgacgacgacgaagagcatcgctgtttcatcacctcgctggtgacgcagacccagcagcaacagcagcacggcggcaacgtcttgtcgtgctcgtcgatcggtgtcagatcagcgcagaacggcggccagcaacggtttctttgaggtggacttcatctagtgcgatgcatgcacgtaaaaggggcagggaaaagcatatagcgtcgctgtattgtttctgagatgggaaggatgcatggcgtgaggaaagcaacaaaggctagggtttggttggttccactctagctaggggtggctagcagccttttctttttactgtgtttagtacttgggctagctagtgctagacttctctgttatattaattactagagggaaaaatataatgctggtgtagtatgtgtattcctttttcctgttgctaacaatgtgtatatactattacgtgcatgcatctgagtttacaactaatggttaattaatgtagctagctagggtgta

SEQ ID NO: 46058 - DNA, 1386 bp, Zea Mays
cgccgacctggccgggatcgcatcaaatcgctcgccaacgaaccgcagccccggctggtagcgcgtgcgtgcgtgcgtattttgcgcgaaacgaagaggcgacagcggcattgattggagccgtgcgagttttaaacgcccggccgctacacccgcacacaccaccaccaccactactaccacagggtcaggatccgatgccccattactactttggcattagcagtcggtgagaagcggggagagcagcgcgagagagggcacgtacggtggttcgttcaacaccctactagcaagctcagccctagtccggagccacggcgcggctagggagccgtgcccggcggccgtcgtcgccgcgcgcgtgcgccgccgcaccggtaagcatccgtttactttgtacagggatttccaatgctgcatagactccaagtatatgatctagctagcttctcagttacagtaatctgatgaaccccagaggcacacagatcgtgtcgacagctaggttcacgattgggaggaaattcacaggggcggacactaccacgccgccttgtgctcctacaccctttgctttcaacggcctgtttggatacagattgacctggcttattagccaaattatctctaatctctctgttttttttaataattgtgtcaacatccttttacactggcatacaagaggcatatggccggcattctcctgtactgccgtccgtagcaacaaaagttccaataatcacacctccacatctccgactccgatccacatgatgaacagtgatgcgcatcgtgacgtgagcgagcagggatcgtggacctccacagggacgtgcagacctgcgggtaccacgacgtcgaggtgatgtggggcatgctgggcctggacgccgggccgcccagcgcgccggagcgccggaaccgctcgccgccgttctggacctggacgccgtccttctggcacttcgggtcgtcgcgccgcacgcccacgcccacgcccacgcccgccgcgcggtagatgatgatgactaggcagtgtctgtgtgggcctctggggcttatactactgtcagtttaatttggctaggaaatgcatggtgctggtgtgacagtgtgtgtgctatgcatgtgtgtgcacggtgcacctttactcctactacgcgttgtagagagagagagagagaagaaaacgcacataaaaaaatcagctctaattccccatgtttattttgctttgcgttctgtggttctgtccttgttcatgcatgtgatggctggtcgcgagggacagacatggcgacatgtttgtcagcggtgtgcaaatggcggagcgttcttttcattactggaccctgacctcactacaaagtttgatgtgag

SEQ ID NO: 46059 - DNA, 960 bp, Zea Mays
cgccgacctggccgggatcgcatcaaatcgctcgccaacgaaccgcagccccggctggtagcgcgtgcgtgcgtgcgtattttgcgcgaaacgaagaggcgacagcggcattgattggagccgtgcgagttttaaacgcccggccgctacacccgcacacaccaccaccaccactactaccacagggtcaggatccgatgccccattactactttggcattagcagtcggtgagaagcggggagagcagcgcgagagagggcacgtacggtggttcgttcaacaccctactagcaagctcagccctagtccggagccacggcgcggctagggagccgtgcccggcggccgtcgtcgccgcgcgcgtgcgccgccgcaccgagcgagcagggatcgtggacctccacagggacgtgcagacctgcgggtaccacgacgtcgaggtgatgtggggcatgctgggcctggacgccgggccgcccagcgcgccggagcgccggaaccgctcgccgccgttctggacctggacgccgtccttctggcacttcgggtcgtcgcgccgcacgcccacgcccacgcccacgcccgccgcgcggtagatgatgatgactaggcagtgtctgtgtgggcctctggggcttatactactgtcagtttaatttggctaggaaatgcatggtgctggtgtgacagtgtgtgtgctatgcatgtgtgtgcacggtgcacctttactcctactacgcgttgtagagagagagagagagaagaaaacgcacataaaaaaatcagctctaattccccatgtttattttgctttgcgttctgtggttctgtccttgttcatgcatgtgatggctggtcgcgagggacagacatggcgacatgtttgtcagcggtgtgcaaatggcggagcgttcttttcattactggaccctgacctcactacaaagtttgatgtgag

SEQ ID NO: 46060 - DNA, 1396 bp, Zea Mays
ctgcctctcttcctattgctattgtgccttaggatatcactacgtacttgtgtctttagagatctctgttggacatgtttgtcatcacaaattgtgttgacaaaattttctttaattggtgttaacccttgcctatcacgtatatcatcatttcggagtcgatctcttcttgtatggccataaacctaacacaacaggactaattgggctgcaccaagaagtttgctataggtaaaggaaaagtgtctcacttgaagtttggtatgttgagcagcttcggaggaactggtccagaaaacatattattctcgacatttctgtttagaggtacataaagtattagaaagagccaaagagtcacgaatattgtatgcatgacagaacatttatgacaataaataatttgaggtgtgaatttaacatcatttggatttatactaaataaaattatatgccccatgcatcatgtgaaagggatgtctgtggctgttgtttgttgtagaaatctgataggcaagatacaaacattaatgtatccacttttctggggatggggaataactggacccaaaagcagaactggtcaattgtattaaaaagcctagagaaataggcacccaaaagaactggctgcattttaaatttaattaattaattaataagaaaataggcacccaaattcgcctcgacgaggacttgaacctgggtggtctgggcagttaaccaaataagttactttgtcattgtttcatgagcaaatgaactagctcagcttcatgagcagttatattagcaaagggctccataaaaacagtgaaataagttactttgtcaatatctttttttctctttccaactagcaaactatgctgaaggtgcatttacaattactacactgcgaactatacttctgaacctgaaagccttaagagagcactaaaaggatataacttttgtcgagtaaattcaaggtggcttcgctaatacagcatagagttatcacattgcatgtctagggctaatttaagtcgcctatcattataatctgtagtttaagttcaaaggaatagacccaaagagtattacttggaggcggtcttttttttgggttaaatcagcagttaactgcccaaataattgcagttattctgcttaatctgtagattatgatgaactataataaatgaaaagttaactgacaacagagaagagggtctggacatacaaatctttgagggagagatcctgcaagacatcaagggtcccagatagttgattatcctgcatgtgcctgtgcaaagtgcaatagaagatcatgaaagagtatgtacaaggtaagagggtaaaaataaaaggaaacggtcagtagaattacaatgtagtcagtgatgtcaag

SEQ ID NO: 46061 - DNA, 576 bp, Zea Mays
ctactttgattctacgactaacatcttcattaatatcccaacattgattttaaataccgaaagaaagttgtgacacggatcccatgtatgtggaatggaacaaaaagaccatgctacctttttgctagaaagttctacccagaatctctgaacaacttgctgaagctattttccagttacacatcggcttgattcaacattttttttgttcatttggcctaggagattcccctagttttttttttctgcttcatgtaaattgtgaaattgatacttagaggcttaacacagagttacgggtacagggccagtgatgtaattctgtgagtcccttggtagggctgaggtgctgtttgtttagtattgacctgccctccctgtcgttcttggtgccgtctgttaggttcctagcgcccattccctgagtaacagggtttttgtcagttattactgattaattctttgtagacatgaagagattacgaaatcagttacacttcatagtttaacctggacttgtttcgagttctagtggcagttgtactcttctgatgagtacggcatcatgttctcatt

SEQ ID NO: 46062 - DNA, 1273 bp, Zea Mays
tctctccttcctctcacattccactagaacactcccaccaggccaccacctccacctcgtcgtctcccaccaccgccgcgcgcgagccctagcccgatctagccggcggcaggcactagatcccgccgcttgcggcatcccgggacgcgcctcgccgaattcgccgctcctcgcactgcaacacgcccggaccactgtagtatgggggaggatttcgatggttgatgcagagaagaggctgttagcaaatgcattggaagatgtcgataatcaattttttgtcttgctttctgacagctgtgttccagtacatacatttgattacatatataattatctgatgggaacaaatgtcagcttcattgattgcttcctggatcctggcccacatggaactggaaggtattccatggaaatgcttcctgaaatagaacagagggacttcaggaagggtgcccagtggtttgctataacacgaaggcatgctttattgattctggctgacaacctttactacaataagttcaagctgtactgcaagccagcagagggacgcaactgtattgctgatgagcattatttgccaaccttcttcaatatggtcgatcctggtggaatagctaactggtcagtgactcatgttgattggtccgagggaaaatggcatccaaggtcatatagagctgcagatgttacctatgaactcttaaagaacataacgtctgtcaatgagaatttccgcattacaagtgatgataagaaagttgtgacacggatcccatgtatgtggaatggaacaaaaagaccatgctacctttttgctagaaagttctacccagaatctctgaacaacttgctgaagctattttccagttacacatcggcttgattcaacattttttttgttcatttggcctaggagattcccctagttttttttttctgcttcatgtaaattgtgaaattgatacttagaggcttaacacagagttacgggtacagggccagtgatgtaattctgtgagtcccttggtagggctgaggtgctgtttgtttagtattgacctgccctccctgtcgttcttggtgccgtctgttaggttcctagcgcccattccctgagtaacagggtttttgtcagttattactgattaattctttgtagacatgaagagattacgaaatcagttacacttcatagtttaacctggacttgtttcgagttctagtggcagttgtactcttctgatgagtacggcatcatgttctcatt

SEQ ID NO: 46063 - DNA, 670 bp, Zea Mays
caatatgttcttatgacgatgaagttgcgctttctaaatatatgaacctggccacctgggtgcatgcttccatgtgctgaagccattggatagaagaagcttcagcattctgtggcaccaagcactggaacacaagtctaaaaaggcagcaccccaaggacactaggtattaataatagtaccaaaaaatagaatgtttcaccatctaccgtaaagcccaaggaagtgcttatcctgaaagcaatggatatgaagagccaaagaagcagaatcgggtcacatggaccattgagctccatgaaaaagtttttggaggctatcgaatctcttgggggaaacaagtcctcgtgaaacctggagtttgaacacatggctgttcccatggcttttgtagatgaagtggagcagcgcttgttgttttgtaaggtttatgtatataactatgtggatttgcaatagccctaataccatgtatatacctcccgctgtggtgcctatgagcctgtccctacgtacaacacctaacgtaggcttggatcctgtcatcttattttgaatcagtttcttgctgtatcaagcctgttcattacactgctatatctctatgtatgataacttgtgtgctgaaacagaaaacaaccgcaactttaatataaattatgttcagtct

SEQ ID NO: 46064 - DNA, 2557 bp, Zea Mays
aagacatcttgcaactatccgatcacaagaagctcacaaaatcacaacacacatctcttcacaacacgatactcctaaaaaaaaacgaaataaaatcgacgacgacgtctaatctatttaaggctgaaatccaccttgcctgcgtggccctcctccccatcgcgtctgtccgctacccctccccgaccagatcgctacgagacgccgcgcgatccgacccaggccgacgccgacgacccctctcgccgccggcggccatggcgtacggcgaccgcgtcaccaccttcgaggactccgagaaggagagcgagtacggctatgtccgcaagatttggttacctgcgggttctcggcttgggatttgggtggtgttggcggttactgtcgtggatctcttgggcgtggctggccttgtccaggtggtgctggcctgctgggatctagccagcattggtggtcaggtctctggacctgtggttgtggctgatggaatgggtggtgctgccatgtatgaacttgttcgtgtcggacatgataacctcattggggaaattatccgtcttgagggcgattcagctacaatccaagtttatgaggaaacagctggactgatggttaatgaccctgtattgagaacaagaaagcctctttcagttgaattgggacctggaattcttggaaacatttttgacggtatccagcgacctctaaaaaccatcgctattaagtcaggagatgtgtatattcctcgtggtgtttcagttcctgcccttgacaaagatgtattgtgggaatttcagccaacgaagctaggtgttggagatgtcatcacaggtggagatctatacgctactgtttttgagaacacattgatgcagcaccatgttgctcttccaccgggttctatggggaaaataagttacattgcaccagctggccagtacaacctgcaggacacagtgctagaattggaatttcagggcataaaaaagaaatttaccatgcttcagacatggcctgtgcgttcaccaaggcctgttgcatcgaagcttgctgcggatacacctcttctgacagggcagcgtgtactggatgcactattcccctcggttctgggaggcacttgtgctattccaggagcatttggctgtggtaaaactgtcattagtcaggcactttccaagtactccaattccgaagctgtggtttatgtgggctgtggtgaacgaggaaacgagatggctgaggttctcatggactttccccagttgacgatgacattgcctgatggccgtgaggagtctgtcatgaagagaacaacactggtggctaacacatcaaacatgcctgtcgctgctcgtgaagcttccatttacactggaattacaattgctgagtatttccgtgatatgggctacaacgtcagtatgatggctgactccacctcccggtgggctgaggcattgcgtgagatctcagggcgtttggctgaaatgcctgctgatagtggttacccagcttacttggctgcacgtttggcatccttttatgaacgtgctggtaaggtaaaatgtctgggaagtccagacaggaatggcagtgtcacaattgttggagctgtctctcctcctggtggtgatttttcagaccctgttacctccgcaaccctcagtattgttcaggtcttctggggtttagataaaaagctcgctcaaaggaagcatttcccatctgtgaattggctcatttcctattcgaaatactccaaggcccttgagtctttttacgagaaatttgatccagatttcattgatattaggacaaaagcacgtgaggtgttgcagagggaggacgatctgaatgaaattgtgcagcttgttggtaaagatgcgctggcagaatctgacaagattacgctggagacagcaaagcttttgagagaagattatttggcacaaaatgcattcaccccatatgataagttctgcccattctacaaatccgtttggatgatgcgcaacattattcacttcaacacattggcaaatcaggctgtggagcgggcagctggtactgacggccataagataacatacagtgtcataaagcatcggttgggggatctattttatcgcctagtatcccaaaagttcgaggatcctgcagaaggcgaagaagctttggtcggcaagtttaagaaactgtacgacgaccttaccactgggttccgcaacctagaagatgaggcacggtgaactgctgtagattttgtgtaagacaataatggctgccaaatgttttataaggtacggaagttgtagattgagaccatgtatgagaattttccccaccgctactcatttctttgccaccactattttagtcatcagtgctggatgggcaccctgtttatttcgacgtaccctttattgctagcattgtaataagcgatgggcatgcttgtagttgaataagtacaatgtccatgtattcaaacatcagcgtcatgtttatttgtttgttgaaaaaactatgttgcctttttggaatttgttcg

SEQ ID NO: 46065 - DNA, 705 bp, Zea Mays
catggggaagctgattattattaaacgggtccggacatgtctatagctgcttcaaaattcgatggagcaccggatcttcagcgtgctctctctcttctgtcagttggcgcctgcggattgcccgatcctgtacaccaaacatcttgcgtcatccaattcactagtgccagcgagaacagtggcgaccttcatctatcacatggagcgaactctggtctagcgtcatgcggtgatggacagcatatagcttctcagcctcaggctcagctggttcggtttaccatggataccagcaacagtgtctatgagcccagtttcttcagtgtaaaccagataaattaagcgttgaagacacacgccacttggtcatttggataaatagccctgaagatggcctgagcttgtgcaagaagttcttcaaccaaccaccggacataaggatctatctgttaatgttatctgtgtatttattagccatacctgaattaagttgaacccaatctaggccagcttatgtgcaatatgcagttccaacctgtgattgacccattttttctgttgtttctttgcccgtgatgtgactgctctggaacttaagtgtgatactgttgtagttacactttactgccctgacaatcatgtcaaacggctggatatctttgaaactgtccttgatgaatctggacgtgtattttgtgtgtgtgt

SEQ ID NO: 46066 - DNA, 2482 bp, Zea Mays
gggtaagtatcttaagttgtgtcttcgagtgtccagaggggtgaatgtaaaaaactcaagacatgtatcttgacgaatacacaatgtcttagctctatgtttaagacatgagactaactgattggtcactttaatttatcgaatgatttgattggtataatgaatatggtaagacacatgttttagacatatttactgtattttgttgtgttttagttgtgtcttatatttggagtactgtgcaacagtgtctaggctgtagatacgtaagtcgttgtcaaagaaaaagtattgggatgcgaaaaaacgtgagtggaaaataaagaaaaaaaggaggcccaaatataaagaagaccagccttttttttctattccaaattccgtttcccccgtctcttcttctgcacagtccacactgttcacttccggccccctcccccgcacctccctccgatcccccaaatcccgaattgaccaacccaaagccgtcgccccgcatggagtggacggccccgaagcgcgccgcctcgccgccctcgcctccgctcctctgggactggggaggagaccacgccggcgccacgggctcgggctcgggctcctccggcgacgccccggcgcggcgcggcgggagggagcgggaggcgaagcgcgccagggccgacgacggcgaggtgaggtgccaggtggaggggtgcgggctggacctcagcagggtcaaggagtaccaccggaagcaccgcgtctgcgaggcccacaccaagtccccccgcgtcgtcgtcgccggtcaggagcggcgcttctgccagcagtgcagccgatttcatgccctgtcagagtttgatcagaagaagaggagctgcaggaggcgtctgtctgatcacaatgcccgccgccggaagcctcagccagatgcattcgcctttgcctctgcaaggctgccttcgtcgtcgttcggtaatgtgttcatatcttaacttaagtagtgcttgaaatttgctagcagtggacactggcaaaatggtggtgatgggctcttagccagctgcatgtacagcaacgccaatagatgtcttgttgcgcaaatggcaagctttctatcttttatacttggcaataagttgctgttgcgtttcttcatggaaatatatacaaactaaactagacattttttttgacgggcaaaagctgtagggggaacccctacagcagcaataaatatactccctccgttcttttttacttgtcgcgttttagttcaaaaataaactagcggccagcaaatattcaaaaacggaggtagtatatattaaaaaagaaagagaacttgtactgagagaaggtgaaaccaccaaaagggcagagaaagaaaagaaagagaggggggggggggggtagagagaacttagccataaggatatttgcagcttgagatcctggctaaatctatacatctgaagcttcagcgcgttgttgaagcagactttccaggacgaaaacgaaggggcctcctccggaaagataaaagcatttctttgtttccagatttcccaagctgctatttgcacaacaagtttagtaatatgataggaggcaaataagttttgtctggaataaagctcctgttagccatcctttcacttctccatgggacagctcatctgagctccctcatgcaaaggaaataagagaggtgtcaacgaaagttgggacaattactggacaagttcatttggataaatcttacgtgtccaatgctgttccatcacttacccatggcaaagatgagccttggccaatgaaaggtccggacatgtctatagctgcttcaaaattcgatggagcaccggatcttcagcgtgctctctctcttctgtcagttggcgcctgcggattgcccgatcctgtacaccaaacatcttgcgtcatccaattcactagtgccagcgagaacagtggcgaccttcatctatcacatggagcgaactctggtctagcgtcatgcggtgatggacagcatatagcttctcagcctcaggctcagctggttcggtttaccatggataccagcaacagtgtctatgagcccagtttcttcagtgtaaaccagataaattaagcgttgaagacacacgccacttggtcatttggataaatagccctgaagatggcctgagcttgtgcaagaagttcttcaaccaaccaccggacataaggatctatctgttaatgttatctgtgtatttattagccatacctgaattaagttgaacccaatctaggccagcttatgtgcaatatgcagttccaacctgtgattgacccattttttctgttgtttctttgcccgtgatgtgactgctctggaacttaagtgtgatactgttgtagttacactttactgccctgacaatcatgtcaaacggctggatatctttgaaactgtccttgatgaatctggacgtgtattttgtgtgtgtgt

SEQ ID NO: 46067 - DNA, 1979 bp, Zea Mays
gggtaagtatcttaagttgtgtcttcgagtgtccagaggggtgaatgtaaaaaactcaagacatgtatcttgacgaatacacaatgtcttagctctatgtttaagacatgagactaactgattggtcactttaatttatcgaatgatttgattggtataatgaatatggtaagacacatgttttagacatatttactgtattttgttgtgttttagttgtgtcttatatttggagtactgtgcaacagtgtctaggctgtagatacgtaagtcgttgtcaaagaaaaagtattgggatgcgaaaaaacgtgagtggaaaataaagaaaaaaaggaggcccaaatataaagaagaccagccttttttttctattccaaattccgtttcccccgtctcttcttctgcacagtccacactgttcacttccggccccctcccccgcacctccctccgatcccccaaatcccgaattgaccaacccaaagccgtcgccccgcatggagtggacggccccgaagcgcgccgcctcgccgccctcgcctccgctcctctgggactggggaggagaccacgccggcgccacgggctcgggctcgggctcctccggcgacgccccggcgcggcgcggcgggagggagcgggaggcgaagcgcgccagggccgacgacggcgaggtgaggtgccaggtggaggggtgcgggctggacctcagcagggtcaaggagtaccaccggaagcaccgcgtctgcgaggcccacaccaagtccccccgcgtcgtcgtcgccggtcaggagcggcgcttctgccagcagtgcagccgatttcatgccctgtcagagtttgatcagaagaagaggagctgcaggaggcgtctgtctgatcacaatgcccgccgccggaagcctcagccagatgcattcgcctttgcctctgcaaggctgccttcgtcgtcgttcgcttcagcgcgttgttgaagcagactttccaggacgaaaacgaaggggcctcctccggaaagataaaagcatttctttgtttccagatttcccaagctgctatttgcacaacaagtttagtaatatgataggaggcaaataagttttgtctggaataaagctcctgttagccatcctttcacttctccatgggacagctcatctgagctccctcatgcaaaggaaataagagaggtgtcaacgaaagttgggacaattactggacaagttcatttggataaatcttacgtgtccaatgctgttccatcacttacccatggcaaagatgagccttggccaatgaaaggtccggacatgtctatagctgcttcaaaattcgatggagcaccggatcttcagcgtgctctctctcttctgtcagttggcgcctgcggattgcccgatcctgtacaccaaacatcttgcgtcatccaattcactagtgccagcgagaacagtggcgaccttcatctatcacatggagcgaactctggtctagcgtcatgcggtgatggacagcatatagcttctcagcctcaggctcagctggttcggtttaccatggataccagcaacagtgtctatgagcccagtttcttcagtgtaaaccagataaattaagcgttgaagacacacgccacttggtcatttggataaatagccctgaagatggcctgagcttgtgcaagaagttcttcaaccaaccaccggacataaggatctatctgttaatgttatctgtgtatttattagccatacctgaattaagttgaacccaatctaggccagcttatgtgcaatatgcagttccaacctgtgattgacccattttttctgttgtttctttgcccgtgatgtgactgctctggaacttaagtgtgatactgttgtagttacactttactgccctgacaatcatgtcaaacggctggatatctttgaaactgtccttgatgaatctggacgtgtattttgtgtgtgtgt

SEQ ID NO: 46068 - DNA, 3457 bp, Zea Mays
aattatagcaaagagtcggaagaggtgggcccttccctccggcgtccgccgccgtcaccactcgtcgttttcctagttcgcacacccatccgccggcggcctccccccgtctcgatagtcgataccaggttctaaatggcgatggcgatgatggctatgcgacgcgcggtggcgctcggcgctcgccacatccccgccgccgcagcctcttcgttccgagtcgtctccctccgccacatgagcgcggacgcgggcgccgcgatggagaagatccgcgccgccgggctgctcaggacgcaggggcttatcgctgggcagtgggtggacgcctacgacggaaagaccattgaggtgcaaaatccagcaactggtgaggtcctggcaaacgtgtcctgtatgggcagcagagaaacatctgatgctattgcttctgctcacagtacattctattcttggagtaaactcactgcaagtgagaggagcaaggcactaagaaaatggtacgatctaattatttcacacaaggaagagcttgcacttctcatgacactggagcaggggaaacctatgaaagaagcccttggtgaggtcaattatggtgcaagtttcatagaatattttgcagaggaagcaaagcgtatatatggtgacatcattcccccaactttatctgatcgcagattgttggttttgaagcagcctgttggggtagttggagctattacaccatggaattttccattagcaatgataacccggaaggttggaccagctttggcctgtggctgtactgttgttgtcaagccatcggagttcacacctctgacagcattagctgcagcagatcttgctcttcaagcgggaataccagcgggtgcattgaatgttgtgatgggtaatgctgctgagataggtgatgcgttgctgcagagtacacaggtcagaaagattacattcactggatcaacagctgttgggaaaaaactgatggctggatctgcaaatactgtgaaaaaggtctccttggaacttggtgggaatgcaccttgcattgttttcgatgatgcggacattgatgttgctgttaaaggcagtcttgctgccaagtttcgtaacagtggacagacatgtgtttgtgcaaacaggatattggtgcaagaaggtatctacgaaaagtttgcaaaagcattcatccaggctgttcagagtttgaaggttggtaacggtctagaagagagtacatctcagggtcctctgattaacgaagctgctgttcaaaaggtggagaagttcataaatgacgcgacttcaaagggagcaaatgtcatgctaggtggtaaaagacacagcctgggaatgtcattttatgagccaactgtagtagggaatgtcagcaatgatatgcttcttttcagagaagaagtttttggtccagttgcaccccttataccgttcaaaactgaggaagaagcagttcatatggccaacgatacaaacgcaggcttagctgcatacatatttaccaagagcatacctcgttcatggcgtgtatctgaatctcttgagtacggcttagttggggtaaacgagggaattatttcaacggaggtggcgccatttggcggagtaaagcagtctggtctagggagagaaggatcgaagtacggcattgacgagtacttggagctcaagtacatctgcatgggcaacttgggttgagtcctgaagtcggcctctagctcgaaacactcggcagatgatgaacggagaaaccaggcgtgcttagaagggcgtgagttgcgtttagctgcaagatcggtcatgatggattgatggcttcgaacctgtatacggcctgtttggattctcttctaccgtcgcttcagccaccaggcttcccaccgaagccacccccgcaacggtccgatagaagcgggcttccgtagaaagctgggctagctgggcatctgtccagtccttggctctcgccacgctagggtttctttggtccccgctgcctcgcatcgctcctgtctcgccttctaggcggagctgggattcttctcaatgacgacaacgagattctaagttcttcacgacgattctgatcccttcaaacttcatcgatagttagcatttgttatccatgatttgtcgtagtgaattgaagtttttggatcgagttcatcggattccagccgatgtacaccgagagatcccctttcatactttccagcataggtacttctccaaagatccagttcaagttggtgtccccgcacaatcgagttaaccaagatttcatgccctgtcagagtttgatcagaagaagaggagctgcaggaggcgtctgtctgatcacaatgcccgccgccggaagcctcagccagatgcattcgcctttgcctctgcaaggctgccttcgtcgtcgttcgcttcagcgcgttgttgaagcagactttccaggacgaaaacgaaggggcctcctccggaaagataaaagcatttctttgtttccagatttcccaagctgctatttgcacaacaagtttagtaatatgataggaggcaaataagttttgtctggaataaagctcctgttagccatcctttcacttctccatgggacagctcatctgagctccctcatgcaaaggaaataagagaggtgtcaacgaaagttgggacaattactggacaagttcatttggataaatcttacgtgtccaatgctgttccatcacttacccatggcaaagatgagccttggccaatgaaaggtccggacatgtctatagctgcttcaaaattcgatggagcaccggatcttcagcgtgctctctctcttctgtcagttggcgcctgcggattgcccgatcctgtacaccaaacatcttgcgtcatccaattcactagtgccagcgagaacagtggcgaccttcatctatcacatggagcgaactctggtctagcgtcatgcggtgatggacagcatatagcttctcagcctcaggctcagctggttcggtttaccatggataccagcaacagtgtctatgagcccagtttcttcagtgtaaaccagataaattaagcgttgaagacacacgccacttggtcatttggataaatagccctgaagatggcctgagcttgtgcaagaagttcttcaaccaaccaccggacataaggatctatctgttaatgttatctgtgtatttattagccatacctgaattaagttgaacccaatctaggccagcttatgtgcaatatgcagttccaacctgtgattgacccattttttctgttgtttctttgcccgtgatgtgactgctctggaacttaagtgtgatactgttgtagttacactttactgccctgacaatcatgtcaaacggctggatatctttgaaactgtccttgatgaatctggacgtgtattttgtgtgtgtgt

SEQ ID NO: 46069 - DNA, 3317 bp, Zea Mays
aattatagcaaagagtcggaagaggtgggcccttccctccggcgtccgccgccgtcaccactcgtcgttttcctagttcgcacacccatccgccggcggcctccccccgtctcgatagtcgataccaggttctaaatggcgatggcgatgatggctatgcgacgcgcggtggcgctcggcgctcgccacatccccgccgccgcagcctcttcgttccgagtcgtctccctccgccacatgagcgcggacgcgggcgccgcgatggagaagatccgcgccgccgggctgctcaggacgcaggggcttatcgctgggcagtgggtggacgcctacgacggaaagaccattgaggtgcaaaatccagcaactggtgaggtcctggcaaacgtgtcctgtatgggcagcagagaaacatctgatgctattgcttctgctcacagtacattctattcttggagtaaactcactgcaagtgagaggagcaaggcactaagaaaatggtacgatctaattatttcacacaaggaagagcttgcacttctcatgacactggagcaggggaaacctatgaaagaagcccttggtgaggtcaattatggtgcaagtttcatagaatattttgcagaggaagcaaagcgtatatatggtgacatcattcccccaactttatctgatcgcagattgttggttttgaagcagcctgttggggtagttggagctattacaccatggaattttccattagcaatgataacccggaaggttggaccagctttggcctgtggctgtactgttgttgtcaagccatcggagttcacacctctgacagcattagctgcagcagatcttgctcttcaagcgggaataccagcgggtgcattgaatgttgtgatgggtaatgctgctgagataggtgatgcgttgctgcagagtacacaggtcagaaagattacattcactggatcaacagctgttgggaaaaaactgatggctggatctgcaaatactgtgaaaaaggtctccttggaacttggtgggaatgcaccttgcattgttttcgatgatgcggacattgatgttgctgttaaaggcagtcttgctgccaagtttcgtaacagtggacagacatgtgtttgtgcaaacaggatattggtgcaagaaggtatctacgaaaagtttgcaaaagcattcatccaggctgttcagagtttgaaggttggtaacggtctagaagagagtacatctcagggtcctctgattaacgaagctgctgttcaaaaggtggagaagttcataaatgacgcgacttcaaagggagcaaatgtcatgctaggtggtaaaagacacagcctgggaatgtcattttatgagccaactgtagtagggaatgtcagcaatgatatgcttcttttcagagaagaagtttttggtccagttgcaccccttataccgttcaaaactgaggaagaagcagttcatatggccaacgatacaaacgcaggcttagctgcatacatatttaccaagagcatacctcgttcatggcgtgtatctgaatctcttgagtacggcttagttggggtaaacgagggaattatttcaacggaggtggcgccatttggcggagtaaagcagtctggtctagggagagaaggatcgaagtacggcattgacgagtacttggagctcaagtacatctgcatgggcaacttgggttgagtcctgaagtcggcctctagctcgaaacactcggcagatgatgaacggagaaaccaggcgtgcttagaagggcgtgagttgcgtttagctgcaagatcggtcatgatggattgatggcttcgaacctgtatacggcctgtttggattctcttctaccgtcgcttcagccaccaggcttcccaccgaagccacccccgcaacggtccgatagaagcgggcttccgtagaaagctgggctagctgggcatctgtccagtccttggctctcgccacgctagggtttctttggtccccgctgcctcgcatcgctcctgtctcgccttctaggcggagctgggattcttctcaatgacgacaacgagattctaagttcttcacgacgattctgatcccttcaaacttcatcgatagttagcatttgttatccatgatttgtcgtagtgaattgaagtttttggatcgagttcatcggattccagccgatgtacaccgagagatcccctttcatactttccagcataggtacttctccaaagatccagttcaagttggtgtccccgcacaatcgagttaaccaagagtttgatcagaagaagaggagctgcaggaggcgtctgtctgatcacaatgcccgccgccggaagcctcagccagatgcattcgcctttgcctctgcaaggctgccttcgtcgtcgttcgatgataggaggcaaataagttttgtctggaataaagctcctgttagccatcctttcacttctccatgggacagctcatctgagctccctcatgcaaaggaaataagagaggtgtcaacgaaagttgggacaattactggacaagttcatttggataaatcttacgtgtccaatgctgttccatcacttacccatggcaaagatgagccttggccaatgaaaggtccggacatgtctatagctgcttcaaaattcgatggagcaccggatcttcagcgtgctctctctcttctgtcagttggcgcctgcggattgcccgatcctgtacaccaaacatcttgcgtcatccaattcactagtgccagcgagaacagtggcgaccttcatctatcacatggagcgaactctggtctagcgtcatgcggtgatggacagcatatagcttctcagcctcaggctcagctggttcggtttaccatggataccagcaacagtgtctatgagcccagtttcttcagtgtaaaccagataaattaagcgttgaagacacacgccacttggtcatttggataaatagccctgaagatggcctgagcttgtgcaagaagttcttcaaccaaccaccggacataaggatctatctgttaatgttatctgtgtatttattagccatacctgaattaagttgaacccaatctaggccagcttatgtgcaatatgcagttccaacctgtgattgacccattttttctgttgtttctttgcccgtgatgtgactgctctggaacttaagtgtgatactgttgtagttacactttactgccctgacaatcatgtcaaacggctggatatctttgaaactgtccttgatgaatctggacgtgtattttgtgtgtgtgt

SEQ ID NO: 46070 - DNA, 3694 bp, Zea Mays
aaaagcttcataattatagcaaagagtcggaagaggtgggcccttccctccggcgtccgccgccgtcaccactcgtcgttttcctagttcgcacacccatccgccggcggcctccccccgtctcgatagtcgataccaggttctaaatggcgatggcgatgatggctatgcgacgcgcggtggcgctcggcgctcgccacatccccgccgccgcagcctcttcgttccgagtcgtctccctccgccacatgagcgcggacgcgggcgccgcgatggagaagatccgcgccgccgggctgctcaggacgcaggggcttatcgctgggcagtgggtggacgcctacgacggaaagaccattgaggtgcaaaatccagcaactggtgaggtcctggcaaacgtgtcctgtatgggcagcagagaaacatctgatgctattgcttctgctcacagtacattctattcttggagtaaactcactgcaagtgagaggagcaaggcactaagaaaatggtacgatctaattatttcacacaaggaagagcttgcacttctcatgacactggagcaggggaaacctatgaaagaagcccttggtgaggtcaattatggtgcaagtttcatagaatattttgcagaggaagcaaagcgtatatatggtgacatcattcccccaactttatctgatcgcagattgttggttttgaagcagcctgttggggtagttggagctattacaccatggaattttccattagcaatgataacccggaaggttggaccagctttggcctgtggctgtactgttgttgtcaagccatcggagttcacacctctgacagcattagctgcagcagatcttgctcttcaagcgggaataccagcgggtgcattgaatgttgtgatgggtaatgctgctgagataggtgatgcgttgctgcagagtacacagaaagattacattcactggatcaacagctgttgggaaaaaactgatggctggatctgcaaatactgtgaaaaaggtctccttggaacttggtgggaatgcaccttgcattgttttcgatgatgcggacattgatgttgctgttaaaggcagtcttgctgccaagtttcgtaacagtggacagacatgtgtttgtgcaaacaggatattggtgcaagaaggtatctacgaaaagtttgcaaaagcattcatccaggctgttcagagtttgaaggttggtaacggtctagaagagagtacatctcagggtcctctgattaacgaagctgctgttcaaaaggtggagaagttcataaatgacgcgacttcaaagggagcaaatgtcatgctaggtggtaaaagacacagcctgggaatgtcattttatgagccaactgtagtagggaatgtcagcaatgatatgcttcttttcagagaagaagtttttggtccagttgcaccccttataccgttcaaaactgaggaagaagcagttcatatggccaacgatacaaacgcaggcttagctgcatacatatttaccaagagcatacctcgttcatggcgtgtatctgaatctcttgagtacggcttagttggggtaaacgagggaattatttcaacggaggtggcgccatttggcggagtaaagcagtctggtctagggagagaaggatcgaagtacggcattgacgagtacttggagctcaagtacatctgcatgggcaacttgggttgagtcctgaagtcggcctctagctcgaaacactcggcagatgatgaacggagaaaccaggcgtgcttagaagggcgtgagttgcgtttagctgcaagatcggtcatgatggattgatggctgtgggagagcagttttagaataaatcgaataagccgcggagcattaaataaaagaagtggaaatgagatgtaaatggcgtggaactataaagtatggcttcaccttcgaacctgtatacggcctgtttggattctcttctaccgtcgcttcagccaccaggcttcccaccgaagccacccccgcaacggtccgatagaagcgggcttccgtagaaagctgggctagctgggcatctgtccagtccttggctctcgccacgctagggtttctttggtccccgctgcctcgcatcgctcctgtctcgccttctaggtttctcgcatgctcgcccaacatccctctgtttcctccgttgtgctgcttacccatgtgttctttctttcctcgtgtaggcggagctgggattcttctcaatgacgacaacgagattctaagttcttcacgacgattctgatcccttcaaacttcatcgatagttagcatttgttatccatgatttgtcgtagtgaattgaagtttttggatcgagttcatcggattccagccgatgtacaccgagagatcccctttcatactttccagcataggtagattgcatttttttcgtccattcggtgtagcgaatcctcgtttgagtacagagttcatcggattcgcctgcttctgtagcgcccaaaccttctccactccattgacatcctaaaccgtggtattcctttccaaaaccctaatggttagtggattcgtttgtctcaggtacttctccaaagatccagttcaagttggtgtccccgcacaatcgagttaaccaagatttcatgccctgtcagagtttgatcagaagaagaggagctgcaggaggcgtctgtctgatcacaatgcccgccgccggaagcctcagccagatgcattcgcctttgcctctgcaaggctgccttcgtcgtcgttcgatgataggaggcaaataagttttgtctggaataaagctcctgttagccatcctttcacttctccatgggacagctcatctgagctccctcatgcaaaggaaataagagaggtgtcaacgaaagttgggacaattactggacaagttcatttggataaatcttacgtgtccaatgctgttccatcacttacccatggcaaagatgagccttggccaatgaaaggtccggacatgtctatagctgcttcaaaattcgatggagcaccggatcttcagcgtgctctctctcttctgtcagttggcgcctgcggattgcccgatcctgtacaccaaacatcttgcgtcatccaattcactagtgccagcgagaacagtggcgaccttcatctatcacatggagcgaactctggtctagcgtcatgcggtgatggacagcatatagcttctcagcctcaggctcagctggttcggtttaccatggataccagcaacagtgtctatgagcccagtttcttcagtgtaaaccagataaattaagcgttgaagacacacgccacttggtcatttggataaatagccctgaagatggcctgagcttgtgcaagaagttcttcaaccaaccaccggacataaggatctatctgttaatgttatctgtgtatttattagccatacctgaattaagttgaacccaatctaggccagcttatgtgcaatatgcagttccaacctgtgattgacccattttttctgttgtttctttgcccgtgatgtgactgctctggaacttaagtgtgatactgttgtagttacactttactgccctgacaatcatgtcaaacggctggatatctttgaaactgtccttgatgaatctggacgtgtattttgtgtgtgtgt

SEQ ID NO: 46071 - DNA, 3492 bp, Zea Mays
agaaattcccgcaacaggctacacgcctacaccataaacaaaggcaaaaagcttcataattatagcaaagagtcggaagaggtgggcccttccctccggcgtccgccgccgtcaccactcgtcgttttcctagttcgcacacccatccgccggcggcctccccccgtctcgatagtcgataccaggttctaaatggcgatggcgatgatggctatgcgacgcgcggtggcgctcggcgctcgccacatccccgccgccgcagcctcttcgttccgagtcgtctccctccgccacatgagcgcggacgcgggcgccgcgatggagaagatccgcgccgccgggctgctcaggacgcaggggcttatcgctgggcagtgggtggacgcctacgacggaaagaccattgaggtgcaaaatccagcaactggtgaggtcctggcaaacgtgtcctgtatgggcagcagagaaacatctgatgctattgcttctgctcacagtacattctattcttggagtaaactcactgcaagtgagaggagcaaggcactaagaaaatggtacgatctaattatttcacacaaggaagagcttgcacttctcatgacactggagcaggggaaacctatgaaagaagcccttggtgaggtcaattatggtgcaagtttcatagaatattttgcagaggaagcaaagcgtatatatggtgacatcattcccccaactttatctgatcgcagattgttggttttgaagcagcctgttggggtagttggagctattacaccatggaattttccattagcaatgataacccggaaggttggaccagctttggcctgtggctgtactgttgttgtcaagccatcggagttcacacctctgacagcattagctgcagcagatcttgctcttcaagcgggaataccagcgggtgcattgaatgttgtgatgggtaatgctgctgagataggtgatgcgttgctgcagagtacacaggtcagaaagattacattcactggatcaacagctgttgggaaaaaactgatggctggatctgcaaatactgtgaaaaaggtctccttggaacttggtgggaatgcaccttgcattgttttcgatgatgcggacattgatgttgctgttaaaggcagtcttgctgccaagtttcgtaacagtggacagacatgtgtttgtgcaaacaggatattggtgcaagaaggtatctacgaaaagtttgcaaaagcattcatccaggctgttcagagtttgaaggttggtaacggtctagaagagagtacatctcagggtcctctgattaacgaagctgctgttcaaaaggtggagaagttcataaatgacgcgacttcaaagggagcaaatgtcatgctaggtggtaaaagacacagcctgggaatgtcattttatgagccaactgtagtagggaatgtcagcaatgatatgcttcttttcagagaagaagtttttggtccagttgcaccccttataccgttcaaaactgaggaagaagcagttcatatggccaacgatacaaacgcaggcttagctgcatacatatttaccaagagcatacctcgttcatggcgtgtatctgaatctcttgagtacggcttagttggggtaaacgagggaattatttcaacggaggtggcgccatttggcggagtaaagcagtctggtctagggagagaaggatcgaagtacggcattgacgagtacttggagctcaagtacatctgcatgggcaacttgggttgagtcctgaagtcggcctctagctcgaaacactcggcagatgatgaacggagaaaccaggcgtgcttagaagggcgtgagttgcgtttagctgcaagatcggtcatgatggattgatggcttcgaacctgtatacggcctgtttggattctcttctaccgtcgcttcagccaccaggcttcccaccgaagccacccccgcaacggtccgatagaagcgggcttccgtagaaagctgggctagctgggcatctgtccagtccttggctctcgccacgctagggtttctttggtccccgctgcctcgcatcgctcctgtctcgccttctaggcggagctgggattcttctcaatgacgacaacgagattctaagttcttcacgacgattctgatcccttcaaacttcatcgatagttagcatttgttatccatgatttgtcgtagtgaattgaagtttttggatcgagttcatcggattccagccgatgtacaccgagagatcccctttcatactttccagcataggtacttctccaaagatccagttcaagttggtgtccccgcacaatcgagttaaccaagatttcatgccctgtcagagtttgatcagaagaagaggagctgcaggaggcgtctgtctgatcacaatgcccgccgccggaagcctcagccagatgcattcgcctttgcctctgcaaggctgccttcgtcgtcgttcgactttccaggacgaaaacgaaggggcctcctccggaaagataaaagcatttctttgtttccagatttcccaagctgctatttgcacaacaagtttagtaatatgataggaggcaaataagttttgtctggaataaagctcctgttagccatcctttcacttctccatgggacagctcatctgagctccctcatgcaaaggaaataagagaggtgtcaacgaaagttgggacaattactggacaagttcatttggataaatcttacgtgtccaatgctgttccatcacttacccatggcaaagatgagccttggccaatgaaaggtccggacatgtctatagctgcttcaaaattcgatggagcaccggatcttcagcgtgctctctctcttctgtcagttggcgcctgcggattgcccgatcctgtacaccaaacatcttgcgtcatccaattcactagtgccagcgagaacagtggcgaccttcatctatcacatggagcgaactctggtctagcgtcatgcggtgatggacagcatatagcttctcagcctcaggctcagctggttcggtttaccatggataccagcaacagtgtctatgagcccagtttcttcagtgtaaaccagataaattaagcgttgaagacacacgccacttggtcatttggataaatagccctgaagatggcctgagcttgtgcaagaagttcttcaaccaaccaccggacataaggatctatctgttaatgttatctgtgtatttattagccatacctgaattaagttgaacccaatctaggccagcttatgtgcaatatgcagttccaacctgtgattgacccattttttctgttgtttctttgcccgtgatgtgactgctctggaacttaagtgtgatactgttgtagttacactttactgccctgacaatcatgtcaaacggctggatatctttgaaactgtccttgatgaatctggacgtgtattttgtgtgtgtgt

SEQ ID NO: 46072 - DNA, 3616 bp, Zea Mays
atatcaaatttttttatgatgtattgttgagtgtcgtgtggttgttaatattatataaaacacaatgtatcatgcttttttttatcgggataaggacctgtcctgttgaagatccgatatccgagtgaagatgaatatacgatgaaccttataaccatgataagtatgtgtacgataataaggataagtaaagtttcgtggaaatggagctgttccaacatagtaagaaattcccgcaacaggctacacgcctacaccataaacaaaggcaaaaagcttcataattatagcaaagagtcggaagaggtgggcccttccctccggcgtccgccgccgtcaccactcgtcgttttcctagttcgcacacccatccgccggcggcctccccccgtctcgatagtcgataccaggttctaaatggcgatggcgatgatggctatgcgacgcgcggtggcgctcggcgctcgccacatccccgccgccgcagcctcttcgttccgagtcgtctccctccgccacatgagcgcggacgcgggcgccgcgatggagaagatccgcgccgccgggctgctcaggacgcaggggcttatcgctgggcagtgggtggacgcctacgacggaaagaccattgaggtgcaaaatccagcaactggtgaggtcctggcaaacgtgtcctgtatgggcagcagagaaacatctgatgctattgcttctgctcacagtacattctattcttggagtaaactcactgcaagtgagaggagcaaggcactaagaaaatggtacgatctaattatttcacacaaggaagagcttgcacttctcatgacactggagcaggggaaacctatgaaagaagcccttggtgaggtcaattatggtgcaagtttcatagaatattttgcagaggaagcaaagcgtatatatggtgacatcattcccccaactttatctgatcgcagattgttggttttgaagcagcctgttggggtagttggagctattacaccatggaattttccattagcaatgataacccggaaggttggaccagctttggcctgtggctgtactgttgttgtcaagccatcggagttcacacctctgacagcattagctgcagcagatcttgctcttcaagcgggaataccagcgggtgcattgaatgttgtgatgggtaatgctgctgagataggtgatgcgttgctgcagagtacacaggtcagaaagattacattcactggatcaacagctgttgggaaaaaactgatggctggatctgcaaatactgtgaaaaaggtctccttggaacttggtgggaatgcaccttgcattgttttcgatgatgcggacattgatgttgctgttaaaggcagtcttgctgccaagtttcgtaacagtggacagacatgtgtttgtgcaaacaggatattggtgcaagaaggtatctacgaaaagtttgcaaaagcattcatccaggctgttcagagtttgaaggttggtaacggtctagaagagagtacatctcagggtcctctgattaacgaagctgctgttcaaaaggtggagaagttcataaatgacgcgacttcaaagggagcaaatgtcatgctaggtggtaaaagacacagcctgggaatgtcattttatgagccaactgtagtagggaatgtcagcaatgatatgcttcttttcagagaagaagtttttggtccagttgcaccccttataccgttcaaaactgaggaagaagcagttcatatggccaacgatacaaacgcaggcttagctgcatacatatttaccaagagcatacctcgttcatggcgtgtatctgaatctcttgagtacggcttagttggggtaaacgagggaattatttcaacggaggtggcgccatttggcggagtaaagcagtctggtctagggagagaaggatcgaagtacggcattgacgagtacttggagctcaagtacatctgcatgggcaacttgggttgagtcctgaagtcggcctctagctcgaaacactcggcagatgatgaacggagaaaccaggcgtgcttagaagggcgtgagttgcgtttagctgcaagatcggtcatgatggattgatggcttcgaacctgtatacggcctgtttggattctcttctaccgtcgcttcagccaccaggcttcccaccgaagccacccccgcaacggtccgatagaagcgggcttccgtagaaagctgggctagctgggcatctgtccagtccttggctctcgccacgctagggtttctttggtccccgctgcctcgcatcgctcctgtctcgccttctaggcggagctgggattcttctcaatgacgacaacgagattctaagttcttcacgacgattctgatcccttcaaacttcatcgatagttagcatttgttatccatgatttgtcgtagtgaattgaagtttttggatcgagttcatcggattccagccgatgtacaccgagagatcccctttcatactttccagcataggtacttctccaaagatccagttcaagttggtgtccccgcacaatcgagttaaccaagatttcatgccctgtcagagtttgatcagaagaagaggagctgcaggaggcgtctgtctgatcacaatgcccgccgccggaagcctcagccagatgcattcgcctttgcctctgcaaggctgccttcgtcgtcgttcgatgataggaggcaaataagttttgtctggaataaagctcctgttagccatcctttcacttctccatgggacagctcatctgagctccctcatgcaaaggaaataagagaggtgtcaacgaaagttgggacaattactggacaagttcatttggataaatcttacgtgtccaatgctgttccatcacttacccatggcaaagatgagccttggccaatgaaaggtccggacatgtctatagctgcttcaaaattcgatggagcaccggatcttcagcgtgctctctctcttctgtcagttggcgcctgcggattgcccgatcctgtacaccaaacatcttgcgtcatccaattcactagtgccagcgagaacagtggcgaccttcatctatcacatggagcgaactctggtctagcgtcatgcggtgatggacagcatatagcttctcagcctcaggctcagctggttcggtttaccatggataccagcaacagtgtctatgagcccagtttcttcagtgtaaaccagataaattaagcgttgaagacacacgccacttggtcatttggataaatagccctgaagatggcctgagcttgtgcaagaagttcttcaaccaaccaccggacataaggatctatctgttaatgttatctgtgtatttattagccatacctgaattaagttgaacccaatctaggccagcttatgtgcaatatgcagttccaacctgtgattgacccattttttctgttgtttctttgcccgtgatgtgactgctctggaacttaagtgtgatactgttgtagttacactttactgccctgacaatcatgtcaaacggctggatatctttgaaactgtccttgatgaatctggacgtgtattttgtgtgtgtgt

SEQ ID NO: 46073 - DNA, 2441 bp, Zea Mays
aattatagcaaagagtcggaagaggtgggcccttccctccggcgtccgccgccgtcaccactcgtcgttttcctagttcgcacacccatccgccggcggcctccccccgtctcgatagtcgataccaggttctaaatggcgatggcgatgatggctatgcgacgcgcggtggcgctcggcgctcgccacatccccgccgccgcagcctcttcgttccgagtcgtctccctccgccacatgagcgcggacgcgggcgccgcgatggagaagatccgcgccgccgggctgctcaggacgcaggggcttatcgctgggcagtgggtggacgcctacgacggaaagaccattgaggtgcaaaatccagcaactggtgaggtcctggcaaacgtgtcctgtatgggcagcagagaaacatctgatgctattgcttctgctcacagtacattctattcttggagtaaactcactgcaagtgagaggagcaaggcactaagaaaatggtacgatctaattatttcacacaaggaagagcttgcacttctcatgacactggagcaggggaaacctatgaaagaagcccttggtgaggtcaattatggtgcaagtttcatagaatattttgcagaggaagcaaagcgtatatatggtgacatcattcccccaactttatctgatcgcagattgttggttttgaagcagcctgttggggtagttggagctattacaccatggaattttccattagcaatgataacccggaaggttggaccagctttggcctgtggctgtactgttgttgtcaagccatcggagttcacacctctgacagcattagctgcagcagatcttgctcttcaagcgggaataccagcgggtgcattgaatgttgtgatgggtaatgctgctgagataggtgatgcgttgctgcagagtacacaggtcagaaagattacattcactggatcaacagctgttgggaaaaaactgatggctggatctgcaaatactgtgaaaaaggtctccttggaacttggtgggaatgcaccttgcattgttttcgatgatgcggacattgatgttgctgttaaaggcagtcttgctgccaagtttcgtaacagtggacagacatgtgtttgtgcaaacaggatattggtgcaagaaggtatctacgaaaagtttgcaaaagcattcatccaggctgttcagagtttgaaggttggtaacggtctagaagagagtacatctcagggtcctctgattaacgaagctgctgttcaaaaggtggagaagttcataaatgacgcgacttcaaagggagcaaatgtcatgctaggtggtaaaagacacagcctgggaatgtcattttatgagccaactgtagtagggaatgtcagcaatgatatgcttcttttcagagaagaagtttttggtccagttgcaccccttataccgttcaaaactgaggaagaagcagttcatatggccaacgatacaaacgcaggcttagctgcatacatatttaccaagagcatacctcgttcatggcgtgtatctgaatctcttgagtacggcttagttggggtaaacgagggaattatttcaacggaggtggcgccatttggcggagtaaagcagtctggtctagggagagaaggatcgaagtacggcattgacgagtacttggagctcaagtacatctgcatgggcaacttgggttgagtcctgaagtcggcctctagctcgaaacactcggcagatgatgaacggagaaaccaggcgtgcttagaagggcgtgagttgcgtttagctgcaagatcggtcatgatggattgatggcttcgaacctgtatacggcctgtttggattctcttctaccgtcgcttcagccaccaggcttcccaccgaagccacccccgcaacggtccgatagaagcgggcttccgtagaaagctgggctagctgggcatctgtccagtccttggctctcgccacgctagggtttctttggtccccgctgcctcgcatcgctcctgtctcgccttctaggcggagctgggattcttctcaatgacgacaacgagattctaagttcttcacgacgattctgatcccttcaaacttcatcgatagttagcatttgttatccatgatttgtcgtagtgaattgaagtttttggatcgagttcatcggattccagccgatgtacaccgagagatcccctttcatactttccagcataggtacttctccaaagatccagttcaagttggtgtccccgcacaatcgagttaaccaagacttgtcttggcctgagtcatcgacggaacccgaatttgatgagccattcgacttcgttgcgcattttgaaaaaatgtggggagtcgaatatgactctgatcagatatcgtcgtttagtgacaacgaactgtgaatgatgtgc

SEQ ID NO: 46074 - DNA, 1746 bp, Zea Mays
aattatagcaaagagtcggaagaggtgggcccttccctccggcgtccgccgccgtcaccactcgtcgttttcctagttcgcacacccatccgccggcggcctccccccgtctcgatagtcgataccaggttctaaatggcgatggcgatgatggctatgcgacgcgcggtggcgctcggcgctcgccacatccccgccgccgcagcctcttcgttccgagtcgtctccctccgccacatgagcgcggacgcgggcgccgcgatggagaagatccgcgccgccgggctgctcaggacgcaggggcttatcgctgggcagtgggtggacgcctacgacggaaagaccattgaggtgcaaaatccagcaactggtgaggtcctggcaaacgtgtcctgtatgggcagcagagaaacatctgatgctattgcttctgctcacagtacattctattcttggagtaaactcactgcaagtgagaggagcaaggcactaagaaaatggtacgatctaattatttcacacaaggaagagcttgcacttctcatgacactggagcaggggaaacctatgaaagaagcccttggtgaggtcaattatggtgcaagtttcatagaatattttgcagaggaagcaaagcgtatatatggtgacatcattcccccaactttatctgatcgcagattgttggttttgaagcagcctgttggggtagttggagctattacaccatggaattttccattagcaatgataacccggaaggttggaccagctttggcctgtggctgtactgttgttgtcaagccatcggagttcacacctctgacagcattagctgcagcagatcttgctcttcaagcgggaataccagcgggtgcattgaatgttgtgatgggtaatgctgctgagataggtgatgcgttgctgcagagtacacaggtcagaaagattacattcactggatcaacagctgttgggaaaaaactgatggctggatctgcaaatactgtgaaaaaggtctccttggaacttggtgggaatgcaccttgcattgttttcgatgatgcggacattgatgttgctgttaaaggcagtcttgctgccaagtttcgtaacagtggacagacatgtgtttgtgcaaacaggatattggtgcaagaaggtatctacgaaaagtttgcaaaagcattcatccaggctgttcagagtttgaaggttggtaacggtctagaagagagtacatctcagggtcctctgattaacgaagctgctgttcaaaaggtggagaagttcataaatgacgcgacttcaaagggagcaaatgtcatgctaggtggtaaaagacacagcctgggaatgtcattttatgagccaactgtagtagggaatgtcagcaatgatatgcttcttttcagagaagaagtttttggtccagttgcaccccttataccgttcaaaactgaggaagaagcagttcatatggccaacgatacaaacgcaggcttagctgcatacatatttaccaagagcatacctcgttcatggcgtgtatctgaatctcttgagtacggcttagttggggtaaacgagggaattatttcaacggaggtggcgccatttggcggagtaaagcagtctggtctagggagagaaggatcgaagtacggcattgacgagtacttggaggtacttctccaaagatccagttcaagttggtgtccccgcacaatcgagttaaccaaggta

SEQ ID NO: 46075 - DNA, 1685 bp, Zea Mays
ctttctgaaccctgcaacactgacatgttatcatagcatggctctgtctacaagcttgcttttggacccaaatcgttcgttgttgtctctgaccctatcgttgctagacacatcctccgggagaacgctttctattatgataagggagttctcgctgaaattttaaaacccataatggggaagggtcttatacccgctgaccttgatacctggaagcaaaggagaaaaggttagaaagttataacacctgggttccatgccttattcatagaagctatggtgaggacatttacgagatgttcagagagaacaatatcaaagcttgaggagcttactgaaagtgaaggccgtgaacaaaattcgactattgtggaccttgaagctgagttctccaatttggcacttgatatcattggattgggtgtgttcaattttgattttgactcggttactaaggaatctcctgtaataaaggcagtgtatggaacacttttcgaagctgagcaccgttccaccttctacatcccctattggaatcttcctttgacaaaatggatagttccaaggcagcgcaagttccatagtgacctcaaagtgatcaacaattgccttgataaccttataaaaaatgcaaaggagacgagacagactttttatataggaagctgatgtggaaaagctccagcaaagggactactcttctctgaaggatgccagcttgctgaggttccttgttgacatgaggggagctgacgctgatgatcgccagcttcgagatgatcttatgacaatgcttattgctggacatgaaacaactgctgctgttctgacatggtctgtttttttgctagcccagagccctaccaggatgagaaaagcccaggcagaggttgattctgttctcagcaatggggcaattactgtcgaatctcttaagaaactggagtacataaaactgattattcttgaagctcttcgcttgtatcctcagccaccattgttaatcaggcgttctctccggccagacaagttgccaggcgggtgcaatggagcaaaagagggatatgaaataccagctgggaccgatatatttgtttcggtatacaacctccacagatccccgtatttctgggaccggccaaatgagtttgaacccgagaggttttccgtcccgaagaaggacgagagcatagaaggctggtctggttttgaccctgaccggagtcctggcgcaatgtaccccaacgagatcatagcggacttcgctttcctccccttcggcggagggcctcgcaagtgcgtgggggaccagttcgcgctcctggagtcgacggtggctctggccctgctgctgcggaagttcgacgtggagctgagagggtcgcccgacgaagtggagatggtgacaggcgccacgatccacacgaagaacgggctgtggtgcaggctgaggagaaggacttgacgggccaacattagctttgcagtttgcactgagtgagaagtagctctcgtgcttgactcctgtgatgtgctttaggcgagctaaactgcatcgcagacagaccagtggatgggaaccgtgtacactgaaaacatatcttgtaggcttgtagcgtaacaggtgcaaccacaacaatatattatttatctatctatctaattgagcttgacattccggtgca

SEQ ID NO: 46076 - DNA, 2071 bp, Zea Mays
caggtccagtggccagtgaccacgctccaccccattgctctggctctgtgctgtgcagctgtgctgccgggctcctgcgccatggccgcggccacgctgctccagggcccagccgccgcctcgccgcgtctcggcgccgcggcttcagcgccgtccgcgtcccacgggaggcgtcgcctcaccttcagcttcaggtgccagtcgaccagcgtcgacaagcagcaggagcggccgcccaagccgaagcagcggaacctgctcgacaacgccagcaacctgctgaccaacttcctcagcggtggcaacctcggggccatgcccgtcgctgagggcgcggtcaccgacctcttcggcaagcccctcttcttctcgctttacgactggttcctcgaggtgaatgcgcgtcccctttctgaaccctgcaacactgacatgttatcatagcatggctctgtctacaagcttgcttttggacccaaatcgttcgttgttgtctctgaccctatcgttgctagacacatcctccgggagaacgctttctattatgataagggagttctcgctgaaattttaaaacccataatggggaagggtcttatacccgctgaccttgatacctggaagcaaaggagaaaagttataacacctgggttccatgccttattcatagaagctatggtgaggacatttacgagatgttcagagagaacaatatcaaagcttgaggagcttactgaaagtgaaggccgtgaacaaaattcgactattgtggaccttgaagctgagttctccaatttggcacttgatatcattggattgggtgtgttcaattttgattttgactcggttactaaggaatctcctgtaataaaggcagtgtatggaacacttttcgaagctgagcaccgttccaccttctacatcccctattggaatcttcctttgacaaaatggatagttccaaggcagcgcaagttccatagtgacctcaaagtgatcaacaattgccttgataaccttataaaaaatgcaaaggagacgagacaggaagctgatgtggaaaagctccagcaaagggactactcttctctgaaggatgccagcttgctgaggttccttgttgacatgaggggagctgacgctgatgatcgccagcttcgagatgatcttatgacaatgcttattgctggacatgaaacaactgctgctgttctgacatggtctgtttttttgctagcccagagccctaccaggatgagaaaagcccaggcagaggttgattctgttctcagcaatggggcaattactgtcgaatctcttaagaaactggagtacataaaactgattattcttgaagctcttcgcttgtatcctcagccaccattgttaatcaggcgttctctccggccagacaagttgccaggcgggtgcaatggagcaaaagagggatatgaaataccagctgggaccgatatatttgtttcggtatacaacctccacagatccccgtatttctgggaccggccaaatgagtttgaacccgagaggttttccgtcccgaagaaggacgagagcatagaaggctggtctggttttgaccctgaccggagtcctggcgcaatgtaccccaacgagatcatagcggacttcgctttcctccccttcggcggagggcctcgcaagtgcgtgggggaccagttcgcgctcctggagtcgacggtggctctggccctgctgctgcggaagttcgacgtggagctgagagggtcgcccgacgaagtggagatggtgacaggcgccacgatccacacgaagaacgggctgtggtgcaggctgaggagaaggacttgacgggccaacattagctttgcagtttgcactgagtgagaagtagctctcgtgcttgactcctgtgatgtgctttaggcgagctaaactgcatcgcagacagaccagtggatgggaaccgtgtacactgaaaacatatcttgtaggcttgtagcgtaacaggtgcaaccacaacaatatattatttatctatctatctaattgagcttgacattccggtgca

SEQ ID NO: 46077 - DNA, 2087 bp, Zea Mays
gtccgttcaggtccagtggccagtgaccacgctccaccccattgctctggctctgtgctgtgcagctgtgctgccgggctcctgcgccatggccgcggccacgctgctccagggcccagccgccgcctcgccgcgtctcggcgccgcggcttcagcgccgtccgcgtcccacgggaggcgtcgcctcaccttcagcttcaggtgccagtcgaccagcgtcgacaagcagcaggagcggccgcccaagccgaagcagcggaacctgctcgacaacgccagcaacctgctgaccaacttcctcagcggtggcaacctcggggccatgcccgtcgctgagggcgcggtcaccgacctcttcggcaagcccctcttcttctcgctttacgactggttcctcgaggtgaatgcgcgtcccctttctgaaccctgcaacactgacatgttatcatagcatggctctgtctacaagcttgcttttggacccaaatcgttcgttgttgtctctgaccctatcgttgctagacacatcctccgggagaacgctttctattatgataagggagttctcgctgaaattttaaaacccataatggggaagggtcttatacccgctgaccttgatacctggaagcaaaggagaaaaggttagaaagttataacacctgggttccatgccttattcatagaagctatggtgaggacatttacgagatgttcagagagaacaatatcaaagcttgaggagcttactgaaagtgaaggccgtgaacaaaattcgactattgtggaccttgaagctgagttctccaatttggcacttgatatcattggattgggtgtgttcaattttgattttgactcggttactaaggaatctcctgtaataaaggcagtgtatggaacacttttcgaagctgagcaccgttccaccttctacatcccctattggaatcttcctttgacaaaatggatagttccaaggcagcgcaagttccatagtgacctcaaagtgatcaacaattgccttgataaccttataaaaaatgcaaaggagacgagacaggaagctgatgtggaaaagctccagcaaagggactactcttctctgaaggatgccagcttgctgaggttccttgttgacatgaggggagctgacgctgatgatcgccagcttcgagatgatcttatgacaatgcttattgctggacatgaaacaactgctgctgttctgacatggtctgtttttttgctagcccagagccctaccaggatgagaaaagcccaggcagaggttgattctgttctcagcaatggggcaattactgtcgaatctcttaagaaactggagtacataaaactgattattcttgaagctcttcgcttgtatcctcagccaccattgttaatcaggcgttctctccggccagacaagttgccaggcgggtgcaatggagcaaaagagggatatgaaataccagctgggaccgatatatttgtttcggtatacaacctccacagatccccgtatttctgggaccggccaaatgagtttgaacccgagaggttttccgtcccgaagaaggacgagagcatagaaggctggtctggttttgaccctgaccggagtcctggcgcaatgtaccccaacgagatcatagcggacttcgctttcctccccttcggcggagggcctcgcaagtgcgtgggggaccagttcgcgctcctggagtcgacggtggctctggccctgctgctgcggaagttcgacgtggagctgagagggtcgcccgacgaagtggagatggtgacaggcgccacgatccacacgaagaacgggctgtggtgcaggctgaggagaaggacttgacgggccaacattagctttgcagtttgcactgagtgagaagtagctctcgtgcttgactcctgtgatgtgctttaggcgagctaaactgcatcgcagacagaccagtggatgggaaccgtgtacactgaaaacatatcttgtaggcttgtagcgtaacaggtgcaaccacaacaatatattatttatctatctatctaattgagcttgacattccggtgca

SEQ ID NO: 46078 - DNA, 1930 bp, Zea Mays
ttatcatctctgtccgttcaggtccagtggccagtgaccacgctccaccccattgctctggctctgtgctgtgcagctgtgctgccgggctcctgcgccatggccgcggccacgctgctccagggcccagccgccgcctcgccgcgtctcggcgccgcggcttcagcgccgtccgcgtcccacgggaggcgtcgcctcaccttcagcttcaggtgccagtcgaccagcgtcgacaagcagcaggagcggccgcccaagccgaagcagcggaacctgctcgacaacgccagcaacctgctgaccaacttcctcagcggtggcaacctcggggccatgcccgtcgctgagggcgcggtcaccgacctcttcggcaagcccctcttcttctcgctttacgactggttcctcgagggagttctcgctgaaattttaaaacccataatggggaagggtcttatacccgctgaccttgatacctggaagcaaaggagaaaagttataacacctgggttccatgccttattcatagaagctatggtgaggacatttacgagatgttcagagagaacaatatcaaagcttgaggagcttactgaaagtgaaggccgtgaacaaaattcgactattgtggaccttgaagctgagttctccaatttggcacttgatatcattggattgggtgtgttcaattttgattttgactcggttactaaggaatctcctgtaataaaggcagtgtatggaacacttttcgaagctgagcaccgttccaccttctacatcccctattggaatcttcctttgacaaaatggatagttccaaggcagcgcaagttccatagtgacctcaaagtgatcaacaattgccttgataaccttataaaaaatgcaaaggagacgagacaggaagctgatgtggaaaagctccagcaaagggactactcttctctgaaggatgccagcttgctgaggttccttgttgacatgaggggagctgacgctgatgatcgccagcttcgagatgatcttatgacaatgcttattgctggacatgaaacaactgctgctgttctgacatggtctgtttttttgctagcccagagccctaccaggatgagaaaagcccaggcagaggttgattctgttctcagcaatggggcaattactgtcgaatctcttaagaaactggagtacataaaactgattattcttgaagctcttcgcttgtatcctcagccaccattgttaatcaggcgttctctccggccagacaagttgccaggcgggtgcaatggagcaaaagagggatatgaaataccagctgggaccgatatatttgtttcggtatacaacctccacagatccccgtatttctgggaccggccaaatgagtttgaacccgagaggttttccgtcccgaagaaggacgagagcatagaaggctggtctggttttgaccctgaccggagtcctggcgcaatgtaccccaacgagatcatagcggacttcgctttcctccccttcggcggagggcctcgcaagtgcgtgggggaccagttcgcgctcctggagtcgacggtggctctggccctgctgctgcggaagttcgacgtggagctgagagggtcgcccgacgaagtggagatggtgacaggcgccacgatccacacgaagaacgggctgtggtgcaggctgaggagaaggacttgacgggccaacattagctttgcagtttgcactgagtgagaagtagctctcgtgcttgactcctgtgatgtgctttaggcgagctaaactgcatcgcagacagaccagtggatgggaaccgtgtacactgaaaacatatcttgtaggcttgtagcgtaacaggtgcaaccacaacaatatattatttatctatctatctaattgagcttgacattccggtgca

SEQ ID NO: 46079 - DNA, 1954 bp, Zea Mays
cttatcatctctgtccgttcaggtccagtggccagtgaccacgctccaccccattgctctggctctgtgctgtgcagctgtgctgccgggctcctgcgccatggccgcggccacgctgctccagggcccagccgccgcctcgccgcgtctcggcgccgcggcttcagcgccgtccgcgtcccacgggaggcgtcgcctcaccttcagcttcaggtgccagtcgaccagcgtcgacaagcagcaggagcggccgcccaagccgaagcagcggaacctgctcgacaacgccagcaacctgctgaccaacttcctcagcggtggcaacctcggggccatgcccgtcgctgagggcgcggtcaccgacctcttcggcaagcccctcttcttctcgctttacgactggttcctcgagcatggctctgtctacaagcttgcttttggacccaaatcgttcgttgttgtctctgaccctatcgttgctagacacatcctccgggagaacgctttctattatgataagttataacacctgggttccatgccttattcatagaagctatggtgaggacatttacgagatgttcagagagaacaatatcaaagcttgaggagcttactgaaagtgaaggccgtgaacaaaattcgactattgtggaccttgaagctgagttctccaatttggcacttgatatcattggattgggtgtgttcaattttgattttgactcggttactaaggaatctcctgtaataaaggcagtgtatggaacacttttcgaagctgagcaccgttccaccttctacatcccctattggaatcttcctttgacaaaatggatagttccaaggcagcgcaagttccatagtgacctcaaagtgatcaacaattgccttgataaccttataaaaaatgcaaaggagacgagacaggaagctgatgtggaaaagctccagcaaagggactactcttctctgaaggatgccagcttgctgaggttccttgttgacatgaggggagctgacgctgatgatcgccagcttcgagatgatcttatgacaatgcttattgctggacatgaaacaactgctgctgttctgacatggtctgtttttttgctagcccagagccctaccaggatgagaaaagcccaggcagaggttgattctgttctcagcaatggggcaattactgtcgaatctcttaagaaactggagtacataaaactgattattcttgaagctcttcgcttgtatcctcagccaccattgttaatcaggcgttctctccggccagacaagttgccaggcgggtgcaatggagcaaaagagggatatgaaataccagctgggaccgatatatttgtttcggtatacaacctccacagatccccgtatttctgggaccggccaaatgagtttgaacccgagaggttttccgtcccgaagaaggacgagagcatagaaggctggtctggttttgaccctgaccggagtcctggcgcaatgtaccccaacgagatcatagcggacttcgctttcctccccttcggcggagggcctcgcaagtgcgtgggggaccagttcgcgctcctggagtcgacggtggctctggccctgctgctgcggaagttcgacgtggagctgagagggtcgcccgacgaagtggagatggtgacaggcgccacgatccacacgaagaacgggctgtggtgcaggctgaggagaaggacttgacgggccaacattagctttgcagtttgcactgagtgagaagtagctctcgtgcttgactcctgtgatgtgctttaggcgagctaaactgcatcgcagacagaccagtggatgggaaccgtgtacactgaaaacatatcttgtaggcttgtagcgtaacaggtgcaaccacaacaatatattatttatctatctatctaattgagcttgacattccggtgca

SEQ ID NO: 46080 - DNA, 2092 bp, Zea Mays
cggccaccttatcatctctgtccgttcaggtccagtggccagtgaccacgctccaccccattgctctggctctgtgctgtgcagctgtgctgccgggctcctgcgccatggccgcggccacgctgctccagggcccagccgccgcctcgccgcgtctcggcgccgcggcttcagcgccgtccgcgtcccacgggaggcgtcgcctcaccttcagcttcaggtgccagtcgaccagcgtcgacaagcagcaggagcggccgcccaagccgaagcagcggaacctgctcgacaacgccagcaacctgctgaccaacttcctcagcggtggcaacctcggggccatgcccgtcgctgagggcgcggtcaccgacctcttcggcaagcccctcttcttctcgctttacgactggttcctcgagcatggctctgtctacaagcttgcttttggacccaaatcgttcgttgttgtctctgaccctatcgttgctagacacatcctccgggagaacgctttctattatgataagggagttctcgctgaaattttaaaacccataatggggaagggtcttatacccgctgaccttgatacctggaagcaaaggagaaaagttataacacctgggttccatgccttattcatagaagctatggtgaggacatttacgagatgttcagagagaacaatatcaaagcttgaggagcttactgaaagtgaaggccgtgaacaaaattcgactattgtggaccttgaagctgagttctccaatttggcacttgatatcattggattgggtgtgttcaattttgattttgactcggttactaaggaatctcctgtaataaaggcagtgtatggaacacttttcgaagctgagcaccgttccaccttctacatcccctattggaatcttcctttgacaaaatggatagttccaaggcagcgcaagttccatagtgacctcaaagtgatcaacaattgccttgataaccttataaaaaatgcaaaggagacgagacaggaagctgatgtggaaaagctccagcaaagggactactcttctctgaagggattttggtgaatagtatctcatatctgtgccatcatgcttttaggatgccagcttgctgaggttccttgttgacatgaggggagctgacgctgatgatcgccagcttcgagatgatcttatgacaatgcttattgctggacatgaaacaactgctgctgttctgacatggtctgtttttttgctagcccagagccctaccaggatgagaaaagcccaggcagaggttgattctgttctcagcaatggggcaattactgtcgaatctcttaagaaactggagtacataaaactgattattcttgaagctcttcgcttgtatcctcagccaccattgttaatcaggcgttctctccggccagacaagttgccaggcgggtgcaatggagcaaaagagggatatgaaataccagctgggaccgatatatttgtttcggtatacaacctccacagatccccgtatttctgggaccggccaaatgagtttgaacccgagaggttttccgtcccgaagaaggacgagagcatagaaggctggtctggttttgaccctgaccggagtcctggcgcaatgtaccccaacgagatcatagcggacttcgctttcctccccttcggcggagggcctcgcaagtgcgtgggggaccagttcgcgctcctggagtcgacggtggctctggccctgctgctgcggaagttcgacgtggagctgagagggtcgcccgacgaagtggagatggtgacaggcgccacgatccacacgaagaacgggctgtggtgcaggctgaggagaaggacttgacgggccaacattagctttgcagtttgcactgagtgagaagtagctctcgtgcttgactcctgtgatgtgctttaggcgagctaaactgcatcgcagacagaccagtggatgggaaccgtgtacactgaaaacatatcttgtaggcttgtagcgtaacaggtgcaaccacaacaatatattatttatctatctatctaattgagcttgacattccggtgca

SEQ ID NO: 46081 - DNA, 2205 bp, Zea Mays
accagaccagcgcaccgcgccgtccagaccagaccacgttccgtggtcggcgcgcaaccggccagccgagtgccgactgccgaccgcaccactctccgtggcccgatgatattcccgatcacgcctaattcaattcaatcaatttcagcgcggccaccttatcatctctgtccgttcaggtccagtggccagtgaccacgctccaccccattgctctggctctgtgctgtgcagctgtgctgccgggctcctgcgccatggccgcggccacgctgctccagggcccagccgccgcctcgccgcgtctcggcgccgcggcttcagcgccgtccgcgtcccacgggaggcgtcgcctcaccttcagcttcaggtgccagtcgaccagcgtcgacaagcagcaggagcggccgcccaagccgaagcagcggaacctgctcgacaacgccagcaacctgctgaccaacttcctcagcggtggcaacctcggggccatgcccgtcgctgagggcgcggtcaccgacctcttcggcaagcccctcttcttctcgctttacgactggttcctcgagcatggctctgtctacaagcttgcttttggacccaaatcgttcgttgttgtctctgaccctatcgttgctagacacatcctccgggagaacgctttctattatgataagggagttctcgctgaaattttaaaacccataatggggaagggtcttatacccgctgaccttgatacctggaagcaaaggagaaaaggttagaaagttataacacctgggttccatgccttattcatagaagctatggtgaggacatttacgagatgttcagagagaacaatatcaaagcttgaggagcttactgaaagtgaaggccgtgaacaaaattcgactattgtggaccttgaagctgagttctccaatttggcacttgatatcattggattgggtgtgttcaattttgattttgactcggttactaaggaatctcctgtaataaaggcagtgtatggaacacttttcgaagctgagcaccgttccaccttctacatcccctattggaatcttcctttgacaaaatggatagttccaaggcagcgcaagttccatagtgacctcaaagtgatcaacaattgccttgataaccttataaaaaatgcaaaggagacgagacaggaagctgatgtggaaaagctccagcaaagggactactcttctctgaaggatgccagcttgctgaggttccttgttgacatgaggggagctgacgctgatgatcgccagcttcgagatgatcttatgacaatgcttattgctggacatgaaacaactgctgctgttctgacatggtctgtttttttgctagcccagagccctaccaggatgagaaaagcccaggcagaggttgattctgttctcagcaatggggcaattactgtcgaatctcttaagaaactggagtacataaaactgattattcttgaagctcttcgcttgtatcctcagccaccattgttaatcaggcgttctctccggccagacaagttgccaggcgggtgcaatggagcaaaagagggatatgaaataccagctgggaccgatatatttgtttcggtatacaacctccacagatccccgtatttctgggaccggccaaatgagtttgaacccgagaggttttccgtcccgaagaaggacgagagcatagaaggctggtctggttttgaccctgaccggagtcctggcgcaatgtaccccaacgagatcatagcggacttcgctttcctccccttcggcggagggcctcgcaagtgcgtgggggaccagttcgcgctcctggagtcgacggtggctctggccctgctgctgcggaagttcgacgtggagctgagagggtcgcccgacgaagtggagatggtgacaggcgccacgatccacacgaagaacgggctgtggtgcaggctgaggagaaggacttgacgggccaacattagctttgcagtttgcactgagtgagaagtagctctcgtgcttgactcctgtgatgtgctttaggcgagctaaactgcatcgcagacagaccagtggatgggaaccgtgtacactgaaaacatatcttgtaggcttgtagcgtaacaggtgcaaccacaacaatatattatttatctatctatctaattgagcttgacattccggtgca

SEQ ID NO: 46082 - DNA, 1522 bp, Zea Mays
ctctctccatcctcccgcctcacagggagttctcgctgaaattttaaaacccataatggggaagggtcttatacccgctgaccttgatacctggaagcaaaggagaaaagttataacacctgggttccatgccttattcatagaagctatggtgaggacatttacgagatgttcagagagaacaatatcaaagcttgaggagcttactgaaagtgaaggccgtgaacaaaattcgactattgtggaccttgaagctgagttctccaatttggcacttgatatcattggattgggtgtgttcaattttgattttgactcggttactaaggaatctcctgtaataaaggcagtgtatggaacacttttcgaagctgagcaccgttccaccttctacatcccctattggaatcttcctttgacaaaatggatagttccaaggcagcgcaagttccatagtgacctcaaagtgatcaacaattgccttgataaccttataaaaaatgcaaaggagacgagacaggaagctgatgtggaaaagctccagcaaagggactactcttctctgaaggatgccagcttgctgaggttccttgttgacatgaggggagctgacgctgatgatcgccagcttcgagatgatcttatgacaatgcttattgctggacatgaaacaactgctgctgttctgacatgagccctaccaggatgagaaaagcccaggcagaggttgattctgttctcagcaatggggcaattactgtcgaatctcttaagaaactggagtacataaaactgattattcttgaagctcttcgcttgtatcctcagccaccattgttaatcaggcgttctctccggccagacaagttgccaggcgggtgcaatggagcaaaagagggatatgaaataccagctgggaccgatatatttgtttcggtatacaacctccacagatccccgtatttctgggaccggccaaatgagtttgaacccgagaggttttccgtcccgaagaaggacgagagcatagaaggctggtctggttttgaccctgaccggagtcctggcgcaatgtaccccaacgagatcatagcggacttcgctttcctccccttcggcggagggcctcgcaagtgcgtgggggaccagttcgcgctcctggagtcgacggtggctctggccctgctgctgcggaagttcgacgtggagctgagagggtcgcccgacgaagtggagatggtgacaggcgccacgatccacacgaagaacgggctgtggtgcaggctgaggagaaggacttgacgggccaacattagctttgcagtttgcactgagtgagaagtagctctcgtgcttgactcctgtgatgtgctttaggcgagctaaactgcatcgcagacagaccagtggatgggaaccgtgtacactgaaaacatatcttgtaggcttgtagcgtaacaggtgcaaccacaacaatatattatttatctatctatctaattgagcttgacattccggtgca

SEQ ID NO: 46083 - DNA, 1606 bp, Zea Mays
gtcgccaatatgctcccaattcgctgccacatgtttgtcctgttctcagatcagatcgtgagcgctcttgttcccatctcggcgtcgtagaaggccctcggctctctccatcctcccgcctcacagttataacacctgggttccatgccttattcatagaagctatggtgaggacatttacgagatgttcagagagaacaatatcaaagcttgaggagcttactgaaagtgaaggccgtgaacaaaattcgactattgtggaccttgaagctgagttctccaatttggcacttgatatcattggattgggtgtgttcaattttgattttgactcggttactaaggaatctcctgtaataaaggcagtgtatggaacacttttcgaagctgagcaccgttccaccttctacatcccctattggaatcttcctttgacaaaatggatagttccaaggcagcgcaagttccatagtgacctcaaagtgatcaacaattgccttgataaccttataaaaaatgcaaaggagacgagacaggaagctgatgtggaaaagctccagcaaagggactactcttctctgaagggattttggtgaatagtatctcatatctgtgccatcatgcttttaggatgccagcttgctgaggttccttgttgacatgaggggagctgacgctgatgatcgccagcttcgagatgatcttatgacaatgcttattgctggacatgaaacaactgctgctgttctgacatggtctgtttttttgctagcccagagccctaccaggatgagaaaagcccaggcagaggttgattctgttctcagcaatggggcaattactgtcgaatctcttaagaaactggagtacataaaactgattattcttgaagctcttcgcttgtatcctcagccaccattgttaatcaggcgttctctccggccagacaagttgccaggcgggtgcaatggagcaaaagagggatatgaaataccagctgggaccgatatatttgtttcggtatacaacctccacagatccccgtatttctgggaccggccaaatgagtttgaacccgagaggttttccgtcccgaagaaggacgagagcatagaaggctggtctggttttgaccctgaccggagtcctggcgcaatgtaccccaacgagatcatagcggacttcgctttcctccccttcggcggagggcctcgcaagtgcgtgggggaccagttcgcgctcctggagtcgacggtggctctggccctgctgctgcggaagttcgacgtggagctgagagggtcgcccgacgaagtggagatggtgacaggcgccacgatccacacgaagaacgggctgtggtgcaggctgaggagaaggacttgacgggccaacattagctttgcagtttgcactgagtgagaagtagctctcgtgcttgactcctgtgatgtgctttaggcgagctaaactgcatcgcagacagaccagtggatgggaaccgtgtacactgaaaacatatcttgtaggcttgtagcgtaacaggtgcaaccacaacaatatattatttatctatctatctaattgagcttgacattccggtgca

SEQ ID NO: 46084 - DNA, 2189 bp, Zea Mays
gacgaggatctcttggagagagcctaagagcaactctaataggaacactaaacataaacaaattcaaatatagggtcataatcttattttagtgaaatttatctaaactttttgaggtccaacttgaaggatagcatctttgcgactcagagagcgacggccctatacgattcgcgttgttccaacctccacagacatttcatatgtatcttcgtcgccaccatctcccatccagttgtcgccaatatgctcccaattcgctgccacatgtttgtcctgttctcagatcagatcgtgagcgctcttgttcccatctcggcgtcgtagaaggccctcggctctctccatcctcccgcctcacaggtgccagtcgaccagcgtcgacaagcagcaggagcggccgcccaagccgaagcagcggaacctgctcgacaacgccagcaacctgctgaccaacttcctcagcggtggcaacctcggggccatgcccgtcgctgagggcgcggtcaccgacctcttcggcaagcccctcttcttctcgctttacgactggttcctcgagcatggctctgtctacaagcttgcttttggacccaaatcgttcgttgttgtctctgaccctatcgttgctagacacatcctccgggagaacgctttctattatgataagggagttctcgctgaaattttaaaacccataatggggaagggtcttatacccgctgaccttgatacctggaagcaaaggagaaaagttataacacctgggttccatgccttattcatagaagctatggtgaggacatttacgagatgttcagagagaacaatatcaaagcttgaggagcttactgaaagtgaaggccgtgaacaaaattcgactattgtggaccttgaagctgagttctccaatttggcacttgatatcattggattgggtgtgttcaattttgattttgactcggttactaaggaatctcctgtaataaaggcagtgtatggaacacttttcgaagctgagcaccgttccaccttctacatcccctattggaatcttcctttgacaaaatggatagttccaaggcagcgcaagttccatagtgacctcaaagtgatcaacaattgccttgataaccttataaaaaatgcaaaggagacgagacaggaagctgatgtggaaaagctccagcaaagggactactcttctctgaaggatgccagcttgctgaggttccttgttgacatgaggggagctgacgctgatgatcgccagcttcgagatgatcttatgacaatgcttattgctggacatgaaacaactgctgctgttctgacatggtctgtttttttgctagcccagagccctaccaggatgagaaaagcccaggcagaggttgattctgttctcagcaatggggcaattactgtcgaatctcttaagaaactggagtacataaaactgattattcttgaagctcttcgcttgtatcctcagccaccattgttaatcaggcgttctctccggccagacaagttgccaggcgggtgcaatggagcaaaagagggatatgaaataccagctgggaccgatatatttgtttcggtatacaacctccacagatccccgtatttctgggaccggccaaatgagtttgaacccgagaggttttccgtcccgaagaaggacgagagcatagaaggctggtctggttttgaccctgaccggagtcctggcgcaatgtaccccaacgagatcatagcggacttcgctttcctccccttcggcggagggcctcgcaagtgcgtgggggaccagttcgcgctcctggagtcgacggtggctctggccctgctgctgcggaagttcgacgtggagctgagagggtcgcccgacgaagtggagatggtgacaggcgccacgatccacacgaagaacgggctgtggtgcaggctgaggagaaggacttgacgggccaacattagctttgcagtttgcactgagtgagaagtagctctcgtgcttgactcctgtgatgtgctttaggcgagctaaactgcatcgcagacagaccagtggatgggaaccgtgtacactgaaaacatatcttgtaggcttgtagcgtaacaggtgcaaccacaacaatatattatttatctatctatctaattgagcttgacattccggtgca

SEQ ID NO: 46085 - DNA, 1895 bp, Zea Mays
attatgggcttttgacgaggatctcttggagagagcctaagagcaactctaataggaacactaaacataaacaaattcaaatatagggtcataatcttattttagtgaaatttatctaaactttttgaggtccaacttgaaggatagcatctttgcgactcagagagcgacggccctatacgattcgcgttgttccaacctccacagacatttcatatgtatcttcgtcgccaccatctcccatccagttgtcgccaatatgctcccaattcgctgccacatgtttgtcctgttctcagatcagatcgtgagcgctcttgttcccatctcggcgtcgtagaaggccctcggctctctccatcctcccgcctcacagggagttctcgctgaaattttaaaacccataatggggaagggtcttatacccgctgaccttgatacctggaagcaaaggagaaaagttataacacctgggttccatgccttattcatagaagctatggtgaggacatttacgagatgttcagagagaacaatatcaaagcttgaggagcttactgaaagtgaaggccgtgaacaaaattcgactattgtggaccttgaagctgagttctccaatttggcacttgatatcattggattgggtgtgttcaattttgattttgactcggttactaaggaatctcctgtaataaaggcagtgtatggaacacttttcgaagctgagcaccgttccaccttctacatcccctattggaatcttcctttgacaaaatggatagttccaaggcagcgcaagttccatagtgacctcaaagtgatcaacaattgccttgataaccttataaaaaatgcaaaggagacgagacaggaagctgatgtggaaaagctccagcaaagggactactcttctctgaaggatgccagcttgctgaggttccttgttgacatgaggggagctgacgctgatgatcgccagcttcgagatgatcttatgacaatgcttattgctggacatgaaacaactgctgctgttctgacatggtctgtttttttgctagcccagagccctaccaggatgagaaaagcccaggcagaggttgattctgttctcagcaatggggcaattactgtcgaatctcttaagaaactggagtacataaaactgattattcttgaagctcttcgcttgtatcctcagccaccattgttaatcaggcgttctctccggccagacaagttgccaggcgggtgcaatggagcaaaagagggatatgaaataccagctgggaccgatatatttgtttcggtatacaacctccacagatccccgtatttctgggaccggccaaatgagtttgaacccgagaggttttccgtcccgaagaaggacgagagcatagaaggctggtctggttttgaccctgaccggagtcctggcgcaatgtaccccaacgagatcatagcggacttcgctttcctccccttcggcggagggcctcgcaagtgcgtgggggaccagttcgcgctcctggagtcgacggtggctctggccctgctgctgcggaagttcgacgtggagctgagagggtcgcccgacgaagtggagatggtgacaggcgccacgatccacacgaagaacgggctgtggtgcaggctgaggagaaggacttgacgggccaacattagctttgcagtttgcactgagtgagaagtagctctcgtgcttgactcctgtgatgtgctttaggcgagctaaactgcatcgcagacagaccagtggatgggaaccgtgtacactgaaaacatatcttgtaggcttgtagcgtaacaggtgcaaccacaacaatatattatttatctatctatctaattgagcttgacattccggtgca

SEQ ID NO: 46086 - DNA, 1924 bp, Zea Mays
cttaaaataattaatttcacaaaaaatgatataattaacatatatagagagtatagtgctcctcctatatatacaggagatttgttctccactattctccttctataggtacaaattatgggcttttgacgaggatctcttggagagagcctaagagcaactctaataggaacactaaacataaacaaattcaaatatagggtcataatcttattttagtgaaatttatctaaactttttgaggtccaacttgaaggatagcatctttgcgactcagagagcgacggccctatacgattcgcgttgttccaacctccacagacatttcatatgtatcttcgtcgccaccatctcccatccagttgtcgccaatatgctcccaattcgctgccacatgtttgtcctgttctcagatcagatcgtgagcgctcttgttcccatctcggcgtcgtagaaggccctcggctctctccatcctcccgcctcacagttataacacctgggttccatgccttattcatagaagctatggtgaggacatttacgagatgttcagagagaacaatatcaaagcttgaggagcttactgaaagtgaaggccgtgaacaaaattcgactattgtggaccttgaagctgagttctccaatttggcacttgatatcattggattgggtgtgttcaattttgattttgactcggttactaaggaatctcctgtaataaaggcagtgtatggaacacttttcgaagctgagcaccgttccaccttctacatcccctattggaatcttcctttgacaaaatggatagttccaaggcagcgcaagttccatagtgacctcaaagtgatcaacaattgccttgataaccttataaaaaatgcaaaggagacgagacaggaagctgatgtggaaaagctccagcaaagggactactcttctctgaaggatgccagcttgctgaggttccttgttgacatgaggggagctgacgctgatgatcgccagcttcgagatgatcttatgacaatgcttattgctggacatgaaacaactgctgctgttctgacatggtctgtttttttgctagcccagagccctaccaggatgagaaaagcccaggcagaggttgattctgttctcagcaatggggcaattactgtcgaatctcttaagaaactggagtacataaaactgattattcttgaagctcttcgcttgtatcctcagccaccattgttaatcaggcgttctctccggccagacaagttgccaggcgggtgcaatggagcaaaagagggatatgaaataccagctgggaccgatatatttgtttcggtatacaacctccacagatccccgtatttctgggaccggccaaatgagtttgaacccgagaggttttccgtcccgaagaaggacgagagcatagaaggctggtctggttttgaccctgaccggagtcctggcgcaatgtaccccaacgagatcatagcggacttcgctttcctccccttcggcggagggcctcgcaagtgcgtgggggaccagttcgcgctcctggagtcgacggtggctctggccctgctgctgcggaagttcgacgtggagctgagagggtcgcccgacgaagtggagatggtgacaggcgccacgatccacacgaagaacgggctgtggtgcaggctgaggagaaggacttgacgggccaacattagctttgcagtttgcactgagtgagaagtagctctcgtgcttgactcctgtgatgtgctttaggcgagctaaactgcatcgcagacagaccagtggatgggaaccgtgtacactgaaaacatatcttgtaggcttgtagcgtaacaggtgcaaccacaacaatatattatttatctatctatctaattgagcttgacattccggtgca

SEQ ID NO: 46087 - DNA, 2310 bp, Zea Mays
cttaaaataattaatttcacaaaaaatgatataattaacatatatagagagtatagtgctcctcctatatatacaggagatttgttctccactattctccttctataggtacaaattatgggcttttgacgaggatctcttggagagagcctaagagcaactctaataggaacactaaacataaacaaattcaaatatagggtcataatcttattttagtgaaatttatctaaactttttgaggtccaacttgaaggatagcatctttgcgactcagagagcgacggccctatacgattcgcgttgttccaacctccacagacatttcatatgtatcttcgtcgccaccatctcccatccagttgtcgccaatatgctcccaattcgctgccacatgtttgtcctgttctcagatcagatcgtgagcgctcttgttcccatctcggcgtcgtagaaggccctcggctctctccatcctcccgcctcacaggttcgtcttccttctctatcccggcgtcgtagaaggcccttgtccctctccatcctcttgcgctccctagtccgtcttccttctctccacctggttgttggttgattcagttgttgtttgtcctattcgttgtccactacataaactttgtcctatttgtgttaacaattgggagtacaattgggagtacgtattgtaggagctacgctcaaagtgagcaatagggttttgcttttttcatcccgttatcaagtgcaagaaacatgttgtccatgtcattatcagcttattgtccagtaaattgtcgagacatttagcgctatatgtgttcaataggttgttgttgctttggtaagcatacattcagtttgttcaatagcctattatatgtgtttagggatggtaacgggtatataccccgtcagatagtatcattccatatttgtacccatcaataaaaaagtatactcgtctcgtcgggtgacttatatccgcgagcgggtataaaatcttacacatgctcgtaccagcaccgataattttatcccgccggataacccgtacccactataaaggtcttaaattctaatatttcaataaattaaaatgtcaaataaacacacacaacaaaagttcaacttaaaatataacaaagcatatgattacattacttggtatttaaataaataatagtcggagaaggattttcttttagcttatatgtgtttattattgataatagtggtaattatgcgggtatattttacccacatgtacacgggtataggtagtaccaacccatgtcagtacccgtctatccaacgggtagagattcttgcccactaacataccatcgggtagagaaatcatcttatacccgtctttactgtcggttttttgggtttcgggtactcattgtcatctctatcattgtgattggtatgttgcgcacatccgttcagactgagcgcgtgcattgaccaagaagcagctgttgtttgattaactgcatagagccaggctgaggctgcatccgcaaatgcaacataggtaaaaaaatatatctctttgctgcatgcgcgcatacgctccggcgttcagtttctggcgggccacgcttactagagtctggcgctgcttgtctgcccatccaatccgtcggtatatgtgttgaactcgatacggtgttatctatagctcattgaaagaatagatacaattactcgtcaacttgggaccaagtcgttgtctctttttcacttggtgctgcgcgaggactcgtgcttaacttctttgatgcaaagtttaaggctcaatggttggaaactaacatacagtttggaccctaaataaattaattggtacctaaatcaaaatatatgccccaattataaggcttatggttggagttgctcaaacaggcttgtcccttgcacagtacaagtagatcgacgacatagggccccaaattttctaggcccccaaaactctggtgtgcataaagatatgatcgtctttatagcagttgaccccgccaaaactcagaagaaagttagcgttgtagaacgcgatgtgactatgatttagcgacttcgcgcgtattagcataggatgtgtccgccgtcggcgatagctctagctaatccctctcgcgttcgtcgccaccgcaaaagatggatgcgcagctgcgtaggcatcaggcgaggtcacatgtcacgagagaattcatgtgctcttgaccgaccaccggcgaatgtcaccaggcccgtcccttgcgtagtgcaggtggatcaacgacatagggccccaaattttctagg

SEQ ID NO: 46088 - DNA, 1393 bp, Zea Mays
gattttggcattcagctcggcagtgcccctgattttgcatgggagcagaacccaagcaactggccttctctgctgccctcggtgtcacgattgggatctttccgatatgtgggaccactgttattcttggtgctgttgttgtagcaatgttgggaagtcgttgcaatgctgttactcttatggttctaaatttggccgccactccaattgaactaagcttgatcgtccctttcttgcgtttgggtgaagccgtcactggcagcgggcacttccccttgacagccgacgcattgaagaatgttctcaccggtcatgcctcaaaggatgtgctaatgagcatcgtccatgcgatgctgggttggcttattgctgcaccaattgtactggtcgtgctgtacgccgtttcgttcccttgtttcaaggtcctggtcaacaggtttggtggtattccttcgagccccaggaccccaatcaaagcggtgtagccagtgcctggccggatcctctgcagttacatccgtggacatagctgcagatgtgtcgctgacatccggggccggccgtggcgtggccccaaacgtcagtgactcgacgtaattgcagaggaaacggtttcagccagtgaggcatgctgaatgcccctggaattgtgtgcaccaagttctttgtgatgccgtcggattgagatgggttccggcatcatgttgctcggccatcccaggcactggcgaataaatatgatgacttgagaggcatgtgtcctctgtgattgtgtatgctggtttcacaaccatatatagcgagatgcgtatttatgaatttatgaagtcttgataaataaagctaggaagcacaggggtcacggaccattgtgccattcttcccgatgtaggcgtgggttgtgttcagctaaattttctgtgggcgttgtacatgcttgcaggaattcagtgccagctgtttgaaatttgaatcataggttcagtggcaaggcaacttggtgcttaagaatcctactaaaatgcactcactacgtttcaattataagatttttctagatgtatgccaatatatcggtgatattagatgttttcatcttattcccatcgaggaatgttgtctttacaaccatccgatgtaactctaagttgtaatgagcagtaagcgtcatattattctagaggaattttttgttgaaacaggtgaggaagtttttattataaccaattccttctctgaagtttttggccacaagacttgctttagatctgtctaaattctctttagtcatattttgtcttgtagactcatttgcagcttgttattttgatgcctttaggatgtctctaccggtctttcgtagcacgctctctatttcaaatcctactctgta

SEQ ID NO: 46089 - DNA, 1455 bp, Zea Mays
cttcgtttcagtccatctgcttcctttttctttcttacaagtaataacacggtgtatctgctactagcacccgtccagttttacatagctcattcaattgaggggagcagaacccaagcaactggccttctctgctgccctcggtgtcacgattgggatctttccgatatgtgggaccactgttattcttggtgctgttgttgtagcaatgttgggaagtcgttgcaatgctgttactcttatggttctaaatttggccgccactccaattgaactaagcttgatcgtccctttcttgcgtttgggtgaagccgtcactggcagcgggcacttccccttgacagccgacgcattgaagaatgttctcaccggtcatgcctcaaaggatgtgctaatgagcatcgtccatgcgatgctgggttggcttattgctgcaccaattgtactggtcgtgctgtacgccgtttcgttcccttgtttcaaggtcctggtcaacaggtttggtggtattccttcgagccccaggaccccaatcaaagcggtgtagccagtgcctggccggatcctctgcagttacatccgtggacatagctgcagatgtgtcgctgacatccggggccggccgtggcgtggccccaaacgtcagtgactcgacgtaattgcagaggaaacggtttcagccagtgaggcatgctgaatgcccctggaattgtgtgcaccaagttctttgtgatgccgtcggattgagatgggttccggcatcatgttgctcggccatcccaggcactggcgaataaatatgatgacttgagaggcatgtgtcctctgtgattgtgtatgctggtttcacaaccatatatagcgagatgcgtatttatgaatttatgaagtcttgataaataaagctaggaagcacaggggtcacggaccattgtgccattcttcccgatgtaggcgtgggttgtgttcagctaaattttctgtgggcgttgtacatgcttgcaggaattcagtgccagctgtttgaaatttgaatcataggttcagtggcaaggcaacttggtgcttaagaatcctactaaaatgcactcactacgtttcaattataagatttttctagatgtatgccaatatatcggtgatattagatgttttcatcttattcccatcgaggaatgttgtctttacaaccatccgatgtaactctaagttgtaatgagcagtaagcgtcatattattctagaggaattttttgttgaaacaggtgaggaagtttttattataaccaattccttctctgaagtttttggccacaagacttgctttagatctgtctaaattctctttagtcatattttgtcttgtagactcatttgcagcttgttattttgatgcctttaggatgtctctaccggtctttcgtagcacgctctctatttcaaatcctactctgta

SEQ ID NO: 46090 - DNA, 1133 bp, Zea Mays
aagacacaagtcagcacaatagatcctgcagagattccatggggtaactttggggctgaatatgttgttgaatcttctggtgtctttacaacgactgataaagcatcagcacacttaaagggtggtgctaagaaagtggtgatatctgcaccatcagcagatgctcccatgtttgtagttggagttaatgagaatagctatgattcgaagatgaatgttgtttctaatgcaagttgcaccaccaactgccttgctccacttgccaaggttgtacatgaggaatttggcatcgtggagggccttatgacaactgttcatgccacaacagccacccagaagaccgttgatggtccttcaatgaaggattggagaggaggacgtggtgctggccaaaacataattcctagctccactggtgcagcaaaggctgttggaaaagttctgcctgagctgaatggaaagctcactggcatggccttccgagttccaacaccaaatgtctctgttgtggacttgacatgccggattgagaaaaacgcctcctatgatgatgtgaaagcagccatcaaggcggcatcagagggtgcactcaaaggtattcttggctacacagacgaggacgttgtttccaatgattttgttggtgattctaggtcaagcatctttgatgccaaggctggtatcggactgagctcttctttcatgaagcttgtgtcttggtatgacaacgagtggggctacagcaaccgggttctggatctgatcgcccacatggctctcgtcagtgccgccgccaagctctgatgtccgtactcgtttctccagtagtagcttagaaaaaaagactgcaattttgacggccattttctgttagctgttgtttggaataagatcaaatgctggaacacttcgaactcgcgcgagactggactcagatccatggcctgtattttagttgtagaagtgggcaaatttgcaccgtagtaccctggcatggttatatgcggaattgttgattgatgagtcgttgtacggtttgtcgacttgatgatatgttgatgtgggagcccctgaatgaggcggtattaatggaaatataggatggcaatggcaatccgtcgacttgcacccta

SEQ ID NO: 46091 - DNA, 1763 bp, Zea Mays
cttttaatttcatttcctctcttttgacgacggaaacgaggcacgatcacacgctgaacgcttccgccccgccgccaccttccccgctctcctccctccgctcgcctccgcttccgttccgcgccctgcccccggaaggcaagcaaagccctcgctacttgcggagcgtcgttggtcaaaccctagcacacgtacgagcaggccagccccgcccgctcccattcccaggccctcatccatggcggcgctctccgtgcccctccacgccgccgccggatcccgcgccgccgcggccgaccccgtcaaggttccgtgcgtgaggagcactggttcagcccatttcggccgcgccttcccctccgtcgcggtctcctctttggctgcgaggcacatcgagccgatgagagcgatagctacacaggcgccccctgccgtgccacaatatttgagtggcgagaagacaaagatcggcatcaacggctttgggcggattggcaggttggtcctgcgaattgcaactagcagagacgatattgaagttgtggctgtgaatgaccctttcgttgatgctaagtacatggttctatttgtgttgtggatgattcaaccctggagatcaatgggaagaaggtcacaattacaagcaaaagagatcctgcagagattccatggggtaactttggggctgaatatgttgttgaatcttctggtgtctttacaacgactgataaagcatcagcacacttaaagggtggtgctaagaaagtggtgatatctgcaccatcagcagatgctcccatgtttgtagttggagttaatgagaatagctatgattcgaagatgaatgttgtttctaatgcaagttgcaccaccaactgccttgctccacttgccaaggttgtacatgaggaatttggcatcgtggagggccttatgacaactgttcatgccacaacagccacccagaagaccgttgatggtccttcaatgaaggattggagaggaggacgtggtgctggccaaaacataattcctagctccactggtgcagcaaaggctgttggaaaagttctgcctgagctgaatggaaagctcactggcatggccttccgagttccaacaccaaatgtctctgttgtggacttgacatgccggattgagaaaaacgcctcctatgatgatgtgaaagcagccatcaaggcggcatcagagggtgcactcaaaggtattcttggctacacagacgaggacgttgtttccaatgattttgttggtgattctaggtcaagcatctttgatgccaaggctggtatcggactgagctcttctttcatgaagcttgtgtcttggtatgacaacgagtggggctacagcaaccgggttctggatctgatcgcccacatggctctcgtcagtgccgccgccaagctctgatgtccgtactcgtttctccagtagtagcttagaaaaaaagactgcaattttgacggccattttctgttagctgttgtttggaataagatcaaatgctggaacacttcgaactcgcgcgagactggactcagatccatggcctgtattttagttgtagaagtgggcaaatttgcaccgtagtaccctggcatggttatatgcggaattgttgattgatgagtcgttgtacggtttgtcgacttgatgatatgttgatgtgggagcccctgaatgaggcggtattaatggaaatataggatggcaatggcaatccgtcgacttgcacccta

SEQ ID NO: 46092 - DNA, 1065 bp, Zea Mays
tgttgttcccgcgaccgtgtaggtccgacttgtggaagcatccggattgggccatggttctgcggcctctcagccggcggatacgttggttcaggggatgcggtttgccgctcctcactgacggctgcgttgattattgcggcgaaagtgctgaaggatctgaaatatgctgacactcatgaatgggtgaaggttgagggcgattcagcaaccgtggggattactgaccatgcccaggatcatctgggtgatgttgtctacgtggagctgccagaagttggcgtcagtgtatcccaggggaagaacttcggtgctgtcgagagcgtgaaggcgaccagtgatatcaattcaccagtgtccggagaggtggttgaggtgaaccggaagctaagcgaggagcctgggttggtgaacgcaagcccgtacgagaaggggtggattatcaaggtcaagctcagcgattcaggcgagctcagttcgctcatggatggtgacaagtactcgaaattctgcgaggaagaagacggtcattgaagaaatcagagggtcttctgaacaccaaggacctctgtctcaagctctatcactgctttctggtctggacacctgctgtgacaaatttaaattggcaaggttcattgcatggaataaattagttaggatttgccctattctaccagggcttgggaaatccgagcttgtgttgtgagtggcgtggtcaagtttgattatgtctttttagttgtaatctcgtgatttccttctttttttaaaaaaaaatatttatctttttgattccgtgctagtatgcaaatttcttggtccttttgcgaatggttcggcgttcattactgtgcatagtgaacagacagggggctcatgcgtttatacagaaagattgcaccatctgtttcgctaaaaaggtatctccattgtcgaaaattttgcaagaaatatctgtttaatgaatcttatgacaatccaatccaacgatggaacatcttttgtaccgagaattcctacaaccttgttgtcgatagttcaacattggtaggaatttgcgca

SEQ ID NO: 46093 - DNA, 1501 bp, Zea Mays
actgtagtggagctggagcgcgcacgcacacacgagtacacgacacgagacacaagccgggaattgaagcatcaagccctttctctgagcgccgatggcacggtatcttctcgcccccacttccacctcctcctctacctttctccccaaggatggagtcaagaactcgccgacgtcacggcccctccgcctccgtgcgctcggctccaggaccagcaaggcgcggcacatcatggcggtggcgtccgagcaggccgcgccgccggccaggtaccccaaggtggccgcccctaccaccggcccgatccccgccgccgagctgctcggagtcatcgaggccgccgcaaaagctggggccgatgttataatggaagctgttaataagccacgcaatatccactataaaggtgttgcagacctggtgacagacacagacaagttgagtgaatcagtcattttggaagttgtcaccaagaacttcaaagaccacctcatacttggggaggaaggcggccttgttggagattccctatcagagtacctctggtgcattgaccctttagatggaacaacgaactttgcacatggttaccccagcttttctgtgtccattagtgttctcttccgtggaaagcctgctgcttctactgtggtggaattttgtggcgggcctatgtgctggagcacccgtacaatttctgcatctgctggcggaggagcttactgtaatgggcaaaagattcatgtcagtcagacagacaaggtggaacaatcacttctcgtcacaggttttggatatgaacacgatgatgcctggacgaccaatatgaatctgttcaaggaatttactgacattagcaggatagtagaggaagctggtggggtggtaactcgcatggacggtggagagtttacggtcttcgatcgctctgttcttgtttccaacggacttgttcatggacagcttttggaccggatcggccctcctactgaagaccttaagaagaaagggatcgacttctcgttgtggttcaagcctgacaagtacccgactgacttttgagctgcatcaagggcaccaccaccagccatgggccaccataataaagcagccatcatttttttttgggaaatttggatctgtaatcttttaatggtatagatccaattattccttttttttggggggtgtccttcaagaagaaacaataatgtttttagttcaatagcactgtacttgtaatggcaatacgatgtacagttcttcgactcgagtttcaaatcagagtttcaagagagccaagctcctgaaagaacagagcttcacaactgaacatggaatgtgcccccattgctctggcttttcgattgttacatgtatcggacgagatcgagattttggaagaggccagctcatttctacatctaagaattgattccatcgtgagccgctttggcctgctaggctgctgctcctcttcgagataccattgatgggggc

SEQ ID NO: 46094 - DNA, 2074 bp, Zea Mays
actgtagtggagctggagcgcgcacgcacacacgagtacacgacacgagacacaagccgggaattgaagcatcaagccctttctctgagcgccgatggcacggtatcttctcgcccccacttccacctcctcctctacctttctccccaaggatggagtcaagaactcgccgacgtcacggcccctccgcctccgtgcgctcggctccaggaccagcaaggcgcggcacatcatggcggtggcgtccgagcaggccgcgccgccggccaggtaccccaaggtggccgcccctaccaccggcccgatccccgccgccgagctgctcggagtcatcgaggccgccgcaaaagctggggccgatgttataatggaagctgttaataagccacgcaatatccactataaaggtgttgcagacctggtgacagacacagacaagttgagtgaatcagtcattttggaagttgtcaccaagaacttcaaagaccacctcatacttggggaggaaggcggccttgttggagattccctatcagagtacctctggtgcattgaccctttagatggaacaacgaactttgcacatggttaccccagcttttctgtgtccattagtgttctcttccgtggaaagcctgctgcttctactgtggtggaattttgtggcgggcctatgtgctggagcacccgtacaatttctgcatctgctggcggaggagcttactgtaatgggcaaaagattcatgtcagtcagacagacaaggtggaacaatcacttctcgtcacaggttttggatatgaacacgatgatgcctggacgaccaatatgaatctgttcaaggaatttactgacattagcaggggagtgcgaaggctagggtctgctgctgctgacatgtcccacattggacttggtattacagaagcttactgggaataccgacttaagccatgggatatggctgctggcgtcctggtagttatagttactttatctcccatgggaatattaacatttaataagtacttctccaaatcagtgttgataaataaccatgagtacatcagaactaaatatcgcccctttttttttgctttgcctaatctcacctcaatcagatattacctgttattgatctaatctaacatttttttgttaaaattagttatacgtaaataggggctgcctctaatatggcagtaaccagtctaaaaatagtgtcagaatcctgtccatggcctttctgtgaacaacgagagtaaaaggtttgaatcgatgcttatattatatttcatgatcgtataaatggatttacttttgttagatcaacgcgtactcgttaagtcagaggatgacagctctgtttccaatctagcataatcttgttttatggtgtatgttgtgctgatatatatctgcccgcttcttcgacagatagtagaggaagctggtggggtggtaactcgcatggacggtggagagtttacggtcttcgatcgctctgttcttgtttccaacggacttgttcatggacagcttttggaccggatcggccctcctactgaagaccttaagaagaaagggatcgacttctcgttgtggttcaagcctgacaagtacccgactgacttttgagctgcatcaagggcaccaccaccagccatgggccaccataataaagcagccatcatttttttttgggaaatttggatctgtaatcttttaatggtatagatccaattattccttttttttggggggtgtccttcaagaagaaacaataatgtttttagttcaatagcactgtacttgtaatggcaatacgatgtacagttcttcgactcgagtttcaaatcagagtttcaagagagccaagctcctgaaagaacagagcttcacaactgaacatggaatgtgcccccattgctctggcttttcgattgttacatgtatcggacgagatcgagattttggaagaggccagctcatttctacatctaagaattgattccatcgtgagccgctttggcctgctaggctgctgctcctcttcgagataccattgatgggggc

SEQ ID NO: 46095 - DNA, 1590 bp, Zea Mays
actgtagtggagctggagcgcgcacgcacacacgagtacacgacacgagacacaagccgggaattgaagcatcaagccctttctctgagcgccgatggcacggtatcttctcgcccccacttccacctcctcctctacctttctccccaaggatggagtcaagaactcgccgacgtcacggcccctccgcctccgtgcgctcggctccaggaccagcaaggcgcggcacatcatggcggtggcgtccgagcaggccgcgccgccggccaggtaccccaaggtggccgcccctaccaccggcccgatccccgccgccgagctgctcggagtcatcgaggccgccgcaaaagctggggccgatgttataatggaagctgttaataagccacgcaatatccactataaaggtgttgcagacctggtgacagacacagacaagttgagtgaatcagtcattttggaagttgtcaccaagaacttcaaagaccacctcatacttggggaggaaggcggccttgttggagattccctatcagagtacctctggtgcattgaccctttagatggaacaacgaactttgcacatggttaccccagcttttctgtgtccattagtgttctcttccgtggaaagcctgctgcttctactgtggtggaattttgtggcgggcctatgtgctggagcacccgtacaatttctgcatctgctggcggaggagcttactgtaatgggcaaaagattcatgtcagtcagacagacaaggttttggatatgaacacgatgatgcctggacgaccaatatgaatctgttcaaggaatttactgacattagcaggggagtgcgaaggctagggtctgctgctgctgacatgtcccacattggacttggtattacagaagcttactgggaataccgacttaagccatgggatatggctgctggcgtcctgatagtagaggaagctggtggggtggtaactcgcatggacggtggagagtttacggtcttcgatcgctctgttcttgtttccaacggacttgttcatggacagcttttggaccggatcggccctcctactgaagaccttaagaagaaagggatcgacttctcgttgtggttcaagcctgacaagtacccgactgacttttgagctgcatcaagggcaccaccaccagccatgggccaccataataaagcagccatcatttttttttgggaaatttggatctgtaatcttttaatggtatagatccaattattccttttttttggggggtgtccttcaagaagaaacaataatgtttttagttcaatagcactgtacttgtaatggcaatacgatgtacagttcttcgactcgagtttcaaatcagagtttcaagagagccaagctcctgaaagaacagagcttcacaactgaacatggaatgtgcccccattgctctggcttttcgattgttacatgtatcggacgagatcgagattttggaagaggccagctcatttctacatctaagaattgattccatcgtgagccgctttggcctgctaggctgctgctcctcttcgagataccattgatgggggc

SEQ ID NO: 46096 - DNA, 1671 bp, Zea Mays
actgtagtggagctggagcgcgcacgcacacacgagtacacgacacgagacacaagccgggaattgaagcatcaagccctttctctgagcgccgatggcacggtatcttctcgcccccacttccacctcctcctctacctttctccccaaggatggagtcaagaactcgccgacgtcacggcccctccgcctccgtgcgctcggctccaggaccagcaaggcgcggcacatcatggcggtggcgtccgagcaggccgcgccgccggccaggtaccccaaggtggccgcccctaccaccggcccgatccccgccgccgagctgctcggagtcatcgaggccgccgcaaaagctggggccgatgttataatggaagctgttaataagccacgcaatatccactataaaggtgttgcagacctggtgacagaacaagttgagtgaatcagtcattttggaagttgtcaccaagaacttcaaagaccacctcatacttggggaggaaggcggccttgttggagattccctatcagagtacctctggtgcattgaccctttagatggaacaacgaactttgcacatggttaccccagcttttctgtgtccattagtgttctcttccgtggaaagcctgctgcttctactgtggtggaattttgtggcgggcctatgtgctggagcacccgtacaatttctgcatctgctggcggaggagcttactgtaatgggcaaaagattcatgtcagtcagacagacaaggggccatgtgctcgatcagtcattcataaaaagtgttttcggatgtctgaattaaatgtcacataaccccgactgcgtatgtagatgttttggatatgaacacgatgatgcctggacgaccaatatgaatctgttcaaggaatttactgacattagcaggggagtgcgaaggctagggtctgctgctgctgacatgtcccacattggacttggtattacagaagcttactgggaataccgacttaagccatgggatatggctgctggcgtcctgatagtagaggaagctggtggggtggtaactcgcatggacggtggagagtttacggtcttcgatcgctctgttcttgtttccaacggacttgttcatggacagcttttggaccggatcggccctcctactgaagaccttaagaagaaagggatcgacttctcgttgtggttcaagcctgacaagtacccgactgacttttgagctgcatcaagggcaccaccaccagccatgggccaccataataaagcagccatcatttttttttgggaaatttggatctgtaatcttttaatggtatagatccaattattccttttttttggggggtgtccttcaagaagaaacaataatgtttttagttcaatagcactgtacttgtaatggcaatacgatgtacagttcttcgactcgagtttcaaatcagagtttcaagagagccaagctcctgaaagaacagagcttcacaactgaacatggaatgtgcccccattgctctggcttttcgattgttacatgtatcggacgagatcgagattttggaagaggccagctcatttctacatctaagaattgattccatcgtgagccgctttggcctgctaggctgctgctcctcttcgagataccattgatgggggc

SEQ ID NO: 46097 - DNA, 2020 bp, Zea Mays
actgtagtggagctggagcgcgcacgcacacacgagtacacgacacgagacacaagccgggaattgaagcatcaagccctttctctgagcgccgatggcacggtatcttctcgcccccacttccacctcctcctctacctttctccccaaggatggagtcaagaactcgccgacgtcacggcccctccgcctccgtgcgctcggctccaggaccagcaaggcgcggcacatcatggcggtggcgtccgagcaggccgcgccgccggccaggtaccccaaggtggccgcccctaccaccggcccgatccccgccgccgagctgctcggagtcatcgaggccgccgcaaaagctggggccgatgttataatggaagctgttaataagccacgcaatatccactataaaggtgttgcagacctggtgacagacacagacaagttgagtgaatcagtcattttggaagttgtcaccaagaacttcaaagaccacctcatacttggggaggaaggcggccttgttggagattccctatcagagtacctctggtgcattgaccctttaggtttggtcccttgctcggttcctacctctgatttgacgaacatctatttaacattgtaaccatttttgtactttgtaataccggatagctccagtagttttccagataatttctcgattttttacagcaaacctgtgaatttgaacagattagtctatcctccacttcattcatttagaaggtgatagttctctgtattactgttaccccggcgagaaaaagaattcagtcctgtgtattattagtgacaagcagattgagaaatagaaggactagtacaattcatatatctgatatttcacagcagtaagggtgtacctgcatatatgggttattgtacctgaatttaatgagaaaattaagttagcatgacggggatctaatctaccaaatttctccctccagatggaacaacgaactttgcacatggttaccccagcttttctgtgtccattagtgttctcttccgtggaaagcctgctgcttctactgtggtggaattttgtggcgggcctatgtgctggagcacccgtacaatttctgcatctgctggcggaggagcttactgtaatgggcaaaagattcatgtcagtcagacagacaaggtggaacaatcacttctcgtcacaggttttggatatgaacacgatgatgcctggacgaccaatatgaatctgttcaaggaatttactgacattagcaggggagtgcgaaggctagggtctgctgctgctgacatgtcccacattggacttggtattacagaagcttactgggaataccgacttaagccatgggatatggctgctggcgtcctgatagtagaggaagctggtggggtggtaactcgcatggacggtggagagtttacggtcttcgatcgctctgttcttgtttccaacggacttgttcatggacagcttttggaccggatcggccctcctactgaagaccttaagaagaaagggatcgacttctcgttgtggttcaagcctgacaagtacccgactgacttttgagctgcatcaagggcaccaccaccagccatgggccaccataataaagcagccatcatttttttttgggaaatttggatctgtaatcttttaatggtatagatccaattattccttttttttggggggtgtccttcaagaagaaacaataatgtttttagttcaatagcactgtacttgtaatggcaatacgatgtacagttcttcgactcgagtttcaaatcagagtttcaagagagccaagctcctgaaagaacagagcttcacaactgaacatggaatgtgcccccattgctctggcttttcgattgttacatgtatcggacgagatcgagattttggaagaggccagctcatttctacatctaagaattgattccatcgtgagccgctttggcctgctaggctgctgctcctcttcgagataccattgatgggggc

SEQ ID NO: 46098 - DNA, 1481 bp, Zea Mays
actgtagtggagctggagcgcgcacgcacacacgagtacacgacacgagacacaagccgggaattgaagcatcaagccctttctctgagcgccgatggcacggtatcttctcgcccccacttccacctcctcctctacctttctccccaaggatggagtcaagaactcgccgacgtcacggcccctccgcctccgtgcgctcggctccaggaccagcaaggcgcggcacatcatggcggtggcgtccgagcaggccgcgccgccggccaggtaccccaaggtggccgcccctaccaccggcccgatccccgccgccgagctgctcggagtcatcgaggccgccgcaaaagctggggccgatgttataatggaagctgttaataagccacgcaatatccactataaaggtgttgcagacctggtgacagaatggaacaacgaactttgcacatggttaccccagcttttctgtgtccattagtgttctcttccgtggaaagcctgctgcttctactgtggtggaattttgtggcgggcctatgtgctggagcacccgtacaatttctgcatctgctggcggaggagcttactgtaatgggcaaaagattcatgtcagtcagacagacaaggtggaacaatcacttctcgtcacaggttttggatatgaacacgatgatgcctggacgaccaatatgaatctgttcaaggaatttactgacattagcaggggagtgcgaaggctagggtctgctgctgctgacatgtcccacattggacttggtattacagaagcttactgggaataccgacttaagccatgggatatggctgctggcgtcctgatagtagaggaagctggtggggtggtaactcgcatggacggtggagagtttacggtcttcgatcgctctgttcttgtttccaacggacttgttcatggacagcttttggaccggatcggccctcctactgaagaccttaagaagaaagggatcgacttctcgttgtggttcaagcctgacaagtacccgactgacttttgagctgcatcaagggcaccaccaccagccatgggccaccataataaagcagccatcatttttttttgggaaatttggatctgtaatcttttaatggtatagatccaattattccttttttttggggggtgtccttcaagaagaaacaataatgtttttagttcaatagcactgtacttgtaatggcaatacgatgtacagttcttcgactcgagtttcaaatcagagtttcaagagagccaagctcctgaaagaacagagcttcacaactgaacatggaatgtgcccccattgctctggcttttcgattgttacatgtatcggacgagatcgagattttggaagaggccagctcatttctacatctaagaattgattccatcgtgagccgctttggcctgctaggctgctgctcctcttcgagataccattgatgggggc

SEQ ID NO: 46099 - DNA, 1678 bp, Zea Mays
actgtagtggagctggagcgcgcacgcacacacgagtacacgacacgagacacaagccgggaattgaagcatcaagccctttctctgagcgccgatggcacggtatcttctcgcccccacttccacctcctcctctacctttctccccaaggatggagtcaagaactcgccgacgtcacggcccctccgcctccgtgcgctcggctccaggaccagcaaggcgcggcacatcatggcggtggcgtccgagcaggccgcgccgccggccaggtaccccaaggtggccgcccctaccaccggcccgatccccgccgccgagctgctcggagtcatcgaggccgccgcaaaagctggggccgatgttataatggaagctgttaataagccacgcaatatccactataaaggtgttgcagacctggtgacagagtaagaatgcttctcgctgttattgtcgtgctgcgccagttcttagtttaattgctatataagcacagacaagttgagtgaatcagtcattttggaagttgtcaccaagaacttcaaagaccacctcatacttggggaggaaggcggccttgttggagattccctatcagagtacctctggtgcattgaccctttagatggaacaacgaactttgcacatggttaccccagcttttctgtgtccattagtgttctcttccgtggaaagcctgctgcttctactgtggtggaattttgtggcgggcctatgtgctggagcacccgtacaatttctgcatctgctggcggaggagcttactgtaatgggcaaaagattcatgtcagtcagacagacaaggtggaacaatcacttctcgtcacaggttttggatatgaacacgatgatgcctggacgaccaatatgaatctgttcaaggaatttactgacattagcaggggagtgcgaaggctagggtctgctgctgctgacatgtcccacattggacttggtattacagaagcttactgggaataccgacttaagccatgggatatggctgctggcgtcctgatagtagaggaagctggtggggtggtaactcgcatggacggtggagagtttacggtcttcgatcgctctgttcttgtttccaacggacttgttcatggacagcttttggaccggatcggccctcctactgaagaccttaagaagaaagggatcgacttctcgttgtggttcaagcctgacaagtacccgactgacttttgagctgcatcaagggcaccaccaccagccatgggccaccataataaagcagccatcatttttttttgggaaatttggatctgtaatcttttaatggtatagatccaattattccttttttttggggggtgtccttcaagaagaaacaataatgtttttagttcaatagcactgtacttgtaatggcaatacgatgtacagttcttcgactcgagtttcaaatcagagtttcaagagagccaagctcctgaaagaacagagcttcacaactgaacatggaatgtgcccccattgctctggcttttcgattgttacatgtatcggacgagatcgagattttggaagaggccagctcatttctacatctaagaattgattccatcgtgagccgctttggcctgctaggctgctgctcctcttcgagataccattgatgggggc

SEQ ID NO: 46100 - DNA, 1502 bp, Zea Mays
actgtagtggagctggagcgcgcacgcacacacgagtacacgacacgagacacaagccgggaattgaagcatcaagccctttctctgagcgccgatggcacggaccagcaaggcgcggcacatcatggcggtggcgtccgagcaggccgcgccgccggccaggtaccccaaggtggccgcccctaccaccggcccgatccccgccgccgagctgctcggagtcatcgaggccgccgcaaaagctggggccgatgttataatggaagctgttaataagccacgcaatatccactataaaggtgttgcagacctggtgacagaacaagttgagtgaatcagtcattttggaagttgtcaccaagaacttcaaagaccacctcatacttggggaggaaggcggccttgttggagattccctatcagagtacctctggtgcattgaccctttagatggaacaacgaactttgcacatggttaccccagcttttctgtgtccattagtgttctcttccgtggaaagcctgctgcttctactgtggtggaattttgtggcgggcctatgtgctggagcacccgtacaatttctgcatctgctggcggaggagcttactgtaatgggcaaaagattcatgtcagtcagacagacaaggtggaacaatcacttctcgtcacaggttttggatatgaacacgatgatgcctggacgaccaatatgaatctgttcaaggaatttactgacattagcaggggagtgcgaaggctagggtctgctgctgctgacatgtcccacattggacttggtattacagaagcttactgggaataccgacttaagccatgggatatggctgctggcgtcctgatagtagaggaagctggtggggtggtaactcgcatggacggtggagagtttacggtcttcgatcgctctgttcttgtttccaacggacttgttcatggacagcttttggaccggatcggccctcctactgaagaccttaagaagaaagggatcgacttctcgttgtggttcaagcctgacaagtacccgactgacttttgagctgcatcaagggcaccaccaccagccatgggccaccataataaagcagccatcatttttttttgggaaatttggatctgtaatcttttaatggtatagatccaattattccttttttttggggggtgtccttcaagaagaaacaataatgtttttagttcaatagcactgtacttgtaatggcaatacgatgtacagttcttcgactcgagtttcaaatcagagtttcaagagagccaagctcctgaaagaacagagcttcacaactgaacatggaatgtgcccccattgctctggcttttcgattgttacatgtatcggacgagatcgagattttggaagaggccagctcatttctacatctaagaattgattccatcgtgagccgctttggcctgctaggctgctgctcctcttcgagataccattgatgggggc

SEQ ID NO: 46101 - DNA, 1517 bp, Zea Mays
atgctgagtgggacacaaaatagcagagtacagtagccctagctgtggttggccaatcctgacacattatcctctccacctcttcagaatccggacctcggcagagtccagtactccagtcccttgtgcatctcggcctctccactctcctttccacgcccgtccagtcctctaatctgacccctcttctccagccggccggagatggtctcgctgcgatgcacaaccgcgcaccactccctcctcggctcgccgacctgcctcgcgcgcccgcggcggcgggcgtgccccgtcgtgcgcgctgccgtcgccgtggaggccggcgcgcaggccaaggtctcactcatccgaattgggacgcgtgggagtcctcttgctcttgcacaagcccacgaaactcgagaaaaactgaaagccacacactctgagttagctgaggagagggccattgagatcgtcatcataaagaccacaggagacatgatcttggacaaaccccttgcagacattggaggcaagggtttattcaccaaggagatagatgatgcgctcttgcagggaaggattgatatcgctgttcactctatgaaagatgttccaacatatctacctgaaggcacaatattgccctgtaacctaccacgagaagatgtcagagacgcattcatatgtttgactgcaaattcgcttgcagagcttcctgctggcagtgttattggaagtgcttctctgcggagacaatctcagattctctacagatatccatcactgaaagtagttaacttcagaggaaacgttcagacacggttaaggaaactcaaggagggagatgtctctgctacattgttggcactggctggattaaggcggctaaatatggcagaaaatgcaactgctgtactatcagtggaagaaatgcttccagcagttgcccaaggtgctattggaatagcttgccgaagcaatgatgacaaaatgatggagtatctatcagcgttgaaccatgaagataccagattagctgttgcatgtgaaagagaatttttggcagttcttgatggtaactgccgaactccaattgcagcctatgcttaccgtgacaatgatgggaattgctcattccgcggtctattgtcttccccagatggatctaaagtatttgagacaacaagaagtggaccgtactcttttgacgacatggttgagatgggcaaagatgctggtcatgagctgaaggcaaaggctgggcctggcttctttgatagcttgcaatgaaaagaatgagcggccatgagcaatttcaattgtcactcttttgggtagaaacagagggcccaagtagagtgttgagaggtttgtttttgtttattctttctcctactagttctgctagagaagggtgtacctggtgtagtggtgagctgagtcatcaggtcgcgggttcgaagcatccagtctccgtatttgtgggagaagcaggtgcgcctctcgtctcctccactccaagacagtactag

SEQ ID NO: 46102 - DNA, 1162 bp, Zea Mays
atttggggacggcggctatgcgttgcgagcgcctgagagatcctgtgtttagctctaccgccgggaattcctcttgctcttgcacaagcccacgaaactcgagaaaaactgaaagccacacactctgagttagctgaggagagggccattgagatcgtcatcataaagaccacaggagacatgatcttggacaaaccccttgcagacattggaggcaagggtttattcaccaaggagatagatgatgcgctcttgcagggaaggattgatatcgctgttcactctatgaaagatgttccaacatatctacctgaaggcacaatattgccctgtaacctaccacgagaagatgtcagagacgcattcatatgtttgactgcaaattcgcttgcagagcttcctgctggcagtgttattggaagtgcttctctgcggagacaatctcagattctctacagatatccatcactgaaagtagttaacttcagaggaaacgttcagacacggttaaggaaactcaaggagggagatgtctctgctacattgttggcactggctggattaaggcggctaaatatggcagaaaatgcaactgctgtactatcagtggaagaaatgcttccagcagttgcccaaggtgctattggaatagcttgccgaagcaatgatgacaaaatgatggagtatctatcagcgttgaaccatgaagataccagattagctgttgcatgtgaaagagaatttttggcagttcttgatgttctgctagagaagggtgtacctggtgtagtggtgagctgagtcatcaggtcgcgggttcgaagcatccagtctccgtatttgtgggagaaggtttgtctcggtttatctcttttccgctactcatatgggagaaatgtgggagcctcagtctgctcttttttttttccatactagttctgctagtgccttgtactatcactcgtattgagcagccccattcagctttataaaaatacagtaaaaacaaagaagctggtatggattaaagaacgaacaagttgattaatgtgatgtttactccggatctagatataaaaatgtgcatatgcatatttcccccacgttgttccaatataacattgtcatccatttttatgttttgtcgagatttggatgttag

SEQ ID NO: 46103 - DNA, 1496 bp, Zea Mays
gttgcatttggggacggcggctatgcgttgcgagcgcctgagagatcctgtgtttagctctaccgccgggaatgacagtcctcttgctcttgcacaagcccacgaaactcgagaaaaactgaaagccacacactctgagttagctgaggagagggccattgagatcgtcatcataaagaccacaggagacatgatcttggacaaaccccttgcagacattggaggcaagggtttattcaccaaggagatagatgatgcgctcttgcagggaaggattgatatcgctgttcactctatgaaagatgttccaacatatctacctgaaggcacaatattgccctgtaacctaccacgagaagatgtcagagacgcattcatatgtttgactgcaaattcgcttgcagagcttcctgctggcagtgttattggaagtgcttctctgcggagacaatctcagattctctacagatatccatcactgaaagtagttaacttcagaggaaacgttcagacacggttaaggaaactcaaggagggagatgtctctgctacattgttggcactggctggattaaggcggctaaatatggcagaaaatgcaactgctgtactatcagtggaagaaatgcttccagcagttgcccaaggtgctattggaatagcttgccgaagcaatgatgacaaaatgatggagtatctatcagcgttgaaccatgaagataccagattagctgttgcatgtgaaagagaatttttggcagttcttgatggtaactgccgaactccaattgcagcctatgcttaccgtgacaatgatgggaattgctcattccgcggtctattgtcttccccagatggatctaaagtatttgagacaacaagaagtggaccgtactcttttgacgacatggttgagatgggcaaagatgctggtcatgagctgaaggcaaaggctgggcctggcttctttgatagcttgcaatgaaaagaatgagcggccatgagcaatttcaattgtcactcttttgggtagaaacagagggcccaagtagagtgttgagaggtttgtttttgtttattctttctcctactagttctgctagagaagggtgtacctggtgtagtggtgagctgagtcatcaggtcgcgggttcgaagcatccagtctccgtatttgtgggagaaggtttgtctcggtttatctcttttccgctactcatatgggagaaatgtgggagcctcagtctgctcttttttttttccatactagttctgctagtgccttgtactatcactcgtattgagcagccccattcagctttataaaaatacagtaaaaacaaagaagctggtatggattaaagaacgaacaagttgattaatgtgatgtttactccggatctagatataaaaatgtgcatatgcatatttcccccacgttgttccaatataacattgtcatccatttttatgttttgtcgagatttggatgttag

SEQ ID NO: 46104 - DNA, 1871 bp, Zea Mays
atgctgagtgggacacaaaatagcagagtacagtagccctagctgtggttggccaatcctgacacattatcctctccacctcttcagaatccggacctcggcagagtccagtactccagtcccttgtgcatctcggcctctccactctcctttccacgcccgtccagtcctctaatctgacccctcttctccagccggccggagatggtctcgctgcgatgcacaaccgcgcaccactccctcctcggctcgccgacctgcctcgcgcgcccgcggcggcgggcgtgccccgtcgtgcgcgctgccgtcgccgtggaggccggcgcgcaggccaaggtctcactcatccgaattgggacgcgtgggaggttttgttagcagttgcatttggggacggcggctatgcgttgcgagcgcctgagagatcctgtgtttagctctaccgccgggaattcctcttgctcttgcacaagcccacgaaactcgagaaaaactgaaagccacacactctgagttagctgaggagagggccattgagatcgtcatcataaagaccacaggagacatgatcttggacaaaccccttgcagacattggaggcaagggtttattcaccaaggagatagatgatgcgctcttgcagggaaggattgatatcgctgttcactctatgaaagatgttccaacatatctacctgaaggcacaatattgccctgtaacctaccacgagaagatgtcagagacgcattcatatgtttgactgcaaattcgcttgcagagcttcctgctggcagtgttattggaagtgcttctctgcggagacaatctcagattctctacagatatccatcactgaaagtagttaacttcagaggaaacgttcagacacggttaaggaaactcaaggagggagatgtctctgctacattgttggcactggctggattaaggcggctaaatatggcagaaaatgcaactgctgtactatcagtggaagaaatgcttccagcagttgcccaaggtgctattggaatagcttgccgaagcaatgatgacaaaatgatggagtatctatcagcgttgaaccatgaagataccagattagctgttgcatgtgaaagagaatttttggcagttcttgatggtaactgccgaactccaattgcagcctatgcttaccgtgacaatgatgggaattgctcattccgcggtctattgtcttccccagatggatctaaagtatttgagacaacaagaagtggaccgtactcttttgacgacatggttgagatgggcaaagatgctggtcatgagctgaaggcaaaggctgggcctggcttctttgatagcttgcaatgaaaagaatgagcggccatgagcaatttcaattgtcactcttttgggtagaaacagagggcccaagtagagtgttgagaggtttgtttttgtttattctttctcctactagttctgctagagaagggtgtacctggtgtagtggtgagctgagtcatcaggtcgcgggttcgaagcatccagtctccgtatttgtgggagaaggtttgtctcggtttatctcttttccgctactcatatgggagaaatgtgggagcctcagtctgctcttttttttttccatactagttctgctagtgccttgtactatcactcgtattgagcagccccattcagctttataaaaatacagtaaaaacaaagaagctggtatggattaaagaacgaacaagttgattaatgtgatgtttactccggatctagatataaaaatgtgcatatgcatatttcccccacgttgttccaatataacattgtcatccatttttatgttttgtcgagatttggatgttag

SEQ ID NO: 46105 - DNA, 1708 bp, Zea Mays
atgctgagtgggacacaaaatagcagagtacagtagccctagctgtggttggccaatcctgacacattatcctctccacctcttcagaatccggacctcggcagagtccagtactccagtcccttgtgcatctcggcctctccactctcctttccacgcccgtccagtcctctaatctgacccctcttctccagccggccggagatggtctcgctgcgatgcacaaccgcgcaccactccctcctcggctcgccgacctgcctcgcgcgcccgcggcggcgggcgtgccccgtcgtgcgcgctgccgtcgccgtggaggccggcgcgcaggccaaggtctcactcatccgaattgggacgcgtgggagtcctcttgctcttgcacaagcccacgaaactcgagaaaaactgaaagccacacactctgagttagctgaggagagggccattgagatcgtcatcataaagaccacaggagacatgatcttggacaaaccccttgcagacattggaggcaagggtttattcaccaaggagatagatgatgcgctcttgcagggaaggattgatatcgctgttcactctatgaaagatgttccaacatatctacctgaagagcttcctgctggcagtgttattggaagtgcttctctgcggagacaatctcagattctctacagatatccatcactgaaagtagttaacttcagaggaaacgttcagacacggttaaggaaactcaaggagggagatgtctctgctacattgttggcactggctggattaaggcggctaaatatggcagaaaatgcaactgctgtactatcagtggaagaaatgcttccagcagttgcccaaggtgctattggaatagcttgccgaagcaatgatgacaaaatgatggagtatctatcagcgttgaaccatgaagataccagattagctgttgcatgtgaaagagaatttttggcagttcttgatggtaactgccgaactccaattgcagcctatgcttaccgtgacaatgatgggaattgctcattccgcggtctattgtcttccccagatggatctaaagtatttgagacaacaagaagtggaccgtactcttttgacgacatggttgagatgggcaaagatgctggtcatgagctgaaggcaaaggctgggcctggcttctttgatagcttgcaatgaaaagaatgagcggccatgagcaatttcaattgtcactcttttgggtagaaacagagggcccaagtagagtgttgagaggtttgtttttgtttattctttctcctactagttctgctagagaagggtgtacctggtgtagtggtgagctgagtcatcaggtcgcgggttcgaagcatccagtctccgtatttgtgggagaaggtttgtctcggtttatctcttttccgctactcatatgggagaaatgtgggagcctcagtctgctcttttttttttccatactagttctgctagtgccttgtactatcactcgtattgagcagccccattcagctttataaaaatacagtaaaaacaaagaagctggtatggattaaagaacgaacaagttgattaatgtgatgtttactccggatctagatataaaaatgtgcatatgcatatttcccccacgttgttccaatataacattgtcatccatttttatgttttgtcgagatttggatgttag

SEQ ID NO: 46106 - DNA, 3361 bp, Zea Mays
ctgcgttcaatcttccttacatcatccatcggctggccctccctttcaaatgcaaaactcctctgtccctggaatgcaggctgcaaagaatattcagtctgcataggaggaggataaatttcaagaatgggagggggacaaacatgtaccatggaccagcaacatgccgctggcatattcatggccgtgtgtgccgaagtaagcacaacagacggaccaacccccttcttgttacttactaactgctcatcaggaatattctgtagcaaaaagttgcagccattagtgctatctgacccaacaacaatattccttttgccacaagaaaatactccagcagaaagttgtgagtaaatattctgcattctatgctcctgacattacgtttcaaaactacgtaataaaattgttatttgtagttaaaattttataagtttgactcaaaccttgtccaaaacgacaactaatcagacaccggagggaatatatttgaaatcacctcagattttataaatcagtttcttaagaatgggtgctttcaaccaggccctaaataaagctcagtatgttcttctcaaaacacactcaattttgtgtccactattttgaaacacaaaatattcacgtagagtttgtttgtgctcagtaatactaaacaaccaattggaactcagtcagtttcaatgaaaaaaccatatgccgaagacctcgcggtcgtggatggcgtagcgacaatgctgacgccgaaggacggagctttcgggcgcagcaccgactgccaccaattcctcgcctcgcctcgcatctgcaagatattagaatcccgcctgcgtcctccgcctgaacgcagagccttctattgcggcgccggcgccggcgccacgacccttctccgccagtccccactagagggcttagaactgcgtggaccacccggcgcctcttggcctctctcgctccgtccttgcgggcgcgacgacggcctccgacagctccgcaaagtcatccaagcctggaacaggatgcgcgtcagctactggttgctgtgtcgaagataacaaattttcaaagctgtcgacctccagggatccaaaaatctccctcccaggtggtgctgcctgctgcgtgcaggggagtgagcgtggctgcgtgggcaccctcggggtcggatctgaagaggaagaaggctgtcgcgctgacctcgactcgatgacggccagaagataaccgacgacatcggaccgcatccgcgcctcctcgagaagggcgccaacgtcatccttgctagccacctgaattacagatgcgattgtgacttgcatcattgcatgccgccgccatggtctcgccctcccatcccagcgtgggcggctgccaactccctcttccgccgccaccgccgcctgcagcccctcctcttcccggccgtctctcactgcgaccacctccgcgttctgtcccactgcctcgtgtccggcctcgcccgcaaccccttcgttgcctcccgccttctcctcgcatcctccagcctctccctccccttctccctcaccctcctcgcctatctcccggcctcctcgctctcatcgttctccttcaactcgctcatccgcgcctccccaccgcgcctcgcgctccgcctgtttgacgaaatgcgcagccgaggagtccccacggacccctacaccttaccgctcctgatcagcgcctgttcctgcagcggttttacactgtgccagtctctgcacgggcagggcttccgtcttggctacaattgccacgtattcacccagacggcgctgttgaacgcgtacctcaagtgcgggtcggtggccaccgcttgcagggtgttcgaggaaatgccggtgaaggatgtggttgcgtggaccagcatggtgtctggttatgtagactccaggatgtacttaaaagccgtcgaggtatttaacgagatgagaggtgctgatgatcttgtgtggcctaatgaggccacagtggtgtcacttgccactgcctgtgctggtctgggctcgctggagcatgcaaagggtctgcattcgtatgtggagaaggctgggttggaggacgagttaattgtcaggaatgcattggttgacatgtatgggaagtgtggctgcattgagtcggcacatagattgttttgtttgatgcgtgagaaggacttgcattcatggacaacaatgatttcagggctgtcttctcatggacgcggcgaagaagcggttggtttgttcttcagcatgtgcgaggagggagtattaccagattcgaccacttttattgtggttctgtctgcctgtagccatgctggactagtagatgaggggatacatatcttcaattccatggagagtgagcacaatgtcccccgggacaccaagcactatggttgcatggtggatcttttcagcagagcagggcttgttcgccgtgcttatgaattcattagcatgatgcctttcgaaccaaacttggagattcttggggccctgctgagtgcatgcagtatcaataatgaactggagattggggagctcgtgctcaataagattgacatggtctgctcctacaaaggaggtgctggtgtgcttctgtcaaatatatatgctaaccaaaatctgtggcatgaagtggataccattagaaggaagataaggactgaagcaattgtcaggaagccacctggtcatagtttgattgcagcagaagtttcttccatgactttctgattggtaattgcatagatttgcttttaatgaagctgtggtcctgattttgcgaaggaggcttggggtgtttgctttcaacaatccctgtaggccagtcgaaatggaaggtgttatgaggagggtgatcacttcggacaacatctgctttgtaaatgctgcggtgcgattgccaagaagctggctgagcttacaacgctaacggatgtcacaaccatcgtcggctaggctggctgacaagatgagccacatttggaccggtggtggcgcgagcgagcttggagctcttggaaggcaaggcgctaccaggtgtccttgtccttttgtttcggaccatggtgtaacactgcaaagcttatggtttgtattggacttgggataggcttgccgtcgagttttggtagatgagtggtgaataagcttgatctataccactgttaccccctcacctaaaagaactatacaactgctgtcgttacctctcgttggctaccatggtgcactgccatcacttggatgacaaaatcgtcgccatgcactgattcaatgcaatttattccatgcccattaatcccatgccctcgtttaaattgttataattttgattattccgg

SEQ ID NO: 46107 - DNA, 1592 bp, Zea Mays
cacaacttgcttggaaccaaaaggttttattattgttggtgaagttgtgtgcttgacatcctcaaactccgatacaggatttcaggttcttgatgagcaatactgtataaaccatggcttcatagtggccaacatgatttaataagcatcatgccccttcgtttgtattccaaccttgttcttataataaatagaaggaatgctcttatgacagtttggatatttaaaacggatggagtaaatatttatataattccttggcgtaatggcgtggctaccctacctcacaagtccaaatcagtttgtctgctccgcccgttgcccgtggcccgtcggtctctcttgcagtctcgccgctccccttcctcccccgcaggaatccgaatcagtaagtccggcgacctaggtctctcggcttgtccgcagcccgccggtcagtaatggcgcaggatgatccggttgtttctgctcagtggctgcacgagcacctagggatgcctgatgttaagaaagttcagagatatacttcttctatcccctgcgttactggttttggatgcttcctggtacatgccggtagagaacagggatccatggaaagaatatcagatggcatagttgatcggacaactgatttaccgcacatgctgccatcagaagaggcttttgcagcagcaatttctgagctggatataaaaaaccaggataaagttattgtctatgatggaaagggattcttcagtgcacctcgtgtttggtggatgtttagagtgtttgggcacaagaaagtctgggtactagacggcggtttgcctcagtggcaagcttctgggttcaacgtggaaaaggccagccctgacgatgacgcagttctgaaatcaatcgctgcaaacagggctgtcaaaagggtttataatggtgaacagacaaatacaatctcgtttcagactgaatttcagcctaatctattctgggcactggaaaaggtcgcacaaaacgtcactgctaagacgtaccaacagatagatgccagagcaaagggcagattcgacggcgtggcgccagagccacgggaaggggtaaggagtgggcatataccaggaagcgtctgcgttccgttccccgagatgttcgacggcgcaccaccgagccttctcctccccgccgacgagctgcggcggaagtttcagcacgcaggaatctccctggaccgacccatcgtcgtgacctgcggatccggcgtgactgcctgcatactcgctctggggctgtacaggatcggaaagcgtgatgtgccagtctacgatgggtcctggacggagtgggagggtcagtcggactccgattaccccaaagtcaccgctcctgggggctaccgtggtactgtgctaccgtcgtcgcgctgtgctaccatcgtcgtcgcgcagtgggctcgatgtctaaagggatggagcacggcatgtgctggtgctgacaagcaggcgggagaggagtggtcgagcggggatggagaacgaagagacgagcgggatgcgcacggccgccagggcgggagaggggcactgagcgcggcacgaggatggagcacatga

SEQ ID NO: 46108 - DNA, 1506 bp, Zea Mays
tttttcagaacatgttagaagccagggaagatcggtgaaatgcttgcattgatataataagtccaggctgaagttattgagctgacagcactaagatataatagtttgagaatctcaatgggttgcttttctacattttgcaagaaaagaagggcaacgcggcaaccaagttcccaccataatgaagacgtacctggctgttcaaatataacaaaatacacttacaaggagctagtaagggcgacaaataactttaacccattgaacaaaattggtgagggtggttttggttccgtttacaagctcaggaatggtacagttattgctgtcaaggtcctttcgtcggagtcaagacaaggagtaagggagtttctgaatgaactcgtggcaatttccgacatctcacatgataatcttgtgaaactttatgggtattgtgcggaaggagaccaaagaatccttgtttacaatcatcttgaaaataatagccttgcacaaacacttctaggctccagccacagcaatatccagtttgattggaaaacacgagtaaatatttgccttggcattgcacggggattagcatacctccatcatggtgtcagtccccacattgttcatcgagacattaaagcaagcaatatacttcttgatagggaccttaccccaaaaatctctgattttggtctagcaaagcttcttccaccaaacgcaacacatgttagcacaagagttgcaggaacactgggttatttggctcctgagtatgctattcgaggacaggtgacacgcaaatcagatgtgtacagctttggcgtgctgcttctggaaattgtttgcgggagatcaaacagcgatacaagattagcatacggagatcagatactcctcgaaaagacatggatgcactacgagcaggggagtctggagaggatcatagacaggtccttgggcggcggcgacctggacgtggcgcaggcctgcaggttcctgaaggtcgggctgctgtgcacgcaggacgtgacgaggcaccggcccgacatgccgagggtcgtcgccatgctgacgggcgagtgggacgtcgagccggagacggtcagcaagcccgccataatcagcgacttcatggacctcaaggtcaggagcacgaggaaagcgagcgacaacgtggccacgccgcctacgtcctcctcgacgttcctgtcctccctcatggcgcactcctcgcccttgctgtcgaacgagtccacgcaggcctccatggcgttcaccggggtgtcggatcgcgagtgatccttgatcccttcgtcaaagactggtcaggctggctggtagtgacctgagttggttggaggtgtggaagacatgtgtagtgtaggcaggcaggcacagatggatttaattgcttcgtttgtaggcgcaacatcattgttgagtcaaaaggttcaagtacatgtgaggaaactgctttgtgtgcaattttggattgaagacgcgattcttttt

SEQ ID NO: 46109 - DNA, 1547 bp, Zea Mays
tgcaacatccactggacaatcttggccagaattttaaccatagaacatgttagaagccagggaagatcggtgaaatgcttgcattgatataataagtccaggctgaagttattgagctgacagcactaagatataatagtttgagaatctcaatgggttgcttttctacattttgcaagaaaagaagggcaacgcggcaaccaagttcccaccataatgaagacgtacctggctgttcaaatataacaaaatacacttacaaggagctagtaagggcgacaaataactttaacccattgaacaaaattggtgagggtggttttggttccgtttacaagggacagctcaggaatggtacagttattgctgtcaaggtcctttcgtcggagtcaagacaaggagtaagggagtttctgaatgaactcgtggcaatttccgacatctcacatgataatcttgtgaaactttatgggtattgtgcggaaggagaccaaagaatccttgtttacaatcatcttgaaaataatagccttgcacaaacacttctaggctccagccacagcaatatccagtttgattggaaaacacgagtaaatatttgccttggcattgcacggggattagcatacctccatcatggtgtcagtccccacattgttcatcgagacattaaagcaagcaatatacttcttgatagggaccttaccccaaaaatctctgattttggtctagcaaagcttcttccaccaaacgcaacacatgttagcacaagagttgcaggaacactgggttatttggctcctgagtatgctattcgaggacaggtgacacgcaaatcagatgtgtacagctttggcgtgctgcttctggaaattgtttgcgggagatcaaacagcgatacaagattagcatacggagatcagatactcctcgaaaagacatggatgcactacgagcaggggagtctggagaggatcatagacaggtccttgggcggcggcgacctggacgtggcgcaggcctgcaggttcctgaaggtcgggctgctgtgcacgcaggacgtgacgaggcaccggcccgacatgccgagggtcgtcgccatgctgacgggcgagtgggacgtcgagccggagacggtcagcaagcccgccataatcagcgacttcatggacctcaaggtcaggagcacgaggaaagcgagcgacaacgtggccacgccgcctacgtcctcctcgacgttcctgtcctccctcatggcgcactcctcgcccttgctgtcgaacgagtccacgcaggcctccatggcgttcaccggggtgtcggatcgcgagtgatccttgatcccttcgtcaaagactggtcaggctggctggtagtgacctgagttggttggaggtgtggaagacatgtgtagtgtaggcaggcaggcacagatggatttaattgcttcgtttgtaggcgcaacatcattgttgagtcaaaaggttcaagtacatgtgaggaaactgctttgtgtgcaattttggattgaagacgcgattcttttt

SEQ ID NO: 46110 - DNA, 1547 bp, Zea Mays
aaagcttaagctgatgggaaaagaacatgttagaagccagggaagatcggtgaaatgcttgcattgatataataagtccaggctgaagttattgagctgacagcactaagatataatagtttgagaatctcaatgggttgcttttctacattttgcaagaaaagaagggcaacgcggcaaccaagttcccaccataatgaaggtagagatctcgtacatgggacgtacctggctgttcaaatataacaaaatacacttacaaggagctagtaagggcgacaaataactttaacccattgaacaaaattggtgagggtggttttggttccgtttacaagggacagctcaggaatggtacagttattgctgtcaaggtcctttcgtcggagtcaagacaaggagtaagggagtttctgaatgaactcgtggcaatttccgacatctcacatgataatcttgtgaaactttatgggtattgtgcggaaggagaccaaagaatccttgtttacaatcatcttgaaaataatagccttgcacaaacacttctaggctccagccacagcaatatccagtttgattggaaaacacgagtaaatatttgccttggcattgcacggggattagcatacctccatcatggtgtcagtccccacattgttcatcgagacattaaagcaagcaatatacttcttgatagggaccttaccccaaaaatctctgattttggtctagcaaagcttcttccaccaaacgcaacacatgttagcacaagagttgcaggaacactgggttatttggctcctgagtatgctattcgaggacaggtgacacgcaaatcagatgtgtacagctttggcgtgctgcttctggaaattgtttgcgggagatcaaacagcgatacaagattagcatacggagatcagatactcctcgaaaagacatggatgcactacgagcaggggagtctggagaggatcatagacaggtccttgggcggcggcgacctggacgtggcgcaggcctgcaggttcctgaaggtcgggctgctgtgcacgcaggacgtgacgaggcaccggcccgacatgccgagggtcgtcgccatgctgacgggcgagtgggacgtcgagccggagacggtcagcaagcccgccataatcagcgacttcatggacctcaaggtcaggagcacgaggaaagcgagcgacaacgtggccacgccgcctacgtcctcctcgacgttcctgtcctccctcatggcgcactcctcgcccttgctgtcgaacgagtccacgcaggcctccatggcgttcaccggggtgtcggatcgcgagtgatccttgatcccttcgtcaaagactggtcaggctggctggtagtgacctgagttggttggaggtgtggaagacatgtgtagtgtaggcaggcaggcacagatggatttaattgcttcgtttgtaggcgcaacatcattgttgagtcaaaaggttcaagtacatgtgaggaaactgctttgtgtgcaattttggattgaagacgcgattcttttt

SEQ ID NO: 46111 - DNA, 1613 bp, Zea Mays
caacccaaaagctctgccaggattcgaactcgagacttctggctctcataccatgttatagtggacgcactaaccaattcaacccaaaagcttaagctgatgggaaaagaacatgttagaagccagggaagatcggtgaaatgcttgcattgatataataagtccaggctgaagttattgagctgacagcactaagatataatagtttgagaatctcaatgggttgcttttctacattttgcaagaaaagaagggcaacgcggcaaccaagttcccaccataatgaagacgtacctggctgttcaaatataacaaaatacacttacaaggagctagtaagggcgacaaataactttaacccattgaacaaaattggtgagggtggttttggttccgtttacaagggacagctcaggaatggtacagttattgctgtcaaggtcctttcgtcggagtcaagacaaggagtaagggagtttctgaatgaactcgtggcaatttccgacatctcacatgataatcttgtgaaactttatgggtattgtgcggaaggagaccaaagaatccttgtttacaatcatcttgaaaataatagccttgcacaaacacttctaggctccagccacagcaatatccagtttgattggaaaacacgagtaaatatttgccttggcattgcacggggattagcatacctccatcatggtgtcagtccccacattgttcatcgagacattaaagcaagcaatatacttcttgatagggaccttaccccaaaaatctctgattttggtctagcaaagcttcttccaccaaacgcaacacatgttagcacaagagttgcaggaacactgggttatttggctcctgagtatgctattcgaggacaggtgacacgcaaatcagatgtgtacagctttggcgtgctgcttctggaaattgtttgcgggagatcaaacagcgatacaagattagcatacggagatcagatactcctcgaaaagacatggatgcactacgagcaggggagtctggagaggatcatagacaggtccttgggcggcggcgacctggacgtggcgcaggcctgcaggttcctgaaggtcgggctgctgtgcacgcaggacgtgacgaggcaccggcccgacatgccgagggtcgtcgccatgctgacgggcgagtgggacgtcgagccggagacggtcagcaagcccgccataatcagcgacttcatggacctcaaggtcaggagcacgaggaaagcgagcgacaacgtggccacgccgcctacgtcctcctcgacgttcctgtcctccctcatggcgcactcctcgcccttgctgtcgaacgagtccacgcaggcctccatggcgttcaccggggtgtcggatcgcgagtgatccttgatcccttcgtcaaagactggtcaggctggctggtagtgacctgagttggttggaggtgtggaagacatgtgtagtgtaggcaggcaggcacagatggatttaattgcttcgtttgtaggcgcaacatcattgttgagtcaaaaggttcaagtacatgtgaggaaactgctttgtgtgcaattttggattgaagacgcgattcttttt

SEQ ID NO: 46112 - DNA, 1394 bp, Zea Mays
cgcttcatcctcccggatcacggcggcggtttgttcagaacatgttagaagccagggaagatcggtgaaatgcttgcattgatataataagtccaggctgaagttattgagctgacagcactaagatataatagtttgagaatctcaatgggttgcttttctacattttgcaagaaaagaagggcaacgcggcaaccaagttcccaccataatgaagacgtacctggctgttcaaatataacaaaatacacttacaaggagctagtaagggcgacaaataactttaacccattgaacaaaattggtgagggtggttttggttccgtttacaagggacagctcaggaatggtacagttattgctgtcaaggtcctttcgtcggagtcaagacaaggagctccagccacagcaatatccagtttgattggaaaacacgagtaaatatttgccttggcattgcacggggattagcatacctccatcatggtgtcagtccccacattgttcatcgagacattaaagcaagcaatatacttcttgatagggaccttaccccaaaaatctctgattttggtctagcaaagcttcttccaccaaacgcaacacatgttagcacaagagttgcaggaacactgggttatttggctcctgagtatgctattcgaggacaggtgacacgcaaatcagatgtgtacagctttggcgtgctgcttctggaaattgtttgcgggagatcaaacagcgatacaagattagcatacggagatcagatactcctcgaaaagacatggatgcactacgagcaggggagtctggagaggatcatagacaggtccttgggcggcggcgacctggacgtggcgcaggcctgcaggttcctgaaggtcgggctgctgtgcacgcaggacgtgacgaggcaccggcccgacatgccgagggtcgtcgccatgctgacgggcgagtgggacgtcgagccggagacggtcagcaagcccgccataatcagcgacttcatggacctcaaggtcaggagcacgaggaaagcgagcgacaacgtggccacgccgcctacgtcctcctcgacgttcctgtcctccctcatggcgcactcctcgcccttgctgtcgaacgagtccacgcaggcctccatggcgttcaccggggtgtcggatcgcgagtgatccttgatcccttcgtcaaagactggtcaggctggctggtagtgacctgagttggttggaggtgtggaagacatgtgtagtgtaggcaggcaggcacagatggatttaattgcttcgtttgtaggcgcaacatcattgttgagtcaaaaggttcaagtacatgtgaggaaactgctttgtgtgcaattttggattgaagacgcgattcttttt

SEQ ID NO: 46113 - DNA, 2243 bp, Zea Mays
gtctagtcaggtcagccaccccaaacgttgtctcggtcaaattcaattcaattgacctggttcaaccgcgaccaccagagccagcaccggacgggtccaccgaaccgcgtgtacagttgtacagtgtacacacggccaccacgcgacgccttacctctccacgtggtcaacggtttgagttgaccctcctcccctctgctccgtccacctttcaaagccgaggcgccccggccgcctcttccacctccacggctccacctccaccccagtccacagcacccctcccctccggcctcccttcccgcaccgcggacgacaagtcaaataccgcgcgtgcgtaccacttggagccatccggcaccacgccacgagtccacagtccgcgcgccccccacgggccgtcgtcgccccggcttctcctctccttcccggcttcccccaacccctcgcgaaagctcgccgctgctgcgtccgcgccccgtggcggcacggcgcggcacctcgtggggaaaccgacggaggccttcgccgagcctttgggggccggcgctttttcctggtgccgtccttctgtactgcctgcgggtgggttgttccgatcataaccgacaaggcgcggcgtgctctcttccctcgcgttgtagactctcgcgggatctgtctcggcggcggcggcgggggtgggggtgggttactgggctcgcttcatcctcccggatcacggcggcggtttgttcagaacatgttagaagccagggaagatcggtgaaatgcttgcattgatataataagtccaggctgaagttattgagctgacagcactaagatataatagtttgagaatctcaatgggttgcttttctacattttgcaagaaaagaagggcaacgcggcaaccaagttcccaccataatgaagacgtacctggctgttcaaatataacaaaatacacttacaaggagctagtaagggcgacaaataactttaacccattgaacaaaattggtgagggtggttttggttccgtttacaagggacagctcaggaatggtacagttattgctgtcaaggtcctttcgtcggagtcaagacaaggagtaagggagtttctgaatgaactcgtggcaatttccgacatctcacatgataatcttgtgaaactttatgggtattgtgcggaaggagaccaaagaatccttgtttacaatcatcttgaaaataatagccttgcacaaacacttctaggctccagccacagcaatatccagtttgattggaaaacacgagtaaatatttgccttggcattgcacggggattagcatacctccatcatggtgtcagtccccacattgttcatcgagacattaaagcaagcaatatacttcttgatagggaccttaccccaaaaatctctgattttggtctagcaaagcttcttccaccaaacgcaacacatgttagcacaagagttgcaggaacactgggttatttggctcctgagtatgctattcgaggacaggtgacacgcaaatcagatgtgtacagctttggcgtgctgcttctggaaattgtttgcgggagatcaaacagcgatacaagattagcatacggagatcagatactcctcgaaaagacatggatgcactacgagcaggggagtctggagaggatcatagacaggtccttgggcggcggcgacctggacgtggcgcaggcctgcaggttcctgaaggtcgggctgctgtgcacgcaggacgtgacgaggcaccggcccgacatgccgagggtcgtcgccatgctgacgggcgagtgggacgtcgagccggagacggtcagcaagcccgccataatcagcgacttcatggacctcaaggtcaggagcacgaggaaagcgagcgacaacgtggccacgccgcctacgtcctcctcgacgttcctgtcctccctcatggcgcactcctcgcccttgctgtcgaacgagtccacgcaggcctccatggcgttcaccggggtgtcggatcgcgagtgatccttgatcccttcgtcaaagactggtcaggctggctggtagtgacctgagttggttggaggtgtggaagacatgtgtagtgtaggcaggcaggcacagatggatttaattgcttcgtttgtaggcgcaacatcattgttgagtcaaaaggttcaagtacatgtgaggaaactgctttgtgtgcaattttggattgaagacgcgattcttttt

SEQ ID NO: 46114 - DNA, 3050 bp, Zea Mays
cgcttgttggcattcatttcgtgaagctgaagagcacaagtgcctgaattctgagttgtggcatgcatgtgctggccctctagtttcattgccttcggtcggtagtcgagtggtgtattttcctcaaggccacggtgagcaggtagcagcatcaacaaataaggaaatggaggctcagatccccaactatcctagtctacctccgcagcttatatgccaactgcataatgtgactatgcatgctgatgctgagacagatgaggtgtatgcacagatgacactccagccactcagtccacaagagctcaaggacccatttttgcctgctgagttaggcactgccagcaaccagccaacaaattatttttgtaaaacactaactgcaagtgatacgagtacacatggtgggttctctgttccacgccgagcagctgagaaggtgtttcctccactggatttcaatcagcaacctcccgcacaggagttgattgcaaaagatcttcatggcaacgactggaaatttcgccatatttttcgaggtcagccaaagcggcatcttctgacaacaggttggagtgtctttgttagtgcaaagagactggttgctggcgactctgtcctttttatctggaatgacaacaaccagctgcttctgggaattcgccgggcaaacagaccacaaaccgtcatgccatcatcagtactttctagtgatagcatgcatattggcctgctcgctgctgcagctcatgctgcatcaacaaatagccggtttactatcttctataatccaagagcaagcccttgtgaatttgtcatacccatggctaagtatgtgaaagctgtgtaccatacccgtatatctgtgggcatgcgtttccggatgctttttgagacggaggaatctagtgtaaggcgttatatggggacaattacaggaataagtgatcttgatcctgttcgctggccaaactcgcactggcgctcagtaaaggttggatgggacgagtcaactgctggagagaagcagccaagggtatctctttgggagattgaaccgttgacaacttttccaatgtatccatctccttttgctcttggattaaagcgcccatggcctgcaggcctgccttctttatacggtggaaggggtgatggcttgacctcttctcttatgtggcttcgagacagggcaaacccgggtttccagtcactgaatttcagcgggcttggtatgagtccctggatgcagcctaggctggataattccttacttggtctccaatctgacatgtaccagaccatagcagcagcagcagcattacaaagcactacgaagcaagttccaccttcagcaatgcagttccaacagcctcagaacattgctgatagatctgctcttctatcaagtcagattctgcagcaagtacaacctcggtttcagcaaatttaccctcaaaatctcaacgaaaacaaaattcaaggtcatacacaacctgagtacctccaagtccaacagcagcttcaacgctgccaatcatttaatgagcagaagcctccgatgcatccacagcaacaacagcaggaaccacagcagcagcaatgcgtccaaacaccacaggatcaacaaatgcaagaacagaagcatctgcacaacttccactccttgccagatgcattatcggccttttctcagctttccccagccactcactccccaccttccgcattgcagacagttccagcattctcgcatcaacaaaacttcccagatacaaacattagctctctctcaccatctactggcccttcaatgcatggcatgttggggagattaccttccgaagcagcttcgagcctcccatgtgtggcaatgaacgcccctgtatcggtatctgacccatggtcatccaagagagttgcagtggagtctgttaacccttgtcgacctcatgtttcaccacatatagaacatttggatatggcgacgtgtaacatgccgcagagctctgcactagcaccattacctggacgggaatgcctagtggatgaagatgggtgctctgatcctcaaaatcacctcttgtttggtgttcacatagactcgcattcacttctgatgcaagggggcattccagcccttcagaatgataacagttcaggcactattccatactcaacctccaatttcctgagcccttctgagaacgatttccccttgaatcaaccgctacgcagcgcgggctgcttagatgagtcggattatcttccatgtgcagagaatgccgaacaggcaaatcaacagtttgcaacctttgtgaaggtttacaaatccgggaccgtcggaaggttgctcgacatcactagattcagcagctacgacgagctccgtagcgaggtggggcgtctgtttggcctcgagggccagctggaagaccctctgagatcaggctggcagcttgtatttgttgacagggaggacgatgtccttctggttggcgatgacccatggcaggaattcgtgaacagtgtgtcctgtataaagatactttcaccggaggaggtccagcggatgggaaagccgggcatccagctcctgagctcggctccttcaagaaggctgggcaatggctgcgacagctacgcgagcatgcaggagccgagaggcctggacgctgggatggcgccggtgggttcggtcgagttctgaagacggcggagggaagcccaccatggccctcgggtcgaggattactctccctcctgtatgtttctgcagcacttgctagctctgcgacttggaacaaagcacgtagatcaaatggagctctgtgctgctccccgtctgatgatgtcttatggtatagactcgtagcagtaactactacatgttgtatacatgccggcacttcagttcttatcgagtagcaataccgctagtttagtccatccaatcaactacgttcttgttcctatgatcctgttgttgcgatgcagtaaaaccttttttttgtcataataacctgtatattgaaactgttcttggctcc

SEQ ID NO: 46115 - DNA, 3855 bp, Zea Mays
accactcgtcgggttaaaacttaaaaccccgaggagtctagtctctcgagggcatacgaggcgagcaggagccggcagcacgaggaagacagaagaagcaaagcgaagcaaggcgacctcctcctcccctgctgcacagagtgggccggggccacggttgcaggaagcagtgtccgtcagtagcagcggcggaggtgctccgcggtcctggttcagtagttctccccctccggccgtggcagcggtcggatctgcgtcgcggcggcggaaagcaccccctccccgcctggagcccggagccgccgtccttctgaagctcggcggcgtcgagatctgagttcggtcgcgcggagaggaggtttcgctgtgccggcgtgcttctcccggagccgcgcgcggaggcggcgcctttgctgcgcattgccgttccgtccgtcccgtcccgtcaagctctaaggcttccgaagaattgaaaccggggttcttgggctttgcgcctcgcgcctcgcgccgtgatgtaaacttgatccctcggatcgaaaaggccgtccctttgcgccggccggccggccggaggtttggcgctgttcggcggaggagcaagtggcggtgctcaatccggaccacgccgcgcacgtgcttggaaaaggagcgtggtttggtgtacaaggaagggcagcaagggcccttgcctccccccttccctctcctctccattccggtgcgcgcctggaacgcgtcttgtgggtcggccggcgagcggagcggcgggaggagaatgaagctctcgccgtcggccagcggtggcctccaggaccagccggcgtcgccggaagaagctgaagagcacaagtgcctgaattctgagttgtggcatgcatgtgctggccctctagtttcattgccttcggtcggtagtcgagtggtgtattttcctcaaggccacggtagcagcatcaacaaataaggaaatggaggctcagatccccaactatcctagtctacctccgcagcttatatgccaactgcataatgtgactatgcatgctgatgctgagacagatgaggtgtatgcacagatgacactccagccactcagtccacaagagctcaaggacccatttttgcctgctgagttaggcactgccagcaaccagccaacaaattatttttgtaaaacactaactgcaagtgatacgagtacacatggtgggttctctgttccacgccgagcagctgagaaggtgtttcctccactggatttcaatcagcaacctcccgcacaggagttgattgcaaaagatcttcatggcaacgactggaaatttcgccatatttttcgaggtcagccaaagcggcatcttctgacaacaggttggagtgtctttgttagtgcaaagagactggttgctggcgactctgtcctttttatctggaatgacaacaaccagctgcttctgggaattcgccgggcaaacagaccacaaaccgtcatgccatcatcagtactttctagtgatagcatgcatattggcctgctcgctgctgcagctcatgctgcatcaacaaatagccggtttactatcttctataatccaagagcaagcccttgtgaatttgtcatacccatggctaagtatgtgaaagctgtgtaccatacccgtatatctgtgggcatgcgtttccggatgctttttgagacggaggaatctagtgtaaggcgttatatggggacaattacaggaataagtgatcttgatcctgttcgctggccaaactcgcactggcgctcagtaaaggttggatgggacgagtcaactgctggagagaagcagccaagggtatctctttgggagattgaaccgttgacaacttttccaatgtatccatctccttttgctcttggattaaagcgcccatggcctgcaggcctgccttctttatacggtggaaggggtgatggcttgacctcttctcttatgtggcttcgagacagggcaaacccgggtttccagtcactgaatttcagcgggcttggtatgagtccctggatgcagcctaggctggataattccttacttggtctccaatctgacatgtaccagaccatagcagcagcagcagcattacaaagcactacgaagcaagttccaccttcagcaatgcagttccaacagcctcagaacattgctgatagatctgctcttctatcaagtcagattctgcagcaagtacaacctcggtttcagcaaatttaccctcaaaatctcaacgaaaacaaaattcaaggtcatacacaacctgagtacctccaagtccaacagcagcttcaacgctgccaatcatttaatgagcagaagcctccgatgcatccacagcaacaacagcaggaaccacagcagcagcaatgcgtccaaacaccacaggatcaacaaatgcaagaacagaagcatctgcacaacttccactccttgccagatgcattatcggccttttctcagctttccccagccactcactccccaccttccgcattgcagacagttccagcattctcgcatcaacaaaacttcccagatacaaacattagctctctctcaccatctactggcccttcaatgcatggcatgttggggagattaccttccgaagcagcttcgagcctcccatgtgtggcaatgaacgcccctgtatcggtatctgacccatggtcatccaagagagttgcagtggagtctgttaacccttgtcgacctcatgtttcaccacatatagaacatttggatatggcgacgtgtaacatgccgcagagctctgcactagcaccattacctggacgggaatgcctagtggatgaagatgggtgctctgatcctcaaaatcacctcttgtttggtgttcacatagactcgcattcacttctgatgcaagggggcattccagcccttcagaatgataacagttcaggcactattccatactcaacctccaatttcctgagcccttctgagaacgatttccccttgaatcaaccgctacgcagcgcgggctgcttagatgagtcggattatcttccatgtgcagagaatgccgaacaggcaaatcaacagtttgcaacctttgtgaaggtttacaaatccgggaccgtcggaaggttgctcgacatcactagattcagcagctacgacgagctccgtagcgaggtggggcgtctgtttggcctcgagggccagctggaagaccctctgagatcaggctggcagcttgtatttgttgacagggaggacgatgtccttctggttggcgatgacccatggcaggaattcgtgaacagtgtgtcctgtataaagatactttcaccggaggaggtccagcggatgggaaagccgggcatccagctcctgagctcggctccttcaagaaggctgggcaatggctgcgacagctacgcgagcatgcaggagccgagaggcctggacgctgggatggcgccggtgggttcggtcgagttctgaagacggcggagggaagcccaccatggccctcgggtcgaggattactctccctcctgtatgtttctgcagcacttgctagctctgcgacttggaacaaagcacgtagatcaaatggagctctgtgctgctccccgtctgatgatgtcttatggtatagactcgtagcagtaactactacatgttgtatacatgccggcacttcagttcttatcgagtagcaataccgctagtttagtccatccaatcaactacgttcttgttcctatgatcctgttgttgcgatgcagtaaaaccttttttttgtcataataacctgtatattgaaactgttcttggctcc

SEQ ID NO: 46116 - DNA, 3860 bp, Zea Mays
accactcgtcgggttaaaacttaaaaccccgaggagtctagtctctcgagggcatacgaggcgagcaggagccggcagcacgaggaagacagaagaagcaaagcgaagcaaggcgacctcctcctcccctgctgcacagagtgggccggggccacggttgcaggaagcagtgtccgtcagtagcagcggcggaggtgctccgcggtcctggttcagtagttctccccctccggccgtggcagcggtcggatctgcgtcgcggcggcggaaagcaccccctccccgcctggagcccggagccgccgtccttctgaagctcggcggcgtcgagatctgagttcggtcgcgcggagaggaggtttcgctgtgccggcgtgcttctcccggagccgcgcgcggaggcggcgcctttgctgcgcattgccgttccgtccgtcccgtcccgtcaagctctaaggcttccgaagaattgaaaccggggttcttgggctttgcgcctcgcgcctcgcgccgtgatgtaaacttgatccctcggatcgaaaaggccgtccctttgcgccggccggccggccggaggtttggcgctgttcggcggaggagcaagtggcggtgctcaatccggaccacgccgcgcacgtgcttggaaaaggagcgtggtttggtgtacaaggaagggcagcaagggcccttgcctccccccttccctctcctctccattccggtgcgcgcctggaacgcgtcttgtgggtcggccggcgagcggagcggcgggaggagaatgaagctctcgccgtcggccagcggtggcctccaggaccagccggcgtcgccggaagctgaagagcacaagtgcctgaattctgagttgtggcatgcatgtgctggccctctagtttcattgccttcggtcggtagtcgagtggtgtattttcctcaaggccacggtgagcaggtagcagcatcaacaaataaggaaatggaggctcagatccccaactatcctagtctacctccgcagcttatatgccaactgcataatgtgactatgcatgctgatgctgagacagatgaggtgtatgcacagatgacactccagccactcagtccacaagagctcaaggacccatttttgcctgctgagttaggcactgccagcaaccagccaacaaattatttttgtaaaacactaactgcaagtgatacgagtacacatggtgggttctctgttccacgccgagcagctgagaaggtgtttcctccactggatttcaatcagcaacctcccgcacaggagttgattgcaaaagatcttcatggcaacgactggaaatttcgccatatttttcgaggtcagccaaagcggcatcttctgacaacaggttggagtgtctttgttagtgcaaagagactggttgctggcgactctgtcctttttatctggaatgacaacaaccagctgcttctgggaattcgccgggcaaacagaccacaaaccgtcatgccatcatcagtactttctagtgatagcatgcatattggcctgctcgctgctgcagctcatgctgcatcaacaaatagccggtttactatcttctataatccaagagcaagcccttgtgaatttgtcatacccatggctaagtatgtgaaagctgtgtaccatacccgtatatctgtgggcatgcgtttccggatgctttttgagacggaggaatctagtgtaaggcgttatatggggacaattacaggaataagtgatcttgatcctgttcgctggccaaactcgcactggcgctcagtaaaggttggatgggacgagtcaactgctggagagaagcagccaagggtatctctttgggagattgaaccgttgacaacttttccaatgtatccatctccttttgctcttggattaaagcgcccatggcctgcaggcctgccttctttatacggtggaaggggtgatggcttgacctcttctcttatgtggcttcgagacagggcaaacccgggtttccagtcactgaatttcagcgggcttggtatgagtccctggatgcagcctaggctggataattccttacttggtctccaatctgacatgtaccagaccatagcagcagcagcagcattacaaagcactacgaagcaagttccaccttcagcaatgcagttccaacagcctcagaacattgctgatagatctgctcttctatcaagtcagattctgcagcaagtacaacctcggtttcagcaaatttaccctcaaaatctcaacgaaaacaaaattcaaggtcatacacaacctgagtacctccaagtccaacagcagcttcaacgctgccaatcatttaatgagcagaagcctccgatgcatccacagcaacaacagcaggaaccacagcagcagcaatgcgtccaaacaccacaggatcaacaaatgcaagaacagaagcatctgcacaacttccactccttgccagatgcattatcggccttttctcagctttccccagccactcactccccaccttccgcattgcagacagttccagcattctcgcatcaacaaaacttcccagatacaaacattagctctctctcaccatctactggcccttcaatgcatggcatgttggggagattaccttccgaagcagcttcgagcctcccatgtgtggcaatgaacgcccctgtatcggtatctgacccatggtcatccaagagagttgcagtggagtctgttaacccttgtcgacctcatgtttcaccacatatagaacatttggatatggcgacgtgtaacatgccgcagagctctgcactagcaccattacctggacgggaatgcctagtggatgaagatgggtgctctgatcctcaaaatcacctcttgtttggtgttcacatagactcgcattcacttctgatgcaagggggcattccagcccttcagaatgataacagttcaggcactattccatactcaacctccaatttcctgagcccttctgagaacgatttccccttgaatcaaccgctacgcagcgcgggctgcttagatgagtcggattatcttccatgtgcagagaatgccgaacaggcaaatcaacagtttgcaacctttgtgaaggtttacaaatccgggaccgtcggaaggttgctcgacatcactagattcagcagctacgacgagctccgtagcgaggtggggcgtctgtttggcctcgagggccagctggaagaccctctgagatcaggctggcagcttgtatttgttgacagggaggacgatgtccttctggttggcgatgacccatggcaggaattcgtgaacagtgtgtcctgtataaagatactttcaccggaggaggtccagcggatgggaaagccgggcatccagctcctgagctcggctccttcaagaaggctgggcaatggctgcgacagctacgcgagcatgcaggagccgagaggcctggacgctgggatggcgccggtgggttcggtcgagttctgaagacggcggagggaagcccaccatggccctcgggtcgaggattactctccctcctgtatgtttctgcagcacttgctagctctgcgacttggaacaaagcacgtagatcaaatggagctctgtgctgctccccgtctgatgatgtcttatggtatagactcgtagcagtaactactacatgttgtatacatgccggcacttcagttcttatcgagtagcaataccgctagtttagtccatccaatcaactacgttcttgttcctatgatcctgttgttgcgatgcagtaaaaccttttttttgtcataataacctgtatattgaaactgttcttggctcc

SEQ ID NO: 46117 - DNA, 3064 bp, Zea Mays
accactcgtcgggttaaaacttaaaaccccgaggagtctagtctctcgagggcatacgaggcgagcaggagccggcagcacgaggaagacagaagaagcaaagcgaagcaaggcgacctcctcctcccctgctgcacagagtgggccggggccacggtagcagcatcaacaaataaggaaatggaggctcagatccccaactatcctagtctacctccgcagcttatatgccaactgcataatgtgactatgcatgctgatgctgagacagatgaggtgtatgcacagatgacactccagccactcagtccacaagagctcaaggacccatttttgcctgctgagttaggcactgccagcaaccagccaacaaattatttttgtaaaacactaactgcaagtgatacgagtacacatggtgggttctctgttccacgccgagcagctgagaaggtgtttcctccactggatttcaatcagcaacctcccgcacaggagttgattgcaaaagatcttcatggcaacgactggaaatttcgccatatttttcgaggtcagccaaagcggcatcttctgacaacaggttggagtgtctttgttagtgcaaagagactggttgctggcgactctgtcctttttatctggaatgacaacaaccagctgcttctgggaattcgccgggcaaacagaccacaaaccgtcatgccatcatcagtactttctagtgatagcatgcatattggcctgctcgctgctgcagctcatgctgcatcaacaaatagccggtttactatcttctataatccaagagcaagcccttgtgaatttgtcatacccatggctaagtatgtgaaagctgtgtaccatacccgtatatctgtgggcatgcgtttccggatgctttttgagacggaggaatctagtgtaaggcgttatatggggacaattacaggaataagtgatcttgatcctgttcgctggccaaactcgcactggcgctcagtaaaggttggatgggacgagtcaactgctggagagaagcagccaagggtatctctttgggagattgaaccgttgacaacttttccaatgtatccatctccttttgctcttggattaaagcgcccatggcctgcaggcctgccttctttatacggtggaaggggtgatggcttgacctcttctcttatgtggcttcgagacagggcaaacccgggtttccagtcactgaatttcagcgggcttggtatgagtccctggatgcagcctaggctggataattccttacttggtctccaatctgacatgtaccagaccatagcagcagcagcagcattacaaagcactacgaagcaagttccaccttcagcaatgcagttccaacagcctcagaacattgctgatagatctgctcttctatcaagtcagattctgcagcaagtacaacctcggtttcagcaaatttaccctcaaaatctcaacgaaaacaaaattcaaggtcatacacaacctgagtacctccaagtccaacagcagcttcaacgctgccaatcatttaatgagcagaagcctccgatgcatccacagcaacaacagcaggaaccacagcagcagcaatgcgtccaaacaccacaggatcaacaaatgcaagaacagaagcatctgcacaacttccactccttgccagatgcattatcggccttttctcagctttccccagccactcactccccaccttccgcattgcagacagttccagcattctcgcatcaacaaaacttcccagatacaaacattagctctctctcaccatctactggcccttcaatgcatggcatgttggggagattaccttccgaagcagcttcgagcctcccatgtgtggcaatgaacgcccctgtatcggtatctgacccatggtcatccaagagagttgcagtggagtctgttaacccttgtcgacctcatgtttcaccacatatagaacatttggatatggcgacgtgtaacatgccgcagagctctgcactagcaccattacctggacgggaatgcctagtggatgaagatgggtgctctgatcctcaaaatcacctcttgtttggtgttcacatagactcgcattcacttctgatgcaagggggcattccagcccttcagaatgataacagttcaggcactattccatactcaacctccaatttcctgagcccttctgagaacgatttccccttgaatcaaccgctacgcagcgcgggctgcttagatgagtcggattatcttccatgtgcagagaatgccgaacaggcaaatcaacagtttgcaacctttgtgaaggtttacaaatccgggaccgtcggaaggttgctcgacatcactagattcagcagctacgacgagctccgtagcgaggtggggcgtctgtttggcctcgagggccagctggaagaccctctgagatcaggctggcagcttgtatttgttgacagggaggacgatgtccttctggttggcgatgacccatggcaggaattcgtgaacagtgtgtcctgtataaagatactttcaccggaggaggtccagcggatgggaaagccgggcatccagctcctgagctcggctccttcaagaaggctgggcaatggctgcgacagctacgcgagcatgcaggagccgagaggcctggacgctgggatggcgccggtgggttcggtcgagttctgaagacggcggagggaagcccaccatggccctcgggtcgaggattactctccctcctgtatgtttctgcagcacttgctagctctgcgacttggaacaaagcacgtagatcaaatggagctctgtgctgctccccgtctgatgatgtcttatggtatagactcgtagcagtaactactacatgttgtatacatgccggcacttcagttcttatcgagtagcaataccgctagtttagtccatccaatcaactacgttcttgttcctatgatcctgttgttgcgatgcagtaaaaccttttttttgtcataataacctgtatattgaaactgttcttggctcc

SEQ ID NO: 46118 - DNA, 3806 bp, Zea Mays
accactcgtcgggttaaaacttaaaaccccgaggagtctagtctctcgagggcatacgaggcgagcaggagccggcagcacgaggaagacagaagaagcaaagcgaagcaaggcgacctcctcctcccctgctgcacagagtgggccggggccacggttgcaggaagcagtgtccgtcagtagcagcggcggaggtgctccgcggtcctggttcagtagttctccccctccggccgtggcagcggtcggatctgcgtcgcggcggcggaaagcaccccctccccgcctggagcccggagccgccgtccttctgaagctcggcggcgtcgagatctgagttcggtcgcgcggagaggaggtttcgctgtgccggcgtgcttctcccggagccgcgcgcggaggcggcgcctttgctgcgcattgccgttccgtccgtcccgtcccgtcaagctctaaggcttccgaagaattgaaaccggggttcttgggctttgcgcctcgcgcctcgcgccgtgatgtaaacttgatccctcggatcgaaaaggccgtccctttgcgccggccggccggccggaggtttggcgctgttcggcggaggagcaagtggcggtgctcaatccggaccacgccgcgcacgtgcttggaaaaggagcgtggtttggtgtacaaggaagggcagcaagggcccttgcctccccccttccctctcctctccattccggtgcgcgcctggaacgcgtcttgtgggtcggccggcgagcggagcggcgggaggagaatgaagctctcgccgtcggccagcggtggcctccaggaccagccggcgtcgccggaagaagctgaagagcacaagtgcctgaattctgagttgtggcatgcatgtgctggccctctagtttcattgccttcggtcggtagtcgagtggtgtattttcctcaaggccacggtagcagcatcaacaaataaggaaatggaggctcagatccccaactatcctagtctacctccgcagcttatatgccaactgcataatgtgactatgcatgctgatgctgagacagatgaggtgtatgcacagatgacactccagccactcagtccacaagagctcaaggacccatttttgcctgctgagttaggcactgccagcaaccagccaacaaattatttttgtaaaacactaactgcaagtgatacgagtacacatggtgggttctctgttccacgccgagcagctgagaaggtgtttcctccactggatttcaatcagcaacctcccgcacaggagttgattgcaaaagatcttcatggcaacgactggaaatttcgccatatttttcgaggtcagccaaagcggcatcttctgacaacaggttggagtgtctttgttagtgcaaagagactggttgctggcgactctgtcctttttatctggaatgacaacaaccagctgcttctgggaattcgccgggcaaacagaccacaaaccgtcatgccatcatcagtactttctagtgatagcatgcatattggcctgctcgctgctgcagctcatgctgcatcaacaaatagccggtttactatcttctataatccaagagcaagcccttgtgaatttgtcatacccatggctaagtatgtgaaagctgtgtaccatacccgtatatctgtgggcatgcgtttccggatgctttttgagacggaggaatctagtgtaaggcgttatatggggacaattacaggaataagtgatcttgatcctgttcgctggccaaactcgcactggcgctcagtaaaggttggatgggacgagtcaactgctggagagaagcagccaagggtatctctttgggagattgaaccgttgacaacttttccaatgtatccatctccttttgctcttggattaaagcgcccatggcctgcaggcctgccttctttatacgggcaaacccgggtttccagtcactgaatttcagcgggcttggtatgagtccctggatgcagcctaggctggataattccttacttggtctccaatctgacatgtaccagaccatagcagcagcagcagcattacaaagcactacgaagcaagttccaccttcagcaatgcagttccaacagcctcagaacattgctgatagatctgctcttctatcaagtcagattctgcagcaagtacaacctcggtttcagcaaatttaccctcaaaatctcaacgaaaacaaaattcaaggtcatacacaacctgagtacctccaagtccaacagcagcttcaacgctgccaatcatttaatgagcagaagcctccgatgcatccacagcaacaacagcaggaaccacagcagcagcaatgcgtccaaacaccacaggatcaacaaatgcaagaacagaagcatctgcacaacttccactccttgccagatgcattatcggccttttctcagctttccccagccactcactccccaccttccgcattgcagacagttccagcattctcgcatcaacaaaacttcccagatacaaacattagctctctctcaccatctactggcccttcaatgcatggcatgttggggagattaccttccgaagcagcttcgagcctcccatgtgtggcaatgaacgcccctgtatcggtatctgacccatggtcatccaagagagttgcagtggagtctgttaacccttgtcgacctcatgtttcaccacatatagaacatttggatatggcgacgtgtaacatgccgcagagctctgcactagcaccattacctggacgggaatgcctagtggatgaagatgggtgctctgatcctcaaaatcacctcttgtttggtgttcacatagactcgcattcacttctgatgcaagggggcattccagcccttcagaatgataacagttcaggcactattccatactcaacctccaatttcctgagcccttctgagaacgatttccccttgaatcaaccgctacgcagcgcgggctgcttagatgagtcggattatcttccatgtgcagagaatgccgaacaggcaaatcaacagtttgcaacctttgtgaaggtttacaaatccgggaccgtcggaaggttgctcgacatcactagattcagcagctacgacgagctccgtagcgaggtggggcgtctgtttggcctcgagggccagctggaagaccctctgagatcaggctggcagcttgtatttgttgacagggaggacgatgtccttctggttggcgatgacccatggcaggaattcgtgaacagtgtgtcctgtataaagatactttcaccggaggaggtccagcggatgggaaagccgggcatccagctcctgagctcggctccttcaagaaggctgggcaatggctgcgacagctacgcgagcatgcaggagccgagaggcctggacgctgggatggcgccggtgggttcggtcgagttctgaagacggcggagggaagcccaccatggccctcgggtcgaggattactctccctcctgtatgtttctgcagcacttgctagctctgcgacttggaacaaagcacgtagatcaaatggagctctgtgctgctccccgtctgatgatgtcttatggtatagactcgtagcagtaactactacatgttgtatacatgccggcacttcagttcttatcgagtagcaataccgctagtttagtccatccaatcaactacgttcttgttcctatgatcctgttgttgcgatgcagtaaaaccttttttttgtcataataacctgtatattgaaactgttcttggctcc

SEQ ID NO: 46119 - DNA, 3847 bp, Zea Mays
accactcgtcgggttaaaacttaaaaccccgaggagtctagtctctcgagggcatacgaggcgagcaggagccggcagcacgaggaagacagaagaagcaaagcgaagcaaggcgacctcctcctcccctgctgcacagagtgggccggggccacggttgcaggaagcagtgtccgtcagtagcagcggcggaggtgctccgcggtcctggttcagtagttctccccctccggccgtggcagcggtcggatctgcgtcgcggcggcggaaagcaccccctccccgcctggagcccggagccgccgtccttctgaagctcggcggcgtcgagatctgagttcggtcgcgcggagaggaggtttcgctgtgccggcgtgcttctcccggagccgcgcgcggaggcggcgcctttgctgcgcattgccgttccgtccgtcccgtcccgtcaagctctaaggcttccgaagaattgaaaccggggttcttgggctttgcgcctcgcgcctcgcgccgtgatgtaaacttgatccctcggatcgaaaaggccgtccctttgcgccggccggccggccggaggtttggcgctgttcggcggaggagcaagtggcggtgctcaatccggaccacgccgcgcacgtgcttggaaaaggagcgtggtttggtgtacaaggaagggcagcaagggcccttgcctccccccttccctctcctctccattccggtgcgcgcctggaacgcgtcttgtgggtcggccggcgagcggagcggcgggaggagaatgaagctctcgccgtcggccagcggtggcctccaggaccagccggcgtcgccggaagaagctgaagagcacaagtgcctgaattctgagttgtggcatgcatgtgctggccctctagtttcattgccttcggtcggtagtcgagtggtgtattttcctcaaggccacggtagcagcatcaacaaataaggaaatggaggctcagatccccaactatcctagtctacctccgcagcttatatgccaactgcataatgtgactatgcatgctgatgctgagacagatgaggtgtatgcacagatgacactccagccactcagtccacaagagctcaaggacccatttttgcctgctgagttaggcactgccagcaaccagccaacaaattatttttgtaaaacactaactgcaagtgatacgagtacacatggtgggttctctgttccacgccgagcagctgagaaggtgtttcctccactggatttcaatcagcaacctcccgcacaggagttgattgcaaaagatcttcatggcaacgactggaaatttcgccatatttttcgaggtcagccaaagcggcatcttctgacaacaggttggagtgtctttgttagtgcaaagagactggttgctggcgactctgtcctttttatctggaatgacaacaaccagctgcttctgggaattcgccgggcaaacagaccacaaaccgtcatgccatcatcagtactttctagtgatagcatgcatattggcctgctcgctgctgcagctcatgctgcatcaacaaatagccggtttactatcttctataatccaagagcaagcccttgtgaatttgtcatacccatggctaagtatgtgaaagctgtgtaccatacccgtatatctgtgggcatgcgtttccggatgctttttgagacggaggaatctagtttatatggggacaattacaggaataagtgatcttgatcctgttcgctggccaaactcgcactggcgctcagtaaaggttggatgggacgagtcaactgctggagagaagcagccaagggtatctctttgggagattgaaccgttgacaacttttccaatgtatccatctccttttgctcttggattaaagcgcccatggcctgcaggcctgccttctttatacggtggaaggggtgatggcttgacctcttctcttatgtggcttcgagacagggcaaacccgggtttccagtcactgaatttcagcgggcttggtatgagtccctggatgcagcctaggctggataattccttacttggtctccaatctgacatgtaccagaccatagcagcagcagcagcattacaaagcactacgaagcaagttccaccttcagcaatgcagttccaacagcctcagaacattgctgatagatctgctcttctatcaagtcagattctgcagcaagtacaacctcggtttcagcaaatttaccctcaaaatctcaacgaaaacaaaattcaaggtcatacacaacctgagtacctccaagtccaacagcagcttcaacgctgccaatcatttaatgagcagaagcctccgatgcatccacagcaacaacagcaggaaccacagcagcagcaatgcgtccaaacaccacaggatcaacaaatgcaagaacagaagcatctgcacaacttccactccttgccagatgcattatcggccttttctcagctttccccagccactcactccccaccttccgcattgcagacagttccagcattctcgcatcaacaaaacttcccagatacaaacattagctctctctcaccatctactggcccttcaatgcatggcatgttggggagattaccttccgaagcagcttcgagcctcccatgtgtggcaatgaacgcccctgtatcggtatctgacccatggtcatccaagagagttgcagtggagtctgttaacccttgtcgacctcatgtttcaccacatatagaacatttggatatggcgacgtgtaacatgccgcagagctctgcactagcaccattacctggacgggaatgcctagtggatgaagatgggtgctctgatcctcaaaatcacctcttgtttggtgttcacatagactcgcattcacttctgatgcaagggggcattccagcccttcagaatgataacagttcaggcactattccatactcaacctccaatttcctgagcccttctgagaacgatttccccttgaatcaaccgctacgcagcgcgggctgcttagatgagtcggattatcttccatgtgcagagaatgccgaacaggcaaatcaacagtttgcaacctttgtgaaggtttacaaatccgggaccgtcggaaggttgctcgacatcactagattcagcagctacgacgagctccgtagcgaggtggggcgtctgtttggcctcgagggccagctggaagaccctctgagatcaggctggcagcttgtatttgttgacagggaggacgatgtccttctggttggcgatgacccatggcaggaattcgtgaacagtgtgtcctgtataaagatactttcaccggaggaggtccagcggatgggaaagccgggcatccagctcctgagctcggctccttcaagaaggctgggcaatggctgcgacagctacgcgagcatgcaggagccgagaggcctggacgctgggatggcgccggtgggttcggtcgagttctgaagacggcggagggaagcccaccatggccctcgggtcgaggattactctccctcctgtatgtttctgcagcacttgctagctctgcgacttggaacaaagcacgtagatcaaatggagctctgtgctgctccccgtctgatgatgtcttatggtatagactcgtagcagtaactactacatgttgtatacatgccggcacttcagttcttatcgagtagcaataccgctagtttagtccatccaatcaactacgttcttgttcctatgatcctgttgttgcgatgcagtaaaaccttttttttgtcataataacctgtatattgaaactgttcttggctcc

SEQ ID NO: 46120 - DNA, 1128 bp, Zea Mays
cccatttctcagagaaccccgcccgcacccggccgggcgaaatggacggtgtcgttgtcaggagggtcatcccttcggataacagttgcctcttcaacgctgtgggctacgtgatggagcacaaccgaaataaggcttctgagctcagacaggtcatagcagcaacagtcgctggtgatcctgagaaattcaatgaagtgtttcttggcaaaccaaatgaagcgtattgtgcttggattttggatcctgaaaagtggggaggagccattgagctctctattctatctgaatactacgggcgtgaaatcgcagcatatgacattcagaccacccgctgtgatctctatggtcaggagaagaattacagtgaaagggccatgctcatttatgatggtttgcattatgatgctctcgctatgtctccggctgaaggtgcacctgaagaatttgaccagacaatcttccccgttaatcatgaccgttccattggtccagcagaaggccttgccctcaacttagtgagggaggcgcaaaggaagaggagctacactgacactgcaaacttcactctgcgctgcggggtgtgccagatcggcgtcatcggtcaacaggaggctgtggaacatgcgcaagccactggccacgtcaacttccaagaatacaaatgacagtacaagatcagactgttgtgctgtaaacttgaccatcatttggttccaactgatattctcctcccgttggatatggttggcgctacattgtatcacagtgtaattcttacggggcaaacagaataatggtcaccttcgttctggacaatgtctatcttgcctgccaatgtcggttgaaattgaaagagcctacaatccattgtcgttctacatgccagaagaggtttgttggcccatgggccggatctatattgggcggtgtggcccggctgtatcatatctggtttatctattaggctttattcggttatttcaattctatgtggattggagtgtattggaatgtattgagatgtattttgacttgttatggatttaaaccgactcaataccattcaatccacatggtttaacggtgaaacgaacaagtccttaacgattttttttttcaaaattc

SEQ ID NO: 46121 - DNA, 1159 bp, Zea Mays
ggcctggagccgtgggggtggttggctgccgccttctctggcccatttctcagagaaccccgcccgcacccggccgggcgaaatggacggtgtcgttgtcaggagggtcatcccttcggataacagttgcctcttcaacgctgtgggctacgtgatggagcacaaccgaaataaggcttctgagctcagacagcaacagtcgctggtgatcctgagaaattcaatgaagtgtttcttggcaaaccaaatgaagcgtattgtgcttggattttggatcctgaaaagtggggaggagccattgagctctctattctatctgaatactacgggcgtgaaatcgcagcatatgacattcagaccacccgctgtgatctctatggtcaggagaagaattacagtgaaagggccatgctcatttatgatggtttgcattatgatgctctcgctatgtctccggctgaaggtgcacctgaagaatttgaccagacaatcttccccgttaatcatgaccgttccattggtccagcagaaggccttgccctcaacttagtgagggaggcgcaaaggaagaggagctacactgacactgcaaacttcactctgcgctgcggggtgtgccagatcggcgtcatcggtcaacaggaggctgtggaacatgcgcaagccactggccacgtcaacttccaagaatacaaatgacagtacaagatcagactgttgtgctgtaaacttgaccatcatttggttccaactgatattctcctcccgttggatatggttggcgctacattgtatcacagtgtaattcttacggggcaaacagaataatggtcaccttcgttctggacaatgtctatcttgcctgccaatgtcggttgaaattgaaagagcctacaatccattgtcgttctacatgccagaagaggtttgttggcccatgggccggatctatattgggcggtgtggcccggctgtatcatatctggtttatctattaggctttattcggttatttcaattctatgtggattggagtgtattggaatgtattgagatgtattttgacttgttatggatttaaaccgactcaataccattcaatccacatggtttaacggtgaaacgaacaagtccttaacgattttttttttcaaaattc

SEQ ID NO: 46122 - DNA, 926 bp, Zea Mays
gccgcacacgctcgcgattcaacaaagacgtacgtacatgcacaaaactagagcgagctgtgtgtgtgtgtgttcgtcatttcctcgatcatggcgaaggcgcaggcgcaggtggcggcgaggttcatgatggaggcgccgccgccgcaggtggtgtcggtcatgcggcggaggaaggcgccgaggagcctgagcaccatcgccgaggacgacagggagatgctggcgccgtgcgggtcaccgtcggaccacggccacgcgcaggtggcggcgaggttcacgacggaggtggcgccgccgcaggtggtgtcggtcatgcgacgaaggaaggggccgaggagcctggacaccatcgccgaggacgacagggagcagcagctggcgtgcgggtcgccatcggaccacggcctcgcgacggcgtggtcgtcgctccagaggataccgacgccaccgcagccgccgcgggagcgcgcaggtgggtccgtgacgagggacctcagcaagaacttcttggactcccacggctgccagcaggccagcggctgggagggtggacacatgctaggccaccggcgagccgtgcatgcgctggagcttcacaaggtcggagcttgttgaagagggaagagagaaaatctagcttagctgcagtgagcttgttcgggagaaatatatttgtaccacttccacacgtgcgctcatgcatgatacttcctccgtttttttatttaccacattttagtaaaaaatgaactagcggctgataaatattcaaaaacggagataatattattttggcttagctttatcacgcgtgatgtggagagtatatatgtttgctgtgaagttgtttttcatccagcttcaatttcgcttgaaataactgtaatagttaatcaaaataaacatacgatattctctctatt

SEQ ID NO: 46123 - DNA, 359 bp, Zea Mays
cccaaagcaaggtaccccgatcttggggcagcacagctgcacaggcaggtgcagtgcagtcgcagagaggactacacgcgccgtttgcctacaaatatttaagctccagccccaagacatcacatcacatatccgttgtggcagcagccttcgtgcaggcatggcgagctcatcttgtgcactgctgggtctggcctgcttcgtgctcctggcggcggcagccggcgccacgcagtacaaggtcggcggcgacaatggctgggccgtgccggacgccaccgccgagtcgttcaacacctgggcggagaagaccagcttccagatcggcgacagcctctctccgtcctcctcctgaccct

SEQ ID NO: 46124 - DNA, 2281 bp, Zea Mays
accaagttaacattcaacaaaccaaacacgttaagctgtaagccatagtgggaaactgagcctgacagaatcaagttaacattcagcaagaaacggtagaaagcaagaacctggaggggtccaataaacaccagcgaatcaaatttgatcccaggcagttaattaggagatataaccagaaaaaaacataatgagcagacttttaagttcaaatatcaaacttcataaggattcaagccatactgctgcagaagagttttgggtacaacacagaggacacaacaggtccattaaaccaacgaagccacaaccacgattcatgacacacaaaccacagatgtttattagacgacgacatccatatagaggtacaccagagggcaccagacgacgcagatacccaggtacagcagcagcttaaatgaaccatggcttactgaccaccgcggaggcggagcaccaggtggagagtgctctccttctggatgttgtagtctgctagggtgcggccatcctccagctgcttgccggcgaagatcagacgctgctggtctggggggatgccctctttgtcctggatcttcgccttcacgttgtcgatggtgtcggagctctcaacctccagggttatggtcttgccagtcaaggtcttcacaaagatctgcataccacctcgcaagcggagcaccaggtggagggtgctctccttctggatgttgtagtcggcgagggtacggccatcctccagctgcttgccagcaaagatcaggcgctgctggtccggtggaatgccctccttgtcctggatcttggctttgacattatcgattgtgtcagacgactccacctccaaggtgatggtcttgccagtcaatgtcttcacaaagatctgcatgccacccctgaggcggagcaccaagtggagggtgctctccttctggatgttgtagtcagccaaggtgcgaccatcctccagctgcttgccggcgaagatcagccgctgctggtccggtggaatgccctccttgtcctggatcttggccttgacgttgtcaatggtgtctgaggactccacctcaagggtgatcgtcttgccagtaagagtcttcacgaagatctgcatgccacccctgagacgcagcaccaagtggagggtgctctccttctggatgttgtaatctgcaagggtacggccatcctccagctgcttgccagcaaagatgagccgctgctggtccggtggaatgccctccttgtcctggatcttggccttgacattgtcgatggtgtccgaggactccacctcaagggtgatcgtcttgccagtaagtgtcttcacgaagatctgcatgccacccctgagacgcagcaccaagtggagggtgctctccttctgaatgttgtagtcggcaagcgtgcgcccgtcctcgagctgcttgccggcaaaaatgagccgctgctggtccggagggatgccctccttgtcctggatcttggccttgacattgtcaatggtatcagaagactcgacctcaagggtgatagtcttgccagtcagagtcttcacgaagatctgcatgccgcccctgagacgcaacaccaagtggagggtgctctccttctgaatgttgtagtcggccagcgtgcgcccgtcctcgagctgcttgccagcaaaaatgagccgctgctggtccggagggatgccctccttgtcctggatcttggccttgacgttgtcgatggtgtcagaagactccacctcgagggtgatagtctttccagtgagggtcttgacgaagatctgcatgcctcccctgagacgcagcaccaagtggagggtgctctccttctggatgttgtagtcagcaagggtcctcccatcctccaactgcttgccggcaaagatgagacgttgctggtcaggtgggatgccctccttgtcctggatctttgccttgacattgtcaatggtgtctgaggactccacctcaagggtgattgtcttgccagtcaaggtcttgacaaagatctgcatgcctcccctaaggcgcagcaccaagtggagggttgactccttctggatgttgtagtcagcaagtgtgcgtccgtcctcaagctgcttgccggcgaagataagccgctgctggtcaggagggatgccctccttgtcctggatcttagccttgacattgtcaatggtgtcagaagactccacctcgagggtgatagtcttgccggtgagggtcttcacaaagatctgcatctgcaaggaaaccaaaaa

SEQ ID NO: 46125 - DNA, 1674 bp, Zea Mays
accaagttaacattcaacaaaccaaacacgttaagctgtaagccatagtgggaaactgagcctgacagaatcaagttaacattcagcaagaaacggtagaaagcaagaacctggaggggtccaataaacaccagcgaatcaaatttgatcccaggcagttaattaggagatataaccagaaaaaaacataatgagcagacttttaagttcaaatatcaaacttcataaggattcaagccatactgctgcagaagagttttgggtacaacacagaggacacaacaggtccattaaaccaacgaagccacaaccacgattcatgacacacaaaccacagatgtttattagacgacgacatccatatagaggtacaccagagggcaccagacgacgcagatacccaggtacagcagcagcttaaatgaaccatggcttactgaccaccgcggaggcggagcaccaggtggagagtgctctccttctggatgttgtagtctgctagggtgcggccatcctccagctgcttgccggcgaagatcagacgctgctggtctggggggatgccctctttgtcctggatcttcgccttcacgttgtcgatggtgtcggagctctcaacctccagggttatggtcttgccagtcaaggtcttcacaaagatctgcataccacctcgcaagcggagcaccaggtggagggtgctctccttctggatgttgtagtcggcgagggtacggccatcctccagctgcttgccagcaaagatcaggcgctgctggtccggtggaatgccctccttgtcctggatcttggctttgacattatcgattgtgtcagacgactccacctccaaggtgatggtcttgccagtcaatgtcttcacaaagatctgcatgccacccctgagacgcaacaccaagtggagggtgctctccttctgaatgttgtagtcggccagcgtgcgcccgtcctcgagctgcttgccagcaaaaatgagccgctgctggtccggagggatgccctccttgtcctggatcttggccttgacgttgtcgatggtgtcagaagactccacctcgagggtgatagtctttccagtgagggtcttgacgaagatctgcatgcctcccctgaggcggagaacaaggtggagggtgctctccttctggatgttgtagtcggcaagtgtgcgcccgtcctcgagctgcttgccagcgaagatgagccgctgctggtccgggggaatgccttccttgtcctggatcttggccttgacgttgtcaatggtgtcagaggactccacctcgagggtgatagtctttccagtgagagtcttgacgaagatctgcatctgcataagaatcaccaaacaacagggtgactatcaacaaaaaagaacagtctcaaaggaaataaacagcatatgaactatgaaggcgccatgcatgctcatcacactgggtattcaaaatctacacatagctgcagcatatgccaccatacaagtacatcaaaatcataataattagaagacatactgatatattagaatatataggtactcaagaacgattaaatcatagtagcatgttacttcatgtatctaagcatgtatatacatctatctaagtaccagtaaaatcaagataatttaagacatactgatttattaga

SEQ ID NO: 46126 - DNA, 2322 bp, Zea Mays
accaagttaacattcaacaaaccaaacacgttaagctgtaagccatagtgggaaactgagcctgacagaatcaagttaacattcagcaagaaacggtagaaagcaagaacctggaggggtccaataaacaccagcgaatcaaatttgatcccaggcagttaattaggagatataaccagaaaaaaacataatgagcagacttttaagttcaaatatcaaacttcataaggattcaagccatactgctgcagaagagttttgggtacaacacagaggacacaacaggtccattaaaccaacgaagccacaaccacgattcatgacacacaaaccacagatgtttattagacgacgacatccatatagaggtacagcagcagcttaaatgaaccatggcttactgaccaccgcggaggcggagcaccaggtggagagtgctctccttctggatgttgtagtctgctagggtgcggccatcctccagctgcttgccggcgaagatcagacgctgctggtctggggggatgccctctttgtcctggatcttcgccttcacgttgtcgatggtgtcggagctctcaacctccagggttatggtcttgccagtcaaggtcttcacaaagatctgcataccacctcgcaagcggagcaccaggtggagggtgctctccttctggatgttgtagtcggcgagggtacggccatcctccagctgcttgccagcaaagatcaggcgctgctggtccggtggaatgccctccttgtcctggatcttggctttgacattatcgattgtgtcagacgactccacctccaaggtgatggtcttgccagtcaatgtcttcacaaagatctgcatgccacccctgaggcggagcaccaagtggagggtgctctccttctggatgttgtagtcagccaaggtgcgaccatcctccagctgcttgccggcgaagatcagccgctgctggtccggtggaatgccctccttgtcctggatcttggccttgacgttgtcaatggtgtctgaggactccacctcaagggtgatcgtcttgccagtaagagtcttcacgaagatctgcatgccacccctgagacgcagcaccaagtggagggtgctctccttctggatgttgtaatctgcaagggtacggccatcctccagctgcttgccagcaaagatgagccgctgctggtccggtggaatgccctccttgtcctggatcttggccttgacattgtcgatggtgtccgaggactccacctcaagggtgatcgtcttgccagtaagtgtcttcacgaagatctgcatgccacccctgagacgcagcaccaagtggagggtgctctccttctgaatgttgtagtcggcaagcgtgcgcccgtcctcgagctgcttgccggcaaaaatgagccgctgctggtccggagggatgccctccttgtcctggatcttggccttgacattgtcaatggtatcagaagactcgacctcaagggtgatagtcttgccagtcagagtcttcacgaagatctgcatgccgcccctgagacgcaacaccaagtggagggtgctctccttctgaatgttgtagtcggccagcgtgcgcccgtcctcgagctgcttgccagcaaaaatgagccgctgctggtccggagggatgccctccttgtcctggatcttggccttgacgttgtcgatggtgtcagaagactccacctcgagggtgatagtctttccagtgagggtcttgacgaagatctgcatgcctcccctgaggcggagaacaaggtggagggtgctctccttctggatgttgtagtcggcaagtgtgcgcccgtcctcgagctgcttgccagcgaagatgagccgctgctggtccgggggaatgccttccttgtcctggatcttggccttgacgttgtcaatggtgtcagaggactccacctcgagggtgatagtctttccagtgagagtcttgacgaagatctgcatctgcataagaatcaccaaacaacagggtgactatcaacaaaaaagaacagtctcaaaggaaataaacagcatatgaactatgaaggcgccatgcatgctcatcacactgggtattcaaaatctacacatagctgcagcatatgccaccatacaagtacatcaaaatcataataattagaagacatactgatatattagaatatataggtactcaagaacgattaaatcatagtagcatgttacttcatgtatctaagcatgtatatacatctatctaagtaccagtaaaatcaagataatttaagacatactgatttattaga

SEQ ID NO: 46127 - DNA, 2290 bp, Zea Mays
gcactcctcaggtcctaggttcgactccccgttggggcgaatttcgggctatggttaaaaaaccccctcgtctgtcccacgccaaagcacatgtgtaaggcccggtcgcggtcgtttctcacatgggctacggtgccgctgtgtatgggtggggcaggggtttggggttttctcgacctgtgtgagaaggtcttcttcttaatataatgcccgagggctatctaccccccctccccgcaggtcgatttttgtttttaaattatgaagtttggaactcaaataactaaaaatatttaacattgaatattatgttaaagcatcctctctgaaaccattattttcatatttttgcaaactcacagttgtggcatttattcaccatactattcactgtattggcatatgcatgtaagatgtgcccctagagaacatgcaagcacattttatgtcaacgattactaagttcatgatgtggtatctgtttgtggttatctaatgtgtccaattctaatgcacttcttaaaaaaacaaccaaatctgcttgttacaaatataattgcttattctgataaaatattctgaatagaataagttacatacctctgaactcttatcttactgattttttgggttcccaataaatatgtgaaatatggaacatattgatattgtagcttacttttccactctctctcagtgaaatgaggcatgataagaagcctgatgatggagaaactaactcatctaggagtctcagtgtctctgacaataatgatgatagaaaaaaggagacactgttaagtggtgatgataaagaggatcacgaaatacagctcaaacaaataagacaggacatggaacttttgcgtgatgataaatctctcttggagataattttggatgagaagaatgctgaagtgcgcaagatttctagcagattaaatgatcttgatctgcagttaaggaaggagaaagaggaatgccacaggatgacctcaaaaattaaaaagttccttaaagcccatgctcgctttttgaaagcacaggaagaattaaaaagatattctgaagcgtggtgctaatgaagaagtttctagtatcaatgttgatgaagatccaaatgttccttatgaaaggagcccaaatgctgctatagctaagaagagatcaataccatactcaacaagtgaagaagcgaaagccgtgaagaaaagaagagagcgggactctgacacaactaggccagataaatataggtttgaaggtactattgcaggatttgaaaaactaagcaagggaaccgagccaacaaaatctttatatttgaagaagaaactgtgggaagatgaaaaggataagataggcaactttgtctcctcagccaacaccgacaaggtgcaatatttttcacgtgctaactcaattttatgatattatctatatcatgttgtcactgctggctggtttaacatggacaacatcctatctttgtgcatatgtttgaggtcgaccctcattgctctgttacctcttgcttactcattaaaacatcttaacaattgggtagcgatatataaaattgtgtagccttcctttgtcctcggtcctattagctcatcatgaccgttgttgacatgattcggactgtgcgtagtatgagctgaaacttttattgagtagataattttaaacttacaggtcaaagaatctccggtcaaacatgttttgccctccactggtatggctgctcatgctttggacgatctgtttgaagctgttgaactggaggatagacgtgacacatcaatagaaaatgatgctgatgacgaaactaggtcgcctgttatgcccccacaaccaccaccggtggttaatacttacgagcagtacgaggctgatgacgaggaagtcgacgtggaatgattagaatgccgagatggtactggaatgagctatatagctctcgcgcctgtgtaaagcattatgtaatatgtatttgatgctggagtttaccttgcataaaaagaatcgtcattaatgatccttggtggatgcggtttaagcactcaacttttttgttaatttgatgaaggcaacatgccctgttacctgtacctaatataccacgtggtggctagctagccagccttgtcagtgccctggtacttttgggtggtcttgctgtgctgttcgcggcacttgaaaactgatgttttgtaggactgatgttttgtaggagtattatttgaatggtagccgttgatcttcggctgttgatgcgctgcttggt

SEQ ID NO: 46128 - DNA, 2031 bp, Zea Mays
gcactcctcaggtcctaggttcgactccccgttggggcgaatttcgggctatggttaaaaaaccccctcgtctgtcccacgccaaagcacatgtgtaaggcccggtcgcggtcgtttctcacatgggctacggtgccgctgtgtatgggtggggcaggggtttggggttttctcgacctgtgtgagaaggtcttcttcttaatataatgcccgagggctatctaccccccctccccgcaggtcgatttttgtttttaaattatgaagtttggaactcaaataactaaaaatatttaacattgaatattatgttaaagcatcctctctgaaaccattattttcatatttttgcaaactcacagttgtggcatttattcaccatactattcactgtattggcatatgcatgtaagatgtgcccctagagaacatgcaagcacattttatgtcaacgattactaagttcatgatgtggtatctgtttgtggttatctaatgtgtccaattctaatgcacttcttaaaaaaacaaccaaatctgcttgttacaaatataattgcttattctgataaaatattctgaatagaataagttacatacctctgaactcttatcttactgattttttgggttcccaataaatatgtgaaatatggaacatattgatattgtagcttacttttccactctctctcagtgaaatgaggcatgataagaagcctgatgatggagaaactaactcatctaggagtctcagtgtctctgacaataatgatgatagaaaaaaggagacactgttaagtggtgatgataaagaggatcacgaaatacagctcaaacaaataagacaggacatggaacttttgcgtgatgataaatctctcttggagataattttggatgagaagaatgctgaagtgcgcaagatttctagcagattaaatgatcttgatctgcagttaaggaaggagaaagaggaatgccacaggatgacctcaaaaattaaaaagttccttaaagcccatgctcgctttttgaaagcacaggaagaattaaaaaggtcacaagctcgttttgagagactcggtgatttacttgcttcagatattctgaagcgtggtgctaatgaagaagtttctagtatcaatgttgatgaagatccaaatgttccttatgaaaggagcccaaatgctgctatagctaagaagagatcaataccatactcaacaagtgaagaagcgaaagccgtgaagaaaagaagagagcgggactctgacacaactaggccagataaatataggtttgaaggtactattgcaggatttgaaaaactaagcaagggaaccgagccaacaaaatctttatatttgaagaagaaactgtgggaagatgaaaaggataagataggcaactttgtctcctcagccaacaccgacaaggtcaaagaatctccggtcaaacatgttttgccctccactggtatggctgctcatgctttggacgatctgtttgaagctgttgaactggaggatagacgtgacacatcaatagaaaatgatgctgatgacgaaactaggtcgcctgttatgcccccacaaccaccaccggtggttaatacttacgagcagtacgaggctgatgacgaggaagtcgacgtggaatgattagaatgccgagatggtactggaatgagctatatagctctcgcgcctgtgtaaagcattatgtaatatgtatttgatgctggagtttaccttgcataaaaagaatcgtcattaatgatccttggtggatgcggtttaagcactcaacttttttgttaatttgatgaaggcaacatgccctgttacctgtacctaatataccacgtggtggctagctagccagccttgtcagtgccctggtacttttgggtggtcttgctgtgctgttcgcggcacttgaaaactgatgttttgtaggactgatgttttgtaggagtattatttgaatggtagccgttgatcttcggctgttgatgcgctgcttggt

SEQ ID NO: 46129 - DNA, 1987 bp, Zea Mays
gcactcctcaggtcctaggttcgactccccgttggggcgaatttcgggctatggttaaaaaaccccctcgtctgtcccacgccaaagcacatgtgtaaggcccggtcgcggtcgtttctcacatgggctacggtgccgctgtgtatgggtggggcaggggtttggggttttctcgacctgtgtgagaaggtcttcttcttaatataatgcccgagggctatctaccccccctccccgcaggtcgatttttgtttttaaattatgaagtttggaactcaaataactaaaaatatttaacattgaatattatgttaaagcatcctctctgaaaccattattttcatatttttgcaaactcacagttgtggcatttattcaccatactattcactgtattggcatatgcatgtaagatgtgcccctagagaacatgcaagcacattttatgtcaacgattactaagttcatgatgtggtatctgtttgtggttatctaatgtgtccaattctaatgcacttcttaaaaaaacaaccaaatctgcttgttacaaatataattgcttattctgataaaatattctgaatagaataagttacatacctctgaactcttatcttactgattttttgggttcccaataaatatgtgaaatatggaacatattgatattgtagcttacttttccactctctctcagtgaaatgaggcatgataagaagcctgatgatggagaaactaactcatctaggagtctcagtgtctctgacaataatgatgatagaaaaaaggagacactgttaagtggtgatgataaagaggatcacgaaatacagctcaaacaaataagacaggacatggaacttttgcgtgatgataaatctctcttggagataattttggatgagaagaatgctgaagtgcgcaagatttctagcagattaaatgatcttgatctgcagttaaggaaggagaaagaggaatgccacaggatgacctcaaaaattaaaaagttccttaaagcccatgctcgctttttgaaagcacaggaagaattaaaaagatattctgaagcgtggtgctaatgaagaagtttctagtatcaatgttgatgaagatccaaatgttccttatgaaaggagcccaaatgctgctatagctaagaagagatcaataccatactcaacaagtgaagaagcgaaagccgtgaagaaaagaagagagcgggactctgacacaactaggccagataaatataggtttgaaggtactattgcaggatttgaaaaactaagcaagggaaccgagccaacaaaatctttatatttgaagaagaaactgtgggaagatgaaaaggataagataggcaactttgtctcctcagccaacaccgacaaggtcaaagaatctccggtcaaacatgttttgccctccactggtatggctgctcatgctttggacgatctgtttgaagctgttgaactggaggatagacgtgacacatcaatagaaaatgatgctgatgacgaaactaggtcgcctgttatgcccccacaaccaccaccggtggttaatacttacgagcagtacgaggctgatgacgaggaagtcgacgtggaatgattagaatgccgagatggtactggaatgagctatatagctctcgcgcctgtgtaaagcattatgtaatatgtatttgatgctggagtttaccttgcataaaaagaatcgtcattaatgatccttggtggatgcggtttaagcactcaacttttttgttaatttgatgaaggcaacatgccctgttacctgtacctaatataccacgtggtggctagctagccagccttgtcagtgccctggtacttttgggtggtcttgctgtgctgttcgcggcacttgaaaactgatgttttgtaggactgatgttttgtaggagtattatttgaatggtagccgttgatcttcggctgttgatgcgctgcttggt

SEQ ID NO: 46130 - DNA, 1974 bp, Zea Mays
gcactcctcaggtcctaggttcgactccccgttggggcgaatttcgggctatggttaaaaaaccccctcgtctgtcccacgccaaagcacatgtgtaaggcccggtcgcggtcgtttctcacatgggctacggtgccgctgtgtatgggtggggcaggggtttggggttttctcgacctgtgtgagaaggtcttcttcttaatataatgcccgagggctatctaccccccctccccgcaggtcgatttttgtttttaaattatgaagtttggaactcaaataactaaaaatatttaacattgaatattatgttaaagcatcctctctgaaaccattattttcatatttttgcaaactcacagttgtggcatttattcaccatactattcactgtattggcatatgcatgtaagatgtgcccctagagaacatgcaagcacattttatgtcaacgattactaagttcatgatgtggtatctgtttgtggttatctaatgtgtccaattctaatgcacttcttaaaaaaacaaccaaatctgcttgttacaaatataattgcttattctgataaaatattctgaatagaataagttacatacctctgaactcttatcttactgattttttgggttcccaataaatatgtgaaatatggaacatattgatattgtagcttacttttccactctctctcagtgaaatgaggcatgataagaagcctgatgatggagaaactaactcatctaggagtctcagtgtctctgacaataatgatgatagaaaaaaggagacactgttaagtggtgatgataaagaggatcacgaaatacagataattttggatgagaagaatgctgaagtgcgcaagatttctagcagattaaatgatcttgatctgcagttaaggaaggagaaagaggaatgccacaggatgacctcaaaaattaaaaagttccttaaagcccatgctcgctttttgaaagcacaggaagaattaaaaaggtcacaagctcgttttgagagactcggtgatttacttgcttcagatattctgaagcgtggtgctaatgaagaagtttctagtatcaatgttgatgaagatccaaatgttccttatgaaaggagcccaaatgctgctatagctaagaagagatcaataccatactcaacaagtgaagaagcgaaagccgtgaagaaaagaagagagcgggactctgacacaactaggccagataaatataggtttgaaggtactattgcaggatttgaaaaactaagcaagggaaccgagccaacaaaatctttatatttgaagaagaaactgtgggaagatgaaaaggataagataggcaactttgtctcctcagccaacaccgacaaggtcaaagaatctccggtcaaacatgttttgccctccactggtatggctgctcatgctttggacgatctgtttgaagctgttgaactggaggatagacgtgacacatcaatagaaaatgatgctgatgacgaaactaggtcgcctgttatgcccccacaaccaccaccggtggttaatacttacgagcagtacgaggctgatgacgaggaagtcgacgtggaatgattagaatgccgagatggtactggaatgagctatatagctctcgcgcctgtgtaaagcattatgtaatatgtatttgatgctggagtttaccttgcataaaaagaatcgtcattaatgatccttggtggatgcggtttaagcactcaacttttttgttaatttgatgaaggcaacatgccctgttacctgtacctaatataccacgtggtggctagctagccagccttgtcagtgccctggtacttttgggtggtcttgctgtgctgttcgcggcacttgaaaactgatgttttgtaggactgatgttttgtaggagtattatttgaatggtagccgttgatcttcggctgttgatgcgctgcttggt

SEQ ID NO: 46131 - DNA, 1810 bp, Zea Mays
gacggcattacctaaaccataccatagaccatcaatcacttctaacacttttcccgtctcccccttcctcgccgcctccactacagggctttgctcctcccaactctcgaaaccctacccacgcgatgagagatcgatcggtcgagcgcgaattccccagccgcgagcggggggatcggccgccgcccggggtgctgggtcccccgcgccgcgggccggcttacaagacgaagttgtgcgcgctgtggcagcgcggcggctgttcccgcgacacatgcagcttcgcgcacggacacgccgagctccgccggttccccggatcgcgcacctcgttcccaccccgcgccgggagaagagattatagaggtggtgactttagagataggtttgataggaggcgctcacctcataggaggcattcccctgatggagattccaggggccatcgctcccttcgtgaccgacgaccaaattcccaagaaagggaatctagctattcacggtctcccagtaggaagagtgaaatgaggcatgataagaagcctgatgatggagaaactaactcatctaggagtctcagtgtctctgacaataatgatgatagaaaaaaggagacactgttaagtggtgatgataaagaggatcacgaaatacagctcaaacaaataagacaggacatggaacttttgcgtgatgataaatctctcttggagataattttggatgagaagaatgctgaagtgcgcaagatttctagcagattaaatgatcttgatctgcagttaaggaaggagaaagaggaatgccacaggatgacctcaaaaattaaaaagttccttaaagcccatgctcgctttttgaaagcacaggaagaattaaaaagatattctgaagcgtggtgctaatgaagaagtttctagtatcaatgttgatgaagatccaaatgttccttatgaaaggagcccaaatgctgctatagctaagaagagatcaataccatactcaacaagtgaagaagcgaaagccgtgaagaaaagaagagagcgggactctgacacaactaggccagataaatataggtttgaaggtactattgcaggatttgaaaaactaagcaagggaaccgagccaacaaaatctttatatttgaagaagaaactgtgggaagatgaaaaggataagataggcaactttgtctcctcagccaacaccgacaaggtcaaagaatctccggtcaaacatgttttgccctccactggtatggctgctcatgctttggacgatctgtttgaagctgttgaactggaggatagacgtgacacatcaatagaaaatgatgctgatgacgaaactaggtcgcctgttatgcccccacaaccaccaccggtggttaatacttacgagcagtacgaggctgatgacgaggaagtcgacgtggaatgattagaatgccgagatggtactggaatgagctatatagctctcgcgcctgtgtaaagcattatgtaatatgtatttgatgctggagtttaccttgcataaaaagaatcgtcattaatgatccttggtggatgcggtttaagcactcaacttttttgttaatttgatgaaggcaacatgccctgttacctgtacctaatataccacgtggtggctagctagccagccttgtcagtgccctggtacttttgggtggtcttgctgtgctgttcgcggcacttgaaaactgatgttttgtaggactgatgttttgtaggagtattatttgaatggtagccgttgatcttcggctgttgatgcgctgcttggt

SEQ ID NO: 46132 - DNA, 2530 bp, Zea Mays
gacggcattacctaaaccataccatagaccatcaatcacttctaacacttttcccgtctcccccttcctcgccgcctccactacagggctttgctcctcccaactctcgaaaccctacccacgcgatgagagatcgatcggtcgagcgcgaattccccagccgcgagcggggggatcggccgccgcccggggtgctgggtcccccgcgccgcgggccggcttacaagacgaagttgtgcgcgctgtggcagcgcggcggctgttcccgcgacacatgcagcttcgcgcacggacacgccgagctccgccggttccccggatcgcgcacctcgttcccaccccgcgccgtctgcagaattaggcggcattcttactggttgccttttgatttaactaccattcaaattagcagactcctgagcagatttattagattcaactgctgccagaggataagatgacttttatatagattcttcagttggcatttcaacgatttattgtgacctgtaatgcttgtccctacatcaagaaggtgggcatatcagtatcttggatgatgactccactgaatgatgtccataatacatttgatgtgctatggtcatgtgcttagcagctttaacggttaattgcacatacccttgaatattgtgcatcagttagatcattgggaagtgttattctcactggtaattgcaagttattgtaattcttgcaagtcgccgcggaagatatctggacaaatgatagtagatttatattgtgatattgggattatagaagacatcaacttgtcataattgttatgtgatgttgttcatggtcttcatcaatttgattttcaacaatcaacattatgagtttggtatcatcttaatgggtatgtcagtggtttcataccatactttggtatctacccatggcattaatttttggctctactttgttgtggctaatgatattatcctggagacccttctacttattgtgcattgaattatcttatagctcaaaggctgtgggagaagagattatagaggtggtgactttagagataggtttgataggaggcgctcacctcataggaggcattcccctgatggagattccaggggccatcgctcccttcgtgaccgacgaccaaattcccaagaaagggaatctagctattcacggtctcccagtaggaagagtgaaatgaggcatgataagaagcctgatgatggagaaactaactcatctaggagtctcagtgtctctgacaataatgatgatagaaaaaaggagacactgttaagtggtgatgataaagaggatcacgaaatacagctcaaacaaataagacaggacatggaacttttgcgtgatgataaatctctcttggagataattttggatgagaagaatgctgaagtgcgcaagatttctagcagattaaatgatcttgatctgcagttaaggaaggagaaagaggaatgccacaggatgacctcaaaaattaaaaagttccttaaagcccatgctcgctttttgaaagcacaggaagaattaaaaaggtcacaagctcgttttgagagactcggtgatttacttgcttcagatattctgaagcgtggtgctaatgaagaagtttctagtatcaatgttgatgaagatccaaatgttccttatgaaaggagcccaaatgctgctatagctaagaagagatcaataccatactcaacaagtgaagaagcgaaagccgtgaagaaaagaagagagcgggactctgacacaactaggccagataaatataggtttgaaggtactattgcaggatttgaaaaactaagcaagggaaccgagccaacaaaatctttatatttgaagaagaaactgtgggaagatgaaaaggataagataggcaactttgtctcctcagccaacaccgacaaggtcaaagaatctccggtcaaacatgttttgccctccactggtatggctgctcatgctttggacgatctgtttgaagctgttgaactggaggatagacgtgacacatcaatagaaaatgatgctgatgacgaaactaggtcgcctgttatgcccccacaaccaccaccggtggttaatacttacgagcagtacgaggctgatgacgaggaagtcgacgtggaatgattagaatgccgagatggtactggaatgagctatatagctctcgcgcctgtgtaaagcattatgtaatatgtatttgatgctggagtttaccttgcataaaaagaatcgtcattaatgatccttggtggatgcggtttaagcactcaacttttttgttaatttgatgaaggcaacatgccctgttacctgtacctaatataccacgtggtggctagctagccagccttgtcagtgccctggtacttttgggtggtcttgctgtgctgttcgcggcacttgaaaactgatgttttgtaggactgatgttttgtaggagtattatttgaatggtagccgttgatcttcggctgttgatgcgctgcttggt

SEQ ID NO: 46133 - DNA, 3190 bp, Zea Mays
gacggcattacctaaaccataccatagaccatcaatcacttctaacacttttcccgtctcccccttcctcgccgcctccactacagggctttgctcctcccaactctcgaaaccctacccacgcgatgagagatcgatcggtcgagcgcgaattccccagccgcgagcggggggatcggccgccgcccggggtgctgggtcccccgcgccgcgggccggcttacaagacgaagttgtgcgcgctgtggcagcgcggcggctgttcccgcgacacatgcagcttcgcgcacggacacgccgagctccgccggttccccggatcgcgcacctcgttcccaccccgcgccggttttgttgtaagatgtcactaattctgcaccctaccgtgaatggttgctcatgtaatccatgtgatctatctgtttcggaagaacaacggtatgtgaccattcaatttatgagatgaagaagaaaggccatggtgcagcaaaaaaagggggatatttaactttttgccatctttatggatggccctaaaccaccagtcactgaccatctgtggagctacaaggggtgacatacatggacatggaaccacatgtgtctgggtatcaatgtccgatttaggtgtatgatttagcagattttttgaaatgccgaatagcacctgaattctgacacggtgtttataattatactggtgtcagtccgggtaactaatgtacctctggacatcgtggttcaaatggaactttattttttctccatgattttatagtagcatgttctctatgttttgtattaagtgctcgtgtgttttattaaattcgtgcttcaattcaacctcagttgctgcagatagaaaataattctcacaagtggaagcttgttgcagtctgcagaattaggcggcattcttactggttgccttttgatttaactaccattcaaattagcagactcctgagcagatttattagattcaactgctgccagaggataagatgacttttatatagattcttcagttggcatttcaacgatttattgtgacctgtaatgcttgtccctacatcaagaaggtgggcatatcagtatcttggatgatgactccactgaatgatgtccataatacatttgatgtgctatggtcatgtgcttagcagctttaacggttaattgcacatacccttgaatattgtgcatcagttagatcattgggaagtgttattctcactggtaattgcaagttattgtaattcttgcaagtcgccgcggaagatatctggacaaatgatagtagatttatattgtgatattgggattatagaagacatcaacttgtcataattgttatgtgatgttgttcatggtcttcatcaatttgattttcaacaatcaacattatgagtttggtatcatcttaatgggtatgtcagtggtttcataccatactttggtatctacccatggcattaatttttggctctactttgttgtggctaatgatattatcctggagacccttctacttattgtgcattgaattatcttatagctcaaaggctgtggtaaggttacaggcttatgggtgacctatctctattagttcatattgacacattttttgttcagcttcatttatccttttcttgtataaatttttctctatcctgacttctagggagaagagattatagaggtggtgactttagagataggtttgataggaggcgctcacctcataggaggcattcccctgatggagattccaggggccatcgctcccttcgtgaccgacgaccaaattcccaagaaagggaatctagctattcacggtctcccagtaggaagagtgaaatgaggcatgataagaagcctgatgatggagaaactaactcatctaggagtctcagtgtctctgacaataatgatgatagaaaaaaggagacactgttaagtggtgatgataaagaggatcacgaaatacagctcaaacaaataagacaggacatggaacttttgcgtgatgataaatctctcttggagataattttggatgagaagaatgctgaagtgcgcaagatttctagcagattaaatgatcttgatctgcagttaaggaaggagaaagaggaatgccacaggatgacctcaaaaattaaaaagttccttaaagcccatgctcgctttttgaaagcacaggaagaattaaaaaggtcacaagctcgttttgagagactcggtgatttacttgcttcagatattctgaagcgtggtgctaatgaagaagtttctagtatcaatgttgatgaagatccaaatgttccttatgaaaggagcccaaatgctgctatagctaagaagagatcaataccatactcaacaagtgaagaagcgaaagccgtgaagaaaagaagagagcgggactctgacacaactaggccagataaatataggtttgaaggtactattgcaggatttgaaaaactaagcaagggaaccgagccaacaaaatctttatatttgaagaagaaactgtgggaagatgaaaaggataagataggcaactttgtctcctcagccaacaccgacaaggtcaaagaatctccggtcaaacatgttttgccctccactggtatggctgctcatgctttggacgatctgtttgaagctgttgaactggaggatagacgtgacacatcaatagaaaatgatgctgatgacgaaactaggtcgcctgttatgcccccacaaccaccaccggtggttaatacttacgagcagtacgaggctgatgacgaggaagtcgacgtggaatgattagaatgccgagatggtactggaatgagctatatagctctcgcgcctgtgtaaagcattatgtaatatgtatttgatgctggagtttaccttgcataaaaagaatcgtcattaatgatccttggtggatgcggtttaagcactcaacttttttgttaatttgatgaaggcaacatgccctgttacctgtacctaatataccacgtggtggctagctagccagccttgtcagtgccctggtacttttgggtggtcttgctgtgctgttcgcggcacttgaaaactgatgttttgtaggactgatgttttgtaggagtattatttgaatggtagccgttgatcttcggctgttgatgcgctgcttggt

SEQ ID NO: 46134 - DNA, 5625 bp, Zea Mays
gaaaagccagaatgggcaacgtcgcagcacaccgcaaacgcaaaggggctgtgccgggcgcccgggcggggtccgatccgacgcgagcgggcggaggagcgcgagcctagtgaccagcgcagcgcaccaccaccaacagcaacaagtagccagccactccagcaccagaacgcaacacagacacagagactagagagagagagtcccgaagcgagcacaagaggccaccgcacagcggccaggcggcgagcgagactcctccacacgtctctcccccttcccctccccttccgtttcctctgtagctgcgcccgaccgaacccccctaccccgtggaatcctcctccgatgcggcgccgataggggctggcggaggagcggaatggcggggcacggtgagaagcggcgccgtacgggaggggcccacgagaagccggaggaggaggaggaggaccgcatctcggatctcccggacgtcctgcgcctgcacattctgagcctactgccgctcaaatcggccatccgcaccggcgcgctctcctcgcggtggcgccgcctctgggcgtaccgctggccggagccctcctcggtgaccatccgcctcccccccggcgcggcgggggcggcggccgcggcgcgcgccgaggcgctggccgggatcgaccgccgcgggcggcgccgcgtcgacggcttctcgctcgccttccacgggggccagctggcgcacgcggacctcaagcgctgcgtcgattacgcggcggcgtgcgaggccgaggacctgcacctccgcgccgacggcggcgcgggcgccgcccggggctcgcgcggggccacgcgccgcccgggcgcgctcgccgtgcagttccccgtcgggagcccgctgctcgcgcgcctgtcggtgcgggggctcagcctcacggccgtcaacaacgccatggtcgccacgctcgaggtgatccacctgcactccgtcttcctcacggacgccgcgctgcgccggatggtcgccgcctgcccccgcctccgggagctcgacctccgttactgccgccgcctgcgccgtgtcgacttcagcagtgttggggtgcccaacctcagtagcttcaccgtcgtcgactgctcccgcaccaccgagctccgggtccctgtcgcgccccgtctccggtcgttccggttcagcggtaccttcctctccagcaacattctctctggagctaagggttctcttgagcatctctacctctgctctggcgggccagagaccggccttcccgccaccaacttgccctacgcagttcctcgcctgtcgaacctcactgtcctcaccctctgcagcattgctctccagtatgtttcttctttcacagccaaggccggctcggagggcaacctgcatggcttaagggagctccagttgctcacgttcgggatggccaactccaaccttgctgacatttatagcttcctcaagacctgcccgtgtcctcgcttggagcgtctctttgtgcagctcccgacaaacaccggtgatgcattcacggagaatttcttggaggtggcggaggaggatccaccaaaaggtggattagaaaacctttgcttagccaagctgacaaatttcaaggggcaccgcaatgagatgcaactagtaggatttctgcttagaaagtcttgtagtctgaagaaactatttctgattgctcctaaggaggatcaccctcaaggactccgcaagacactgtcagatacgctgcctgattttctaaaaaaagaaatattgcatctggaaagagcttcaacagatacgcagatatttttcagtgagcctgatgctcagacgcagcaattgcattcggaggtctttgtcaggttttagcttgaaatgaggaaatgctgttgtagtccagtttctgctcctatagttttagatttctagcctttagagaacagacatggggaaaaaagtatctgcaaggcatacatagttttgatatatgttttctttttgcaatttgtgttactaaagaagtcctgcatagcggttgaaatgagagctgttctgatcttccacattttcttcttctcatccctctcttctccccctgtttgtgttcgcgatctctttggagttggcttattataagttgctgttgtacacagccaaccatctattggaacacaacaaccttcattttatttgtcgtacaattgaattggtaggttaactttgtggttctagatagatggagcatgtgcatatctcttgcttaatctgggagttgcattatatttttcttttcagttttttcctaaataggtatagtttctgtttctgagctaagtttcatataacttgtcatctgtcttgagtcattcatgtaaaaaagatgtatcaggggaatcttataaaactgtctttttgtgcggttaggattatattaacctagtatatatggactctacatctgctttctctgtttgttgtatgggtgaaattattgttgcttagatgggacatgtgtcttaaagcgatataatcatatggacttctgtacattaaagctttctttcatattatatccatgatactgcagatctctaagggaactatcatttcttgtacttccatcctggttgtcttgtgtgtctgcaaaacctggaacacctctgaatgacagagctcctgccttttttcttaaaaaaataatatatagttgacagtctgttgttggcagtattggtttacatccttaaaatgtcatacacgggttgttcaggacttcaggtgaccaaattcatatgtgctcattttggtgttactggtgaggtggtgaggaggtgtatttattttgatgtcattgagttttagtggtggagctagatgagatgaaatgctttggactctggtgttcttagctagctttgcaggatgaaaccatatttgtggaaattctatggtgctccttttgtgaagtggaagccatatcaccgtagtgctttgcacttatgtcttatccttcaaaccatgcagagctgtagtgccatacatcatagcaaaatgatatggataatgttggtaaaggtgtctagtagctttgagaattcttatgcacttgtatgtttgaagcagccatatccgtgcatacccttcatatttttgaattgaatcaattatttctgaaactttaggctggccgctgcctaataatctccagctacaaggaatcatacttgatgcgaagttgtggaaatggatttttgatttatgcagcttggtgtttcaagatatattacaagtgacgtaaaatttatgtggttctgttgggagcaacatgttggccacttgactattaacatgcaatttaccgttgcttttttactcaatgtgtctatctgtactgcttcatatatggaaatgtaagttagcatactcttttagacttgttttaatatcaatagaaatgcacacttgaagtatacctttgcagcaagctgtgttcagtaaccagtaagcatttttactacttcctccattcctccaaattataagacttttttatttttctagatatataattttttctacgtacttagatatacattatatctaggtacatactaaaagtaatctatttaaaaaactaaaacgtcttatagtttggaatggagtaagtaaatcttttaaatactggatggaaaccattaatctattgtgatttctttctcaatgccagttttttcattaatctttgctattgtgtagtttgcaatcatagaacagatttgttggaaaagtactttacctatctattttctctatttacattgccaacttgtaaaacataggaataagagagtgcatacaatatcttaaaagagagtgatatgctgcttcagaaaagattgcttatgctgatgagaaaaaaaagaaggtatatcctactttgtgtgaattagtggtggggctactgggattgaccttgcagtggagatgcacaattttattattcaacccttgtagatatatccacactccaaactttgttaagatatgtgttattcaatctgaaagatatgttgttcgacctgtgtgagaactgagaactgagaaggtcttcttcttaatacaatacttggggttgtctcatcctccctaggtcgagttttttatattcattatcatttgaatgaatgttttgacagaaaaaatgggctaaaaagaactatattttgggacggagagagtatatgttagggcagagacaactcttgtttgcaacaccgctcttagctcttttgagtaatgtatgctaactttcttgcaacttgataaatgattttccattgaagggacctgtacacttaagtaattaactaacggggttaatggtgtctgtgaataactggtctaccttcaataactagaataacacagcagcaaagcatttttaatctcaaacaagttgagtaacaagtaactatagaataccatgaaaagaacgatctttgaggattgggggatttatcgagttaggattacacgtaaacatcgaatctttgacatgggcatactgatttagcttttacatagtagttttatgaagaactgaaaacttgagatatattcagatgtctgtaacgtttggcaacaggcatctgcactatctaagcacttgtattcaggtgcgtcgtctgtctgcaagctatatcttgtccttcctgtcatttccgcagaatgtgtttacgatcctgcactcatgtttctaatgtttcgtgatcagattcagatggatgcctgtatggtcccgcactctattttaaatgatcgcttccctccacacgatgcggtagacaagtgggaaaaggtaaatgtgcacccaaccttttattatactcctattagcaagcataataaagactatatttgtacctctagcagtggactatattattaaccttgcatgctcttgctctaagatgaagcctacatcagctagctatgtacagaaagcaccatgtttccgatgggcccacccgtccccagagttgcaacggaaggatctaagctcttcaggaacgcgggtgaggtgaagtgaagacgatgtccgtgacgccggttcagagctggtgaagttctctagcaacgggaagaagagggtttttaaggatgcttccgcttcaaaaaagctaaaagaccaattaatggtttttttgccttttagaaaacaggtgtttttagtatgtttctaagaatacttcagacacttttttattattttttttggtttttaatattttttaatgaatggaataaacaatttattcatggttgttgtaagagataaagataagaggtatattttacacctgtttttttttttttgtagatgataccctataaagttataacagttttttatagctcatagtcaaatgtagtttttcttcaccgccacagttgaaccgaatagacacttaatactacgatgatacacaaatcttctcaacaatcgagaaagagaagaggtagtctatgggtgacaatgtgctctaaattttacaccataagatttaaggatcagatcggattaagatcatgccttatttttatttatttttaaaata

SEQ ID NO: 46135 - DNA, 2280 bp, Zea Mays
caaaactgcagaaaaactttgttcccaagcacccccttagactttttgttctgtaatactagtgtacgtatgtggggcgggggtgggggttctgtgttcagaattaagactgcatttattgttgtctagtccttgcatttattgttgtctagcaactgtgctacagtatggttgcccaattcattataattactgatttaacaaatagtcctaccccatccacaaagttgctagggcatagagtggagtgcatgaccaatttattataattactgaattaacaaatagtcctactcctaccctatccacagttgctagagcatagcttattgattgatgcctgtaactactacggctcgccaaacatctgtagccccttactctacatgccattgattcatcctatagtatgggctcgcttattctgatagattacagcaacctcattcaagtgttggcgtgcagagttcttagtttgtgtgcatttgattgatagcttatttttgcagagatgtcttgctcatttcttttgtcacttgggttctttctagtctcacatttgttattttggtggagggccttctcggcgctgcatccagttatttttttgggattgtagctgccctgtccagtagctctccacattgggcacatcgcacctctattttgttgttctcaagtttttttatttgtgtgcttagtgcagactgcagggtacccacaattgtccttttacgtttttttaaaaaaaaagtacggaccttgcattgtgagctaacgaaggcactggtcgctcgatcacatgggggtgtggtctgtggtggaccggcagtactgtctcaactagccaatggtccacagtatcagtacctgctccgtgctcaccaaccggtaccggttctccatcgcgtgcacctcgtgttaaaaatattttgtactctctctgttctgattaatgtaactctcaagtctcttactctttatttctttttttataagttaaacgatttaaactttaactaaaatcgtgcaacatacttatattataaagtagatatcattacactgatggaatgcgtttttagtaaatttgatttaagacaagtattagtactatttattataaatttagtcggacataagctagttttcttgtattattttatgcactggagagtaataacttatctcatgcaatgtgctcactccatccataaaaagatgtaattttcgtttttctgtaacttgaccaaacttatatataggaaaaatagtaccattcataatataaaacaaacatcattagattgattataaaatatatttccatagaaaattttattgtaaacataaatgtaaatagtatatattataaatttgatcaaacttaaactagtttgatcggcacaaatctatacttgcattctatgtggatggagtagttagcctcatgagactgaataattggcggcctgcacttcgcatttcgtgcactggtgcatcttccatcctcgggtttatgggatgaataatacttcagtaaatcccatctttgttaccattttattaagattgttgaggtgttcattgatatgatagataacgctcatatttagccatttaggctcacagttcagtaaatcaatcatatagtagatgacatgatactgtcactcacgccactgttccttccactgcaagtatgtctactgtaattaatcacttacttttggtgcctggcagcttccctccacacgatgcggtagacaagtgggaaaaggtaaatgtgcacccaaccttttattatactcctattagcaagcataataaagactatatttgtacctctagcagtggactatattattaaccttgcatgctcttgctctaagatgaagcctacatcagctagctatgtacagaaagcaccatgtttccgatgggcccacccgtccccagagttgcaacggaaggatctaagctcttcaggaacgcgggtgaggtgaagtgaagacgatgtccgtgacgccggttcagagctggtgaagttctctagcaacgggaagaagagggtttttaaggatgcttccgcttcaaaaaagctaaaagaccaattaatggtttttttgccttttagaaaacaggtgtttttagtatgtttctaagaatacttcagacacttttttattattttttttggtttttaatattttttaatgaatggaataaacaatttattcatggttgttgtaagagataaagataagaggtatattttac

SEQ ID NO: 46136 - DNA, 918 bp, Zea Mays
cgaattgcaaaaatctccagtcacaccacacgtcacgctcgcaccggcgggcgggcggcgccctgacggccgagggtcacgtcacacccaggcagcggctgcgctccagagataactagtgcggcggagggcgggatgctgctgctcaatccgtgtcctatcccaaagtgaaatgccgactgaatcaattggaatatggatgcacccctgtctagagatttgggaagaaaatgagtacaaggtagccctgtagttcccagatgtaaagggaaccatggggcttgagtgtacgcaggacatacagcaaggcttgctacatgctggtcatggcttcttcttgggagtgtcgcgtggatatggcatccgatcccgtcctgagtttgattggcaaattggttcacttaaaactttgtatctacccacagataggatatacttcaatagttgaattgaccaccggtgatcatatgccaaaggaagagaaaatgacttgcccaatcggtacagctagcgagttttgattcttttcttcttcctcttcgtcttcctcttctttgagaattttctgtgattcctgttgccttttcctttttgcggatcatggagagttggttcccactagttatccatcacatgcttttagctttcggagtcatggtggaaggagtgcaggatgggaaaaaaaatatccttgagctgacattccttgatattgagctcgttttagacatgcacaatatgcaaagtcgaagatactaaacggtccaccaatttacgccccttggctgccacaaaatctaggccctgcattctgctccagtgaaaagagtgtcatttagaattttgcacagttaacatgttattaaaactttggttgtcgacatcctttttgaacaattgaactttgaaagacggctt

SEQ ID NO: 46137 - DNA, 2203 bp, Zea Mays
gactaccattctacaagctatcacaagagtgttgtgggcttgtggcgcagcagcagacggacgccaggtttttttccttttagaccgcaacctcaaaaccctagcttgtccctcctgctcccagatctcttccactcggccactccctagcacatcaaaccctagctccgcccagcccccaaccatgtcggcgatgatgcaaccgcagatcatcctgctcaaggagggcacggacacgtcgcaggggcgcgctcaggtggtgagcaatatcaacgcgtgcacggcggtgggcgacaccgtgcggaccacgctggggcctcgggggatggacaagctcatccacgacgacaagggcggagtcaccatctccaacgacggcgccaccatcatgcgcctcctcgacatcgtgcaccccgccgccaagatccttgtcgacatcgccaagtcgcaggactccgaggtcggcgatgggacaactactgtggtgcttctagctgcagaattcttaaaggaagcaaaaccttatatcgaggacggggtgcacccccacagtctaattcgcagttatagaactgcaggcaatatggcaatccaaagggttaaagagctggcagttagcatagaaggaaaaagccttgaagagaagaaatcactgctagccaagtgcgctgctacaacactctcttcaaaacttataggtggtgaaaaagaattctttgcttctatggttgtggatgctgtccttgccattggcaatgatgacaggcttaatcttattgggattaaaaaggttcctggaggtaccatgagagactcttttttggtgaatggtgttgcgttcaagaagacgttttcatatgcaggatttgagcaacaaccaaagaagttccttaatccaaagattcttttgttaaacattgaactagaattgaaatctgagaaggaaaatgcagagatcagattgtctgaccctctgcaataccaatcaattgttgatgctgagtggaacattatttatgacaaactggataaatgtgtgaaaagtggagcaaagatagttctgtctcggctagctattggtgatcttggaacacagatcgagacattttctgtgctggccgtgtcactgaagaagatttgcaacgtgttgctgcagcaactggtggaactgttcaaacttctgtaaataatgtcatcaatgatgtactcggttcctgtgaggtattcgaggaaaagcaagtaggcaatgaaagattcaacatatttagtggctgcccttctggccagacagcgactattgttctccgtggtggtgcagaccagttcattgaggaagctgaacgaagtctccatgatgccatcatgattgtgaggagagcacttaagaactcgacagttgtgccgggtggtggtgctattgatatggaaataagcaagtatctcaggcagcatgcacgaacaattgctgggaagtctcagttctttgtaaattcatttgctaaagcccttgaggttattccacgccaactttgcgataatgctggatttgatgccactgacgttctcaataagctgaggcagaaacatgcatctggtgaaggtgctaattatggtgtagacataaacactggcggaattactgattcctttgcaaactttgtttgggaacctgctgttgtaaagatcaatgctataaatgctgcaaccgaagcttcctgccttattcttagcgtcgacgagacagtgaaaaacccaaagtcggagagcgcacaaggtgaggctgctgccggtgcgatggctggtcgcggtcgaggtgcaatgcgaggacgtggtggcaggggcatgcgcaggcgataaactgggtcaagtagatcatggtgagatttttttgcatgtttgcgagtgcttttgtgccttactgcacatgtatggacgctgcacttactattgtgcgcttttggttgtgaagcagtcgtagactttttttttgtttcagaagagatgcaccaggcgtttatcagtgtaccgtccgctggatgtgttatagtagacctgagctttggattctaatttgtttgacatttatcttggtttattggcttgtcttttgaacaatgagaaaatcagtgttgtagtttgcgatcctcgtgcgctcaagcgtaaaacatagacatgtgtgcttgtttggaacccgagatgtttg

SEQ ID NO: 46138 - DNA, 2085 bp, Zea Mays
gactaccattctacaagctatcacaagagtgttgtgggcttgtggcgcagcagcagacggacgccaggtttttttccttttagaccgcaacctcaaaaccctagcttgtccctcctgctcccagatctcttccactcggccactccctagcacatcaaaccctagctccgcccagcccccaaccatgtcggcgatgatgatcatcctgctcaaggagggcacggacacgtcgcaggggcgcgctcaggtggtgagcaatatcaacgcgtgcacggcggtgggcgacaccgtgcggaccacgctggggcctcgggggatggacaagctcatccacgacgacaagggcggagtcaccatctccaacgacggcgccaccatcatgcgcctcctcgacatcgtgcaccccgccgccaagatccttgtcgacatcgccaagtcgcaggactccgaggtcggcgatgggacaactactgtggtgcttctagctgcagaattcttaaaggaagcaaaaccttatatcgaggacggggtgcacccccacagtctaattcgcagttatagaactgcaggcaatatggcaatccaaagggttaaagagctggcagttagcatagaaggaaaaagccttgaagagaagaaatcactgctagccaagtgcgctgctacaacactctcttcaaaacttataggtggtgaaaaagaattctttgcttctatggttgtggatgctgtccttgccattggcaatgatgacaggcttaatcttattgggattaaaaaggttcctggaggtaccatgagagactcttttttggtgaatggtgttgcgttcaagaagacgttttcatatgcaggatttgagcaacaaccaaagaagttccttaatccaaagattcttttgttaaacattgaactagaattgaaatctgagaaggaaaatgcagagatcagattgtctgaccctctgcaataccaatcaattgttgatgctgagtggaacattatttatgacaaactggataaatgtgtgaaaagtggagcaaagatagttctgtctcggctagctattggtgatcttggaacacagtattttgcagatcgagacattttctgtgctggccgtgtcactgaagaagatttgcaacgtgttgctgcagcaactggtggaactgttcaaacttctgtaaataatgtcatcaatgatgtactcggttcctgtgaggtattcgaggaaaagcaagtaggcaatgaaagattcaacatatttagtggctgcccttctggccagacagcgactattgttctccgtggtggtgcagaccagttcattgaggaagctgaacgaagtctccatgatgccatcatgattgtgaggagagcacttaagaactcgacagttgtgccgggtggtggtgctattgatatggaaataagcaagtatctcaggcagcatgcacgaacaattgctgggaagtctcagttctttgtaaattcatttgctaaagcccttgaggttattccacgccaactttgcgataatgctggatttgatgccactgacgttctcaataagctgaggcagaaacatgcatctggtgaaggtgctaattatggtgtagacataaacactggcggaattactgattcctttgcaaactttgtttgggaacctgctgttgtaaagatcaatgctataaatgctgcaaccgaagcttcctgccttattcttagcgtcgacgagacagtgaaaaacccaaagtcggagagcgcacaaggtgaggctgctgccggtgcgatggctggtcgcggtcgaggtgcaatgcgaggacgtggtggcaggggcatgcgcaggcgataaactgggtcaagtagatcatgaagagatgcaccaggcgtttatcagtgtaccgtccgctggatgtgttatagtagacctgagctttggattctaatttgtttgacatttatcttggtttattggcttgtcttttgaacaatgagaaaatcagtgttgtagtttgcgatcctcgtgcgctcaagcgtaaaacatagacatgtgtgcttgtttggaacccgagatgtttg

SEQ ID NO: 46139 - DNA, 770 bp, Zea Mays
gaacttgtcgatgctgtacccgcccagcacctgcttgaagtgctcgacgtcggggaagtctccggcggggagatggtattccctctgcacctgttccaccggaccacgagtatcagccaagcagagggatgttgagcaaaaagaaaagaggaaaaatgacagtaactttggatttaggtgcgaccaaatcaaggcatctccttcttcagatggccaattatgtaagcatggatcttggcagctcgggcacgcttaacaaactcattgacctggaagaaacggtgctgtccgtttcagaaatccagtacaggaagggaggattctgacagatgactcaacatttcaacttacccgtcgatcacaggctttcttaggaatgtccttcaggtcacagaggaggtcatcttgctccctctcaaacaagtcttttccaattggcccaacagctgaatcattcactggcttatcattaaatgatctgcaaataatgattccaaagtgacaacccaattagtttatactctgttgaacaactgctaacttttgtgaagattcggctacaacccaatgcaaattagatatatattttaatttgaattttgaacctccatcaacatgcatatatttttttacttattgtacaagccttgtaacacgtccattgctcaaaagtaatagaggagtaaatgtaacaaatagcaggcataagaaagtacccgatatacacacgcacaacctcaggagtatttagcactttcccaagagaccac

SEQ ID NO: 46140 - DNA, 1672 bp, Zea Mays
atgacggccacgaagctcaacccggccgcggcgccgttcccttgcccctacccctactacgcgccgccgcccccgttcccgctcccgggcgcctgcccgcctacgctcccgctcgtcacctactcctacgtcttgtccccgcagggccgcctcggcttctacctcccggtgcggcagtactcgtccccgccggtcccacgcaagggcgtctccgcggcgccgcaccacggccgcctcccgccgcccaaagtcatggcggccttctccgggccctgcggcgcggggaagcgccaggctgcggcgcctccggtggccgccgccgcgcgtgcccaggtgccggcggcgccgcgcaagccgcggcaggaagcggggagcaggagccacgccgtggcgccgcggcagaaagcggagagcaggaggagccaggccgtggcgccgtggccacggaaggcggctggtccccgcgcgcgcctcgccgcgcagcgtgaggcgcccccgccgccgtccctctacacgaagcggccgctgcattgggtgaagccgaagccctcggagctcggcgagtgcactaccatcatgctccggaatatccccaataagctcaggagcggcgatctgatcagtttgctcgacgagcagtgcgcgcacgccaacagggccgccggctccgtcgtcgcggcgtacgacgtcatgtaccttccgatggacttccggaaggaagcgaactttggctacgcgttcataaacctgacgacgccggcggccgccaaggtgctctactgcgcgttgcaaaactgcggctggaaagtgcagggctccaagaaggtcatcaggatcgaccaggccgcgcagcagggcaaggcgacgctggtgaggcacttggagaggatgcggctggagtgcgacaaggacgagttcctgccggtgcagttctcgccgccgcgcgacggcgtgaacgtccccgccgcgccctgccgcatccgcgtgcagccgctggccctcggcgaggggcgcgggcctcgtcccaggccgaggcccaaggctgcttagctagagctagctagcgccatgggcgccagcgccactagtgggatgcatggggggagtcaaacgatgcatgcatgcaagcatgcatacgatggacgcgggcatgcggcggagtaggaagagtgcttcggacgttgttgcattggtggtggcgtcgtcgggccgggcggtgatctgagagtctcaagtccgtcaagtatgccttccccttcctctagacctctcttctacccgtccgacgaggaggaggaggggtaggctggggggactttggacggtagcctagtagggtcgatgcatgtgtactcgtagtagtctgtgtgtgtactcgtggttgtgcagcgtgtctgtactctgtagttggatctgtactgcctgccttgcctgtgttgtgttgtgtgctactgataggaggacgtctgatggcaggccgcgcagcagctgtctagctacaagtagggtactagctaggcaatgtgtgtgtcccactccccacccactttcctgcttcctgctccctggcctcatcgtggaactggtagtactagcatgcatgggctgcagcatggcctgtggccatcacctgtggcgttggtgttccccgaacccgaagcaaaaggagaat

SEQ ID NO: 46141 - DNA, 1902 bp, Zea Mays
caagaagctaaaataaacctcaaattcttaaacctgacccttacgccttcgctcgcgccgccgccgccgccgccgctacgccccgcacctcgcttcatttcgtgtcgccaagatgacgaagcgcactaagaaggcaggaattgttggcaaatatggaaccaggtatggtgctagcttgcgtaagcaaatcaagaagatggaggtatctcagcattccaagtacttttgcgagttctgtgggaagtttgctgtgaagaggaaagcagttggaatttgggggtgcaaggactgtgggaaggtgaaggctggtggtgcttacaccatgaacactgctagtgcggtcaccgtcaggagcacgatccgccgcctgagggagcagactgaagcatgatatagctctttatattattggggtttcctgtagttgctcttgtcaggcatgttgtgggggccttatctagtggaaatgtggaatcactgtactggctgttttgccgagacaatgctccttatatttggtttatgctctaggatctcaaagttgtgttaagatttgcccttggttaccgttctgaatctgacaagtgatatttcatcctatgccatcttgacgtcgaatttggttgtggttttctatgcgcttggctgtgtcaatggtttgctattctgttcttgaaattctacagatactgctgcgtctctgctggttgagtctggtttagatagcaaccagtccttattattggtctttcaagttcaagtcaactaaaatgcgacaaataaaaaaaagaatggagggagtatataactgttcaagtcaaccaatccttattacgcctgcacttgtgtccaaaaagaaatgccccggagctattattggtctgttgccagataagcagtgacgacgcagcatcgaaggtcagagacgacttttttgcgagaacgagcatcaagctgacggaatggagcattattccgataaaaaaaaggtatagccagaactcttgcatcctggtgatggtaaactgccgtgccagtataaacgcgaaggcaggtcacacatactcacaagtccgtcccatctcaggtcatccatccatccatccctgcagcaatggcgtctgcagtgaccagcagcgacaaggagcaggccgtccctaccatcgacgctgacgaagcgcacgcgctgctgagctccggccatggctacgtggatgtcaggatgcggggggacttccacaaggcgcatgcgcccggtgctcggaacgttccctactacctgtccgtcacgccgcaagggaaggagaagaacccacactttgtagaggaagtggctgccttctgtgggaaggatgatgtcttcattgtgggttgcaacacggggaacagatccaggttcgcgacggcagaccttctgaacgcggggttcaagaacgtgaggaacctgcaaggtggttaccgctcctttcagcagcgagctcaacagcagtagacatcacgtcctgaaggtatgccagggatgctgcagttgaacgacacatttgcctacctccaggaaaccgtttatctccagcagctctctatcacacctcatactttaaattttactttgtaaacagtgctgtctaccgtcccacctcatactttaaattgtactttataaacaattctgtctaccgtataaaatattacaaacctcttgttttgcatatgcacgatctgttggtcccagccttacaaggtatattcaactgtagaaacaagtctctgtagcatgcgttacaaggaattggactacatgatgcactttgacatatgaatttcctatatgtgcctggcaaaactctgtggcgacatgattgttttaccatcatagcctgacacataaaaaagcaaaaaata

SEQ ID NO: 46142 - DNA, 1837 bp, Zea Mays
caagaagctaaaataaacctcaaattcttaaacctgacccttacgccttcgctcgcgccgccgccgccgccgccgctacgccccgcacctcgcttcatttcgtgtcgccaagatggtacgtcgcttcacctcttccccccaatcttctggatgcctagttccttgttgcgcgagtagtgttgccttggtagcccagcttcggtttgatgtgtatatggctagctgtggatgcctagttatgtctggccgcttgttatgatgtgctgtgcgagatcttagtgtttgacttcatagtccagctccagtttgatgtgttcggctagctccatactttaatttttcgggataggaacatgtccagcgatcatactctgtgattcgtctggaaagtatcagttgacaagatagcgatgagaaaggtttggtttgtaccatttgtttttcgggaatgtatctctaagaatttcttatatcatcataaatctggatgtgtcaatctatcatcactaacctatatgctcagtatatcatatttgttagattataaagtttgaccaatcgaaaacaatgttacaagtatatgtgaatatacataatatttcatgagttctcttaggtatgttgcatgtgtggttttcatcctgctgcttgtgcaatttccaagagattggaaacatacattgttagtttagtataatggcaaactagttttctcataccaaactgggtgaaaataaacatttcttgtaaattcactttggtcatctgacacctttgccgtgtaatctgaagccattccgctgcacctggcagtatggaacatgaaagtagtatgcggtgcaaagtttagccttttaatatctcatgtataaaacagcggtgtataatagttttccccgtgtgcaggttttaattgttatgcctttgctttttcaatgtataatgggtaatttttctctttctgctattggagagttaatcgcagctaactcaactatttttttaccgttccacatatctagtgtttaagaagttatatttcccttgttgattgttaacctacttgtgtgtctaaaagtagtgttcaagctacagttctacacttccgagttatattgagtagctgtgtaatttattttgcttttataatccctatgcagacgaagcgcactaagaaggcaggaattgttggcaaatatggaaccaggtatggtgctagcttgcgtaagcaaatcaagaagatggaggtatctcagcattccaagtacttttgcgagttctgtgggaagtttgctgtgaagaggaaagcagttggaatttgggggtgcaaggactgtgggaaggtgaaggctggtggtgcttacaccatgaacactgctagtgcggtcaccgtcaggagcacgatccgccgcctgagggagcagactgaagcatgatatagctctttatattattggggtttcctgtagttgctcttgtcaggcatgttgtgggggccttatctagtggaaatgtggaatcactgtactggctgttttgccgagacaatgctccttatatttggtttatgctctaggatctcaaagttgtgttaagatttgcccttggttaccgttctgaatctgacaagtgatatttcatcctatgccatcttgacgtcgaatttggttgtggttttctatgcgcttggctgtgtcaatggtttgctattctgttcttgaaattctacagatactgctgcgtctctgctggttgagtctggtttagatagcaaccagtccttattattggtctttcaagttcaagtcaactaaaatgcgacaaataaaaaaaagaa

SEQ ID NO: 46143 - DNA, 3971 bp, Zea Mays
caagcctcctgctatgccgcaggtcgacactgcgcgctgcaatggattggattctcttgcatagttgcatggccaacgttgatgctttccaggcatgtaaccacttccatgatatgtggtctcatggcagggttattgttcacacatttgcaagcaagcccaagcaccttaagcatttgctcttcatgccctgtgccgcagagtgttggatctaggacatcaaccagctttccctgagagctcatctccagcacccatgggacaagttcttttgatgttgtcaggaccggaacaggtcgcaagcctgtgagcagctcaagaaggacaactccgaagctgtatatatcacctctcagagtggccacccatccgtgcgcatactcaggggggatgtaacctagagtgccaaccaactctgttgtaacatgggttttgttgggaaggatcaaccttgacagtccaaagtctgcaacgtaagcttttaattctttgtctagcaggatgttgctgcatttgatgtcacggtgcacaatctgaggtttgcagtcattatggatgtaagaaaggccacggcttgctccttgcgcaatccttagcctcgtcggccagtcaagaaatgtgctggcatcatcatccctgttgtgaagccaatcatctaggctgccattctccatgtaggagtatatgaggaatctcgagttcccctggatgcagtacccccacagtggcacaagatggtcgtgctgtgccatggacagtgcttcaacctctgcagtgaactccctttccatcaagcacatttcatcattgagcttcttgatagcaagcttgcagccatcaggtagttcagccttatagactagaccataaccaccacacccaatgatgttttccttgttgaagttatttgtggcttttacaatgtcagagaacgtgagcttgttttcatttccctttccttgtggcaccatgatcactccatgctccaagctggagttgaatgtgcttgtttcaagatatccgttgtcctcccttctaccttgggccgttaaacggtttatcctgatggagacaaggagacgccacagcaacaaaagaatggcaatcattgcaaagaacacaccaaatgcaattgcgagaatggccttcttatttcttcctcctgtggataccagaggcacatcggctgaatcgcatcgacgaccgatcataaagccgcacagcttcggattccctagaaagctggagttctgaaatgtaccaaattggccaccggttggaataggcccttccaggtcattgttagaaacgttgaatgtggaaaggaagtgcagattctccaatgcaactgggattttacccgtgagatcattgctggataaatcaagcaccagcaggtttgtgagattgcagatagatgtggggatcggtccggttaagctgttggagctgatatcaagtgaaaggaggcctttcaactgaccaatctctgggggaatctgacctgtgaatctgttgctgcttagatttagaactttaggaaaagcaatcggtatgcggtactgacgtgatggaccatcatagactggcagatcgaaaacgcttgcgtccaaatgagctgcagtcctctctgaagttagcattggtatactcactacttctttcggaatttcccctgtaaggctgttgtttgatatgtctaagtagaaaaggtactccagtgtgtggatccaggttggtatgggtccactgagtcgattgccatctaagaacaacatctccagatttactaacttcgatatccagagaggtatttctcctgacaggaggcagtttccgatgtccagaacctgaagattctcaaaaccgtagatcacggcatcatccggtatggtttcttcaaagaaattgattccaagaagaagcgtggtcaggttcttggagctcctcagtatctgaagcgcgtttgttatatttgaaaggctgttgtttgtaagcgacaggaacgagagggacttcaggttgcctagcccttctgataactgtccatggaacttattcgaagctagccgcagcgcagtcaggtttctacaggagtatatgctctccggaatcgtgccactgaagttattcagcatgagatctatggttcttagactgggcatgttgctgaaatcaacccgggagagttcgccactgaaaccgttgctcctaaggtctagagttatgagatccgtgcagttgctcagggctggtggcagctccccatacatgctgttatagtccagatgaagttcttgcaatctcttgagctgacctatggtatcaggtatcttgccgccgaaactgttgtctcctaggtcaaggacgaccagattggagagcttggctacatgtgcgccatcgactgttccatgcaaaaagttgctggagaaggagaggcgttccagcgatgtagcgttgaaaagctcacgggggagagtcccgctgaggttgttgtggccagccctgagtactctgagcatggagcagttcccaagccctgggggcacgccgccactgaacttgttgtagctgagttcgagcacggcgaaggacggcgctgtggcacagaactggtccgggatctgcccggtcaagctgttgttgctggcgttcagcgcgaccagactccgcatcctctcccacgccgtggacgtgagctgccccgtgaacgagttgctcgagatgttgagtacctcagtcggtgcctcgccagagcccggtgaggccggcgtcgtaagagagctccgcgaggaactggagcagggacgccctctccggctccccgcaggcgctggcgcaggactcccaggagatggagatgagcagcagcgcaagggcgagggcgcgaggccggtggaaggagatttgacttcatatacggcgtgccgttttaccagcgtgggttgacagggaaaagttgcgtgtccggtgttttccaaagaagctgaatgccttcaggattttcaattgaagtcaaattgcagaggaacctgccgggagagcatagcagggtggctccgggactctctgctacctgcagccaggcagacatggagattggggtggaagcacgggacgacaggaggacgcagaagaagccacggggacccacggcaacggcatgcgcgtgtacgtccaaccccatgcgatcggtctcggtcagcgcgctctcttcgttgcacttgcacgactggatgaaaggatgcgcgtggagtggacaacgacggccttcccgtccaaccttacccatgcgtcggtctcggtcagcgcgctcacgggcactgcacgactggatctaacgtggaggtgtggccacacacacacctgcctagcccttgattcacaccggcctcctatgagtttttttattctttaatccattttaaacatactttttttggaaaccaatctctattaagataaactatcgcccacatgtttcagtcaaggcatccatacagagctactcattacttctatgcgaccgtttttaatgtaaacagttgttcatggtcattttattttatttttactattgcttgatatgtcttattaaattgctgataagttagtgacatgaactcattttgaatcataagaggtgttttttttttctttcgattgtcctgacgagtttggtaccttcttttcaatcaatggtggagatggagatggccacacgagcacttcgagtggtgggttccgtctctcccaacccttcgccgatgataggcaaggagaagaacagagctgccaatgaacgacttgagaactcttttttatgtgattgtggatatctagagtttgagtgtggtaacaagactgcatttttatacctcttgatcattgtattttcttgcttaaatttaataatatgtcctcatttgtagtataaatattagaaatgtcattctagagccaaagga

SEQ ID NO: 46144 - DNA, 3922 bp, Zea Mays
caagcctcctgctatgccgcaggccaacgttgatgctttccaggcatgtaaccacttccatgatatgtggtctcatggcagggttattgttcacacatttgcaagcaagcccaagcaccttaagcatttgctcttcatgccctgtgccgcagagtgttggatctaggacatcaaccagctttccctgagagctcatctccagcacccatgggacaagttcttttgatgttgtcaggaccggaacaggtcgcaagcctgtgagcagctcaagaaggacaactccgaagctgtatatatcacctctcagagtggccacccatccgtgcgcatactcaggggggatgtaacctagagtgccaaccaactctgttgtaacatgggttttgttgggaaggatcaaccttgacagtccaaagtctgcaacgtaagcttttaattctttgtctagcaggatgttgctgcatttgatgtcacggtgcacaatctgaggtttgcagtcattatggatgtaagaaaggccacggcttgctccttgcgcaatccttagcctcgtcggccagtcaagaaatgtgctggcatcatcatccctgttgtgaagccaatcatctaggctgccattctccatgtaggagtatatgaggaatctcgagttcccctggatgcagtacccccacagtggcacaagatggtcgtgctgtgccatggacagtgcttcaacctctgcagtgaactccctttccatcaagcacatttcatcattgagcttcttgatagcaagcttgcagccatcaggtagttcagccttatagactagaccataaccaccacacccaatgatgttttccttgttgaagttatttgtggcttttacaatgtcagagaacgtgagcttgttttcatttccctttccttgtggcaccatgatcactccatgctccaagctggagttgaatgtgcttgtttcaagatatccgttgtcctcccttctaccttgggccgttaaacggtttatcctgatggagacaaggagacgccacagcaacaaaagaatggcaatcattgcaaagaacacaccaaatgcaattgcgagaatggccttcttatttcttcctcctgtggataccagaggcacatcggctgaatcgcatcgacgaccgatcataaagccgcacagcttcggattccctagaaagctggagttctgaaatgtaccaaattggccaccggttggaataggcccttccaggtcattgttagaaacgttgaatgtggaaaggaagtgcagattctccaatgcaactgggattttacccgtgagatcattgctggataaatcaagcaccagcaggtttgtgagattgcagatagatgtggggatcggtccggttaagctgttggagctgatatcaagtgaaaggaggcctttcaactgaccaatctctgggggaatctgacctgtgaatctgttgctgcttagatttagaactttaggaaaagcaatcggtatgcggtactgacgtgatggaccatcatagactggcagatcgaaaacgcttgcgtccaaatgagctgcagtcctctctgaagttagcattggtatactcactacttctttcggaatttcccctgtaaggctgttgtttgatatgtctaagtagaaaaggtactccagtgtgtggatccaggttggtatgggtccactgagtcgattgccatctaagaacaacatctccagatttactaacttcgatatccagagaggtatttctcctgacaggaggcagtttccgatgtccagaacctgaagattctcaaaaccgtagatcacggcatcatccggtatggtttcttcaaagaaattgattccaagaagaagcgtggtcaggttcttggagctcctcagtatctgaagcgcgtttgttatatttgaaaggctgttgtttgtaagcgacaggaacgagagggacttcaggttgcctagcccttctgataactgtccatggaacttattcgaagctagccgcagcgcagtcaggtttctacaggagtatatgctctccggaatcgtgccactgaagttattcagcatgagatctatggttcttagactgggcatgttgctgaaatcaacccgggagagttcgccactgaaaccgttgctcctaaggtctagagttatgagatccgtgcagttgctcagggctggtggcagctccccatacatgctgttatagtccagatgaagttcttgcaatctcttgagctgacctatggtatcaggtatcttgccgccgaaactgttgtctcctaggtcaaggacgaccagattggagagcttggctacatgtgcgccatcgactgttccatgcaaaaagttgctggagaaggagaggcgttccagcgatgtagcgttgaaaagctcacgggggagagtcccgctgaggttgttgtggccagccctgagtactctgagcatggagcagttcccaagccctgggggcacgccgccactgaacttgttgtagctgagttcgagcacggcgaaggacggcgctgtggcacagaactggtccgggatctgcccggtcaagctgttgttgctggcgttcagcgcgaccagactccgcatcctctcccacgccgtggacgtgagctgccccgtgaacgagttgctcgagatgttgagtacctcagtcggtgcctcgccagagcccggtgaggccggcgtcgtaagagagctccgcgaggaactggagcagggacgccctctccggctccccgcaggcgctggcgcaggactcccaggagatggagatgagcagcagcgcaagggcgagggcgcgaggccggtggaaggagatttgacttcatatacggcgtgccgttttaccagcgtgggttgacagggaaaagttgcgtgtccggtgttttccaaagaagctgaatgccttcaggattttcaattgaagtcaaattgcagaggaacctgccgggagagcatagcagggtggctccgggactctctgctacctgcagccaggcagacatggagattggggtggaagcacgggacgacaggaggacgcagaagaagccacggggacccacggcaacggcatgcgcgtgtacgtccaaccccatgcgatcggtctcggtcagcgcgctctcttcgttgcacttgcacgactggatgaaaggatgcgcgtggagtggacaacgacggccttcccgtccaaccttacccatgcgtcggtctcggtcagcgcgctcacgggcactgcacgactggatctaacgtggaggtgtggccacacacacacctgcctagcccttgattcacaccggcctcctatgagtttttttattctttaatccattttaaacatactttttttggaaaccaatctctattaagataaactatcgcccacatgtttcagtcaaggcatccatacagagctactcattacttctatgcgaccgtttttaatgtaaacagttgttcatggtcattttattttatttttactattgcttgatatgtcttattaaattgctgataagttagtgacatgaactcattttgaatcataagaggtgttttttttttctttcgattgtcctgacgagtttggtaccttcttttcaatcaatggtggagatggagatggccacacgagcacttcgagtggtgggttccgtctctcccaacccttcgccgatgataggcaaggagaagaacagagctgccaatgaacgacttgagaactcttttttatgtgattgtggatatctagagtttgagtgtggtaacaagactgcatttttatacctcttgatcattgtattttcttgcttaaatttaataatatgtcctcatttgtagtataaatattagaaatgtcattctagagccaaagga

SEQ ID NO: 46145 - DNA, 1495 bp, Zea Mays
ggacactccaagcctcctgctatgccgcaggccaacgttgatgctttccaggcatgtaaccacttccatgatatgtggtctcatggcagggttattgttcacacatttgcaagcaagcccaagcaccttaagcatttgctcttcatgccctgtgccgcagagtgttggatctaggacatcaaccagctttccctgagagctcatctccagcacccatgggacaagttcttttgatgttgtcaggaccggaacaggtcgcaagcctgtgagcagctcaagaaggacaactccgaagctgtatatatcacctctcagagtggccacccatccgtgcgcatactcaggggggatgtaacctagagtgccaaccaactctgttgtaacatgggttttgttgggaaggatcaaccttgacagtccaaagtctgcaacatttgacttcatatacggcgtgccgttttaccagcgtgggttgacagggaaaagttgcgtgtccggtgttttccaaagaagctgaatgccttcaggattttcaattgaagtcaaattgcagaggaacctgccgggagagcatagcagggtggctccgggactctctgctacctgcagccaggcagacatggagattggggtggaagcacgggacgacaggaggacgcagaagaagccacggggacccacggcaacggcatgcgcgtgtacgtccaaccccatgcgatcggtctcggtcagcgcgctctcttcgttgcacttgcacgactggatgaaaggatgcgcgtggagtggacaacgacggccttcccgtccaaccttacccatgcgtcggtctcggtcagcgcgctcacgggcactgcacgactggatctaacgtggaggtgtggccacacacacacctgcctagcccttgattcacaccggcctcctatgagtttttttattctttaatccattttaaacatactttttttggaaaccaatctctattaagataaactatcgcccacatgtttcagtcaaggcatccatacagagctactcattacttctatgcgaccgtttttaatgtaaacagttgttcatggtcattttattttatttttactattgcttgatatgtcttattaaattgctgataagttagtgacatgaactcattttgaatcataagaggtgttttttttttctttcgattgtcctgacgagtttggtaccttcttttcaatcaatggtggagatggagatggccacacgagcacttcgagtggtgggttccgtctctcccaacccttcgccgatgataggcaaggagaagaacagagctgccaatgaacgacttgagaactcttttttatgtgattgtggatatctagagtttgagtgtggtaacaagactgcatttttatacctcttgatcattgtattttcttgcttaaatttaataatatgtcctcatttgtagtataaatattagaaatgtcattctagagccaaagga

SEQ ID NO: 46146 - DNA, 4281 bp, Zea Mays
gtcttgccttgccttgcctgccgtgagagtttcggcctccaactaacccttccccgccagccatcgccactcgcccgcgacctcggccccgtccactgacaagcaccacaagtgaattctgcagtagctcctccctctccaagcttcaaccaccaccgccaaccgcgcgccgtgacctgcgtgggatcccgagcccattttcctcgcgccttcgtcgacgccctcaacgcaatgccggtcctgagcatcgatcctttgggcttgggcgcggaacaaggagccgccgtcccggaagcagcgcactcaggctgttcgatgaaataccaccgttgaatcggatcctcccttgggcgacaagggaggctgtcctgactcctgagggccaacgttgatgctttccaggcatgtaaccacttccatgatatgtggtctcatggcagggttattgttcacacatttgcaagcaagcccaagcaccttaagcatttgctcttcatgccctgtgccgcagagtgttggatctaggacatcaaccagctttccctgagagctcatctccagcacccatgggacaagttcttttgatgttgtcaggaccggaacaggtcgcaagcctgtgagcagctcaagaaggacaactccgaagctgtatatatcacctctcagagtggccacccatccgtgcgcatactcaggggggatgtaacctagagtgccaaccaactctgttgtaacatgggttttgttgggaaggatcaaccttgacagtccaaagtctgcaacgtaagcttttaattctttgtctagcaggatgttgctgcatttgatgtcacggtgcacaatctgaggtttgcagtcattatggatgtaagaaaggccacggcttgctccttgcgcaatccttagcctcgtcggccagtcaagaaatgtgctggcatcatcatccctgttgtgaagccaatcatctaggctgccattctccatgtaggagtatatgaggaatctcgagttcccctggatgcagtacccccacagtggcacaagatggtcgtgctgtgccatggacagtgcttcaacctctgcagtgaactccctttccatcaagcacatttcatcattgagcttcttgatagcaagcttgcagccatcaggtagttcagccttatagactagaccataaccaccacacccaatgatgttttccttgttgaagttatttgtggcttttacaatgtcagagaacgtgagcttgttttcatttccctttccttgtggcaccatgatcactccatgctccaagctggagttgaatgtgcttgtttcaagatatccgttgtcctcccttctaccttgggccgttaaacggtttatcctgatggagacaaggagacgccacagcaacaaaagaatggcaatcattgcaaagaacacaccaaatgcaattgcgagaatggccttcttatttcttcctcctgtggataccagaggcacatcggctgaatcgcatcgacgaccgatcataaagccgcacagcttcggattccctagaaagctggagttctgaaatgtaccaaattggccaccggttggaataggcccttccaggtcattgttagaaacgttgaatgtggaaaggaagtgcagattctccaatgcaactgggattttacccgtgagatcattgctggataaatcaagcaccagcaggtttgtgagattgcagatagatgtggggatcggtccggttaagctgttggagctgatatcaagtgaaaggaggcctttcaactgaccaatctctgggggaatctgacctgtgaatctgttgctgcttagatttagaactttaggaaaagcaatcggtatgcggtactgacgtgatggaccatcatagactggcagatcgaaaacgcttgcgtccaaatgagctgcagtcctctctgaagttagcattggtatactcactacttctttcggaatttcccctgtaaggctgttgtttgatatgtctaagtagaaaaggtactccagtgtgtggatccaggttggtatgggtccactgagtcgattgccatctaagaacaacatctccagatttactaacttcgatatccagagaggtatttctcctgacaggaggcagtttccgatgtccagaacctgaagattctcaaaaccgtagatcacggcatcatccggtatggtttcttcaaagaaattgattccaagaagaagcgtggtcaggttcttggagctcctcagtatctgaagcgcgtttgttatatttgaaaggctgttgtttgtaagcgacaggaacgagagggacttcaggttgcctagcccttctgataactgtccatggaacttattcgaagctagccgcagcgcagtcaggtttctacaggagtatatgctctccggaatcgtgccactgaagttattcagcatgagatctatggttcttagactgggcatgttgctgaaatcaacccgggagagttcgccactgaaaccgttgctcctaaggtctagagttatgagatccgtgcagttgctcagggctggtggcagctccccatacatgctgttatagtccagatgaagttcttgcaatctcttgagctgacctatggtatcaggtatcttgccgccgaaactgttgtctcctaggtcaaggacgaccagattggagagcttggctacatgtgcgccatcgactgttccatgcaaaaagttgctggagaaggagaggcgttccagcgatgtagcgttgaaaagctcacgggggagagtcccgctgaggttgttgtggccagccctgagtactctgagcatggagcagttcccaagccctgggggcacgccgccactgaacttgttgtagctgagttcgagcacggcgaaggacggcgctgtggcacagaactggtccgggatctgcccggtcaagctgttgttgctggcgttcagcgcgaccagactccgcatcctctcccacgccgtggacgtgagctgccccgtgaacgagttgctcgagatgttgagtacctcagtcggtgcctcgccagagcccggtgaggccggcgtcgtaagagagctccgcgaggaactggagcagggacgccctctccggctccccgcaggcgctggcgcaggactcccaggagatggagatgagcagcagcgcaagggcgagggcgcgaggccggtggaaggagatttgacttcatatacggcgtgccgttttaccagcgtgggttgacagggaaaagttgcgtgtccggtgttttccaaagaagctgaatgccttcaggattttcaattgaagtcaaattgcagaggaacctgccgggagagcatagcagggtggctccgggactctctgctacctgcagccaggcagacatggagattggggtggaagcacgggacgacaggaggacgcagaagaagccacggggacccacggcaacggcatgcgcgtgtacgtccaaccccatgcgatcggtctcggtcagcgcgctctcttcgttgcacttgcacgactggatgaaaggatgcgcgtggagtggacaacgacggccttcccgtccaaccttacccatgcgtcggtctcggtcagcgcgctcacgggcactgcacgactggatctaacgtggaggtgtggccacacacacacctgcctagcccttgattcacaccggcctcctatgagtttttttattctttaatccattttaaacatactttttttggaaaccaatctctattaagataaactatcgcccacatgtttcagtcaaggcatccatacagagctactcattacttctatgcgaccgtttttaatgtaaacagttgttcatggtcattttattttatttttactattgcttgatatgtcttattaaattgctgataagttagtgacatgaactcattttgaatcataagaggtgttttttttttctttcgattgtcctgacgagtttggtaccttcttttcaatcaatggtggagatggagatggccacacgagcacttcgagtggtgggttccgtctctcccaacccttcgccgatgataggcaaggagaagaacagagctgccaatgaacgacttgagaactcttttttatgtgattgtggatatctagagtttgagtgtggtaacaagactgcatttttatacctcttgatcattgtattttcttgcttaaatttaataatatgtcctcatttgtagtataaatattagaaatgtcattctagagccaaagga

SEQ ID NO: 46147 - DNA, 4374 bp, Zea Mays
ctcggtttggtagccctgcccagcctcccatggaaggaaggggtcaacgagcccaactcgtgcgagtccagcctcctaaagctcggctcgggtcgtcttgccttgccttgcctgccgtgagagtttcggcctccaactaacccttccccgccagccatcgccactcgcccgcgacctcggccccgtccactgacaagcaccacaagtgaattctgcagtagctcctccctctccaagcttcaaccaccaccgccaaccgcgcgccgtgacctgcgtgggatcccgagcccattttcctcgcgccttcgtcgacgccctcaacgcaatgccggtcctgagcatcgatcctttgggcttgggcgcggaacaaggagccgccgtcccggaagcagcgcactcaggctgttcgatgaaataccaccgttgaatcggatcctcccttgggcgacaagggaggctgtcctgactcctgaggccaacgttgatgctttccaggcatgtaaccacttccatgatatgtggtctcatggcagggttattgttcacacatttgcaagcaagcccaagcaccttaagcatttgctcttcatgccctgtgccgcagagtgttggatctaggacatcaaccagctttccctgagagctcatctccagcacccatgggacaagttcttttgatgttgtcaggaccggaacaggtcgcaagcctgtgagcagctcaagaaggacaactccgaagctgtatatatcacctctcagagtggccacccatccgtgcgcatactcaggggggatgtaacctagagtgccaaccaactctgttgtaacatgggttttgttgggaaggatcaaccttgacagtccaaagtctgcaacgtaagcttttaattctttgtctagcaggatgttgctgcatttgatgtcacggtgcacaatctgaggtttgcagtcattatggatgtaagaaaggccacggcttgctccttgcgcaatccttagcctcgtcggccagtcaagaaatgtgctggcatcatcatccctgttgtgaagccaatcatctaggctgccattctccatgtaggagtatatgaggaatctcgagttcccctggatgcagtacccccacagtggcacaagatggtcgtgctgtgccatggacagtgcttcaacctctgcagtgaactccctttccatcaagcacatttcatcattgagcttcttgatagcaagcttgcagccatcaggtagttcagccttatagactagaccataaccaccacacccaatgatgttttccttgttgaagttatttgtggcttttacaatgtcagagaacgtgagcttgttttcatttccctttccttgtggcaccatgatcactccatgctccaagctggagttgaatgtgcttgtttcaagatatccgttgtcctcccttctaccttgggccgttaaacggtttatcctgatggagacaaggagacgccacagcaacaaaagaatggcaatcattgcaaagaacacaccaaatgcaattgcgagaatggccttcttatttcttcctcctgtggataccagaggcacatcggctgaatcgcatcgacgaccgatcataaagccgcacagcttcggattccctagaaagctggagttctgaaatgtaccaaattggccaccggttggaataggcccttccaggtcattgttagaaacgttgaatgtggaaaggaagtgcagattctccaatgcaactgggattttacccgtgagatcattgctggataaatcaagcaccagcaggtttgtgagattgcagatagatgtggggatcggtccggttaagctgttggagctgatatcaagtgaaaggaggcctttcaactgaccaatctctgggggaatctgacctgtgaatctgttgctgcttagatttagaactttaggaaaagcaatcggtatgcggtactgacgtgatggaccatcatagactggcagatcgaaaacgcttgcgtccaaatgagctgcagtcctctctgaagttagcattggtatactcactacttctttcggaatttcccctgtaaggctgttgtttgatatgtctaagtagaaaaggtactccagtgtgtggatccaggttggtatgggtccactgagtcgattgccatctaagaacaacatctccagatttactaacttcgatatccagagaggtatttctcctgacaggaggcagtttccgatgtccagaacctgaagattctcaaaaccgtagatcacggcatcatccggtatggtttcttcaaagaaattgattccaagaagaagcgtggtcaggttcttggagctcctcagtatctgaagcgcgtttgttatatttgaaaggctgttgtttgtaagcgacaggaacgagagggacttcaggttgcctagcccttctgataactgtccatggaacttattcgaagctagccgcagcgcagtcaggtttctacaggagtatatgctctccggaatcgtgccactgaagttattcagcatgagatctatggttcttagactgggcatgttgctgaaatcaacccgggagagttcgccactgaaaccgttgctcctaaggtctagagttatgagatccgtgcagttgctcagggctggtggcagctccccatacatgctgttatagtccagatgaagttcttgcaatctcttgagctgacctatggtatcaggtatcttgccgccgaaactgttgtctcctaggtcaaggacgaccagattggagagcttggctacatgtgcgccatcgactgttccatgcaaaaagttgctggagaaggagaggcgttccagcgatgtagcgttgaaaagctcacgggggagagtcccgctgaggttgttgtggccagccctgagtactctgagcatggagcagttcccaagccctgggggcacgccgccactgaacttgttgtagctgagttcgagcacggcgaaggacggcgctgtggcacagaactggtccgggatctgcccggtcaagctgttgttgctggcgttcagcgcgaccagactccgcatcctctcccacgccgtggacgtgagctgccccgtgaacgagttgctcgagatgttgagtacctcagtcggtgcctcgccagagcccggtgaggccggcgtcgtaagagagctccgcgaggaactggagcagggacgccctctccggctccccgcaggcgctggcgcaggactcccaggagatggagatgagcagcagcgcaagggcgagggcgcgaggccggtggaaggagatttgacttcatatacggcgtgccgttttaccagcgtgggttgacagggaaaagttgcgtgtccggtgttttccaaagaagctgaatgccttcaggattttcaattgaagtcaaattgcagaggaacctgccgggagagcatagcagggtggctccgggactctctgctacctgcagccaggcagacatggagattggggtggaagcacgggacgacaggaggacgcagaagaagccacggggacccacggcaacggcatgcgcgtgtacgtccaaccccatgcgatcggtctcggtcagcgcgctctcttcgttgcacttgcacgactggatgaaaggatgcgcgtggagtggacaacgacggccttcccgtccaaccttacccatgcgtcggtctcggtcagcgcgctcacgggcactgcacgactggatctaacgtggaggtgtggccacacacacacctgcctagcccttgattcacaccggcctcctatgagtttttttattctttaatccattttaaacatactttttttggaaaccaatctctattaagataaactatcgcccacatgtttcagtcaaggcatccatacagagctactcattacttctatgcgaccgtttttaatgtaaacagttgttcatggtcattttattttatttttactattgcttgatatgtcttattaaattgctgataagttagtgacatgaactcattttgaatcataagaggtgttttttttttctttcgattgtcctgacgagtttggtaccttcttttcaatcaatggtggagatggagatggccacacgagcacttcgagtggtgggttccgtctctcccaacccttcgccgatgataggcaaggagaagaacagagctgccaatgaacgacttgagaactcttttttatgtgattgtggatatctagagtttgagtgtggtaacaagactgcatttttatacctcttgatcattgtattttcttgcttaaatttaataatatgtcctcatttgtagtataaatattagaaatgtcattctagagccaaagga

SEQ ID NO: 46148 - DNA, 1387 bp, Zea Mays
cctgtaacgagcatccattgtccctgacacggcagccctggccatggcccctgcaactacatatccatcgtcaacttcatcaagagtgaacctttcttgactagagctagacctgttgctgctgctccttgttccacttccaccactgcttctcctttcccctgttctcgtccttctccggactcctcctgggggggaagacctacagaacgctttgcagaagatacaggacgtccaccagcttgctctaaccccgtggtaaacctcgtagtcgtcgtctccagcttcgtcaccgtccccgtactcgatgacatagtctccaagaaccacaccgtttggaacctgcgcgtgtattgtgctcaggacatctaccacgtcggaagaccgctgcaggttctcccaatcggcccggcgagcagggtcgatcgcggaagggcgcgagtccggatgcttttgctgggtgtgcctctggagctcgtggaagctgccgacgtacgagcagcggctctcttcgcagcatcttctcttctggttaaggtgcgagcgagcctcgccgatgacgaaccaccccatcacatcgcctctacacagcgggcaagccgggcggttgttgtttgcattcgacgaagagatggtaatggtatggatgctgttgagaggagccacggtacgggaggaggctctggcgttggctggcactggcagtggcagtccatgagcgcctctgaacctctcgagacagttggagcgagtctggtcggtgtcgcatatgaaaggcctacagcccttctcatacgaggcgcacctgagcaacactgcattgtggggggaatcgagacagattgggcacgcgacatcctccacccagctttgatcgaactttatgtcctggtcgatggagctgggcctccttaccaccttcttcgttaccagattccctgaacccatgctggaattcctaggctggtgttcgtgtttggctttggcacaaccaaagctgtcttctcatggcaaacctgcatcgatcaagcggcaagaaaattagcctctcaacgctatagtttttagcatgtcgcatggatttccccatatttatcagtatcagacagatgcggttttgaatccacagcacgcctccaaactagaaattaaacagatttcgggaggtagggggggggggggggggggggggggggactcgataaatcctctgaagaacaatactgaatccaaatgtcaaaaccatcgacaggcatcgggttaagaaatcgactggtaaatacgaaacttcatcaaaatcctttactcccaaaaaccagcgctcccacgactatacaatccctgtaccactgaagaattacttagttgaaataaaaaaggaaaaaaa

SEQ ID NO: 46149 - DNA, 1682 bp, Zea Mays
ccccgatcattctcatccactcctctgctttcctcaaactcaaaggaaagcacgcgagcagcttcccttgcacgcctccctctcctctcgtccatccgttccccccttcccctgcttcccggctctccctccccccatccctgcacgccccttttcatgcgcgaggaggggccgtggggaccaccaccagcacctccatccgcgcgcatctcgcggtggtgctcctcctcctcctccccctgctcccggggcgggcgctctcctgttcctcctcctcctgctgctggtgccagggccgggagggcggcgcggaggtggcgctcatggggctcgccggggacgggtcggcggacaccgccaacctcagtaatagtgaaaatggtcggttcagttatggagttgcaagttctcccgggaaaagagcatcgatggaggacttctatgaggcaaggatagacgacgttgacggagagaaagttggaatgtttggtgtgtatgatggtcacggaggagtcagagcagctgagtacgttaagcagcatcttttcagcaatttaatcaaacacccaaagttcatcactgataccaaggccgctattgctgaaacttacaaccgcacagattcagaatttctgaaagctgatagcactcaaactcgagatgctggctcaactgcctcaacagctattattgtaggtgatcgtttgcttgttgcaaatgttggagattctagagctgttatttctaaaggaggacaggcaattgcggtttcaagggatcacaaacctgatcagacagatgagaggcaaagaattgaggatgcagggggctttgttatgtgggctgggacatggagagtgggtggcgttctcgctgtctctcgagcatttggtgataaactcttgaagccgtatgttgttgctgaccctgaaatcaaggaggaggtggtcgacagctcccttgaattcctcatccttgctagcgacggactctgggatgttgtcactaatgagctgttgccatggtcaagcctatccaggacccccaggaagcagcaaacaagcttctcgaagaagcttcccgaaggggaagctccgataacatcacagttatcatcgtccgcttcatagacggaactaccggtgagaaatcaggcgacgacaaagagaccaccaacgaccaacactcctagctgtctcgtgtagggatccatcgtgctgtgtgttcttctggctgttgtacctgatgctcagagtagacgctggctgctgctccgcaaggaaactgactcccccgaccgccgttcatgctcctggctggctggctcgctggccgcctcgacgggaacgctgccgtagaatgacgactggggctggtgttgttgttacagtatggtccttttttctttcttctttcccctttcatccattaagctctgtgatgtagctgcccgtgctgttgattcatgaaatcatgctagagattttttcctggcagtaagtgcgtgcctgtaaaactgtcgaacaatttggacgaaaattgtacactgcagtatgtaaccatcaaaatctccccccctacattcgccttgtggtgttctgctgtcatgcctcctgaaaattgctaccaagccgtggatggaggtgtgcaaggaatcggaaagctcgagattctacagagca

SEQ ID NO: 46150 - DNA, 1676 bp, Zea Mays
ccccgatcattctcatccactcctctgctttcctcaaactcaaaggaaagcacgcgagcagcttcccttgcacgcctccctctcctctcgtccatccgttccccccttcccctgcttcccggctctccctccccccatccctgcacgccccttttcatgcgcgaggaggggccgtggggaccaccaccagcacctccatccgcgcgcatctcgcggtggtgctcctcctcctcctccccctgctcccggggcgggcgctctcctgttcctcctcctcctgctgctggtgccagggccgggagggcggcgcggaggtggcgctcatggggctcgccggggacgggtcggcggacaccgccaacctcagtaatagtgaaaatggtcggttcagttatggagttgcaagttctcccgggaaaagagcatcgatggaggacttctatgaggcaaggatagacgacgttgacggagagaaagttggaatgtttggtgtgtatgatggtcacggaggagtcagagcagctgagtacgttaagcagcatcttttcagcaatttaatcaaacacccaaagttcatcactgataccaaggccgctattgctgaaacttacaaccgcacagattcagaatttctgaaagctgatagcactcaaactcgagatgctggctcaactgcctcaacagctattattgtaggtgatcgtttgcttgttgcaaatgttggagattctagagctgttatttctaaaggaggacaggcaattgcggtttcaagggatcacaaacctgatcagacagatgagaggcaaagaattgaggatgcagggggctttgttatgtgggctgagtgggtggcgttctcgctgtctctcgagcatttggtgataaactcttgaagccgtatgttgttgctgaccctgaaatcaaggaggaggtggtcgacagctcccttgaattcctcatccttgctagcgacggactctgggatgttgtcactaatgaggaagctgttgccatggtcaagcctatccaggacccccaggaagcagcaaacaagcttctcgaagaagcttcccgaaggggaagctccgataacatcacagttatcatcgtccgcttcatagacggaactaccggtgagaaatcaggcgacgacaaagagaccaccaacgaccaacactcctagctgtctcgtgtagggatccatcgtgctgtgtgttcttctggctgttgtacctgatgctcagagtagacgctggctgctgctccgcaaggaaactgactcccccgaccgccgttcatgctcctggctggctggctcgctggccgcctcgacgggaacgctgccgtagaatgacgactggggctggtgttgttgttacagtatggtccttttttctttcttctttcccctttcatccattaagctctgtgatgtagctgcccgtgctgttgattcatgaaatcatgctagagattttttcctggcagtaagtgcgtgcctgtaaaactgtcgaacaatttggacgaaaattgtacactgcagtatgtaaccatcaaaatctccccccctacattcgccttgtggtgttctgctgtcatgcctcctgaaaattgctaccaagccgtggatggaggtgtgcaaggaatcggaaagctcgagattctacagagca

SEQ ID NO: 46151 - DNA, 677 bp, Zea Mays
cttgtttgctgttgccatggtcaagcctatccaggacccccaggaagcagcaaacaagcttctcgaagaagcttcccgaaggggaagctccgataacatcacagttatcatcgtccgcttcatagacggaactaccggtgagaaatcaggcgacgacaaagagaccaccaacgaccaacactcctagctgtctcgtgtagggatccatcgtgctgtgtgttcttctggctgttgtacctgatgctcagagtagacgctggctgctgctccgcaaggaaactgactcccccgaccgccgttcatgctcctggctggctggctcgctggccgcctcgacgggaacgctgccgtagaatgacgactggggctggtgttgttgttacagtatggtccttttttctttcttctttcccctttcatccattaagctctgtgatgtagctgcccgtgctgttgattcatgaaatcatgctagagattttttcctggcagtaagtgcgtgcctgtaaaactgtcgaacaatttggacgaaaattgtacactgcagtatgtaaccatcaaaatctccccccctacattcgccttgtggtgttctgctgtcatgcctcctgaaaattgctaccaagccgtggatggaggtgtgcaaggaatcggaaagctcgagattctacagagca

SEQ ID NO: 46152 - DNA, 2442 bp, Zea Mays
tatttatataaaatcgctatatatatacatttatattttgatatttttgtatcttacttatatactttaaagtattatttttagtttatagatttagccaacgagaaattcaaaataagtaactacatttaaataaatatttaaaaagctatgggagtttttttaccaaaaatatataataattaaaaagaatataaaggcttctagttgctctcacgccaggtcacacgaaaaagaaaataaaagaaaagcagacaaaaatgttttaaatcgacaaaaatcagagaatgcgaggccggcaagtcggcaaccctaggtctgtggttgatccccaacacctcctgccctcctataaaagccgcccgcctccgtttctcgcctgcaccgcatcgcctcgccgctgttccccgcaacctatcgacccaatctcgtccgacccggcgcgtcgtcccctccagatctccgtcgccctctccaggtagcagaaactgttctgctgcagtctgacaaagtggagggcttaggagcttctgcttcttttatgtctgaacaatctttgctttatttgggattgttgggagagtactctcgtgcaactaggaaaaggcacaagatggcgctgcaaaacattggtgcttcaaacagggatgatgccttctacaggtacaagatgcccagaatgattaccaagatagaaggccgtggtaatggtatcaagacaaatgttgtgaacatggttgacatagcaaaagcacttgccaggccagcttcctacacaaccaagtactttggatgtgagcttggtgcacagtccaaatttgatgagaagacagggatttccttggttaacggggctcatgatactgcaaagctggctggtctccttgaggtattcatcaagaagtatgtccaatgttatgggtgtggaaatcctgagacagagattctcatctcaaagacccagatgatatcactgaaatgtgcagcctgtgggttcgtctcagatgttgatatgagggacaagctcacaaccttcattctgaaaaacccaccagaacagaagaagggcggaaaagacaagaaggccatgaggagagctgagaaggaacggctgaaggaaggtgaggctgctgatgaggagcagaagaaactgaagaaggatgcaaagaagaagggttccaaggattccactgctaagggtttgaagaagaaggctactactgctactggctctgatgaggatcactcatcctctccaactcgcagccatgatggtgacaaagcagctgcagatgatgatgacgatgatgtccagtggcagactgacacttcaattgaggctgcgaagcagcgcatgcaagagcagctgagtgcagcaactgctgaaatggtgatgctgtcgactgaggagactgagaagaagatgaaacaggcaacccacaaagatggaagcactaatggttcagcaaaagaaatccctaatgacaagcctgccgtcactaagcctagtccctatgaagaactgattggagacatcaaggctagcctaggaagtgctccgacccctacccagctcaaggctgtgctggcctcatcaacccttcctccccaggacgtgatgaatgctctcctggaggctctctttggtggtgtgggtaagggattcaccaaagaggttgtgaagaacaagaagtaccttgcagttgctgtgccagatgagggtgcccagacccttctggttcaggccattgaggcttttggtgggaagtgcaaccctgaggcgctgaaggaggttcccgttgtcctcaaagccctctacgatggagatatcctggacgaggaaaccattgtggactggtacaatgatgctgtcgcagctgggaaggactcccaggttgtcaagaatgccaagccgttcgtcgagtggctccagagtgccgagtctgatgaagagggtgacgacgagtgaagaggccacgctgctctactgctaatggccgaacttgataatattatttcaataagtttgttttgcttgcctggtgtcggtgtttaaaactgttaattgtcgtgtggcgcagcatactcttctgttgctgcatgtgtcgtcgtcagtttggttgtctgttggatgtcacagtttattatggattgctactatacaagtatttgtttcggatgtgttgtataacctttcgggatgtaacattttatgattgcactgttgcttctctaagggttgaggattatgaaatccaggtaaggctacggcgtagtcgtcttcatagcgggaacttgtagagtatgaccggtacttgtagagtacatgcagctcttactcgaaaaatgcggagtgcgagaacgcccaatcggaggagaggaggaagcggtctgttgggtgagaaaagaatagagtcaaaaaaaaaaatgataaaagatata

SEQ ID NO: 46153 - DNA, 387 bp, Zea Mays
ctcacaagtatctgcttgatctatcatactactcttccatagagagtaatatgatcttttgtggttttgttggtctaaggagaagaagtccacacggcaattgaagattgcagagctgctggaatacgtgttatggtgataacaggagataacaaagaaacagccgaggccatctgccatgagattggggtttttggccctcatgaagatatcagttcaaaaagcttcacagggaaggaattcatggcactttctgataaaaagatcttaagacaatagtgcggccttctcttctctagggcagaaccaaaacacaagcaaacttgtgaactttatgtgtgaatgcagtaagtcgttagactgctcaaagaagatggtgaagtggtt

SEQ ID NO: 46154 - DNA, 2945 bp, Zea Mays
gaaccctttcttcctcttcctcccccagtatactccaattcccacgtactcttcctccttgttctcctcctcctctctccctctctctcgccagaggatccaagaagtaccattgcagctcgctccattcgttcccaatcccaacacagcctctcagctgagctcagctcagctcagctcagggagttcccctgcttgtttttgctctagtgctcttggctgcctcagaaaaggactgcatgtgcagcagctgcaaagatagaatttctttatttttttcaccccaccttctcccaaggtgctgttggtgccccaggtggaggcaactggcgaagtgtgtgcgttctttgcttgatcaactaggttaagccatttcttgccccagtgttctccgattcatggttgtggaactagtccgagaatagctggagctgctcgttttcccttccaagaagacgaaggcggggggcgaggcgatcgtttgagcggtacctgttgcgcgcctgaggcggtgcaatcaatgtcgtcttcctgcataccgaccggcctgcggctggacctggacatggtgaaggcggcggcgtcgccggtgggcgcgcactcgtcgccgctgcgcccggcgcactactcgtcgccgtcgtcgacgctgtcgtcggaggcgtccaacgcctcgtcatcgtcggcgacgtcggtgtcgctcaagcgggctcgcgcgccgcggaagcggcccaaccaggcgtacaacgaggccgccgcgctgctcgcgtccatccacccctccgtgttccccgtgaacaagagccccaagacggcgccgccgcgcccgccgcagctctccgtgctggcggcggcgctcgacgcctcgcccgacctcctcccgccgctccccgtcctcgcggactccgcattcctgctccgggaccaggacacgccgtcgccgaagccgcggagcccgtccggcgccaagaactgcccgtcgccggcccccgtgagcagcgcgttccgggacttccgcgacccgccgtcgtcggcgagcctcgacgcggtcggcgccgacgagcttggcgagatcgacttcgacgacgacggcttcaacgccgactccatcctcgacgtcggtgacgccgcggccgggggcctcgacggcatcatgggcagcctcaccgtcgacgtcgagagcggcaccgccgccaggtccgatgactccatcctttccagctccggcatacacccctacctcaggaggctcatggtggtcggcctcgccggcaggttcgagctcggcctcgggtcccagcacggtgctcggcccagcctcaaccgcgcactgaagcggcgggacgacgacggcgcctggtggatgtggccggcagtgccggtaaaggacttgacgatcgcaccaccggcaccgccagcaccaccggcgccgaacgccgcagtgccgcaggccgccgccgccgccgcgccagaaaagaagaaaagcaagaagaagaaggtggtgaaggccatggcgaagggaaatgaggagcttcttcccaacgcgaagtgcaaggaggaagaagctgacgcctctgttgatgacgccgccgctaatggcgacggtgactccgacagtgcgccgacgaacgcaccaaaggccggtctggggctgaagctggacgccgacgaggttctcaaggcgtggtccgacaaagggtccatgtttgccgagggcagcgggccggagttgccgacgtcggccgccgaagtgcggagaacggagcaggcggcggtggggtcagggaagccagcgtgctgcggtacaaggagaagaggcgcacccggctcttctccaagaagatccggtaccaggtgcgcaaggtgaacgccgactgccggcctcggatgaagggaaggttcgttaggagcccgtctcttcttcggcaggccctggaggaagagacctagctagacaggcagtaatctttgctagccatttcttcttcttcttttttcccagcgcgtttttggccttttagttcctcattaactaagatgtgagtgagaattttcagtttttttttggtcggagttttgctctggagagaagaggatagggtaggatgcctttatagtggattgtcatggcatggtggtcagatagtttgtctcgggtttacagtgtgaggtaaaggaaggaaaaataaagtgatgttagaagaatacaaagcttcatacaggaagcagctcaggtgatgggttctgtttcgcatttactgctccgaaattaccgactgaatatctcattgctgtgaaacatccattgcaaagaagaagaagaagaaacggctacaaatcagcacggattatggtgtaataataagtaacagttgacaaaacctgctgtttttcatgcagcaggcctgcctctgctttggaaaggtaaattatgtgcagctgcaggcattagcaaaatacagtagaaatcagaccgaaaagagagagagagaaaaaaggcactagagatctcattgaaacttcatcagcacctgaaaaaccatgtgatttcacaaggcgcggatcaggtaataagaagtgcaaacagtaaataaaccaacacttggctggttgaagcaagttggggttcaagctatcagatattcagatggcatcttttattttctttctttttttttacttgcagtgcatcagacaaaagagcgaaatggatatggttgggcagaggcactgacctgctctgctcagctcagttatgcacacacatctgcgcaaaattccaaccgacggcatggacagcgcagatgaaatttgtcagatggcaattggatgatcctcctaaaagcatatacacgtagtagattaattctatttaaaacacatctagcagaaacaggagagataaactcgtcattactcacatctgtgattattccagcctagtcgag

SEQ ID NO: 46155 - DNA, 2937 bp, Zea Mays
gaaccctttcttcctcttcctcccccagtatactccaattcccacgtactcttcctccttgttctcctcctcctctctccctctctctcgccagaggatccaagaagtaccattgcagctcgctccattcgttcccaatcccaacacagcctctcagctgagctcagctcagctcagctcagggagttcccctgcttgtttttgctctagtgctcttggctgcctcagaaaaggactgcatgtgcagcagctgcaaagatagaatttctttatttttttcaccccaccttctcccaaggtgctgttggtgccccaggtggaggcaactggcgaagtgtgtgcgttctttgcttgatcaactaggttaagccatttcttgccccagtgttctccgattcatggttgtggaactagtccgagaatagctggagctgctcgttttcccttccaagaagacgaaggcggggggcgaggcgatcgtttgagcggtacctgttgcgcgcctgaggcggtgcaatcaatgtcgtcttcctgcataccgaccggcctgcggctggacctggacatggtgaaggcggcggcgtcgccggtgggcgcgcactcgtcgccgctgcgcccggcgcactactcgtcgccgtcgtcgacgctgtcgtcggaggcgtccaacgcctcgtcatcgtcggcgacgtcggtgtcgctcaagcgggctcgcgcgccgcggaagcggcccaaccaggcgtacaacgaggccgccgcgctgctcgcgtccatccacccctccgtgttccccgtgaacaagagccccaagacggcgccgccgcgcccgccgcagctctccgtgctggcggcggcgctcgacgcctcgcccgacctcctcccgccgctccccgtcctcgcggactccgcattcctgctccgggaccaggacacgccgtcgccgaagccgcggagcccgtccggcgccaagaactgcccgtcgccggcccccgtgagcagcgcgttccgggacttccgcgacccgccgtcgtcggcgagcctcgacgcggtcggcgccgacgagcttggcgagatcgacttcgacgacgacggcttcaacgccgactccatcctcgacgtcggtgacgccgcggccgggggcctcgacggcatcatgggcagcctcaccgtcgacgtcgagagcggcaccgccgccaggtccgatgactccatcctttccagctccggcatacacccctacctcaggaggctcatggtggtcggcctcgccggcaggttcgagctcggcctcgggtcccagcacggtgctcggcccagcctcaaccgcgcactgaagcggcgggacgacgacggcgcctggtggatgtggccggcagtgccggtaaaggacttgacgatcgcaccaccggcaccgccagcaccaccggcgccgaacgccgcagtgccgcaggccgccgccgccgccgcgccagaaaagaagaaaagcaagaagaagaaggtggtgaaggccatggcgaagggaaatgaggagcttcttcccaacgcgaagtgcaaggaggaagaagctgacgcctctgttgatgacgccgccgctaatggcgacggtgactccgacagtgcgccgacgaacgcaccaaaggccggtctggggctgaagctggacgccgacgaggttctcaaggcgtggtccgacaaagggtccatgtttgccgagggcagcgggccggagttgccgacgtcggccgccgaagtgcgggctaagcttgcagacatcgacctgtttccagagaacggagcaggcggcggtggggtcagggaagccagcgtgctgcggtacaaggagaagaggcgcacccggctcttctccaagaagatccggtaccagggaaggttcgttaggagcccgtctcttcttcggcaggccctggaggaagagacctagctagacaggcagtaatctttgctagccatttcttcttcttcttttttcccagcgcgtttttggccttttagttcctcattaactaagatgtgagtgagaattttcagtttttttttggtcggagttttgctctggagagaagaggatagggtaggatgcctttatagtggattgtcatggcatggtggtcagatagtttgtctcgggtttacagtgtgaggtaaaggaaggaaaaataaagtgatgttagaagaatacaaagcttcatacaggaagcagctcaggtgatgggttctgtttcgcatttactgctccgaaattaccgactgaatatctcattgctgtgaaacatccattgcaaagaagaagaagaagaaacggctacaaatcagcacggattatggtgtaataataagtaacagttgacaaaacctgctgtttttcatgcagcaggcctgcctctgctttggaaaggtaaattatgtgcagctgcaggcattagcaaaatacagtagaaatcagaccgaaaagagagagagagaaaaaaggcactagagatctcattgaaacttcatcagcacctgaaaaaccatgtgatttcacaaggcgcggatcaggtaataagaagtgcaaacagtaaataaaccaacacttggctggttgaagcaagttggggttcaagctatcagatattcagatggcatcttttattttctttctttttttttacttgcagtgcatcagacaaaagagcgaaatggatatggttgggcagaggcactgacctgctctgctcagctcagttatgcacacacatctgcgcaaaattccaaccgacggcatggacagcgcagatgaaatttgtcagatggcaattggatgatcctcctaaaagcatatacacgtagtagattaattctatttaaaacacatctagcagaaacaggagagataaactcgtcattactcacatctgtgattattccagcctagtcgag

SEQ ID NO: 46156 - DNA, 3215 bp, Zea Mays
cccttcttaataacaaagcacaacacaggcaaagaggatccgtcttcctccgtgctgcctcacttccgccgcacgcgaccggagaggcggctcactgcgtagcgccgcgagcccaaccctagccccgcccgcccgtccattccttccgtccttctggtggaccagctgccgagcccctccggcaggcatgtctccccccgagaaccccagccccgcggcgccggccgagccgtcgcagccgccgccaccggcggccgcggccaaggggaaggggaagaaggacgagaagaaggatgacgatctgtcggaggaggatctggcgctcaaggagcagctggagctctacgtcgtgcgggcgcaggacgcggatcccggcgtgcagaagctcgcgctcgagagcatgaggcaggagattcgctctgccacgagctcgatgacttcggttccaaagccactgaaattcctccgcccacactttggaactctcaagtcctatttcgaaacaatgcaagagtctgagctcaagaagtacatggctgacattctgtcagtgttagctttgacaatgtctgttgaaggggaaagagagagcctgaaataccgtttgttgggctctgaaggtgatattggttcatggggtcatgaatatgtgagaaatttggccggcgagattgcacaagaattccaaaagcgtcaggatgatgacttgcccattgatgtcctaatggagctagtgcagcaaattgtttcatttcacatgaagcataatgctgagcctgaagctgtggatcttcttatggaggtcgaagaccttgatttactagttgagcatgtagatgctacaaactacaaaagagcttgcttgtacctgactagttcatccaaatttctccctgcccctgatgatatgttggcacttgacatagcatataccatctacatgaagtttggagaccttgcaagcgctttgagaatttctctgcagcttgagaaatccacccagtatgtgaagcaagtctacacagcaactgatgaccttctgttgaagaaacaattctcatatctcattgcacgccatggtttggctatggagattgatgatgagatcgccgctgatgacaatgacaaggaggttttgcaagaaatagtaaataatactaagttgagtgagggatatcttactcttgctcgcgatattgaggtcatggagcctaaatccccagaggatatatacaaggtccatttgattgatggtcgtggtgccagctccagtcttgattctgcaagacagaatttagctgcaacatttgtaaatgcatttgtgaatgctgggtttggccaggacaagttgatgaccgctccatctgattcatccagcagcgggtcttccggaaattggttattcaagaacaaggaacatggaaaagctagtgcagcagctagtctgggaatgattctcttgtgggatactgattccgggctcgctcagcttgacaagtacttgcatagtaatgatactcatgttgttgctggagctttgctaggtattggaattgtcacttgtggggtgaagagtgattgtgatcctgcgtttgctattcttatggagtatattggcaaggatgactcaaacattcgtattggagcaatattgggtcttggaattgcatatgctggttcccagaaagaagagcttaaaatgcatctatctgctgtgttgggagactcccaatcacctcttgaggtcttggtcttctcggccattgccatgggattggtgtttgtcggttcttgcaatgaagagattgcacagtctattatatttgctttgatggagcgtagtgaggccgagttggcagaacccattatacggttgcttcctgttgcgcttggccttttatatcttggaaaacaggatagtgtggaggctaccgcagaggtctctaaaacatttgatgagaagatagggaagtactgtgatgtaacacttatgtcactggcatatgccgggacaggaaatgtgcttaaggttcagaaacttcttggcatttgctcacagcatcttgagaaaggtgaaacacaccaagggccagctgtcctagggattgctcttattgctatggctgaagaattaggagctgaaatggctgtacgttcacttgagcgtcttctgcagtatggcgagcagaatataagacgggcagttcctcttgctcttggtatactctgcatatctaatcccaaggtaaacgttatggacacactaagcagattgagtcatgatgcagacgccgatgtgtcgatggctgcaattatctcattgggtttgattggtgctggcacaaacaatgccagaatagctggcatgcttcgcaatctttcaagttattactacaaagaagctgctcatctgttttgtgatggcacttgggggccttgtaaccgttctccacgcgtgccttgatatgaagtccaccatcctagggaaataccactacatcctctacattattgtcctggcaatgcagcccaggatgcttttgactgtcgacgaggatctgaagcccctgtcagtacctgtccgcgtcgggcaagcggtcgacgtggttggtcaggcaggaaggccgaagacaatcaccggcttccagacacactccacgccggtcttgctcgcagcaggggagagagctgaactagcaactgaaaaatacattccactgaccccggtactagagggctttgtgattctgaagaagaacccagagtaccacgaggagtgaagacccagatagcatattggtgtttccgaggcccgtccagataggcagcctcgaatttgcgcggccttggatatctatcttctttcttgctcagcggcagcgccatcctggccctctccttcctgggtccgtgtccatgtttgattcttatcttaccggagctgtggctaactgaaagagctgtctttggttggcttaacttgtagtacgaccgtatttattaattactagaagacgtttatagagcgtactctgtacggtgaggtgatgacatggtggcatagcgtagtgtaattttctttttggcgttcgtctcggccaatcgatagcatacatagtccttgttttgacattgtgaatcatcattatccgttccctgtattttggggtttcgttctgtattttgtcagtagtggatgtggacataaaggtggc

SEQ ID NO: 46157 - DNA, 4497 bp, Zea Mays
ccgcagtcccgctagctagtccccttcccttctccaatctcgcatcgcaattcgcatcttccatttcgtccaccaaaccaaaccaaaccaaaccctactcgcccccgcccgcgccaccgccatggactcgatcgacgcggatctagcgcgcacgcaggaggagcggcgcaagatggaggaggcgctggcggccggcgcgcccatggccgtgtcctccgtcaccttcgacaccgacctctacggtggcgggggcgccgaccccaaccgcttcgcgggctacgacacctccatcccggcctccgaggatgacgccgcggaggacgacacggagttggccaaccccgcaccgcgccgcctcgcggcctacacgggccacgccatcgccgccgccgacctcccgcggtcagccgacgacgacgacgggctgcccaagaggtcccagcgcatcatcgaccgcgaggacgactaccgccgccgccgcctcaaccagatcatctcgccggagcgccatgacccgttcgctgccggggaggccaccccggatccctctgtgcggacctacgccgacgtcatgcgcgacgcggcgctgcagaagaagaaggaggacctgctcagggagattgccaagaagaagaaggaagaggaggagaaggagaaggagaggaaggctgccgcgcctgagcagccggctgctgcgacgaagcggcgtaacaggtgggatcagtcgcaggatggcgatgctgctgccggtggcaagaaggcaaagacatcctcggactgggatgcccccgatgcgactcctgggattgggcgttgggatgccacccctggacgtgttggagacgccacaccctccgtgagaaggaacagatgggatgagacaccgactccaggtaggatggctgatgctgatgcgacgcctgcagctggcggtgccacccctggggcaactccttctggggcttgggatgcgactccaaagcttcctggtggtgtcacgccaacacctggtaagaagcagaggtcaaggtgggatgagacgccagcgagtatggggagtgcaacccctggtggtcttggtgctgcaacacctgttggttatactcctggtccaacgccatttggtgcagagaaccttgccacaccaactcctagccagattgcccgtggaccgattactccggagcagtaccagctcatgcggtgggagcgggacattgaggagaggaacaggcctctcactgatgaggagctcgatgccatgttcccgcaggaaggatacaagattcttgagcccccggcttcctaccagcccatcaggaccccagcaaggaagctccttgcgacaccaacacctctggggacaccactttatgctattccagaggagaatcgtgggcagcattttgatgtgcctaaggagctgcctggtggattgcctctcatgaagccagaggattaccaatactttggaactttgctgaatgaagaagaggaggaggagctatcgccagaggagcagaaggagaggaaaatcatgaaactgttactcaaagtgaagaatggtacacctccacagcgtaaaacagcacttcggcaattgacagacaaagcccgggagttcggtgctggaccactgttcaacaaaatcctgcccttactcatgcagccaacactggaggaccaggagaggcatcttctggtgaaggtcattgatagggtactgtataagctggatgagctggtccgaccttttgtgcacaagattcttgtggttattgaaccactgttgattgatgaggactactatgctcgtgttgaaggcagggagatcatctcaaatcttagtaaagcagctgggcttgctactatgattgctgccatgcgaccggatattgataacattgatgagtatgtgagaaacaccactgctagggcattcagtgtagtggcttctgctttgggcatccctgcccttttaccattcctgaaggctgtctgtcagagtaagaagtcttggcaagctaggcacactggtatcaaaatcgtgcagcagattgctattctcatgggttgtgctgttttgccacatctcaagtcattagtcgagatcattgagcatggtctgagcgatgaaaaccagaaagtccggacaattactgccctttctcttgctgcacttgctgaggctgctgcaccatatggtatagaaagttttgataccgtattgaagcctttgtggaagggtatcagatctcaccgagggaaagtccttgctgccttcctcaaggccattggtttcatcatccctcttatggatgctctgtatgctagttactacacaaaggaggtgatgcaggtcctcattagggagttccaatctccagatgaagaaatgaagaagattgttctcaaggttgtgaaacagtgtgtcagtacagagggtgtggaggctgattatatccgaaatgacatccttccagatttcttcaagcacttctgggtgaggagaatggctctagatcggaggaactataagcagcttgtggaaactacagtggagatagcaaacaaggttggagttgctgatattgtggggaggattgttgaggatctgaaagatgagagcgagccttacagaagaatggtgatggaaacaattgagaaggtagtggccaacttgggtgcttcagatatcgatgctcgtcttgaggagctgcttattgatggtatcttgtatgctttccaagagcagactagtgatgatgcaaatgttatgcttaatggttttggagctgtggttaatgcacttggacaaagagttaagccttaccttcctcagatttgtggtaccatcaagtggcgattgaacaataagagtgcaaaagttaggcagcaagctgctgatctgatctccaggatagccattgtcatgaagcagtgccaggaggagcaactcatgggtcacttgggtgttgtgctgtatgagtacttaggagaagagtatcctgaggtgttgggttcaattcttggagccttgaaggctatcgtcaatgtcatcggtatgactaaaatgactcctccaatcaaggatcttcttcctcgtctaacccccatcttgaagaacaggcatgagaaggtccaagagaactgcattgatcttgttggtaggattgctgatcgtggagcagaatttgtgccagcaagggaatggatgaggatttgttttgagctgctcgagatgttgaaggctcataagaaaggtattaggagagccactgtgaatacatttggttatattgcaaaggctatagggccacaggatgtgctggccaccctgttgaataatttgaaggtgcaggagcggcagaaccgtgtctgcacaactgtagcaattgccatagttgctgaaacttgctcacctttcacagttttacctgcccttatgaatgagtaccgggtcccagagctcaatgtccaaaatggtgttctgaagtcactctctttcctctttgagtatattggtgagatgggtaaagattacatatatgctgtcactcccttacttgaagatgctttaatggatagagatctggttcaccggcagactgctgcatctgctgttaagcacatggctctaggtgttgctggcttgggttgtgaggatgctcttgttcatctgcttaactatgtttggcccaacatatttgagacatctccccacgttataaatgctgtcatggaggcaattgagggtatgagggttgcgctaggtgcagctgtgattttgaattattgcctgcaaggtctcttccatccagcaaggaaagtacgtgaagtttattggaagatatacaactctctgtacattggtgcacaggattcacttgttgcttcttatcctgccctggaagacgatggggataacatatttagtcgcccagagttggcaatgttcgtctgattaacgctggatgtccatgtatcttcatccatattgttgtgaagcttgaactgggattgttccttccgaagggggtgcacaatgtttaggaatttttattatggtttactgtaatgcaactctaaatcactgtcgtaatctgatctactaaccatttgggaaatgttctgttttcaggatagtccgtgttgaagctgctgaagagttccactggattgaggaccgatttcgaggctgcagaggaccctttaattaatccatcatgatcctatgttttgaaggagaaatgacgatcctagcgtgttgtcttaatattagacgttggcaccttctgtgttcttgaactttttgtgatagccgtggatgttgttgttatatataggtgtggacagtggaacattgcaaacccctctgtgaccttgattcctcgctgtattcctgagatggctgttattagcgtgccttgatcaaatagcttgtgtatctcggtttgcaaaggctactggtgataatccatctgttactcctatgtt

SEQ ID NO: 46158 - DNA, 4377 bp, Zea Mays
ccgcagtcccgctagctagtccccttcccttctccaatctcgcatcgcaattcgcatcttccatttcgtccaccaaaccaaaccaaaccaaaccctactcgcccccgcccgcgccaccgccatggactcgatcgacgcggatctagcgcgcacgcaggaggagcggcgcaagatggaggaggcgctggcggccggcgcgcccatggccgtgtcctccgtcaccttcgacaccgacctctacggtggcgggggcgccgaccccaaccgcttcgcgggctacgacacctccatcccggcctccgaggatgacgccgcggaggacgacacggagttggccaaccccgcaccgcgccgcctcgcggcctacacgggccacgccatcgccgccgccgacctcccgcggtcagccgacgacgacgacgggctgcccaagaggtcccagcgcatcatcgaccgcgaggacgactaccgccgccgccgcctcaaccagatcatctcgccggagcgccatgacccgttcgctgccggggaggccaccccggatccctctgtgcggacctacgccgacgtcatgcgcgacgcggcgctgcagaagaagaaggaggacctgctcagggagattgccaagaagaagaaggaagaggaggagaaggagaaggagaggaaggctgccgcgcctgagcagccggctgctgcgacgaagcggcgtaacaggtgggatcagtcgcaggatggcgatgctgctgccggtggcaagaaggcaaagacatcctcggactgggatgcccccgatgcgactcctgggattgggcgttgggatgccacccctggacgtgttggagacgccacaccctccgtgagaaggaacagatgggatgagacaccgactccaggtaggatggctgatgctgatgcgacgcctgcagctggcggtgccacccctggggcaactccttctggggcttgggatgcgactccaaagcttcctggtggtgtcacgccaacacctggtaagaagcagaggtcaaggtgggatgagacgccagcgagtatggggagtgcaacccctggtggtcttggtgctgcaacacctgttggttatactcctggtccaacgccatttggtgcagagaaccttgccacaccaactcctagccagattgcccgtggaccgattactccggagcagtaccagctcatgcggtgggagcgggacattgaggagaggaacaggcctctcactgatgaggagctcgatgccatgttcccgcaggaaggatacaagattcttgagcccccggcttcctaccagcccatcaggaccccagcaaggaagctccttgcgacaccaacacctctggggacaccactttatgctattccagaggagaatcgtgggcagcattttgatgtgcctaaggagctgcctggtggattgcctctcatgaagccagaggattaccaatactttggaactttgctgaatgaagaagaggaggaggagctatcgccagaggagcagaaggagaggaaaatcatgaaactgttactcaaagtgaagaatggtacacctccacagcgtaaaacagcacttcggcaattgacagacaaagcccgggagttcggtgctggaccactgttcaacaaaatcctgcccttactcatgcagccaacactggaggaccaggagaggcatcttctggtgaaggtcattgatagggtactgtataagctggatgagctggtccgaccttttgtgcacaagattcttgtggttattgaaccactgttgattgatgaggactactatgctcgtgttgaaggcagggagatcatctcaaatcttagtaaagcagctgggcttgctactatgattgctgccatgcgaccggatattgataacattgatgagtatgtgagaaacaccactgctagggcattcagtgtagtggcttctgctttgggcatccctgcccttttaccattcctgaaggctgtctgtcagagtaagaagtcttggcaagctaggcacactggtatcaaaatcgtgcagcagattgctattctcatgggttgtgctgttttgccacatctcaagtcattagtcgagatcattgagcatggtctgagcgatgaaaaccagaaagtccggacaattactgccctttctcttgctgcacttgctgaggctgctgcaccatatggtatagaaagttttgataccgtattgaagcctttgtggaagggtatcagatctcaccgagggaaagtccttgctgccttcctcaaggccattggtttcatcatccctcttatggatgctctgtatgctagttactacacaaaggaggtgatgcaggtcctcattagggagttccaatctccagatgaagaaatgaagaagattgttctcaaggttgtgaaacagtgtgtcagtacagagggtgtggaggctgattatatccgaaatgacatccttccagatttcttcaagcacttctgggtgaggagaatggctctagatcggaggaactataagcagcttgtggaaactacagtggagatagcaaacaaggttggagttgctgatattgtggggaggattgttgaggatctgaaagatgagagcgagccttacagaagaatggtgatggaaacaattgagaaggtagtggccaacttgggtgcttcagatatcgatgctcgtcttgaggagctgcttattgatggtatcttgtatgctttccaagagcagactagtgatgatgcaaatgttatgcttaatggttttggagctgtggttaatgcacttggacaaagagttaagccttaccttcctcagatttgtggtaccatcaagtggcgattgaacaataagagtgcaaaagttaggcagcaagctgctgatctgatctccaggatagccattgtcatgaagcagtgccaggaggagcaactcatgggtcacttgggtgttgtgctgtatgagtacttaggagaagagtatcctgaggtgttgggttcaattcttggagccttgaaggctatcgtcaatgtcatcggtatgactaaaatgactcctccaatcaaggatcttcttcctcgtctaacccccatcttgaagaacaggcatgagaaggtccaagagaactgcattgatcttgttggtaggattgctgatcgtggagcagaatttgtgccagcaagggaatggatgaggatttgttttgagctgctcgagatgttgaaggctcataagaaaggtattaggagagccactgtgaatacatttggttatattgcaaaggctatagggccacaggatgtgctggccaccctgttgaataatttgaaggtgcaggagcggcagaaccgtgtctgcacaactgtagcaattgccatagttgctgaaacttgctcacctttcacagttttacctgcccttatgaatgagtaccgggtcccagagctcaatgtccaaaatggtgttctgaagtcactctctttcctctttgagtatattggtgagatgggtaaagattacatatatgctgtcactcccttacttgaagatgctttaatggatagagatctggttcaccggcagactgctgcatctgctgttaagcacatggctctaggtgttgctggcttgggttgtgaggatgctcttgttcatctgcttaactatgtttggcccaacatatttgagacatctccccacgttataaatgctgtcatggaggcaattgagggtatgagggttgcgctaggtgcagctgtgattttgaattattgcctgcaaggtctcttccatccagcaaggaaagtacgtgaagtttattggaagatatacaactctctgtacattggtgcacaggattcacttgttgcttcttatcctgccctggaagacgatggggataacatatttagtcgcccagagttggcaatgttcgtctgattaacgctggatgtccatgtatcttcatccatattgttgtgaagcttgaactgggtggatagtccgtgttgaagctgctgaagagttccactggattgaggaccgatttcgaggctgcagaggaccctttaattaatccatcatgatcctatgttttgaaggagaaatgacgatcctagcgtgttgtcttaatattagacgttggcaccttctgtgttcttgaactttttgtgatagccgtggatgttgttgttatatataggtgtggacagtggaacattgcaaacccctctgtgaccttgattcctcgctgtattcctgagatggctgttattagcgtgccttgatcaaatagcttgtgtatctcggtttgcaaaggctactggtgataatccatctgttactcctatgtt

SEQ ID NO: 46159 - DNA, 3462 bp, Zea Mays
agaaaaacataaatacaaagacgtttagttccaaggctgcatcaaaaagatcttaaaagtcataagatttaataccaatgattacactatgcccttgagtttttgtaacaactaatcactatttctccaaacacattctacctaaattgttgtggcaagtagagtgccggatagattagattggtttagtttgttaggaaagagataagttagattgatttgattaggataaggaaagagataagttagactgatttggtcagttaggataaggaaagagataagttttggttaggatattcccttaggagtcaagtaagcctctctctatataaggagagatgtatcaatctaattgagcaaaaattaaggaaaacccgtccctcttgctcggtcgtgtgcaaggcccctactggcctccttgtgctccgtcaacactagccatcgtcatagatgttaaggcccatattatctatgtctatatacaagtcctaaggactaatcactaaccatactctctctaatccaaggttagtaacatggtaacgaagcagtttagggttcctgattcatttttgcggccgccagtcttccccaatctggttgccggtctttcctaatccggctgccagtctaccccaatctggacgatggtcttccaatcgatcgtcgtcgtcgttgctcccctgtctcggccgccgtcgtggccccaattcagccgcggtcgcggctccaaaccatctaggttgcatccacagccacctctgctgtcacttcgaccgcattaaccgtcaccgctgcttctccccatcgctgtcgccgtcaacatccataccgcctccgcggtcacctgctgccgctgcagccggatcccatccagattccagactgttgtcgcgcccgcatcggtcttcgtcgagtctccttccccaattcaggcgtgtcctcccctagtcgtggattcatcaagcacggttgcatctgctgccagcgcgaactcgttcacgagcatcttccccctctgcggactccttcaggcgcatcctcgccttagctgccagcgcgaactccttcacgagcattgttcctgctactcgtcggtggcgtcttctcccagtgtctgcaactgttgagggcttctgctgcttctttgggacagagaatcaggtttgagacaaggatcgggccatctcttcactagttctggttggttacttctaccgctgctactgttgttgcgtggtttaccttttcgtgcttgtcttatttacatcctttgtacgtcacgcatcaatcgaacaccatgtcagtcaatgctattgtggttaacatcattcttgacggtcagaactacctagagtgggctttctttgtttagactgcactatgtggtcatggtttgctttttcacttaactgaagatcctcctgccttgcgctgctgaaatcaaaagttggcagatcaatgatggcaaagtaatggatgccatggttaataacactaaaccgtccctaattacgagcatgtccaagttcacaactgctaaagctatttggtctcgtttgaaggacagttttattcaggacaatggtgttctcttacacactctcatgcaacaaattcatgttattaagcagaatgatatgtctattgatgagtgttgttctgttttttatcgtttgatgagttctttgatattcatggtatcggcctatacagctaatccatgtccggcacataagtttattgaaaaaatcttcacatataaatttgttatgggagtccaggctgaatatgactcttcgagcatggctactccacagttctgatactctcaccatggctaaggcattgtttgatctattagctgaagagactcgcctcaaatctatgttctctgctactggttctagctcttacagtgtgttggctgctgctcagaagtcaaggagttccactttagtaccttgtgcgcattacaagaacactcatcggcccgataattgttttattaaatttccaaagaagttggctaatttccgtgcacgaagagtcgttcgtggtcgtggtactggttctgcacatagaggttcagctgttattgcttctacttcacctgctacagccttatcatcgtcttgggctcttgactccagggatcttccatgtgacatctgatcagacatagtttcttccaaacctgtcaccgaagatggttctgttcgaactattgatggtactttatgccacatgaaactaactaattttcgtgcacgaagaatcgttcgtggtcgtggtactggttctgcacatagaggttcaattgttattgcttactaccttcacctgctacagccttatcatcgtcttgggctcttgactccggggatctcctttcatgtgacatctgatcagacatagtttcttccaaacctgtcaccgaagatggttctgttcgaactattgatggtactttatgccacataacccaccaaggatcgtcgcacaaaggttgtaactgggattggtcgtcaccgtagaactgcccctcgcctctacatcctagacaccttgtgccttcatccactacatcttcggcacgtgtgctttcggcagcatcggtttctgttgcttctttttcccaatagcatcattgtcttggtcatttgtgtggctctcgtgatctcgtctgtacactttaataaaatcgggttgtttaggtcatacaccttttgagtctagcttttattgtaagagttgtcatattggaaaacaaatacaacttccttattatactagtgattctcattctgctagaccttttgatcttgttcactctagtgcttggggtctagctccttttgtttcaaagggttgtaataaatattatgtcatttttgttgatgatcattcttgttatatttggatttatttcataaaacgtcaatctgagttgctccctattataagtcttttgctcgcatggttcacacccagttctttgcgctgattaaaattttcgatgtgattctggtggtgaatatttatctgatacttttcgacaattcctaacatcaaagagtacgctagctcagctttcttgccctggtgctcatgctcaaaacggggttgttgaacacaagcatcatcatgtcatagaaactactagcactcttttgatatcttaagaagggaacaataaatggaccaagaaaagaaaaaactgaaaaccagccatcgagaatttagccacagacaccctaagcctctgaacactattaaacctaagcatttgcaacttcagcgtgtcattgaagttgtccttcctgttagactatgtgtgtggaaggggacaccactattgggctgtcggcccattagggttagggttaagtctctatatatatgtgtaccccccttctttatgcaatacatcaatccaatagttccaagaaagaaaag

SEQ ID NO: 46160 - DNA, 1671 bp, Zea Mays
cttttgcaggcaacttttgtgcagccgcccccgctttcccccccgcgaaaacccagcagccgccgccgctgccgccgccgccgccgccacatccagtcctgccccggggccctgaaccctagccatggcgtcctccatactctccgactgctcctcggcccgcctcctccctctccgccgctcgctcctcccgccgcgggcgccccgcctccgctcctgccccgctctagctacccccaggcgcctactcgtcgccgccaggccccagctgcttccgcgcccgcgccacatggactcggtccccgcagccaccgcctcttccgccgactcagcaaccgtctcagccgatgcgcctgccaaactgattgacgggaagctcgtggcgaagcaagtgagagaagaaatagctgtccaagtcaccaggatgaaggatgtgatcggcattgtgcccggcctggctgtcatccttgttgggtcgaggaaggattctcagacttacgtgcggaacaagaagaaggcgtgcgaagcggtcggtataaagtcgtacgaggtcaacttgcctgaggacagctctgaggaggaggttatcaagcacatagcgagtttcaacagtgacccgtccgtgcatggcatcttggttcagttgcccttaccaaggcatatgaatgatgagaacattctgaatgcggtcagtattgaaaaggatgttgatggctttcatccgctgaacatcggacggcttgcaatgcaaggccgagatccgttctttgtaccttgcaccccgaaaggatgcatggagttgctacaccgacacggagttgaaattaaagggaagagagctgttgtgatcggacgaagcaatattgttggaacgcctgctgcattgttgttgcaaaaagcaaatgcaactgtcagcattgttcattcacaaaccaagaaccctgagcaaataacgagacaggcagatatagtcatcgcagctgttggagtcgccaacttggtcagaggggattggataaagcctggagctactattattgatgttggcatcaatccagttgatgacccagagagcccccgcgggtacaggctcgtcggggacgtctgctacgaggaagcctccaaggtcgccggagccatcacgccggtcccaggcggcgtcgggccgatgacgatcgcgatgcttctgtcgaacacgctcgagtcggctagacggatccacggattcaagtagccgccgcacccaccgtccgtccagcagagagaagcgaaggcgttggccctgccagccaagccagactagtgcaggggtcgtagggaaaaaataaataaataattaaataaattttgacgcagatgagatgggaaatcccagcttgacactttgttagggtattgtgcttgataaaaatatggcaccaggtgaatctgaggtgccagtaaatcttggatgaattctgccgcacgcatccgaccggatcagcagaaacttgtctccatgccatgatcagggtacctgtgttgtgagtgactgtggctgtgactggtgggtgccgttgtcgacgtgggataatgcctgatctgtccagttggatccccgatttcattagctgtctgtctgtctgtctgcccccgtttttttttttgtttttttttttttttgaaaaattg

SEQ ID NO: 46161 - DNA, 919 bp, Zea Mays
ctggaagtcacgccttccgtatggactatgttccgacagtgtttgataacttcagtgccaacgttgtggttgatggtaatactgtcaacctcggcctctgggacactgcaggtcaagaggattacaacagactgagaccactgagctatcgtggagctgatgtttttcttctggctttctcactgatcagtaaggccagctatgagaatgtttcgaagaagtggatacctgaactgaagcattatgcacctggtgtgccaattattctcgtagggacaaagcttgatcttcgagacgacaagcagttctttgtggaccatcctggtgctgtccctatcactactgctcagggagaggagctaagaaagcaaataggcgctccatactacatcgaatgcagctcgaagacccaactaaacgtgaagggcgtcttcgatgcggcgataaaggttgtgctgcagccgcctaaggcgaagaagaagaaaaaggtgcagaggggggcgtgctccattttgtgatctaatcatcggtagatgaagaaacaagggcgaaggtgccatggctttatcatcgtcgcgtcttgcttcagtggaacagcatgaatggtccccaccccctctaggtttactggcggctcggctgcagcgagttctcatctctttgtcgaggcattgagcgatatgtttgtttcattttcctccttcctgccttgtgattatctggtgtgtgtgtgtgtgtgactgacgaagtcgcggcgattaggtaactcgcttagaaggtatttcccgtgtttgagcaaaagaaagtatccctgttatctctgttccataagttagacatgatgtaatcgtactaagtttatttttacttatttcacttgaatggaaaagtatgcttcccatttatatgctcgttgtca

SEQ ID NO: 46162 - DNA, 1239 bp, Zea Mays
aagaaggaaatgatgcgcgcgcacaccgtggccacccctctctctctctctctccttccttccctccccacccaccaccgcgccgggccaccaccacccactctaccctcccctccccaccaccactagcacccaccgtcccggcgcggagaccgcttccctccctccgcctccgcaaccctctcccgcctcgcccgcgcctccctccatttgtccgcggctcccctccctcccgatcttaaccacccgccacccggcttcctctcccccttcttcctccctcaaaccagacgctcgcccccctttcctccaccgcctatcttcttcagacgaccagcaggaggactatgttccgacagtgtttgataacttcagtgccaacgttgtggttgatggtaatactgtcaacctcggcctctgggacactgcaggtcaagaggattacaacagactgagaccactgagctatcgtggagctgatgtttttcttctggctttctcactgatcagtaaggccagctatgagaatgtttcgaagaagtggatacctgaactgaagcattatgcacctggtgtgccaattattctcgtagggacaaagcttgatcttcgagacgacaagcagttctttgtggaccatcctggtgctgtccctatcactactgctcagggagaggagctaagaaagcaaataggcgctccatactacatcgaatgcagctcgaagacccaactaaacgtgaagggcgtcttcgatgcggcgataaaggttgtgctgcagccgcctaaggcgaagaagaagaaaaaggtgcagaggggggcgtgctccattttgtgatctaatcatcggtagatgaagaaacaagggcgaaggtgccatggctttatcatcgtcgcgtcttgcttcagtggaacagcatgaatggtccccaccccctctaggtttactggcggctcggctgcagcgagttctcatctctttgtcgaggcattgagcgatatgtttgtttcattttcctccttcctgccttgtgattatctggtgtgtgtgtgtgtgtgactgacgaagtcgcggcgattaggtaactcgcttagaaggtatttcccgtgtttgagcaaaagaaagtatccctgttatctctgttccataagttagacatgatgtaatcgtactaagtttatttttacttatttcacttgaatggaaaagtatgcttcccatttatatgctcgttgtca

SEQ ID NO: 46163 - DNA, 1521 bp, Zea Mays
cgaaaacccagcagccgccgccgctgccgccgccgccgccgccacatccagtcctgccccggggccctgaaccctagccatggcgtcctccatactctccgactgctcctcggcccgcctcctccctctccgccgctcgctcctcccgccgcgggcgccccgcctccgctcctgccccgctctagctacccccaggcgcctactcgtcgccgccaggccccagctgcttccgcgcccgcgccacatggactcggtccccgcagccaccgcctcttccgccgactcagccgatgcgcctgccaaactgattgacgggaagctcgtggcgaagcaagtgagagaagaaatagctgtccaagtcaccaggatgaaggatgtgatcggcattgtgcccggcctggctgtcatccttgttgggtcgaggaaggattctcagacttacgtgcggaacaagaagaaggcgtgcgaagcggtcggtataaagtcgtacgaggtcaacttgcctgaggacagctctgaggaggaggttatcaagcacatagcgagtttcaacagtgacccgtccgtgcatggcatcttggttcagttgcccttaccaaggcatatgaatgatgagaacattctgaatgcggtcagtattgaaaaggatgttgatggctttcatccgctgaacatcggacggcttgcaatgcaaggccgagatccgttctttgtaccttgcaccccgaaaggatgcatggagttgctacaccgacacggagttgaaattaaagggaagagagctgttgtgatcggacgaagcaatattgttggaacgcctgctgcattgttgttgcaaaaagcaaatgcaactgtcagcattgttcattcacaaaccaagaaccctgagcaaataacgagacaggcagatatagtcatcgcagctgttggagtcgccaacttggtcagaggggattggataaagcctggagctactattattgatgttggcatcaatccagttgatgacccagagagcccccgcgggtacaggctcgtcggggacgtctgctacgaggaagcctccaaggtcgccggagccatcacgccggtcccaggcggcgtcgggccgatgacgatcgcgatgcttctgtcgaacacgctcgagtcggctagacggatccacggattcaagtagccgccgcacccaccgtccgtccagcagagagaagcgaaggcgttggccctgccagccaagccagactagtgcaggggtcgtagggaaaaaataaataaataattaaataaattttgacgcagatgagatgggaaatcccagcttgacactttgttagggtattgtgcttgataaaaatatggcaccaggtgaatctgaggtgccagtaaatcttggatgaattctgccgcacgcatccgaccggatcagcagaaacttgtctccatgccatgatcagggtacctgtgttgtgagtgactgtggctgtgactggtgggtgccgttgtcgacgtgggataatgcct

SEQ ID NO: 46164 - DNA, 744 bp, Zea Mays
ttctcaagcactagctgagggccgtgatggttggcagaagtgggttaaaggttttggcaagtctatcaaaagaaagggcaaagggctcttcatgccgctccgcgtactgttgaccgggaagcttcatggacctgacataggtggcgctattgccctaatacacaaagccggcgtctgtggtgcggtgactccgcagtccaactttgttactctagatgagcggttcagggtcctgaaggagattgactgggactcgttggcgaaggagcaagaaactcctgctgaatctgccgttcccgccacttaataggctgtgacagtagcagcttagtaggccttcgtatctgtcagggatgatgttgcgcttgaagagttctgtccattttgccgtgtttttttttgtcaccgttcggttccatcgagtagaagttgagtagttaataaagcggattttgagcatagatcgatgctgtaatgggggtattgaattactagacgaggatgtctgtaatctaggcgcctgcagtcttttcttttgctgaatccaggtgttcataaacaatatcaaaattgtttggcactcggatgttactcgtgtttgacaaactcaggcccagtttgtttccttctgttctaaacatctaattatctgtttatgtattatcatagtctagctatctagattatataattcaccttataatatatgttgtttgtttgtctcttaacttatgtaagtttgat

SEQ ID NO: 46165 - DNA, 1493 bp, Zea Mays
ccgcccacgtctccagagccatctcggccgtccgatcctcccgcgccttcctcgtatgcgccgccctcctctatataaagtacgcgttggcacgaagcgagcagataagatcgagcagcgagagacgggcaggggagagggaaaaaaaaatctaaccctagcatccgcagcgctagggttcgggggttgcgatggcggcggcggcgagacagcgggggacggtgaagtggttcaacgacaccaagggcttcgggttcatctcccccgaggacggcagcgaagatctcttcgtgcaccagtcgtcgatcaagtcggagggcttccgctcgctcgcggagggcgaggaggtggagttttccgtctcggagggtgacgacggccgcactaaggccgtcgacgtgaccggccccgacggatccttcgtcaggggcggcggaggcggaggaggaggcggcggcggcggtggctgcttcaagtgtggcgagcctggccacatggccagggactgctccagcggcggcggcggctacggcggtggcggcggcggcggtggaggcggctgctacaactgcggccaggccggccacatggccagggactgccccagcggtggcggcggtggcggagggaggttcggcggcggcggcgggggtggcggcgaccgctcctgctacaactgcggcgaggccggccacatcgcccgcgactgccccacgtgaggtgtgtccgcgtccgtccgtccagccagatcagatcggatcgctccaccacctgctggtctgatggcgccgcccccttctagatctcgcttaaaaaacacccccctctcgctgtgtgtcggagtaccgctttagttttgccgatccgggcacgagtgcccgctgcctctttcctctcatgcgtaagaggatcccgtccgccgttttcagatttcgttcggttcgtagaagaactctcaagttaagttaagttatcatggtgtgtgcttggtcgttgttcgtcgtcgtcgttaaggttttaagagatgatttggtcctgtgttgccgaggggaagtcgaatctgcttttttctttttttgtggtttgttccaccagactgaggaaggagatgagatgattattctcccagattataatcctgcctgcttgtgcttgatttggttaccacatatgccttcaccactaccgctcgatttgatttgattatgcgcaacgcacgggcggttcttgtgatattgcggtgggtggttggttagatcacacggcccgttgtttggtacggaatggaattgctggcacctaccagtagtacacaactacacgtctgcctgttgttttgttgtggatggatgtggtgatgatgataatgatgatggcatgatgctttccagcgagtgatttgtttctgtgcaacacagagaaaggaggaaagcttttctgctgctgcggggcgtgggaatgtgggtgacactggtgtcagtcccccctgctgc

SEQ ID NO: 46166 - DNA, 1532 bp, Zea Mays
ccgcccacgtctccagagccatctcggccgtccgatcctcccgcgccttcctcgtatgcgccgccctcctctatataaagtacgcgttggcacgaagcgagcagataagatcgagcagcgagagacgggcaggggagagggaaaaaaaaatctaaccctagcatccgcagcgctagggttcgggggttgcgatggcggcggcggcgagacagcgggggacggtgaagtggttcaacgacaccaagggcttcgggttcatctcccccgaggacggcagcgaagatctcttcgtgcaccagtcgtcgatcaagtcggagggcttccgctcgctcgcggagggcgaggaggtggagttttccgtctcggagggtgacgacggccgcactaaggccgtcgacgtgaccggccccgacggatccttcgtcaggggcggcggaggcggaggaggaggcggcggcggctacggcggcggcggctacggaggaggaggcggcggcggcggtggctgcttcaagtgtggcgagcctggccacatggccagggactgctccagcggcggcggcggctacggcggtggcggcggcggcggtggaggcggctgctacaactgcggccaggccggccacatggccagggactgccccagcggtggcggcggtggcggagggaggttcggcggcggcggcgggggtggcggcgaccgctcctgctacaactgcggcgaggccggccacatcgcccgcgactgccccacgtgaggtgtgtccgcgtccgtccgtccagccagatcagatcggatcgctccaccacctgctggtctgatggcgccgcccccttctagatctcgcttaaaaaacacccccctctcgctgtgtgtcggagtaccgctttagttttgccgatccgggcacgagtgcccgctgcctctttcctctcatgcgtaagaggatcccgtccgccgttttcagatttcgttcggttcgtagaagaactctcaagttaagttaagttatcatggtgtgtgcttggtcgttgttcgtcgtcgtcgttaaggttttaagagatgatttggtcctgtgttgccgaggggaagtcgaatctgcttttttctttttttgtggtttgttccaccagactgaggaaggagatgagatgattattctcccagattataatcctgcctgcttgtgcttgatttggttaccacatatgccttcaccactaccgctcgatttgatttgattatgcgcaacgcacgggcggttcttgtgatattgcggtgggtggttggttagatcacacggcccgttgtttggtacggaatggaattgctggcacctaccagtagtacacaactacacgtctgcctgttgttttgttgtggatggatgtggtgatgatgataatgatgatggcatgatgctttccagcgagtgatttgtttctgtgcaacacagagaaaggaggaaagcttttctgctgctgcggggcgtgggaatgtgggtgacactggtgtcagtcccccctgctgc

SEQ ID NO: 46167 - DNA, 2285 bp, Zea Mays
gcgcggcagcccgcccaggaacacgcctgcgcctgcgcctccgcttcctcgaggccgcgtttcgccggctgcctgccggcggtccaccataacatgggcggcgggcggaagcggcggcggcgcgacggctcggagacgccgtcgatgcacccgcggaaccgctacgcagccgccgcgccggacttcgccgcgctggcggagctctacccgtcctttcgccccttcgtctccgtctccggcagcgggcgcgcgtccgttgatttcaccgacttctcctccaccagggagctcacgcgcgtgctcctcctccacgaccatggcgtcaactggtggattccagatggacagctctgcccgactgttccaaacaggtccaactacattcactggatcgaggatcttctctcctcagatctgatcccaccaatatccagctcgagtgagagagtgaagggcttcgacattggaacaggtgccaattgcatctatcctctccttggagcatctttactgggatggacctttgttggatctgatgtcactaatgttgctcttgaatgggctaagaagaatgtggagagcaatccacacctggcagagttaattgagatcagaaatgcaaatgcagcaccatctgaatctgaaactgttgtcagggaagctgccagcgagaagattttagagcctgcggaggatgtagctatgccaaagccacatatccttgtgggtgttgtaaaggagagtgagagctttgacttctgtatgtgcaatcctccattctttgagagcacagaggaagctggccttaacccaaaaacatcgtgtggtgggacagctgaagagatggtttgccctggtggcgagctggcatttattacacaaatcattgaagatagtgtttcccttaagaactctttcaggtggtttacatcgatgattggcagaaaggcaaacttaaagttattgatctcaaaggttcgtgaggctggggcatcagtcgtgaaaactactgaatttgtacaaggtcatacagctagatggggccttgcttggtcattcattgctccgaaaccaagaaaaatagtcctcggctccagtgctccagcaaaaaaacaccattcctttatgcttcaggggcttcgtcgtgaacatggtgcgttccaaattctgaaatcaactgaggctttctttctagcttctaatctatcatgcaaaacggattcgtcggtcttttcagtcgatgtcacattgtcagatgagcagattgaggctgcaatattgcatggggatgattatgccggttctctagaagatagctctgcaaagttacaatgcgttgtcaagggaatatcatttcgtattacagtgtttgaacaaattcctgggaccctcctaatcaaaggttcattattgaataaagcattatcagtcttctggatgccaaggaatgtgcaaaacgaaatcatgggacggcaacagcgtattagcttatagccaggagtcacaaacagagacgctaagcagtgatggaaactctacacttgcactgcagaaaccattgttgctcgcatgttttcttgatgtgcagtgacggcaagtttgtgggaataccagcatcatgtctggtgtgctggctgcttatctggatttggagaacgacttgacatgacaacaatgggggtcttgctttcaaggccccctgcagtggcacgcaccgtaaaccattccagtgacactgagtagatgacaaatgcagcatcagcggtctgtgcagaccggggtatctggtacactgaattgcctccagagttttttctttctttcttttttccattctttctttctttctttgctatggcacgggaactcagatgaaggctttgaacttcagtgaaccgcacagtgcatgaaactgctgctgcttcaaattaatgtgtttttggaacatgtttgtagcacaatgcctctggccggtagcagtggattatgtaactgtctctaacactgtcagctcaaggcaagttcatcatgaccagtcgattcggatcatcggtttagatgaaccgtgattcatgaagcttggtcatttagaggcgaaacgaaggggtcatcttaggcatctcagtgtcatgtttccacaagaagtttgatatttgttgcacgtcgcttttgttatccattttttctaggtgatgtatactacaggacacctatgtggtgatgcggaagcactggcaagtatccatcagcgtcccatgggttgttttgcttcggattagggcctg

SEQ ID NO: 46168 - DNA, 2384 bp, Zea Mays
gcgcggcagcccgcccaggaacacgcctgcgcctgcgcctccgcttcctcgaggccgcgtttcgccggctgcctgccggcggtccaccataacatgggcggcgggcggaagcggcggcggcgcgacggctcggagacgccgtcgatgcacccgcggaaccgctacgcagccgccgcgccggacttcgccgcgctggcggagctctacccgtcctttcgccccttcgtctccgtctccggcagcgggcgcgcgtccgttgatttcaccgacttctcctccaccagggagctcacgcgcgtgctcctcctccacgaccatggcgtcaactgatggacagctctgcccgactgttccaaacaggtccaactacattcactggatcgaggatcttctctcctcagatctgatcccaccaatatccagctcgagtgagagagtgaagggcttcgacattggaacaggtgccaattgcatctatcctctccttggagcatctttactgggatggacctttgttggatctgatgtcactaatgttgctcttgaatgggctaagaagaatgtggagagcaatccacacctggcagagttaattgagatcagaaatgcaaatgcagcaccatctgaatctgaaactgttgtcagggaagctgccagcgagaagattttagagcctgcggaggatgtagctatgccaaagccacatatccttgtgggtgttgtaaaggagagtgagagctttgacttctgtatgtgcaatcctccattctttgagagcacagaggaagctggccttaacccaaaaacatcgtgtggtgggacagctgaagagatggtttgccctggtggcgagctggcatttattacacaaatcattgaagatagtgtttcccttaagaactctttcaggtggtttacatcgatgattggcagaaaggcaaacttaaagttattgatctcaaaggttcgtgaggctggggcatcagtcgtgaaaactactgaatttgtacaaggtcatacagctagatggggccttgcttggtcattcattgctccgaaaccaagaaaaatagtcctcggctccagtgctccagcaaaaaaacaccattcctttatgcttcaggggcttcgtcgtgaacatggtgcgttccaaattctgaaatcaactgaggctttctttctagcttctaatctatcatgcaaaacggattcgtcggtcttttcagtcgatgtcacattgtcagatgagcagattgaggctgcaatattgcatggggatgattatgccggttctctagaagatagctctgcaaagttacaatgcgttgtcaagggaatatcatttcgtattacagtgtttgaacaaattcctgggaccctcctaatcaaaggttcattattgaataaagcattatcaggtaccttctcatcattgttttctcggttggaggatgcgttaagggcgaaatgtctcagtaaggcgcgatagatctttaattatgagctttgatgcctctgcacggataagtcttctggatgccaaggaatgtgcaaaacgaaatcatgggacggcaacagcgtattagcttatagccaggagtcacaaacagagacgctaagcagtgatggaaactctacacttgcactgcagaaaccattgttgctcgcatgttttcttgatgtgcagtgacggcaagtttgtgggaataccagcatcatgtctggtgtgctggctgcttatctggatttggagaacgacttgacatgacaacaatgggggtcttgctttcaaggccccctgcagtggcacgcaccgtaaaccattccagtgacactgagtagatgacaaatgcagcatcagcggtctgtgcagaccggggtatctggtacactgaattgcctccagagttttttctttctttcttttttccattctttctttctttctttgctatggcacgggaactcagatgaaggctttgaacttcagtgaaccgcacagtgcatgaaactgctgctgcttcaaattaatgtgtttttggaacatgtttgtagcacaatgcctctggccggtagcagtggattatgtaactgtctctaacactgtcagctcaaggcaagttcatcatgaccagtcgattcggatcatcggtttagatgaaccgtgattcatgaagcttggtcatttagaggcgaaacgaaggggtcatcttaggcatctcagtgtcatgtttccacaagaagtttgatatttgttgcacgtcgcttttgttatccattttttctaggtgatgtatactacaggacacctatgtggtgatgcggaagcactggcaagtatccatcagcgtcccatgggttgttttgcttcggattagggcctg

SEQ ID NO: 46169 - DNA, 2287 bp, Zea Mays
gcgcggcagcccgcccaggaacacgcctgcgcctgcgcctccgcttcctcgaggccgcgtttcgccggctgcctgccggcggtccaccataacatgggcggcgggcggaagcggcggcggcgcgacggctcggagacgccgtcgatgcacccgcggaaccgctacgcagccgccgcgccggacttcgccgcgctggcggagctctacccgtcctttcgccccttcgtctccgtctccggcagcgggcgcgcgtccgttgatttcaccgacttctcctccaccagggagctcacgcgcgtgctcctcctccacgaccatggcgtcaactggtggattccagatggacagctctgcccgactgttccaaacaggtccaactacattcactggatcgaggatcttctctcctcagatctgatcccaccaatatccagctcgagtgagagagtgaagggcttcgacattggaacaggtgccaattgcatctatcctctccttggagcatctttactgggatggacctttgttggatctgatgtcactaatgttgctcttgaatgggctaagaagaatgtggagagcaatccacacctggcagagttaattgagatcagaaatgcaaatgcagcaccatctgaatctgaaactgttgtcagggaagctgccagcgagaagattttagagcctgcggaggatgtagctatgccaaagccacatatccttgtgggtgttgtaaaggagagtgagagctttgacttctgtatgtgcaatcctccattctttgagagcacagaggaagctggccttaacccaaaaacatcgtgtggtgggacagctgaagagatggtttgccctggtggcgagctggcatttattacacaaatcattgaagatagtgtttcccttaagaactctttcaggtggtttacatcgatgattggcagaaaggcaaacttaaagttattgatctcaaaggttcgtgaggctggggcatcagtcgtgaaaactactgaatttgtacaaggtcatacagctagatggggccttgcttggtcattcattgctccgaaaccaagaaaaatagtcctcggctccagtgctccagcaaaaaaacaccattcctttatgcttcaggtcacattgtcagatgagcagattgaggctgcaatattgcatggggatgattatgccggttctctagaagatagctctgcaaagttacaatgcgttgtcaagggaatatcatttcgtattacagtgtttgaacaaattcctgggaccctcctaatcaaaggttcattattgaataaagcattatcaggtaccttctcatcattgttttctcggttggaggatgcgttaagggcgaaatgtctcagtaaggcgcgatagatctttaattatgagctttgatgcctctgcacggataagtcttctggatgccaaggaatgtgcaaaacgaaatcatgggacggcaacagcgtattagcttatagccaggagtcacaaacagagacgctaagcagtgatggaaactctacacttgcactgcagaaaccattgttgctcgcatgttttcttgatgtgcagtgacggcaagtttgtgggaataccagcatcatgtctggtgtgctggctgcttatctggatttggagaacgacttgacatgacaacaatgggggtcttgctttcaaggccccctgcagtggcacgcaccgtaaaccattccagtgacactgagtagatgacaaatgcagcatcagcggtctgtgcagaccggggtatctggtacactgaattgcctccagagttttttctttctttcttttttccattctttctttctttctttgctatggcacgggaactcagatgaaggctttgaacttcagtgaaccgcacagtgcatgaaactgctgctgcttcaaattaatgtgtttttggaacatgtttgtagcacaatgcctctggccggtagcagtggattatgtaactgtctctaacactgtcagctcaaggcaagttcatcatgaccagtcgattcggatcatcggtttagatgaaccgtgattcatgaagcttggtcatttagaggcgaaacgaaggggtcatcttaggcatctcagtgtcatgtttccacaagaagtttgatatttgttgcacgtcgcttttgttatccattttttctaggtgatgtatactacaggacacctatgtggtgatgcggaagcactggcaagtatccatcagcgtcccatgggttgttttgcttcggattagggcctg

SEQ ID NO: 46170 - DNA, 2297 bp, Zea Mays
agcagctttggcgccggataaatccagggcgagacgagaacaaggcaacaaggaaaaaagaagaaacaaacccccaaaaccgggggccggagcctccagctccagtccaccacactgcacgcgagaaccggaatacggagagaatggaaatctagcccggaccgtggaggagaggagaggagagggaaagggaaaggaagaggcggcgtgcccaccgcgagcaccagccaccagcaacagaaccacacggcgcgagtcagtccctgtggggagggccctgcgtgtcatcctcccggcggcaacccaatccccgcggccgcgtcgccacgtggcgccacggcgctcgcccgcccctattaaaccacacggcctgggagcggaggggagcccaggaagcaatccgctcgctcgcccgcccgcccgcccacatcgcgccgccgccgccgccgccgcccgattccgcagccaccgaacacagaccccccggcgcggcgcccgcccatggaggatgcggcggagaccgagcagctggaggtggccgccattctgtgcgacataagcaggctcgtgcggtcgcggcaccggcggcgccagcgcgcgcgcgccgcggccccgcacctggagatcctctcgtggggccggcgccggccgcggtcgatgccggaggtcaagccctccccggtcccggctcccgccgccgccgagaggggcggggccgctagccccgacaccccgctcgcgtacccggagagcggcggggacgacgcgccgccggaggacaagggcgaggtcgccgtagctcccccgctggaccagtgggcggaggaggaacagcagctcggcgaggcggcggcgagcttgtcccagccccgggagaacgcgcgtccactccaggtcgggaggaaggagcaggaggacctgccggcgctggtggtgctggacctgaacgagccggcgcgggcggcggccgacgacgagggggaacagcagccggcgcgcgcgcgggcgcgcgcgcgggcccgggctcgagcgcaggcgcgggcgcaggcagcggccgacgacgagggcgaggagcagcaggaggcccgggcgcgggcggccgcggccgccgccgccgcggagtggtaccggcaggcgcagctgcgggccgcgctgcagaaggcggccgtgtcggcgggcgcgcgccgccgccgcctcgagatcctgcgggccaaggcggcgtgcccgctggtgtcgagcaggagcagggtgcggcgcgccgccgggtgctgagggcgacgacgcgcgtccaagttttgaggcgtggcggccagcctagtcgaaccggactagctgtagcctgtagggtggcggcggcagcggcagcagcgtgctactgtagcagctaagtatttgttgcagtgctagtgattgtttttttcctttcttggataaagaatgttagaatgagattgggtgggagaacgagggggaagaggaacttcgaggtgttgttcatattcagcatgtgtagaagcttgatttgagttgagagtgaggcaatgagcgagttgacgtcgtctggatcgtcttggaacactgtcagattttgatcagcagcatatcagaagtaaccagatatcgatttaattgtatctaccatcgtattgccgttgcaaatttacaattacaggtagtagtgacgtagtactatctttttttaggggaaaaaattggacagtaccagaagcagatgtgatgtgatgtgacatgccaatattactgaaatattgttcgttataattgctatatatatataattattggcgaatagggaattcttttttgttataattgttatatgcaatcgtctcatacgttactataaactcaactccagccctatttcttgattctgagtgctcctgtattgctggtaccggaggctcggacacgacacgagctgatgcaactcattaacgtgcttgatgatgcaacatttgcagcatgaattttatctaaaattggaggaatatgtagtgaaaactcaacaaggagcaagaaatatggttcttgaaccatcggaatttgtggcatacaccctctctgatttagtgtagaatatattcactcatcatcttccgtgaaaagtaactctcgctcggacaaacaattctgttaccgacaaataagtccagatactcgaaacaagaggaaaagaaacgcagctttacaacacgacgacagtatgtttgggcctcggcggccgcagaaaacatacgcacactacaagataaaccgatcctgcaggctcggac

SEQ ID NO: 46171 - DNA, 2891 bp, Zea Mays
agcagctttggcgccggataaatccagggcgagacgagaacaaggcaacaaggaaaaaagaagaaacaaacccccaaaaccgggggccggagcctccagctccagtccaccacactgcacgcgagaaccggaatacggagagaatggaaatctagcccggaccgtggaggagaggagaggagagggaaagggaaaggaagaggcggcgtgcccaccgcgagcaccagccaccagcaacagaaccacacggcgcgagtcagtccctgtggggagggccctgcgtgtcatcctcccggcggcaacccaatccccgcggccgcgtcgccacgtggcgccacggcgctcgcccgcccctattaaaccacacggcctgggagcggaggggagcccaggaagcaatccgctcgctcgcccgcccgcccgcccacatcgcgccgccgccgccgccgccgcccgattccgcagccaccgaacacagaccccccggcgcggcgcccgcccatggaggatgcggcggagaccgagcagctggaggtggccgccattctgtgcgacataagcaggctcgtgcggtcgcggcaccggcggcgccagcgcgcgcgcgccgcggccccgcacctggagatcctctcgtggggccggcgccggccgcggtcgatgccggaggtcaagccctccccggtcccggctcccgccgccgccgagaggggcggggccgctagccccgacaccccgctcgcgtacccggagagcggcggggacgacgcgccgccggaggacaagggcgaggtcgccgtagctcccccgctggaccagtgggcggaggaggaacagcagctcggcgaggcggcggcgagcttgtcccagccccgggagaacgcgcgtccactccaggtcaacccttcctcctccccactccctttttcttcctcgggagtttagatcttcttctgttcgtgtctgtctcccgtcgattgcttgcttgtgtgcgactagcgacctcgagccattgattagagaaattcaagcggctgcggcgtccccggcacagcagagctcggtcggatgcggagctggaggagcacgagcgaacgagagccttggtgaagcagttgcactcgcaccgtcgcacgaggtgctgctggatggatcctttctctggcggtcgctttccgtcaatctggtagccgtggttgccagttgccacggagactgggtaccggggcggggcacggtttcttgctgctcaattcttgggcgctcggttttgctcgcttgcgtgtttgtgcggacggcaaccacaaccactccagctctgctcgcccatctcatccccacccccaacaaggatcgaaagctgcgacctttttttccccaaaaacaaaaccatctccgagaactcagccatccaacacgaaaaaaagaggaatttttagtttcgattccaatctcccgatcgccattgaccgtctatagtactcatgccaggtcgggaggaaggagcaggaggacctgccggcgctggtggtgctggacctgaacgagccggcgcgggcggcggccgacgacgagggggaacagcagccggcgcgcgcgcgggcgcgcgcgcgggcccgggctcgagcgcaggcgcgggcgcaggcagcggccgacgacgagggcgaggagcagcaggaggcccgggcgcgggcggccgcggccgccgccgccgcggagtggtaccggcaggcgcagctgcgggccgcgctgcagaaggcggccgtgtcggcgggcgcgcgccgccgccgcctcgagatcctgcgggccaaggcggcgtgcccgctggtgtcgagcaggagcagggtgcggcgcgccgccgggtgctgagggcgacgacgcgcgtccaagttttgaggcgtggcggccagcctagtcgaaccggactagctgtagcctgtagggtggcggcggcagcggcagcagcgtgctactgtagcagctaagtatttgttgcagtgctagtgattgtttttttcctttcttggataaagaatgttagaatgagattgggtgggagaacgagggggaagaggaacttcgaggtgttgttcatattcagcatgtgtagaagcttgatttgagttgagagtgaggcaatgagcgagttgacgtcgtctggatcgtcttggaacactgtcagattttgatcagcagcatatcagaagtaaccagatatcgatttaattgtatctaccatcgtattgccgttgcaaatttacaattacaggtagtagtgacgtagtactatctttttttaggggaaaaaattggacagtaccagaagcagatgtgatgtgatgtgacatgccaatattactgaaatattgttcgttataattgctatatatatataattattggcgaatagggaattcttttttgttataattgttatatgcaatcgtctcatacgttactataaactcaactccagccctatttcttgattctgagtgctcctgtattgctggtaccggaggctcggacacgacacgagctgatgcaactcattaacgtgcttgatgatgcaacatttgcagcatgaattttatctaaaattggaggaatatgtagtgaaaactcaacaaggagcaagaaatatggttcttgaaccatcggaatttgtggcatacaccctctctgatttagtgtagaatatattcactcatcatcttccgtgaaaagtaactctcgctcggacaaacaattctgttaccgacaaataagtccagatactcgaaacaagaggaaaagaaacgcagctttacaacacgacgacagtatgtttgggcctcggcggccgcagaaaacatacgcacactacaagataaaccgatcctgcaggctcggac

SEQ ID NO: 46172 - DNA, 3128 bp, Zea Mays
agcagctttggcgccggataaatccagggcgagacgagaacaaggcaacaaggaaaaaagaagaaacaaacccccaaaaccgggggccggagcctccagctccagtccaccacactgcacgcgagaaccggaatacggagagaatggaaatctagcccggaccgtggaggagaggagaggagagggaaagggaaaggaagaggcggcgtgcccaccgcgagcaccagccaccagcaacagaaccacacggcgcgagtcagtccctgtggggagggccctgcgtgtcatcctcccggcggcaacccaatccccgcggccgcgtcgccacgtggcgccacggcgctcgcccgcccctattaaaccacacggcctgggagcggaggggagcccaggaagcaatccgctcgctcgcccgcccgcccgcccacatcgcgccgccgccgccgccgccgcccgattccgcagccaccgaacacagaccccccggcgcggcgcccgcccatggaggatgcggcggagaccgagcagctggaggtggccgccattctgtgcgacataagcaggctcgtgcggtcgcggcaccggcggcgccagcgcgcgcgcgccgcggccccgcacctggagatcctctcgtggggccggcgccggccgcggtcgatgccggaggtcaagccctccccggtcccggctcccgccgccgccgagaggggcggggccgctagccccgacaccccgctcgcgtacccggagagcggcggggacgacgcgccgccggaggacaagggcgaggtcgccgtagctcccccgctggaccagtgggcggaggaggaacagcagctcggcgaggcggcggcgagcttgtcccagccccgggagaacgcgcgtccactccaggtcaacccttcctcctccccactccctttttcttcctcgggagtttagatcttcttctgttcgtgtctgtctcccgtcgattgcttgcttgtgtgcgactagcgacctcgagccattgattagagaaattcaagcggctgcggcgtccccggcacagcagagctcggtcggatgcggagctggaggagcacgagcgaacgagagccttggtgaagcagttgcactcgcaccgtcgcacgaggtgctgctggatggatcctttctctggcggtcgctttccgtcaatctggtagccgtggttgccagttgccacggagactgggtaccggggcggggcacggtttcttgctgctcaattcttgggcgctcggttttgctcgcttgcgtgtttgtgcggacggcaaccacaaccactccagctctgctcgcccatctcatccccacccccaacaaggatcgaaagctgcgacctttttttccccaaaaacaaaaccatctccgagaactcagccatccaacacgaaaaaaagaggaatttttagtttcgattccaatctcccgatcgccattgaccgtctatagtactcatgccaggtagagtataaaaccgttcccttctgtgattggtttgacgcctttcccgatttagtaggaggcctgacgccgtgtcgtcacgaacggctctcgatgcccatgcgtgcatacgtacgcacgcgcgcgctgagagaaagagagagagcagctgaaagggggagttgagtaatgagttccaatcatccaatctcgaactgacgccgcagcaccctggctacgtacgtgtcgctttcgcaggtcgggaggaaggagcaggaggacctgccggcgctggtggtgctggacctgaacgagccggcgcgggcggcggccgacgacgagggggaacagcagccggcgcgcgcgcgggcgcgcgcgcgggcccgggctcgagcgcaggcgcgggcgcaggcagcggccgacgacgagggcgaggagcagcaggaggcccgggcgcgggcggccgcggccgccgccgccgcggagtggtaccggcaggcgcagctgcgggccgcgctgcagaaggcggccgtgtcggcgggcgcgcgccgccgccgcctcgagatcctgcgggccaaggcggcgtgcccgctggtgtcgagcaggagcagggtgcggcgcgccgccgggtgctgagggcgacgacgcgcgtccaagttttgaggcgtggcggccagcctagtcgaaccggactagctgtagcctgtagggtggcggcggcagcggcagcagcgtgctactgtagcagctaagtatttgttgcagtgctagtgattgtttttttcctttcttggataaagaatgttagaatgagattgggtgggagaacgagggggaagaggaacttcgaggtgttgttcatattcagcatgtgtagaagcttgatttgagttgagagtgaggcaatgagcgagttgacgtcgtctggatcgtcttggaacactgtcagattttgatcagcagcatatcagaagtaaccagatatcgatttaattgtatctaccatcgtattgccgttgcaaatttacaattacaggtagtagtgacgtagtactatctttttttaggggaaaaaattggacagtaccagaagcagatgtgatgtgatgtgacatgccaatattactgaaatattgttcgttataattgctatatatatataattattggcgaatagggaattcttttttgttataattgttatatgcaatcgtctcatacgttactataaactcaactccagccctatttcttgattctgagtgctcctgtattgctggtaccggaggctcggacacgacacgagctgatgcaactcattaacgtgcttgatgatgcaacatttgcagcatgaattttatctaaaattggaggaatatgtagtgaaaactcaacaaggagcaagaaatatggttcttgaaccatcggaatttgtggcatacaccctctctgatttagtgtagaatatattcactcatcatcttccgtgaaaagtaactctcgctcggacaaacaattctgttaccgacaaataagtccagatactcgaaacaagaggaaaagaaacgcagctttacaacacgacgacagtatgtttgggcctcggcggccgcagaaaacatacgcacactacaagataaaccgatcctgcaggctcggac

SEQ ID NO: 46173 - DNA, 2938 bp, Zea Mays
agcagctttggcgccggataaatccagggcgagacgagaacaaggcaacaaggaaaaaagaagaaacaaacccccaaaaccgggggccggagcctccagctccagtccaccacactgcacgcgagaaccggaatacggagagaatggaaatctagcccggaccgtggaggagaggagaggagagggaaagggaaaggaagaggcggcgtgcccaccgcgagcaccagccaccagcaacagaaccacacggcgcgagtcagtccctgtggggagggccctgcgtgtcatcctcccggcggcaacccaatccccgcggccgcgtcgccacgtggcgccacggcgctcgcccgcccctattaaaccacacggcctgggagcggaggggagcccaggaagcaatccgctcgctcgcccgcccgcccgcccacatcgcgccgccgccgccgccgccgcccgattccgcagccaccgaacacagaccccccggcgcggcgcccgcccatggaggatgcggcggagaccgagcagctggaggtggccgccattctgtgcgacataagcaggctcgtgcggtcgcggcaccggcggcgccagcgcgcgcgcgccgcggccccgcacctggagatcctctcgtggggccggcgccggccgcggtcgatgccggaggtcaagccctccccggtcccggctcccgccgccgccgagaggggcggggccgctagccccgacaccccgctcgcgtacccggagagcggcggggacgacgcgccgccggaggacaagggcgaggtcgccgtagctcccccgctggaccagtggccggacgggcgacaattaatctgccttggatggactgctcgcagtgggcggaggaggaacagcagctcggcgaggcggcggcgagcttgtcccagccccgggagaacgcgcgtccactccaggtcaacccttcctcctccccactccctttttcttcctcgggagtttagatcttcttctgttcgtgtctgtctcccgtcgattgcttgcttgtgtgcgactagcgacctcgagccattgattagagaaattcaagcggctgcggcgtccccggcacagcagagctcggtcggatgcggagctggaggagcacgagcgaacgagagccttggtgaagcagttgcactcgcaccgtcgcacgaggtgctgctggatggatcctttctctggcggtcgctttccgtcaatctggtagccgtggttgccagttgccacggagactgggtaccggggcggggcacggtttcttgctgctcaattcttgggcgctcggttttgctcgcttgcgtgtttgtgcggacggcaaccacaaccactccagctctgctcgcccatctcatccccacccccaacaaggatcgaaagctgcgacctttttttccccaaaaacaaaaccatctccgagaactcagccatccaacacgaaaaaaagaggaatttttagtttcgattccaatctcccgatcgccattgaccgtctatagtactcatgccaggtcgggaggaaggagcaggaggacctgccggcgctggtggtgctggacctgaacgagccggcgcgggcggcggccgacgacgagggggaacagcagccggcgcgcgcgcgggcgcgcgcgcgggcccgggctcgagcgcaggcgcgggcgcaggcagcggccgacgacgagggcgaggagcagcaggaggcccgggcgcgggcggccgcggccgccgccgccgcggagtggtaccggcaggcgcagctgcgggccgcgctgcagaaggcggccgtgtcggcgggcgcgcgccgccgccgcctcgagatcctgcgggccaaggcggcgtgcccgctggtgtcgagcaggagcagggtgcggcgcgccgccgggtgctgagggcgacgacgcgcgtccaagttttgaggcgtggcggccagcctagtcgaaccggactagctgtagcctgtagggtggcggcggcagcggcagcagcgtgctactgtagcagctaagtatttgttgcagtgctagtgattgtttttttcctttcttggataaagaatgttagaatgagattgggtgggagaacgagggggaagaggaacttcgaggtgttgttcatattcagcatgtgtagaagcttgatttgagttgagagtgaggcaatgagcgagttgacgtcgtctggatcgtcttggaacactgtcagattttgatcagcagcatatcagaagtaaccagatatcgatttaattgtatctaccatcgtattgccgttgcaaatttacaattacaggtagtagtgacgtagtactatctttttttaggggaaaaaattggacagtaccagaagcagatgtgatgtgatgtgacatgccaatattactgaaatattgttcgttataattgctatatatatataattattggcgaatagggaattcttttttgttataattgttatatgcaatcgtctcatacgttactataaactcaactccagccctatttcttgattctgagtgctcctgtattgctggtaccggaggctcggacacgacacgagctgatgcaactcattaacgtgcttgatgatgcaacatttgcagcatgaattttatctaaaattggaggaatatgtagtgaaaactcaacaaggagcaagaaatatggttcttgaaccatcggaatttgtggcatacaccctctctgatttagtgtagaatatattcactcatcatcttccgtgaaaagtaactctcgctcggacaaacaattctgttaccgacaaataagtccagatactcgaaacaagaggaaaagaaacgcagctttacaacacgacgacagtatgtttgggcctcggcggccgcagaaaacatacgcacactacaagataaaccgatcctgcaggctcggac

SEQ ID NO: 46174 - DNA, 2583 bp, Zea Mays
gtcttttatagctgttgttcactttgccctaaggttggttagcatgtgcgtgtctatccgtccatgactgcctcatcctcctcctctcgccgcattccttctcctcgagtccgtgtagagtgagcgaagacgacaaagagagaaacgagagggttgtgacttgtgagatctttttgagctagtagctaggactagcaaggggtggacaggcctttctggatggcggatatggagaggagggaggagaaggagaagaagccggtggttgggcgtcagcaagcaaggagacacgcgatagggagtggctccaccccctcctcgcctcctcctccaacggctgccgctggatatagcgggaaggagatgagaggtgaggagcacagggcagcgctgagacagaagagactcaagaaggccaagtgcttcaagtggagaccaagcaagggcgacatggatagcaaagtggaggcggggggagcggggtctggtcaggtctgcgatgacgcagtgctctgctcgctgtctacggccagcttcagtggcctggttagctggcagagagtgaggacccttgggaaggtggctgaggggtgtgatgctgccgatcctccggttccaagaaaattaagatcagccataaacaagcgagctggtcgatttgcttctgcgccatcacgccatgtcaaaaagaggcgtcatctttcggctatcagtgctcaaatttcttctgtaggccaggaaacaagatccaatgggagctcgttatttacagaacaagaggaagcaattgctgatgttctgctgtccctatcccaagtaccctctcacagcgaggtcacagccgacaaggctgtagcagatagttcaaacacgaatgacgcttcaacttctttttcaaaaggacctactaaggaggatgaccaaacagccgagctgccaagcgctgctaacgagctggctagccaatgcgcctgcataaataaagcggtggagcaaagcaacatcgttccaaatgcagatccagtggctgctgctgcaaatcaatccagcaacagtatcccacttctgtcagcgaatgagcaaatgcaggacctttctatggaaactgctgtgaatttgccaagcccatctaaagacacctccattaacagcaccatgaactgcagtttgatgatagcaaatgtcaccctgcacagaagccagaggctcctctttggctggtaaattctgatcaatctgagggtgtgctgctacatgagagggagaaggccaagaacaacagtgcacaagaaattgtgcctctggtccagactctgttgccttgtaccccagctgggtacttagtaaaaccctcttcaagcaaactggcagctcccgccaatacaatttctgaatccgctaacttcaccacgcctggaaatcagaacaagcaccctgtgctcagaaacgtcggcgcgccgaaggcatggaagaggagcatcacccacgtgtacgtgagccacgtgatccagatgcacgtgaacaaggagaaggccgccgcgtcgtcgtcgttacaaagccaagcgaggcctgaggagaggctcctcgcccgctgccccaggcctccgaacggctcgtccaccacctcgcacaaggccgccgccgctcgggacgagaggttgtacacggtgcacttcgacgtgcgcgtcccggctcaccagccgcccgctggcatctgcgatgcgggcgccggccggcagaagattgtcagcggtagttcctggcaaaaccttccggccacatcggcggccgccgcggcagcggcgcagcatgtccggtacctacaccctcagatggctcggccaccggcgacgccgcgtgacgcgacgccgtactcgttcccgcacttcccttacagcagggggagtctgccacccgccgcggcgcttcagcagatgccacagtatgtgtgcggcccggcgtatggtctgcgccctgcgagctcgtcggcgatgatgatgaagcagctacaacaacccatgccgacgcagcagcagcaccagcagatgtggcagtaccatgtctcgcagtaccagccgaggccggacgctacgctttctccggcggcagcgtggcacggcatttcgtcgtcgctgcgaccgatgggcatgcttgctcccccggagatgccgtcgccgccacggccgccgcagatggagctcttctgcgcgccgtaccaaggtggcaggcagccgcagcagctgaggttgatgtagcctggcctcccttctgctgctgatcagctgattgatactactattcagacgcactaatttatagtggataatatacaacatcttagcagtaaaaaagtgggatgttgcaaaaaagaaaaagaaagtgagatgcataaggttgtgttttatttatacactcaggaaatagggttatgcatggtaccagaggggactaaactgcaggccactggtatttagagtgagagcccttttggcaatgcctacggctctaactctggctcatcttcaatctctatcaaacggttataaaaaaatagcttcttatcgaaagccctctaaaagagag

SEQ ID NO: 46175 - DNA, 2593 bp, Zea Mays
gtcttttatagctgttgttcactttgccctaaggttggttagcatgtgcgtgtctatccgtccatgactgcctcatcctcctcctctcgccgcattccttctcctcgagtccgtgtagagtgagcgaagacgacaaagagagaaacgagagggttgtgacttgtgagatctttttgagctagtagctaggactagcaaggggtggacaggcctttctggatggcggatatggagaggagggaggagaaggagaagaagccggtggttgggcgtcagcaagcaaggagacacgcgatagggagtggctccaccccctcctcgcctcctcctccaacggctgccgctggatatagcgggaaggagatgagaggtgaggagcacagggcagcgctgagacagaagagactcaagaaggccaagtgcttcaagtggagaccaagcaagggcgacatggatagcaaagtggaggcggggggagcggggtctggtcaggtctgcgatgacgcagtgctctgctcgctgtctacggccagcttcagtggcctggttagctggcagagagtgaggacccttgggaaggtggctgaggggtgtgatgctgccgatcctccggttccaagaaaattaagatcagccataaacaagcgagctggtcgatttgcttctgcgccatcacgccatgtcaaaaagaggcgtcatctttcggctatcagtgctcaaatttcttctgtaggccaggaaacaagatccaatgggagctcgttatttacagaacaagaggaagcaattgctgatgttctgctgtccctatcccaagtaccctctcacagcgaggtcacagccgacaaggctgtagcagatagttcaaacacgaatgacgcttcaacttctttttcaaaaggacctactaaggaggatgaccaaacagccgagctgccaagcgctgctaacgagctggctagccaatgcgcctgcataaataaagcggtggagcaaagcaacatcgttccaaatgcagatccagtggctgctgctgcaaatcaatccagcaacagtatcccacttctgtcagcgaatgagcaaatgcaggacctttctatggaaactgctgtgaatttgccaagcccatctaaagacacctccattaacagcgctcaaaagcaccatgaactgcagtttgatgatagcaaatgtcaccctgcacagaagccagaggctcctctttggctggtaaattctgatcaatctgagggtgtgctgctacatgagagggagaaggccaagaacaacagtgcacaagaaattgtgcctctggtccagactctgttgccttgtaccccagctgggtacttagtaaaaccctcttcaagcaaactggcagctcccgccaatacaatttctgaatccgctaacttcaccacgcctggaaatcagaacaagcaccctgtgctcagaaacgtcggcgcgccgaaggcatggaagaggagcatcacccacgtgtacgtgagccacgtgatccagatgcacgtgaacaaggagaaggccgccgcgtcgtcgtcgttacaaagccaagcgaggcctgaggagaggctcctcgcccgctgccccaggcctccgaacggctcgtccaccacctcgcacaaggccgccgccgctcgggacgagaggttgtacacggtgcacttcgacgtgcgcgtcccggctcaccagccgcccgctggcatctgcgatgcgggcgccggccggcagaagattgtcagcggtagttcctggcaaaaccttccggccacatcggcggccgccgcggcagcggcgcagcatgtccggtacctacaccctcagatggctcggccaccggcgacgccgcgtgacgcgacgccgtactcgttcccgcacttcccttacagcagggggagtctgccacccgccgcggcgcttcagcagatgccacagtatgtgtgcggcccggcgtatggtctgcgccctgcgagctcgtcggcgatgatgatgaagcagctacaacaacccatgccgacgcagcagcagcaccagcagatgtggcagtaccatgtctcgcagtaccagccgaggccggacgctacgctttctccggcggcagcgtggcacggcatttcgtcgtcgctgcgaccgatgggcatgcttgctcccccggagatgccgtcgccgccacggccgccgcagatggagctcttctgcgcgccgtaccaaggtggcaggcagccgcagcagctgaggttgatgtagcctggcctcccttctgctgctgatcagctgattgatactactattcagacgcactaatttatagtggataatatacaacatcttagcagtaaaaaagtgggatgttgcaaaaaagaaaaagaaagtgagatgcataaggttgtgttttatttatacactcaggaaatagggttatgcatggtaccagaggggactaaactgcaggccactggtatttagagtgagagcccttttggcaatgcctacggctctaactctggctcatcttcaatctctatcaaacggttataaaaaaatagcttcttatcgaaagccctctaaaagagag

SEQ ID NO: 46176 - DNA, 2380 bp, Zea Mays
cctgtctatcctatcttttttccctgccgcgctgcctatttactttgcttcgagcgtactgctgggctctggacgcttgtctccttgtcccagactcccagtcttttatagctgttgttcactttgccctaaggatatagcgggaaggagatgagaggtgaggagcacagggcagcgctgagacagaagagactcaagaaggccaagtgcttcaagtggagaccaagcaagggcgacatggatagcaaagtggaggcggggggagcggggtctggtcaggtctgcgatgacgcagtgctctgctcgctgtctacggccagcttcagtggcctggttagctggcagagagtgaggacccttgggaaggtggctgaggggtgtgatgctgccgatcctccggttccaagaaaattaagatcagccataaacaagcgagctggtcgatttgcttctgcgccatcacgccatgtcaaaaagaggcgtcatctttcggctatcagtgctcaaatttcttctgtaggccaggaaacaagatccaatgggagctcgttatttacagaacaagaggaagcaattgctgatgttctgctgtccctatcccaagtaccctctcacagcgaggtcacagccgacaaggctgtagcagatagttcaaacacgaatgacgcttcaacttctttttcaaaaggacctactaaggaggatgaccaaacagccgagctgccaagcgctgctaacgagctggctagccaatgcgcctgcataaataaagcggtggagcaaagcaacatcgttccaaatgcagatccagtggctgctgctgcaaatcaatccagcaacagtatcccacttctgtcagcgaatgagcaaatgcaggacctttctatggaaactgctgtgaatttgccaagcccatctaaagacacctccattaacagcgctcaaaagcaccatgaactgcagtttgatgatagcaaatgtcaccctgcacagaagccagaggctcctctttggctggtaaattctgatcaatctgagggtgtgctgctacatgagagggagaaggccaagaacaacagtgcacaagaaattgtgcctctggtccagactctgttgccttgtaccccagctgggtacttagtaaaaccctcttcaagcaaactggcagctcccgccaatacaatttctgaatccgctaacttcaccacgcctggaaatcagaacaagcaccctgtgctcagaaacgtcggcgcgccgaaggcatggaagaggagcatcacccacgtgtacgtgagccacgtgatccagatgcacgtgaacaaggagaaggccgccgcgtcgtcgtcgttacaaagccaagcgaggcctgaggagaggctcctcgcccgctgccccaggcctccgaacggctcgtccaccacctcgcacaaggccgccgccgctcgggacgagaggttgtacacggtgcacttcgacgtgcgcgtcccggctcaccagccgcccgctggcatctgcgatgcgggcgccggccggcagaagattgtcagcggtagttcctggcaaaaccttccggccacatcggcggccgccgcggcagcggcgcagcatgtccggtacctacaccctcagatggctcggccaccggcgacgccgcgtgacgcgacgccgtactcgttcccgcacttcccttacagcagggggagtctgccacccgccgcggcgcttcagcagatgccacagtatgtgtgcggcccggcgtatggtctgcgccctgcgagctcgtcggcgatgatgatgaagcagctacaacaacccatgccgacgcagcagcagcaccagcagatgtggcagtaccatgtctcgcagtaccagccgaggccggacgctacgctttctccggcggcagcgtggcacggcatttcgtcgtcgctgcgaccgatgggcatgcttgctcccccggagatgccgtcgccgccacggccgccgcagatggagctcttctgcgcgccgtaccaaggtggcaggcagccgcagcagctgaggttgatgtagcctggcctcccttctgctgctgatcagctgattgatactactattcagacgcactaatttatagtggataatatacaacatcttagcagtaaaaaagtgggatgttgcaaaaaagaaaaagaaagtgagatgcataaggttgtgttttatttatacactcaggaaatagggttatgcatggtaccagaggggactaaactgcaggccactggtatttagagtgagagcccttttggcaatgcctacggctctaactctggctcatcttcaatctctatcaaacggttataaaaaaatagcttcttatcgaaagccctctaaaagagag

SEQ ID NO: 46177 - DNA, 6611 bp, Zea Mays
aaactgctggaatatacttacaccgggaagaaggcgaaggccgtcgcgctctcggcggcggcggcggcggcggcagcggcgatgcttgcgttcgagcagcaggtgttggcggatctggtggaagatccgaacggaggtctggtggtgctctcctcgggtctccctctcgcttccctagccgctaccctcctcctccatctccaccagacccccggcaacgcggctggaggaggatgtctcctcgtcctctccgccaccgataccctcaaggcccggatccggcgccgcctccaagacaagctgcaggttcacgacgtgccccctgacctcgccgcgcagcagcgcgccaccctttacgcctctggcgctgctctcttcctctctccccgcgccctcgccgccgacctcctcacctcccgcctcctcccctcccgcgtccaagccctactcctcctctccgcccaccgctccaccgatacctcctccgatgccttcatctgccgcctcctccgtcaacgcaatcttctccccgtttacgccttctccgattgcccccatgccatggtcgccggtttctccaaggccgagcgtaccatgaagagcctctacgtccgccgtctccacctctggccccgcttccacgttctcgccgcagccgacctggaacgcgccccgcctgacgtcgtagacgtgcgcgttcccatgacgccgcccatgaggggtatccaggctgctgtcctcgctaccatggacgcttgtctcaaggaacttaggcgcaccaacaaggtggatgttgaggacctcaccgtcgacaagggcctcttcaagtccttcgatgagatcgtccggaggcagctcgaccccatctggcacactcttgggaagaagacaaagcagcttgtggctgacctcaggacgctacgcaagctgcttgattacctcgtcaggtatgacgccgttacatacttgaagtaccttgacacattgagagtatcagaaggtgtcagatcagtttggatacttgctgactcaagccataggatatttgagcttgcaaaaaggcgcgtttaccaggcagtgagaacagatggtgttaatgttagcatagataataagggcacaccaacaaagaagaggaaagtggcacataattctaccaagaaaggaaaagtaactgaaaatgaagattccactgtaggtcccaacactcagaaggctaatactgatgtgggcattgtattggaagaggttttggaggaggcaccgaaatggaaagtgttatgggaattgttgcaagagatagcagaacaacggatgaagagcagtgccgggaatgtgcatgatgaggacaaaaatgatgaaagtggcatagttttggtatcatgtaaagatgaacgcacatgcttgcagctgcaggaatgcatattaaaaggcccctgtcaggttatgcgagaagagtgggagaagtatctgattggaaaagctgagctgcatggattgaataaggacaagagaaaatctgagcaaccaaaaggtgttggtgtcctggatggtgaagttcaaatgggatctagtgagagtgtgtgtccagttagcattagcaaactcgaaactaatgccttacttgccgctgcctctgaattaagaaatatatcaaatgaagcagatgtcaagagtagctcaaatagcagctgcagcaaggctgggggagcaaaggggaaaccaaagaaaaccacttcaaagagacaaggcagcaatcgaaaaaataaaagtaaggagggaaatgacaatagccaaggtactggtctggattctgaaggtcaatcaggaaaagcagatgtacaggctgagattgttgcttctaagatgtccgcatatgatgcttccatgtcagcctctacttctaatgttaaatttaaccattcatctgctttcggaaacttggcaaacgccaagccactacctcctgtgcagtttcatgctctagacagtgaccaccaggttcttgatgtatggaagccatctgtcattattgtttatcatccagatattacctttgtaagagaaattgaagtatacaaggcagaaaactcatcaaggaagttaaaagtttacttccttttttatgaagattccactgaggtgcaaaaatatgagtccagcattcgacgggaaaatgaagcatttgaatctttgatcagacagaagtccctgatgatgatacctgttgatcaggatggccgttgcattggaccaactgttgcaaatgaaccagagcctcctttatgtcagaactcaattacaagaaaggcaggtggtaaaaaggcgcccgagaaggagatgcaggttattgtagacatgagagagttcatgagcagccttccgaatgtattacatcaaaaaggtatccgaatcgtaccggtcacccttgaagttggtgactatgtgctctctcctttgatctgtgttgaacggaaaagtattgcggacttgttccaaagctttgcttctggtcgtctgtacaatcaggttgagacaatggcacgttactacaagatcccggttctcctcatcgagttctcacaagataagagcttttcctttcagtctgcaaatgagattggtgatgatgtctctccgaccaacattatctcgaagctttctctgctagtgctgcattttcctcggcttcgcataatctggtcacgcagcttgcatgctacagcagaaatatttatgtcactgaaaacaaaccaggatgaacctgatgagaaaaaagcaacaagagttggcgtgccatccgaggatggtatcgtggaggatgatgtgaggtctgaaaattacaacacatcagccattgagttcttaagaaggcttcctggggtgacggattctaactaccgagcaatcatggatggatgcaatagcttggccgagctggccctgcttccagtggaaaggttggcggagctaatgggtggtcagaaagctgcgcggacgctcaaggagtttctcgatgccaagtgcccaaccatgttgtagccagagtgacgctgtactgtttgtattgtgtcctgtgggatacaaatacttcagttgatgtgccttatatatatatattaaaaaaaacaaatgttgtaccaatgccaatgcctgtgcatgttgttgtctggaatcgatagacacatgtgctgtgcatggtaaattttgcagaatcgtgtgcttgtgggccaaagcaaacatgcagaaaatgagcagcagattatgggctgggcaggctctaacccagcccaggaactccccctctcccccacgttcttctttgttgttgttgggcaagtagtgcggctgtttgagtctacgctacagaatgactatctaaatcacacctcctgtggagcctttcatgctcagatggaatcttgggaaagaattttgtactggatggcagttttgtgggagcgtgggttcagtcatgagaatcctcaagtgagatgcctggttatgcaatcctttttggatattgcatgggaacgctacaaggattgcactcagataattccaaggggttttgtgcttggtcctctgatacgtggtttgaatgatgtggttcatcataaggattttgttatgaatagacagcttgttaacttgaagtctagtgcagtttgtgaacaggttataaaagttgcaacatcactgataaatgccactgaaattccacttaacccgcttctgcatttcattgccacaattcctcgagagttctctgattatattggaccattgagagtagtagttcaaaaatggtttgttcagaaggaagaatgttctcctggtgacactttgttgagtaagctgattgatttctctgccaccttcgtaagtcaaaaacggaatgaaggttcgaatgtttttgatgacgaggatgtggatgcatgggaagctgaagcaaggtgggctagaacccttcttgtaacctcggaggaggaacatttgaaacgaatcttcaggtttttggaggcatatggctacaagctctctgagcaatgtcccagtggagatttcatacccataaaaaattttatcattgttttaagcttcattgaggaacttgaggaaaaaaaaatcccacgtggtcagtcaaaggttagtattaaacgagaggtccagattggtcttgtgcttgagttcatatgctggctgttgagaagctgcatgcttgcaacaccacaccacataaatttggagggcctgcggacgccccgatgcatatcactcacatgcattcttgctcctgctaggaggatcggaaccagcatgtctgaacgatgcatcttctccttctccactctggcttcgccggcggcagatggaaacaacagccggcgaggaggccgccaccgtggcgattccatcgtcacccgctcttcggcggcggccaacacgctgccgctgctccgcaatgacgacttcgacctccgggagggcctgacggacgtacgaaatgttctccgtcaacgtcagaagagtggctgcagcagcagggacatgatggtcaccgtcgacaacctcaagcgcctctgcatcgaccactacttccaggaagagatcgagcgcgccatgggtgcctgctgcatgggtctcatccacagcgacgatctcttcgacgcgacgcttgccttcaggctcctcagagaggccggccatggcgtttcagcagatgatgttttacggaggttcactgacgacgacgacagcggcggcgagttcaggctcgatctcagcaaggacatcagagggctgctgagcctgcacgacatgtctcacctggacatgggaggggaggagttgctctgcaaggcaagagtgttctcgcgccaccacctcgcttctgccgtcaggtacctggagccaagccttggcgagtacgtgagacagtcgcttgaccacccctaccacctgagcctcacgcagtacaaggctcggcaccacctcgcctacctccagagcctgcccgtcagagacaccgcgctcgagagactagtggctgcagagttccagctcaacagatcgctgcatcagaaagaaatgcaggccattaaaagatggtggatggagctaggattggttcaagaaatacctgtggtgagggaccaggtgctgaaatggtacatgtggtccatgacagcgctccaaggacgttccttctccagacaccgggttcagatcaccaagatcatcgcgctcgtctatgtcgtcgacgacatatttgaccttgttgccacactagatgagctctccctctttgcagaggcagtcaaaatgtggaacagcacggctgcagagtcactccctagctacatgagatcatgctacaaggctctttacaccgtcacaaatgagatagcggatacggccgaaaaggagcatggattgaaccatgttaatcatcttagaaaagcatgggcagcgttgtttgatggatttatggtcgaggcaagatggctagcaactgataaggttcctactgcagaggattacctgacgaatggtgttgtcacatcaggagtgccgctcacatttgtacacatattcatcatgctagggtgtgacgatgatcaaagtacccaagctctcgttgaccacatgccctctgtcatctcttgcccagccaagatcctccggctttgggatgacatgggcagtgcagaggatgaagctcaggaaggattcgatggttcctatagggatttctacctcatggagaaccctagatgcagccgtagcgatgcggaagcacatatgcgtagcttgatcgcaagggagtgggaggagctcaatagggagtgcttatgcaagaggaccttctcctctagcttcacacacgtctgcttgaacgccgcgcgaatgatcagtgtcatgtactcatacaacaaggaacaaaggcttcttgtccttgaggactatgcaaggatgttgatactttgaagctttgctccatggacatacatgtgagacaacgtgcagggatggatcttgccatcactactgccgaggacaaggttagaggtaggtgtggcatccatcttgaatctatggtggaaaagacacatctgcctttgatctgcaacggtccaaggtcgccaccacaatgatccatatctaccaatgtaataataatgtacgatagcactatattttttgaaaaaaatgtaatattgaaatatgcaacacaagtaagagctgtgtataagtccccacaaatatgacacatggaaaggttaccatgcatgatgtctcacagctaccacatcagtccaatatagagacaaaggtgtgggtgctaatttagacactataagggttagtttggaagcaaaggaatataaaactagctagagagggaaaacctcccataaataactaaatatcttagtcaaatgataccctaggattgctcatcctagggatcccaaataatttaagttttctaactaaccctaatagaaaagtgtgtatggtcttgtaaaatattgttctgttgtaataaagtttttttttctttcaggctttagtctattgatttggttgtatagtttgaaagtact

SEQ ID NO: 46178 - DNA, 6210 bp, Zea Mays
aaactgctggaatatacttacaccgggaagaaggcgaaggccgtcgcgctctcggcggcggcggcggcggcggcagcggcgatgcttgcgttcgagcagcaggtgttggcggatctggtggaagatccgaacggaggtctggtggtgctctcctcgggtctccctctcgcttccctagccgctaccctcctcctccatctccaccagacccccggcaacgcggctggaggaggatgtctcctcgtcctctccgccaccgataccctcaaggcccggatccggcgccgcctccaagacaagctgcaggttcacgacgtgccccctgacctcgccgcgcagcagcgcgccaccctttacgcctctggcgctgctctcttcctctctccccgcgccctcgccgccgacctcctcacctcccgcctcctcccctcccgcgtccaagccctactcctcctctccgcccaccgctccaccgatacctcctccgatgccttcatctgccgcctcctccgtcaacgcaatcttctccccgtttacgccttctccgattgcccccatgccatggtcgccggtttctccaaggccgagcgtaccatgaagagcctctacgtccgccgtctccacctctggccccgcttccacgttctcgccgcagccgacctggaacgcgccccgcctgacgtcgtagacgtgcgcgttcccatgacgccgcccatgaggggtatccaggctgctgtcctcgctaccatggacgcttgtctcaaggaacttaggcgcaccaacaaggtggatgttgaggacctcaccgtcgacaagggcctcttcaagtccttcgatgagatcgtccggaggcagctcgaccccatctggcacactcttgggaagaagacaaagcagcttgtggctgacctcaggacgctacgcaagctgcttgattacctcgtcaggtatgacgccgttacatacttgaagtaccttgacacattgagagtatcagaaggtgtcagatcagtttggatacttgctgactcaagccataggatatttgagcttgcaaaaaggcgcgtttaccaggcagtgagaacagatggtgttaatgttagcatagataataagggcacaccaacaaagaagaggaaagtggcacataattctaccaagaaaggaaaagtaactgaaaatgaagattccactgtaggtcccaacactcagaaggctaatactgatgtgggcattgtattggaagaggttttggaggaggcaccgaaatggaaagtgttatgggaattgttgcaagagatagcagaacaacggatgaagagcagtgccgggaatgtgcatgatgaggacaaaaatgatgaaagtggcatagttttggtatcatgtaaagatgaacgcacatgcttgcagctgcaggaatgcatattaaaaggcccctgtcaggttatgcgagaagagtgggagaagtatctgattggaaaagctgagctgcatggattgaataaggacaagagaaaatctgagcaaccaaaaggtgttggtgtcctggatggtgaagttcaaatgggatctagtgagagtgtgtgtccagttagcattagcaaactcgaaactaatgccttacttgccgctgcctctgaattaagaaatatatcaaatgaagcagatgtcaagagtagctcaaatagcagctgcagcaaggctgggggagcaaaggggaaaccaaagaaaaccacttcaaagagacaaggcagcaatcgaaaaaataaaagtaaggagggaaatgacaatagccaaggtactggtctggattctgaaggtcaatcaggaaaagcagatgtacaggctgagattgttgcttctaagatgtccgcatatgatgcttccatgtcagcctctacttctaatgttaaatttaaccattcatctgctttcggaaacttggcaaacgccaagccactacctcctgtgcagtttcatgctctagacagtgaccaccaggttcttgatgtatggaagccatctgtcattattgtttatcatccagatattacctttgtaagagaaattgaagtatacaaggcagaaaactcatcaaggaagttaaaagtttacttccttttttatgaagattccactgaggtgcaaaaatatgagtccagcattcgacgggaaaatgaagcatttgaatctttgatcagacagaagtccctgatgatgatacctgttgatcaggatggccgttgcattggaccaactgttgcaaatgaaccagagcctcctttatgtcagaactcaattacaagaaaggcaggtggtaaaaaggcgcccgagaaggagatgcaggttattgtagacatgagagagttcatgagcagccttccgaatgtattacatcaaaaaggttgagacaatggcacgttactacaagatcccggttctcctcatcgagttctcacaagataagagcttttcctttcagtctgcaaatgagattggtgatgatgtctctccgaccaacattatctcgaagctttctctgctagtgctgcattttcctcggcttcgcataatctggtcacgcagcttgcatgctacagcagaaatatttatgtcactgaaaacaaaccaggatgaacctgatgagaaaaaagcaacaagagttggcgtgccatccgaggatggtatcgtggaggatgatgtgaggtctgaaaattacaacacatcagccattgagttcttaagaaggcttcctggggtgacggattctaactaccgagcaatcatggatggatgcaatagcttggccgagctggccctgcttccagtggaaagcaaacatgcagaaaatgagcagcagattatgggctgggcaggctctaacccagcccaggaactccccctctcccccacgttcttctttgttgttgttgggcaagtagtgcggctgtttgagtctacgctacagaatgactatctaaatcacacctcctgtggagcctttcatgctcagatggaatcttgggaaagaattttgtactggatggcagttttgtgggagcgtgggttcagtcatgagaatcctcaagtgagatgcctggttatgcaatcctttttggatattgcatgggaacgctacaaggattgcactcagataattccaaggggttttgtgcttggtcctctgatacgtggtttgaatgatgtggttcatcataaggattttgttatgaatagacagcttgttaacttgaagtctagtgcagtttgtgaacaggttataaaagttgcaacatcactgataaatgccactgaaattccacttaacccgcttctgcatttcattgccacaattcctcgagagttctctgattatattggaccattgagagtagtagttcaaaaatggtttgttcagaaggaagaatgttctcctggtgacactttgttgagtaagctgattgatttctctgccaccttcgtaagtcaaaaacggaatgaaggttcgaatgtttttgatgacgaggatgtggatgcatgggaagctgaagcaaggtgggctagaacccttcttgtaacctcggaggaggaacatttgaaacgaatcttcaggtttttggaggcatatggctacaagctctctgagcaatgtcccagtggagatttcatacccataaaaaattttatcattgttttaagcttcattgaggaacttgaggaaaaaaaaatcccacgtggtcagtcaaaggttagtattaaacgagaggtccagattggtcttgtgcttgagttcatatgctggctgttgagaagctgcatgcttgcaacaccacaccacataaatttggagggcctgcggacgccccgatgcatatcactcacatgcattcttgctcctgctaggaggatcggaaccagcatgtctgaacgatgcatcttctccttctccactctggcttcgccggcggcagatggaaacaacagccggcgaggaggccgccaccgtggcgattccatcgtcacccgctcttcggcggcggccaacacgctgccgctgctccgcaatgacgacttcgacctccgggagggcctgacggacgtacgaaatgttctccgtcaacgtcagaagagtggctgcagcagcagggacatgatggtcaccgtcgacaacctcaagcgcctctgcatcgaccactacttccaggaagagatcgagcgcgccatgggtgcctgctgcatgggtctcatccacagcgacgatctcttcgacgcgacgcttgccttcaggctcctcagagaggccggccatggcgtttcagcagatgatgttttacggaggttcactgacgacgacgacagcggcggcgagttcaggctcgatctcagcaaggacatcagagggctgctgagcctgcacgacatgtctcacctggacatgggaggggaggagttgctctgcaaggcaagagtgttctcgcgccaccacctcgcttctgccgtcaggtacctggagccaagccttggcgagtacgtgagacagtcgcttgaccacccctaccacctgagcctcacgcagtacaaggctcggcaccacctcgcctacctccagagcctgcccgtcagagacaccgcgctcgagagactagtggctgcagagttccagctcaacagatcgctgcatcagaaagaaatgcaggccattaaaagatggtggatggagctaggattggttcaagaaatacctgtggtgagggaccaggtgctgaaatggtacatgtggtccatgacagcgctccaaggacgttccttctccagacaccgggttcagatcaccaagatcatcgcgctcgtctatgtcgtcgacgacatatttgaccttgttgccacactagatgagctctccctctttgcagaggcagtcaaaatgtggaacagcacggctgcagagtcactccctagctacatgagatcatgctacaaggctctttacaccgtcacaaatgagatagcggatacggccgaaaaggagcatggattgaaccatgttaatcatcttagaaaagcatgggcagcgttgtttgatggatttatggtcgaggcaagatggctagcaactgataaggttcctactgcagaggattacctgacgaatggtgttgtcacatcaggagtgccgctcacatttgtacacatattcatcatgctagggtgtgacgatgatcaaagtacccaagctctcgttgaccacatgccctctgtcatctcttgcccagccaagatcctccggctttgggatgacatgggcagtgcagaggatgaagctcaggaaggattcgatggttcctatagggatttctacctcatggagaaccctagatgcagccgtagcgatgcggaagcacatatgcgtagcttgatcgcaagggagtgggaggagctcaatagggagtgcttatgcaagaggaccttctcctctagcttcacacacgtctgcttgaacgccgcgcgaatgatcagtgtcatgtactcatacaacaaggaacaaaggcttcttgtccttgaggactatgcaaggatgttgatactttgaagctttgctccatggacatacatgtgagacaacgtgcagggatggatcttgccatcactactgccgaggacaaggttagaggtaggtgtggcatccatcttgaatctatggtggaaaagacacatctgcctttgatctgcaacggtccaaggtcgccaccacaatgatccatatctaccaatgtaataataatgtacgatagcactatattttttgaaaaaaatgtaatattgaaatatgcaacacaagtaagagctgtgtataagtccccacaaatatgacacatggaaaggttaccatgcatgatgtctcacagctaccacatcagtccaatatagagacaaaggtgtgggtgctaatttagacactataagggttagtttggaagcaaaggaatataaaactagctagagagggaaaacctcccataaataactaaatatcttagtcaaatgataccctaggattgctcatcctagggatcccaaataatttaagttttctaactaaccctaatagaaaagtgtgtatggtcttgtaaaatattgttctgttgtaataaagtttttttttctttcaggctttagtctattgatttggttgtatagtttgaaagtact

SEQ ID NO: 46179 - DNA, 4542 bp, Zea Mays
gcggaatagagaaactgctggaatatacttacaccgggaagaaggcgaaggccgtcgcgctctcggcggcggcggcggcggcggcagcggcgatgcttgcgttcgagcagcaggtgttggcggatctggtggaagatccgaacggaggtctggtggtgctctcctcgggtctccctctcgcttccctagccgctaccctcctcctccatctccaccagacccccggcaacgcggctggaggaggatgtctcctcgtcctctccgccaccgataccctcaaggcccggatccggcgccgcctccaagacaagctgcaggttcacgacgtgccccctgacctcgccgcgcagcagcgcgccaccctttacgcctctggcgctgctctcttcctctctccccgcgccctcgccgccgacctcctcacctcccgcctcctcccctcccgcgtccaagccctactcctcctctccgcccaccgctccaccgatacctcctccgatgccttcatctgccgcctcctccgtcaacgcaatcttctccccgtttacgccttctccgattgcccccatgccatggtcgccggtttctccaaggccgagcgtaccatgaagagcctctacgtccgccgtctccacctctggccccgcttccacgttctcgccgcagccgacctggaacgcgccccgcctgacgtcgtagacgtgcgcgttcccatgacgccgcccatgaggggtatccaggctgctgtcctcgctaccatggacgcttgtctcaaggaacttaggcgcaccaacaaggtggatgttgaggacctcaccgtcgacaagggcctcttcaagtccttcgatgagatcgtccggaggcagctcgaccccatctggcacactcttgggaagaagacaaagcagcttgtggctgacctcaggacgctacgcaagctgcttgattacctcgtcaggatgaacctgatgagaaaaaagcaacaagagttggcgtgccatccgaggatggtatcgtggaggatgatgtgaggtctgaaaattacaacacatcagccattgagttcttaagaaggcttcctggggtgacggattctaactaccgagcaatcatggatggatgcaatagcttggccgagctggccctgcttccagtggaaagcaaacatgcagaaaatgagcagcagattatgggctgggcaggctctaacccagcccaggaactccccctctcccccacgttcttctttgttgttgttgggcaagtagtgcggctgtttgagtctacgctacagaatgactatctaaatcacacctcctgtggagcctttcatgctcagatggaatcttgggaaagaattttgtactggatggcagttttgtgggagcgtgggttcagtcatgagaatcctcaagtgagatgcctggttatgcaatcctttttggatattgcatgggaacgctacaaggattgcactcagataattccaaggggttttgtgcttggtcctctgatacgtggtttgaatgatgtggttcatcataaggattttgttatgaatagacagcttgttaacttgaagtctagtgcagtttgtgaacaggttataaaagttgcaacatcactgataaatgccactgaaattccacttaacccgcttctgcatttcattgccacaattcctcgagagttctctgattatattggaccattgagagtagtagttcaaaaatggtttgttcagaaggaagaatgttctcctggtgacactttgttgagtaagctgattgatttctctgccaccttcgtaagtcaaaaacggaatgaaggttcgaatgtttttgatgacgaggatgtggatgcatgggaagctgaagcaaggtgggctagaacccttcttgtaacctcggaggaggaacatttgaaacgaatcttcagtttttggaggcatatggctacaagctctctgagcaatgtcccagtggagatttcatacccataaaaaattttatcattgttttaagcttcattgaggaacttgaggaaaaaaaaatcccacgtggtcagtcaaaggttagtattaaacgagaggtccagattggtcttgtgcttgagttcatatgctggctgttgagaagctgcatgcttgcaacaccacaccacataaatttggagggcctgcggacgccccgatgcatatcactcacatgcattcttgctcctgctaggaggatcggaaccagcatgtctgaacgatgcatcttctccttctccactctggcttcgccggcggcagatggaaacaacagccggcgaggaggccgccaccgtggcgattccatcgtcacccgctcttcggcggcggccaacacgctgccgctgctccgcaatgacgacttcgacctccgggagggcctgacggacgtacgaaatgttctccgtcaacgtcagaagagtggctgcagcagcagggacatgatggtcaccgtcgacaacctcaagcgcctctgcatcgaccactacttccaggaagagatcgagcgcgccatgggtgcctgctgcatgggtctcatccacagcgacgatctcttcgacgcgacgcttgccttcaggctcctcagagaggccggccatggcgtttcagcagatgatgttttacggaggttcactgacgacgacgacagcggcggcgagttcaggctcgatctcagcaaggacatcagagggctgctgagcctgcacgacatgtctcacctggacatgggaggggaggagttgctctgcaaggcaagagtgttctcgcgccaccacctcgcttctgccgtcaggtacctggagccaagccttggcgagtacgtgagacagtcgcttgaccacccctaccacctgagcctcacgcagtacaaggctcggcaccacctcgcctacctccagagcctgcccgtcagagacaccgcgctcgagagactagtggctgcagagttccagctcaacagatcgctgcatcagaaagaaatgcaggccattaaaagatggtggatggagctaggattggttcaagaaatacctgtggtgagggaccaggtgctgaaatggtacatgtggtccatgacagcgctccaaggacgttccttctccagacaccgggttcagatcaccaagatcatcgcgctcgtctatgtcgtcgacgacatatttgaccttgttgccacactagatgagctctccctctttgcagaggcagtcaaaatgtggaacagcacggctgcagagtcactccctagctacatgagatcatgctacaaggctctttacaccgtcacaaatgagatagcggatacggccgaaaaggagcatggattgaaccatgttaatcatcttagaaaagcagtatgattgggcagcgttgtttgatggatttatggtcgaggcaagatggctagcaactgataaggttcctactgcagaggattacctgacgaatggtgttgtcacatcaggagtgccgctcacatttgtacacatattcatcatgctagggtgtgacgatgatcaaagtacccaagctctcgttgaccacatgccctctgtcatctcttgcccagccaagatcctccggctttgggatgacatgggcagtgcagaggatgaagctcaggaaggattcgatggttcctatagggatttctacctcatggagaaccctagatgcagccgtagcgatgcggaagcacatatgcgtagcttgatcgcaagggagtgggaggagctcaatagggagtgcttatgcaagaggaccttctcctctagcttcacacacgtctgcttgaacgccgcgcgaatgatcagtgtcatgtactcatacaacaaggaacaaaggcttcttgtccttgaggactatgcaaggatgttgatactttgaagctttgctccatggacatacatgtgagacaacgtgcagggatggatcttgccatcactactgccgaggacaaggttagaggtaggtgtggcatccatcttgaatctatggtggaaaagacacatctgcctttgatctgcaacggtccaaggtcgccaccacaatgatccatatctaccaatgtaataataatgtacgatagcactatattttttgaaaaaaatgtaatattgaaatatgcaacacaagtaagagctgtgtataagtccccacaaatatgacacatggaaaggttaccatgcatgatgtctcacagctaccacatcagtccaatatagagacaaaggtgtgggtgctaatttagacactataagggttagtttggaagcaaaggaatataaaactagctagagagggaaaacctcccataaataactaaatatcttagtcaaatgataccctaggattgctcatcctagggatcccaaataatttaagttttctaactaaccctaatagaaaagtgtgtatggtcttgtaaaatattgttctgttgtaataaagtttttttttctttcaggctttagtctattgatttggttgtatagtttgaaagtact

SEQ ID NO: 46180 - DNA, 6936 bp, Zea Mays
gaattttttgaaacaaaactctctcaaacaggtcctaaaggaccagatctaggaaatagctttttctaaaagccgacttttctggcagtgtaaaactgaaagcaccctagacctgctctactctagcaacacatgtataacactttgtagattgaagtttgaaataggaagtgacatggagcggaatagagaaactgctggaatatacttacaccgggaagaaggcgaaggccgtcgcgctctcggcggcggcggcggcggcggcagcggcgatgcttgcgttcgagcagcaggtgttggcggatctggtggaagatccgaacggaggtctggtggtgctctcctcgggtctccctctcgcttccctagccgctaccctcctcctccatctccaccagacccccggcaacgcggctggaggaggatgtctcctcgtcctctccgccaccgataccctcaaggcccggatccggcgccgcctccaagacaagctgcaggttcacgacgtgccccctgacctcgccgcgcagcagcgcgccaccctttacgcctctggcgctgctctcttcctctctccccgcgccctcgccgccgacctcctcacctcccgcctcctcccctcccgcgtccaagccctactcctcctctccgcccaccgctccaccgatacctcctccgatgccttcatctgccgcctcctccgtcaacgcaatcttctccccgtttacgccttctccgattgcccccatgccatggtcgccggtttctccaaggccgagcgtaccatgaagagcctctacgtccgccgtctccacctctggccccgcttccacgttctcgccgcagccgacctggaacgcgccccgcctgacgtcgtagacgtgcgcgttcccatgacgccgcccatgaggggtatccaggctgctgtcctcgctaccatggacgcttgtctcaaggaacttaggcgcaccaacaaggtggatgttgaggacctcaccgtcgacaagggcctcttcaagtccttcgatgagatcgtccggaggcagctcgaccccatctggcacactcttgggaagaagacaaagcagcttgtggctgacctcaggacgctacgcaagctgcttgattacctcgtcaggtatgacgccgttacatacttgaagtaccttgacacattgagagtatcagaaggtgtcagatcagtttggatacttgctgactcaagccataggatatttgagcttgcaaaaaggcgcgtttaccaggcagtgagaacagatggtgttaatgttagcatagataataagggcacaccaacaaagaagaggaaagtggcacataattctaccaagaaaggaaaagtaactgaaaatgaagattccactgtaggtcccaacactcagaaggctaatactgatgtgggcattgtattggaagaggttttggaggaggcaccgaaatggaaagtgttatgggggggaagtggcaatggcgcagacgccggcccctggcttcgcaggtggtgtgggcaatcggctgggcgccgatctgtgctgggcagcaaggagggagaccggagtagcagggaagaaagacggtttagagataattcattgcttgctttatttcataactttccattacataaataggccggctattggcctggccgcagccttctaactgcttgactctatctccttaaactctcctaaaaaatctcaacaacttctaatctgttattatccctagatattctcaactaatatctctagataaactcaactaggcctcttatccttaggcctgtgcctgtacgtggcgccccacataacatggtgtgtatagcatgttgaactattgtttgttgtgctaaatgctaattcttaactatctctgttttttctattcttgtagcaaactagcaacctcatccctaactatcagataatatgagtattaatcataaaaaatgtttttgctttgagttgactgctttgaagtttgcaggaattgttgcaagagatagcagaacaacggatgaagagcagtgccgggaatgtgcatgatgaggacaaaaatgatgaaagtggcatagttttggtatcatgtaaagatgaacgcacatgcttgcagctgcaggaatgcatattaaaaggcccctgtcaggttatgcgagaagagtgggagaagtatctgattggaaaagctgagctgcatggattgaataaggacaagagaaaatctgagcaaccaaaaggtgttggtgtcctggatggtgaagttcaaatgggatctagtgagagtgtgtgtccagttagcattagcaaactcgaaactaatgccttacttgccgctgcctctgaattaagaaatatatcaaatgaagcagatgtcaagagtagctcaaatagcagctgcagcaaggctgggggagcaaaggggaaaccaaagaaaaccacttcaaagagacaaggcagcaatcgaaaaaataaaagtaaggagggaaatgacaatagccaaggtactggtctggattctgaaggtcaatcaggaaaagcagatgtacaggctgagattgttgcttctaagatgtccgcatatgatgcttccatgtcagcctctacttctaatgttaaatttaaccattcatctgctttcggaaacttggcaaacgccaagccactacctcctgtgcagtttcatgctctagacagtgaccaccaggttcttgatgtatggaagccatctgtcattattgtttatcatccagatattacctttgtaagagaaattgaagtatacaaggcagaaaactcatcaaggaagttaaaagtttacttccttttttatgaagattccactgaggtgcaaaaatatgagtccagcattcgacgggaaaatgaagcatttgaatctttgatcagacagaagtccctgatgatgatacctgttgatcaggatggccgttgcattggaccaactgttgcaaatgaaccagagcctcctttatgtcagaactcaattacaagaaaggcaggtggtaaaaaggcgcccgagaaggagatgcaggttattgtagacatgagagagttcatgagcagccttccgaatgtattacatcaaaaaggttgagacaatggcacgttactacaagatcccggttctcctcatcgagttctcacaagataagagcttttcctttcagtctgcaaatgagattggtgatgatgtctctccgaccaacattatctcgaagctttctctgctagtgctgcattttcctcggcttcgcataatctggtcacgcagcttgcatgctacagcagaaatatttatgtcactgaaaacaaaccaggatgaacctgatgagaaaaaagcaacaagagttggcgtgccatccgaggatggtatcgtggaggatgatgtgaggtctgaaaattacaacacatcagccattgagttcttaagaaggcttcctggggtgacggattctaactaccgagcaatcatggatggatgcaatagcttggccgagctggccctgcttccagtggaaagcaaacatgcagaaaatgagcagcagattatgggctgggcaggctctaacccagcccaggaactccccctctcccccacgttcttctttgttgttgttgggcaagtagtgcggctgtttgagtctacgctacagaatgactatctaaatcacacctcctgtggagcctttcatgctcagatggaatcttgggaaagaattttgtactggatggcagttttgtgggagcgtgggttcagtcatgagaatcctcaagtgagatgcctggttatgcaatcctttttggatattgcatgggaacgctacaaggattgcactcagataattccaaggggttttgtgcttggtcctctgatacgtggtttgaatgatgtggttcatcataaggattttgttatgaatagacagcttgttaacttgaagtctagtgcagtttgtgaacaggttataaaagttgcaacatcactgataaatgccactgaaattccacttaacccgcttctgcatttcattgccacaattcctcgagagttctctgattatattggaccattgagagtagtagttcaaaaatggtttgttcagaaggaagaatgttctcctggtgacactttgttgagtaagctgattgatttctctgccaccttcgtaagtcaaaaacggaatgaaggttcgaatgtttttgatgacgaggatgtggatgcatgggaagctgaagcaaggtgggctagaacccttcttgtaacctcggaggaggaacatttgaaacgaatcttcaggtttttggaggcatatggctacaagctctctgagcaatgtcccagtggagatttcatacccataaaaaattttatcattgttttaagcttcattgaggaacttgaggaaaaaaaaatcccacgtggtcagtcaaaggttagtattaaacgagaggtccagattggtcttgtgcttgagttcatatgctggctgttgagaagctgcatgcttgcaacaccacaccacataaatttggagggcctgcggacgccccgatgcatatcactcacatgcattcttgctcctgctaggaggatcggaaccagcatgtctgaacgatgcatcttctccttctccactctggcttcgccggcggcagatggaaacaacagccggcgaggaggccgccaccgtggcgattccatcgtcacccgctcttcggcggcggccaacacgctgccgctgctccgcaatgacgacttcgacctccgggagggcctgacggacgtacgaaatgttctccgtcaacgtcagaagagtggctgcagcagcagggacatgatggtcaccgtcgacaacctcaagcgcctctgcatcgaccactacttccaggaagagatcgagcgcgccatgggtgcctgctgcatgggtctcatccacagcgacgatctcttcgacgcgacgcttgccttcaggctcctcagagaggccggccatggcgtttcagcagatgatgttttacggaggttcactgacgacgacgacagcggcggcgagttcaggctcgatctcagcaaggacatcagagggctgctgagcctgcacgacatgtctcacctggacatgggaggggaggagttgctctgcaaggcaagagtgttctcgcgccaccacctcgcttctgccgtcaggtacctggagccaagccttggcgagtacgtgagacagtcgcttgaccacccctaccacctgagcctcacgcagtacaaggctcggcaccacctcgcctacctccagagcctgcccgtcagagacaccgcgctcgagagactagtggctgcagagttccagctcaacagatcgctgcatcagaaagaaatgcaggccattaaaagatggtggatggagctaggattggttcaagaaatacctgtggtgagggaccaggtgctgaaatggtacatgtggtccatgacagcgctccaaggacgttccttctccagacaccgggttcagatcaccaagatcatcgcgctcgtctatgtcgtcgacgacatatttgaccttgttgccacactagatgagctctccctctttgcagaggcagtcaaaatgtggaacagcacggctgcagagtcactccctagctacatgagatcatgctacaaggctctttacaccgtcacaaatgagatagcggatacggccgaaaaggagcatggattgaaccatgttaatcatcttagaaaagcatgggcagcgttgtttgatggatttatggtcgaggcaagatggctagcaactgataaggttcctactgcagaggattacctgacgaatggtgttgtcacatcaggagtgccgctcacatttgtacacatattcatcatgctagggtgtgacgatgatcaaagtacccaagctctcgttgaccacatgccctctgtcatctcttgcccagccaagatcctccggctttgggatgacatgggcagtgcagaggatgaagctcaggaaggattcgatggttcctatagggatttctacctcatggagaaccctagatgcagccgtagcgatgcggaagcacatatgcgtagcttgatcgcaagggagtgggaggagctcaatagggagtgcttatgcaagaggaccttctcctctagcttcacacacgtctgcttgaacgccgcgcgaatgatcagtgtcatgtactcatacaacaaggaacaaaggcttcttgtccttgaggactatgcaaggatgttgatactttgaagctttgctccatggacatacatgtgagacaacgtgcagggatggatcttgccatcactactgccgaggacaaggttagaggtaggtgtggcatccatcttgaatctatggtggaaaagacacatctgcctttgatctgcaacggtccaaggtcgccaccacaatgatccatatctaccaatgtaataataatgtacgatagcactatattttttgaaaaaaatgtaatattgaaatatgcaacacaagtaagagctgtgtataagtccccacaaatatgacacatggaaaggttaccatgcatgatgtctcacagctaccacatcagtccaatatagagacaaaggtgtgggtgctaatttagacactataagggttagtttggaagcaaaggaatataaaactagctagagagggaaaacctcccataaataactaaatatcttagtcaaatgataccctaggattgctcatcctagggatcccaaataatttaagttttctaactaaccctaatagaaaagtgtgtatggtcttgtaaaatattgttctgttgtaataaagtttttttttctttcaggctttagtctattgatttggttgtatagtttgaaagtact

SEQ ID NO: 46181 - DNA, 1137 bp, Zea Mays
ggtctttgcacctttctacgaatctatgatggccgttgcattggaccaactgttgcaaatgaaccagagcctcctttatgtcagaactcaattacaagaaaggcaggtggtaaaaaggcgcccgagaaggagatgcaggttattgtagacatgagagagttcatgagcagccttccgaatgtattacatcaaaaaggtatccgaatcgtaccggtcacccttgaagttggtgactatgtgctctctcctttgatctgtgttgaacggaaaagtattgcggacttgttccaaagctttgcttctggtcgtctgtacaatcaggttgagacaatggcacgttactacaagatcccggttctcctcatcgagttctcacaagataagagcttttcctttcagtctgcaaatgagattggtgatgatgtctctccgaccaacattatctcgaagctttctctgctagtgctgcattttcctcggcttcgcataatctggtcacgcagcttgcatgctacagcagaaatatttatgtcactgaaaacaaaccaggatgaacctgatgagaaaaaagcaacaagagttggcgtgccatccgaggatggtatcgtggaggatgatgtgaggtctgaaaattacaacacatcagccattgagttcttaagaaggcttcctggggtgacggattctaactaccgagcaatcatggatggatgcaatagcttggccgagctggccctgcttccagtggaaaggttggcggagctaatgggtggtcagaaagctgcgcggacgctcaaggagtttctcgatgccaagtgcccaaccatgttgtagccagagtgacgctctagcaggagtcaagggtctctcctatttaggagctcccttgctggtcgtctaaagactcctctttctcatggatttgtttctttatgtttatttctgcactccgtaaggagcgttttttttatttgtatttcggtcttctatggaccttttttctctgtaaaaggttccatttcacatgtttcacataatctttcagatatactgcattactactatcttgatgcttttgtcttctgtgctagtccaacaaagttttattttctactgtccttcaattttggttcgttg

SEQ ID NO: 46182 - DNA, 5137 bp, Zea Mays
aaactgctggaatatacttacaccgggaagaaggcgaaggccgtcgcgctctcggcggcggcggcggcggcggcagcggcgatgcttgcgttcgagcagcaggtgttggcggatctggtggaagatccgaacggaggtctggtggtgctctcctcgggtctccctctcgcttccctagccgctaccctcctcctccatctccaccagacccccggcaacgcggctggaggaggatgtctcctcgtcctctccgccaccgataccctcaaggcccggatccggcgccgcctccaagacaagctgcaggttcacgacgtgccccctgacctcgccgcgcagcagcgcgccaccctttacgcctctggcgctgctctcttcctctctccccgcgccctcgccgccgacctcctcacctcccgcctcctcccctcccgcgtccaagccctactcctcctctccgcccaccgctccaccgatacctcctccgatgccttcatctgccgcctcctccgtcaacgcaatcttctccccgtttacgccttctccgattgcccccatgccatggtcgccggtttctccaaggccgagcgtaccatgaagagcctctacgtccgccgtctccacctctggccccgcttccacgttctcgccgcagccgacctggaacgcgccccgcctgacgtcgtagacgtgcgcgttcccatgacgccgcccatgaggggtatccaggctgctgtcctcgctaccatggacgcttgtctcaaggaacttaggcgcaccaacaaggtggatgttgaggacctcaccgtcgacaagggcctcttcaagtccttcgatgagatcgtccggaggcagctcgaccccatctggcacactcttgggaagaagacaaagcagcttgtggctgacctcaggacgctacgcaagctgcttgattacctcgtcaggtatgacgccgttacatacttgaagtaccttgacacattgagagtatcagaaggtgtcagatcagtttggatacttgctgactcaagccataggatatttgagcttgcaaaaaggcgcgtttaccaggcagtgagaacagatggtgttaatgttagcatagataataagggcacaccaacaaagaagaggaaagtggcacataattctaccaagaaaggaaaagtaactgaaaatgaagattccactgtaggtcccaacactcagaaggctaatactgatgtgggcattgtattggaagaggttttggaggaggcaccgaaatggaaagtgttatgggggggaagtggcaatggcgcagacgccggcccctggcttcgcaggtggtgtgggcaatcggctgggcgccgatctgtgctgggcagcaaggagggagaccggagtagcagggaagaaagacggtttagagataattcattgcttgctttatttcataactttccattacataaataggccggctattggcctggccgcagccttctaactgcttgactctatctccttaaactctcctaaaaaatctcaacaacttctaatctgttattatccctagatattctcaactaatatctctagataaactcaactaggcctcttatccttaggcctgtgcctgtacgtggcgccccacataacatggtgtgtatagcatgttgaactattgtttgttgtgctaaatgctaattcttaactatctctgttttttctattcttgtagcaaactagcaacctcatccctaactatcagataatatgagtattaatcataaaaaatgtttttgctttgagttgactgctttgaagtttgcaggaattgttgcaagagatagcagaacaacggatgaagagcagtgccgggaatgtgcatgatgaggacaaaaatgatgaaagtggcatagttttggtatcatgtaaagatgaacgcacatgcttgcagctgcaggaatgcatattaaaaggcccctgtcaggttatgcgagaagagtgggagaagtatctgattggaaaagctgagctgcatggattgaataaggacaagagaaaatctgagcaaccaaaaggtgttggtgtcctggatggtgaagttcaaatgggatctagtgagagtgtgtgtccagttagcattagcaaactcgaaactaatgccttacttgccgctgcctctgaattaagaaatatatcaaatgaagcagatgtcaagagtagctcaaatagcagctgcagcaaggctgggggagcaaaggggaaaccaaagaaaaccacttcaaagagacaaggcagcaatcgaaaaaataaaagtaaggagggaaatgacaatagccaaggtactggtctggattctgaaggtcaatcaggaaaagcagatgtacaggctgagattgttgcttctaagatgtccgcatatgatgcttccatgtcagcctctacttctaatgttaaatttaaccattcatctgctttcggaaacttggcaaacgccaagccactacctcctgtgcagtttcatgctctagacagtgaccaccaggttcttgatgtatggaagccatctgtcattattgtttatcatccagatattacctttgtaagagaaattgaagtatacaaggcagaaaactcatcaaggaagttaaaagtttacttccttttttatgaagattccactgaggtgcaaaaatatgagtccagcattcgacgggaaaatgaagcatttgaatctttgatcagacagaagtccctgatgatgatacctgttgatcaggatggccgttgcattggaccaactgttgcaaatgaaccagagcctcctttatgtcagaactcaattacaagaaaggcaggtggtaaaaaggcgcccgagaaggagatgcaggttattgtagacatgagagagttcatgagcagccttccgaatgtattacatcaaaaaggtatccgaatcgtaccggtcacccttgaagttggtgactatgtgctctctcctttgatctgtgttgaacggaaaagtattgcggacttgttccaaagctttgcttctggtcgtctgtacaatcaggttgagacaatggcacgttactacaagatcccggttctcctcatcgagttctcacaagataagagcttttcctttcagtctgcaaatgagattggtgatgatgtctctccgaccaacattatctcgaagctttctctgctagtgctgcattttcctcggcttcgcataatctggtcacgcagcttgcatgctacagcagaaatatttatgtcactgaaaacaaaccaggatgaacctgatgagaaaaaagcaacaagagttggcgtgccatccgaggatggtatcgtggaggatgatgtgaggtctgaaaattacaacacatcagccattgagttcttaagaaggcttcctggggtgacggattctaactaccgagcaatcatggatggatgcaatagcttggccgagctggccctgcttccagtggaaagcaaacatgcagaaaatgagcagcagattatgggctgggcaggctctaacccagcccaggaactccccctctcccccacgttcttctttgttgttgttgggcaagtagtgcggctgtttgagtctacgctacagaatgactatctaaatcacacctcctgtggagcctttcatgctcagatggaatcttgggaaagaattttgtactggatggcagttttgtgggagcgtgggttcagtcatgagaatcctcaagtgagatgcctggttatgcaatcctttttggatattgcatgggaacgctacaaggattgcactcagataattccaaggggttttgtgcttggtcctctgatacgtggtttgaatgatgtggttcatcataaggattttgttatgaatagacagcttgttaacttgaagtctagtgcagtttgtgaacaggttataaaagttgcaacatcactgataaatgccactgaaattccacttaacccgcttctgcatttcattgccacaattcctcgagagttctctgattatattggaccattgagagtagtagttcaaaaatggtttgttcagaaggaagaatgttctcctggtgacactttgttgagtaagctgattgatttctctgccaccttcgtaagtcaaaaacggaatgaaggttcgaatgtttttgatgacgaggatgtggatgcatgggaagctgaagcaaggtgggctagaacccttcttgtaacctcggaggaggaacatttgaaacgaatcttcaggtttttggaggcatatggctacaagctctctgagcaatgtcccagtggagatttcatacccataaaaaattttatcattgttttaagcttcattgaggaacttgaggtgagacagagagagcttgtttgccggagtataatacaatcttaagaggttcagatacagtaaatttattggtgctcgatgatctcaacaaaatgttcacagaatcacttttgctaattttggaaaatatggtggccttcagcaaactgtcttgccccgtattctggttttgagatgtggacgaacaggatttacccccaaagcttggaggaccaagccagcgtcgtttggctacctccattacttcttcagtattacagggtgtatgttccgtccttcttggagtggtggaagagggctgcagagacagtgcagggaatggtcaagaaagctggattctctcgtcattttgggagcctggaagatttggaaccactacaatagatatgtgtttgatggagagaccccagcctttctcgaaccctgaagcactctgaagcagactgatgatgagagaagcctttgagagctagcaggagtcaagggtctctcctatttaggagctcccttgctggtcgtctaaagactcctctttctcatggatttgtttctttatgtttatttctgcactccgtaaggagcgttttttttatttgtatttcggtcttctatggaccttttttctctgtaaaaggttccatttcacatgtttcacataatctttcagatatactgcattactactatcttgatgcttttgtcttctgtgctagtccaacaaagttttattttctactgtccttcaattttggttcgttg

SEQ ID NO: 46183 - DNA, 4524 bp, Zea Mays
aaactgctggaatatacttacaccgggaagaaggcgaaggccgtcgcgctctcggcggcggcggcggcggcggcagcggcgatgcttgcgttcgagcagcaggtgttggcggatctggtggaagatccgaacggaggtctggtggtgctctcctcgggtctccctctcgcttccctagccgctaccctcctcctccatctccaccagacccccggcaacgcggctggaggaggatgtctcctcgtcctctccgccaccgataccctcaaggcccggatccggcgccgcctccaagacaagctgcaggttcacgacgtgccccctgacctcgccgcgcagcagcgcgccaccctttacgcctctggcgctgctctcttcctctctccccgcgccctcgccgccgacctcctcacctcccgcctcctcccctcccgcgtccaagccctactcctcctctccgcccaccgctccaccgatacctcctccgatgccttcatctgccgcctcctccgtcaacgcaatcttctccccgtttacgccttctccgattgcccccatgccatggtcgccggtttctccaaggccgagcgtaccatgaagagcctctacgtccgccgtctccacctctggccccgcttccacgttctcgccgcagccgacctggaacgcgccccgcctgacgtcgtagacgtgcgcgttcccatgacgccgcccatgaggggtatccaggctgctgtcctcgctaccatggacgcttgtctcaaggaacttaggcgcaccaacaaggtggatgttgaggacctcaccgtcgacaagggcctcttcaagtccttcgatgagatcgtccggaggcagctcgaccccatctggcacactcttgggaagaagacaaagcagcttgtggctgacctcaggacgctacgcaagctgcttgattacctcgtcaggtatgacgccgttacatacttgaagtaccttgacacattgagagtatcagaaggtgtcagatcagtttggatacttgctgactcaagccataggatatttgagcttgcaaaaaggcgcgtttaccaggcagtgagaacagatggtgttaatgttagcatagataataagggcacaccaacaaagaagaggaaagtggcacataattctaccaagaaaggaaaagtaactggtagctgctcttggccccttcatttgcaggaattgttgcaagagatagcagaacaacggatgaagagcagtgccgggaatgtgcatgatgaggacaaaaatgatgaaagtggcatagttttggtatcatgtaaagatgaacgcacatgcttgcagctgcaggaatgcatattaaaaggcccctgtcaggttatgcgagaagagtgggagaagtatctgattggaaaagctgagctgcatggattgaataaggacaagagaaaatctgagcaaccaaaaggtgttggtgtcctggatggtgaagttcaaatgggatctagtgagagtgtgtgtccagttagcattagcaaactcgaaactaatgccttacttgccgctgcctctgaattaagaaatatatcaaatgaagcagatgtcaagagtagctcaaatagcagctgcagcaaggctgggggagcaaaggggaaaccaaagaaaaccacttcaaagagacaaggcagcaatcgaaaaaataaaagtaaggagggaaatgacaatagccaaggtactggtctggattctgaaggtcaatcaggaaaagcagatgtacaggctgagattgttgcttctaagatgtccgcatatgatgcttccatgtcagcctctacttctaatgttaaatttaaccattcatctgctttcggaaacttggcaaacgccaagccactacctcctgtgcagtttcatgctctagacagtgaccaccaggttcttgatgtatggaagccatctgtcattattgtttatcatccagatattacctttgtaagagaaattgaagtatacaaggcagaaaactcatcaaggaagttaaaagtttacttccttttttatgaagattccactgaggtgcaaaaatatgagtccagcattcgacgggaaaatgaagcatttgaatctttgatcagacagaagtccctgatgatgatacctgttgatcaggatggccgttgcattggaccaactgttgcaaatgaaccagagcctcctttatgtcagaactcaattacaagaaaggcaggtggtaaaaaggcgcccgagaaggagatgcaggttattgtagacatgagagagttcatgagcagccttccgaatgtattacatcaaaaaggtatccgaatcgtaccggtcacccttgaagttggtgactatgtgctctctcctttgatctgtgttgaacggaaaagtattgcggacttgttccaaagctttgcttctggtcgtctgtacaatcaggttgagacaatggcacgttactacaagatcccggttctcctcatcgagttctcacaagataagagcttttcctttcagtctgcaaatgagattggtgatgatgtctctccgaccaacattatctcgaagctttctctgctagtgctgcattttcctcggcttcgcataatctggtcacgcagcttgcatgctacagcagaaatatttatgtcactgaaaacaaaccaggatgaacctgatgagaaaaaagcaacaagagttggcgtgccatccgaggatggtatcgtggaggatgatgtgaggtctgaaaattacaacacatcagccattgagttcttaagaaggcttcctggggtgacggattctaactaccgagcaatcatggatggatgcaatagcttggccgagctggccctgcttccagtggaaagcaaacatgcagaaaatgagcagcagattatgggctgggcaggctctaacccagcccaggaactccccctctcccccacgttcttctttgttgttgttgggcaagtagtgcggctgtttgagtctacgctacagaatgactatctaaatcacacctcctgtggagcctttcatgctcagatggaatcttgggaaagaattttgtactggatggcagttttgtgggagcgtgggttcagtcatgagaatcctcaagtgagatgcctggttatgcaatcctttttggatattgcatgggaacgctacaaggattgcactcagataattccaaggggttttgtgcttggtcctctgatacgtggtttgaatgatgtggttcatcataaggattttgttatgaatagacagcttgttaacttgaagtctagtgcagtttgtgaacaggttataaaagttgcaacatcactgataaatgccactgaaattccacttaacccgcttctgcatttcattgccacaattcctcgagagttctctgattatattggaccattgagagtagtagttcaaaaatggtttgttcagaaggaagaatgttctcctggtgacactttgttgagtaagctgattgatttctctgccaccttcgtaagtcaaaaacggaatgaaggttcgaatgtttttgatgacgaggatgtggatgcatgggaagctgaagcaaggtgggctagaacccttcttgtaacctcggaggaggaacatttgaaacgaatcttcaggtttttggaggcatatggctacaagctctctgagcaatgtcccagtggagatttcatacccataaaaaattttatcattgttttaagcttcattgaggaacttgaggtgagacagagagagcttgtttgccggagtataatacaatcttaagaggttcagatacagtaaatttattggtgctcgatgatctcaacaaaatgttcacagaatcacttttgctaattttggaaaatatggtggccttcagcaaactgtcttgccccgtattctggttttgagatgtggacgaacaggatttacccccaaagcttggaggaccaagccagcgtcgtttggctacctccattacttcttcagtattacagggtgtatgttccgtccttcttggagtggtggaagagggctgcagagacagtgcagggaatggtcaagaaagctggattctctcgtcattttgggagcctggaagatttggaaccactacaatagatatgtgtttgatggagagaccccagcctttctcgaaccctgaagcactctgaagcagactgatgatgagagaagcctttgagagctagcaggagtcaagggtctctcctatttaggagctcccttgctggtcgtctaaagactcctctttctcatggatttgtttctttatgtttatttctgcactccgtaaggagcgttttttttatttgtatttcggtcttctatggaccttttttctctgtaaaaggttccatttcacatgtttcacataatctttcagatatactgcattactactatcttgatgcttttgtcttctgtgctagtccaacaaagttttattttctactgtccttcaattttggttcgttg

SEQ ID NO: 46184 - DNA, 3342 bp, Zea Mays
aaactgctggaatatacttacaccgggaagaaggcgaaggccgtcgcgctctcggcggcggcggcggcggcggcagcggcgatgcttgcgttcgagcagcaggtgttggcggatctggtggaagatccgaacggaggtctggtggtgctctcctcgggtctccctctcgcttccctagccgctaccctcctcctccatctccaccagacccccggcaacgcggctggaggaggatgtctcctcgtcctctccgccaccgataccctcaaggcccggatccggcgccgcctccaagacaagctgcaggttcacgacgtgccccctgacctcgccgcgcagcagcgcgccaccctttacgcctctggcgctgctctcttcctctctccccgcgccctcgccgccgacctcctcacctcccgcctcctcccctcccgcgtccaagccctactcctcctctccgcccaccgctccaccgatacctcctccgatgccttcatctgccgcctcctccgtcaacgcaatcttctccccgtttacgccttctccgattgcccccatgccatggtcgccggtttctccaaggccgagcgtaccatgaagagcctctacgtccgccgtctccacctctggccccgcttccacgttctcgccgcagccgacctggaacgcgccccgcctgacgtcgtagacgtgcgcgttcccatgacgccgcccatgaggggtatccaggctgctgtcctcgctaccatggacgcttgtctcaaggaacttaggcgcaccaacaaggtggatgttgaggacctcaccgtcgacaagggcctcttcaagtccttcgatgagatcgtccggaggcagctcgaccccatctggcacactcttgggaagaagacaaagcagcttgtggctgacctcaggacgctacgcaagctgcttgattacctcgtcaggtatgacgccgttacatacttgaagtaccttgacacattgagagtatcagaaggtgtcagatcagtttggatacttgctgactcaagccataggatatttgagcttgcaaaaaggcgcgtttaccaggcagtgagaacagatggtgttaatgttagcatagataataagggcacaccaacaaagaagaggaaagtggcacataattctaccaagaaaggaaaagtaactgaaaatgaagattccactgtaggtcccaacactcagaaggctaatactgatgtgggcattgtattggaagaggttttggaggaggcaccgaaatggaaagtgttatgggggggaagtggcaatggcgcagacgccggcccctggcttcgcaggtggtgtgggcaatcggctgggcgccgatctgtgctgggcagcaaggagggagaccggagtagcagggaagaaagacggaattgttgcaagagatagcagaacaacggatgaagagcagtgccgggaatgtgcatgatgaggacaaaaatgatgaaagtggcatagttttggtatcatgtaaagatgaacgcacatgcttgcagctgcaggaatgcatattaaaaggcccctgtcaggttatgcgagaagagtgggagaagtatctgattggaaaagctgagctgcatggattgaataaggacaagagaaaatctgagcaaccaaaaggtgttggtgtcctggatggtgaagttcaaatgggatctagtgagagtgtgtgtccagttagcattagcaaactcgaaactaatgccttacttgccgctgcctctgaattaagaaatatatcaaatgaagcagatgtcaagagtagctcaaatagcagctgcagcaaggctgggggagcaaaggggaaaccaaagaaaaccacttcaaagagacaaggcagcaatcgaaaaaataaaagtaaggagggaaatgacaatagccaaggtactggtctggattctgaaggtcaatcaggaaaagcagatgtacaggctgagattgttgcttctaagatgtccgcatatgatgcttccatgtcagcctctacttctaatgttaaatttaaccattcatctgctttcggaaacttggcaaacgccaagccactacctcctgtgcagtttcatgctctagacagtgaccaccaggttcttgatgtatggaagccatctgtcattattgtttatcatccagatattacctttgtaagagaaattgaagtatacaaggcagaaaactcatcaaggaagttaaaagtttacttccttttttatgaagattccactgaggtgcaaaaatatgagtccagcattcgacgggaaaatgaagcatttgaatctttgatcagacagaagtccctgatgatgatacctgttgatcaggatggccgttgcattggaccaactgttgcaaatgaaccagagcctcctttatgtcagaactcaattacaagaaaggcaggtggtaaaaaggcgcccgagaaggagatgcaggttattgtagacatgagagagttcatgagcagccttccgaatgtattacatcaaaaaggttgagacaatggcacgttactacaagatcccggttctcctcatcgagttctcacaagataagagcttttcctttcagtctgcaaatgagattggtgatgatgtctctccgaccaacattatctcgaagctttctctgctagtgctgcattttcctcggcttcgcataatctggtcacgcagcttgcatgctacagcagaaatatttatgtcactgaaaacaaaccaggatgaacctgatgagaaaaaagcaacaagagttggcgtgccatccgaggatggtatcgtggaggatgatgtgaggtctgaaaattacaacacatcagccattgagttcttaagaaggcttcctggggtgacggattctaactaccgagcaatcatggatggatgcaatagcttggccgagctggccctgcttccagtggaaaggttggcggagctaatgggtggtcagaaagctgcgcggacgctcaaggagtttctcgatgccaagtgcccaaccatgttgtagccagagtgacgctctagcaggagtcaagggtctctcctatttaggagctcccttgctggtcgtctaaagactcctctttctcatggatttgtttctttatgtttatttctgcactccgtaaggagcgttttttttatttgtatttcggtcttctatggaccttttttctctgtaaaaggttccatttcacatgtttcacataatctttcagatatactgcattactactatcttgatgcttttgtcttctgtgctagtccaacaaagttttattttctactgtccttcaattttggttcgttg

SEQ ID NO: 46185 - DNA, 3021 bp, Zea Mays
aaactgctggaatatacttacaccgggaagaaggcgaaggccgtcgcgctctcggcggcggcggcggcggcggcagcggcgatgcttgcgttcgagcagcaggtgttggcggatctggtggaagatccgaacggaggtctggtggtgctctcctcgggtctccctctcgcttccctagccgctaccctcctcctccatctccaccagacccccggcaacgcggctggaggaggatgtctcctcgtcctctccgccaccgataccctcaaggcccggatccggcgccgcctccaagacaagctgcaggttcacgacgtgccccctgacctcgccgcgcagcagcgcgccaccctttacgcctctggcgctgctctcttcctctctccccgcgccctcgccgccgacctcctcacctcccgcctcctcccctcccgcgtccaagccctactcctcctctccgcccaccgctccaccgatacctcctccgatgccttcatctgccgcctcctccgtcaacgcaatcttctccccgtttacgccttctccgattgcccccatgccatggtcgccggtttctccaaggccgagcgtaccatgaagagcctctacgtccgccgtctccacctctggccccgcttccacgttctcgccgcagccgacctggaacgcgccccgcctgacgtcgtagacgtgcgcgttcccatgacgccgcccatgaggggtatccaggctgctgtcctcgctaccatggacgcttgtctcaaggaacttaggcgcaccaacaaggtggatgttgaggacctcaccgtcgacaagggcctcttcaagtccttcgatgagatcgtccggaggcagctcgaccccatctggcacactcttgggaagaagacaaagcagcttgtggctgacctcaggacgctacgcaagctgcttgattacctcgtcaggtatgacgccgttacatacttgaagtaccttgacacattgagagtatcagaaggtgtcagatcagtttggatacttgctgactcaagccataggatatttgagcttgcaaaaaggcgcgtttaccaggcagtgagaacagatggtgttaatgttagcatagataataagggcacaccaacaaagaagaggaaagtggcacataattctaccaagaaaggaaaagtaactggtagctgctcttggccccttcatttgcaggaattgttgcaagagatagcagaacaacggatgaagagcagtgccgggaatgtgcatgatgaggacaaaaatgatgaaagtggcatagttttggtatcatgtaaagatgaacgcacatgcttgcagctgcaggaatgcatattaaaaggcccctgtcaggttatgcgagaagagtgggagaagtatctgattggaaaagctgagctgcatggattgaataaggacaagagaaaatctgagcaaccaaaaggtgttggtgtcctggatggtgaagttcaaatgggatctagtgagagtgtgtgtccagttagcattagcaaactcgaaactaatgccttacttgccgctgcctctgaattaagaaatatatcaaatgaagcagatgtcaagagtagctcaaatagcagctgcagcaaggctgggggagcaaaggggaaaccaaagaaaaccacttcaaagagacaaggcagcaatcgaaaaaataaaagtaaggagggaaatgacaatagccaaggtactggtctggattctgaaggtcaatcaggaaaagcagatgtacaggctgagattgttgcttctaagatgtccgcatatgatgcttccatgtcagcctctacttctaatgttaaatttaaccattcatctgctttcggaaacttggcaaacgccaagccactacctcctgtgcagtttcatgctctagacagtgaccaccaggttcttgatattccactgaggtgcaaaaatatgagtccagcattcgacgggaaaatgaagcatttgaatctttgatcagacagaagtccctgatgatgatacctgttgatcaggatggccgttgcattggaccaactgttgcaaatgaaccagagcctcctttatgtcagaactcaattacaagaaaggcaggtggtaaaaaggcgcccgagaaggagatgcaggttattgtagacatgagagagttcatgagcagccttccgaatgtattacatcaaaaaggttgagacaatggcacgttactacaagatcccggttctcctcatcgagttctcacaagataagagcttttcctttcagtctgcaaatgagattggtgatgatgtctctccgaccaacattatctcgaagctttctctgctagtgctgcattttcctcggcttcgcataatctggtcacgcagcttgcatgctacagcagaaatatttatgtcactgaaaacaaaccaggatgaacctgatgagaaaaaagcaacaagagttggcgtgccatccgaggatggtatcgtggaggatgatgtgaggtctgaaaattacaacacatcagccattgagttcttaagaaggcttcctggggtgacggattctaactaccgagcaatcatggatggatgcaatagcttggccgagctggccctgcttccagtggaaaggttggcggagctaatgggtggtcagaaagctgcgcggacgctcaaggagtttctcgatgccaagtgcccaaccatgttgtagccagagtgacgctctagcaggagtcaagggtctctcctatttaggagctcccttgctggtcgtctaaagactcctctttctcatggatttgtttctttatgtttatttctgcactccgtaaggagcgttttttttatttgtatttcggtcttctatggaccttttttctctgtaaaaggttccatttcacatgtttcacataatctttcagatatactgcattactactatcttgatgcttttgtcttctgtgctagtccaacaaagttttattttctactgtccttcaattttggttcgttg

SEQ ID NO: 46186 - DNA, 3232 bp, Zea Mays
agagaaactgctggaatatacttacaccgggaagaaggcgaaggccgtcgcgctctcggcggcggcggcggcggcggcagcggcgatgcttgcgttcgagcagcaggtgttggcggatctggtggaagatccgaacggaggtctggtggtgctctcctcgggtctccctctcgcttccctagccgctaccctcctcctccatctccaccagacccccggcaacgcggctggaggaggatgtctcctcgtcctctccgccaccgataccctcaaggcccggatccggcgccgcctccaagacaagctgcaggttcacgacgtgccccctgacctcgccgcgcagcagcgcgccaccctttacgcctctggcgctgctctcttcctctctccccgcgccctcgccgccgacctcctcacctcccgcctcctcccctcccgcgtccaagccctactcctcctctccgcccaccgctccaccgatacctcctccgatgccttcatctgccgcctcctccgtcaacgcaatcttctccccgtttacgccttctccgattgcccccatgccatggtcgccggtttctccaaggccgagcgtaccatgaagagcctctacgtccgccgtctccacctctggccccgcttccacgttctcgccgcagccgacctggaacgcgccccgcctgacgtcgtagacgtgcgcgttcccatgacgccgcccatgaggggtatccaggctgctgtcctcgctaccatggacgcttgtctcaaggaacttaggcgcaccaacaaggtggatgttgaggacctcaccgtcgacaagggcctcttcaagtccttcgatgagatcgtccggaggcagctcgaccccatctggcacactcttgggaagaagacaaagcagcttgtggctgacctcaggacgctacgcaagctgcttgattacctcgtcaggtatgacgccgttacatacttgaagtaccttgacacattgagagtatcagaaggtgtcagatcagtttggatacttgctgactcaagccataggatatttgagcttgcaaaaaggcgcgtttaccaggcagtgagaacagatggtgttaatgttagcatagataataagggcacaccaacaaagaagaggaaagtggcacataattctaccaagaaaggaaaagtaactggtagctgctcttggccccttcatttgcaggtcccaacactcagaaggctaatactgatgtgggcattgtattggaagaggttttggaggaggcaccgaaatggaaagtgttatgggaattgttgcaagagatagcagaacaacggatgaagagcagtgccgggaatgtgcatgatgaggacaaaaatgatgaaagtggcatagttttggtatcatgtaaagatgaacgcacatgcttgcagctgcaggaatgcatattaaaaggcccctgtcaggttatgcgagaagagtgggagaagtatctgattggaaaagctgagctgcatggattgaataaggacaagagaaaatctgagcaaccaaaaggtgttggtgtcctggatggtgaagttcaaatgggatctagtgagagtgtgtgtccagttagcattagcaaactcgaaactaatgccttacttgccgctgcctctgaattaagaaatatatcaaatgaagcagatgtcaagagtagctcaaatagcagctgcagcaaggctgggggagcaaaggggaaaccaaagaaaaccacttcaaagagacaaggcagcaatcgaaaaaataaaagtaaggagggaaatgacaatagccaaggtactggtctggattctgaaggtcaatcaggaaaagcagatgtacaggctgagattgttgcttctaagatgtccgcatatgatgcttccatgtcagcctctacttctaatgttaaatttaaccattcatctgctttcggaaacttggcaaacgccaagccactacctcctgtgcagtttcatgctctagacagtgaccaccaggttcttgatgtatggaagccatctgtcattattgtttatcatccagatattacctttgtaagagaaattgaagtatacaaggcagaaaactcatcaaggaagttaaaagtttacttccttttttatgaagattccactgaggtgcaaaaatatgagtccagcattcgacgggaaaatgaagcatttgaatctttgatcagacagaagtccctgatgatgatacctgttgatcaggatggccgttgcattggaccaactgttgcaaatgaaccagagcctcctttatgtcagaactcaattacaagaaaggcaggtggtaaaaaggcgcccgagaaggagatgcaggttattgtagacatgagagagttcatgagcagccttccgaatgtattacatcaaaaaggttgagacaatggcacgttactacaagatcccggttctcctcatcgagttctcacaagataagagcttttcctttcagtctgcaaatgagattggtgatgatgtctctccgaccaacattatctcgaagctttctctgctagtgctgcattttcctcggcttcgcataatctggtcacgcagcttgcatgctacagcagaaatatttatgtcactgaaaacaaaccaggatgaacctgatgagaaaaaagcaacaagagttggcgtgccatccgaggatggtatcgtggaggatgatgtgaggtctgaaaattacaacacatcagccattgagttcttaagaaggcttcctggggtgacggattctaactaccgagcaatcatggatggatgcaatagcttggccgagctggccctgcttccagtggaaaggttggcggagctaatgggtggtcagaaagctgcgcggacgctcaaggagtttctcgatgccaagtgcccaaccatgttgtagccagagtgacgctctagcaggagtcaagggtctctcctatttaggagctcccttgctggtcgtctaaagactcctctttctcatggatttgtttctttatgtttatttctgcactccgtaaggagcgttttttttatttgtatttcggtcttctatggaccttttttctctgtaaaaggttccatttcacatgtttcacataatctttcagatatactgcattactactatcttgatgcttttgtcttctgtgctagtccaacaaagttttattttctactgtccttcaattttggttcgttg

SEQ ID NO: 46187 - DNA, 3092 bp, Zea Mays
agagaaactgctggaatatacttacaccgggaagaaggcgaaggccgtcgcgctctcggcggcggcggcggcggcggcagcggcgatgcttgcgttcgagcagcaggtgttggcggatctggtggaagatccgaacggaggtctggtggtgctctcctcgggtctccctctcgcttccctagccgctaccctcctcctccatctccaccagacccccggcaacgcggctggaggaggatgtctcctcgtcctctccgccaccgataccctcaaggcccggatccggcgccgcctccaagacaagctgcaggttcacgacgtgccccctgacctcgccgcgcagcagcgcgccaccctttacgcctctggcgctgctctcttcctctctccccgcgccctcgccgccgacctcctcacctcccgcctcctcccctcccgcgtccaagccctactcctcctctccgcccaccgctccaccgatacctcctccgatgccttcatctgccgcctcctccgtcaacgcaatcttctccccgtttacgccttctccgattgcccccatgccatggtcgccggtttctccaaggccgagcgtaccatgaagagcctctacgtccgccgtctccacctctggccccgcttccacgttctcgccgcagccgacctggaacgcgccccgcctgacgtcgtagacgtgcgcgttcccatgacgccgcccatgaggggtatccaggctgctgtcctcgctaccatggacgcttgtctcaaggaacttaggcgcaccaacaaggtggatgttgaggacctcaccgtcgacaagggcctcttcaagtccttcgatgagatcgtccggaggcagctcgaccccatctggcacactcttgggaagaagacaaagcagcttgtggctgacctcaggacgctacgcaagctgcttgattacctcgtcaggtatgacgccgttacatacttgaagtaccttgacacattgagagtatcagaaggtgtcagatcagtttggatacttgctgactcaagccataggatatttgagcttgcaaaaaggcgcgtttaccaggcagtgagaacagatggtgttaatgttagcatagataataagggcacaccaacaaagaagaggaaagtggcacataattctaccaagaaaggaaaagtaactgaaaatgaagattccactgtaggtcccaacactcagaaggctaatactgatgtgggcattgtattggaagaggttttggaggaggcaccgaaatggaaagtgttatgggaattgttgcaagagatagcagaacaacggatgaagagcagtgccgggaatgtgcatgatgaggacaaaaatgatgaaagtggcatagttttggtatcatgtaaagatgaacgcacatgcttgcagctgcaggaatgcatattaaaaggcccctgtcaggttatgcgagaagagtgggagaagtatctgattggaaaagctgagctgcatggattgaataaggacaagagaaaatctgagcaaccaaaagatgtcaagagtagctcaaatagcagctgcagcaaggctgggggagcaaaggggaaaccaaagaaaaccacttcaaagagacaaggcagcaatcgaaaaaataaaagtaaggagggaaatgacaatagccaaggtactggtctggattctgaaggtcaatcaggaaaagcagatgtacaggctgagattgttgcttctaagatgtccgcatatgatgcttccatgtcagcctctacttctaatgttaaatttaaccattcatctgctttcggaaacttggcaaacgccaagccactacctcctgtgcagtttcatgctctagacagtgaccaccaggttcttgatgtatggaagccatctgtcattattgtttatcatccagatattacctttgtaagagaaattgaagtatacaaggcagaaaactcatcaaggaagttaaaagtttacttccttttttatgaagattccactgaggtgcaaaaatatgagtccagcattcgacgggaaaatgaagcatttgaatctttgatcagacagaagtccctgatgatgatacctgttgatcaggatggccgttgcattggaccaactgttgcaaatgaaccagagcctcctttatgtcagaactcaattacaagaaaggcaggtggtaaaaaggcgcccgagaaggagatgcaggttattgtagacatgagagagttcatgagcagccttccgaatgtattacatcaaaaaggttgagacaatggcacgttactacaagatcccggttctcctcatcgagttctcacaagataagagcttttcctttcagtctgcaaatgagattggtgatgatgtctctccgaccaacattatctcgaagctttctctgctagtgctgcattttcctcggcttcgcataatctggtcacgcagcttgcatgctacagcagaaatatttatgtcactgaaaacaaaccaggatgaacctgatgagaaaaaagcaacaagagttggcgtgccatccgaggatggtatcgtggaggatgatgtgaggtctgaaaattacaacacatcagccattgagttcttaagaaggcttcctggggtgacggattctaactaccgagcaatcatggatggatgcaatagcttggccgagctggccctgcttccagtggaaaggttggcggagctaatgggtggtcagaaagctgcgcggacgctcaaggagtttctcgatgccaagtgcccaaccatgttgtagccagagtgacgctctagcaggagtcaagggtctctcctatttaggagctcccttgctggtcgtctaaagactcctctttctcatggatttgtttctttatgtttatttctgcactccgtaaggagcgttttttttatttgtatttcggtcttctatggaccttttttctctgtaaaaggttccatttcacatgtttcacataatctttcagatatactgcattactactatcttgatgcttttgtcttctgtgctagtccaacaaagttttattttctactgtccttcaattttggttcgttg

SEQ ID NO: 46188 - DNA, 2973 bp, Zea Mays
cggaatagagaaactgctggaatatacttacaccgggaagaaggcgaaggccgtcgcgctctcggcggcggcggcggcggcggcagcggcgatgcttgcgttcgagcagcaggtgttggcggatctggtggaagatccgaacggaggtctggtggtgctctcctcgggtctccctctcgcttccctagccgctaccctcctcctccatctccaccagacccccggcaacgcggctggaggaggatgtctcctcgtcctctccgccaccgataccctcaaggcccggatccggcgccgcctccaagacaagctgcaggttcacgacgtgccccctgacctcgccgcgcagcagcgcgccaccctttacgcctctggcgctgctctcttcctctctccccgcgccctcgccgccgacctcctcacctcccgcctcctcccctcccgcgtccaagccctactcctcctctccgcccaccgctccaccgatacctcctccgatgccttcatctgccgcctcctccgtcaacgcaatcttctccccgtttacgccttctccgattgcccccatgccatggtcgccggtttctccaaggccgagcgtaccatgaagagcctctacgtccgccgtctccacctctggccccgcttccacgttctcgccgcagccgacctggaacgcgccccgcctgacgtcgtagacgtgcgcgttcccatgacgccgcccatgaggggtatccaggctgctgtcctcgctaccatggacgcttgtctcaaggaacttaggcgcaccaacaaggtggatgttgaggacctcaccgtcgacaagggcctcttcaagtccttcgatgagatcgtccggaggcagctcgaccccatctggcacactcttgggaagaagacaaagcagcttgtggctgacctcaggacgctacgcaagctgcttgattacctcgtcaggtatgacgccgttacatacttgaagtaccttgacacattgagagtatcagaaggtgtcagatcagtttggatacttgctgactcaagccataggatatttgagcttgcaaaaaggcgcgtttaccaggcagtgagaacagatggtgttaatgttagcatagataataagggcacaccaacaaagaagaggaaagtggcacataattctaccaagaaaggaaaagtaactgaaaatgaagattccactgtaggtcccaacactcagaaggctaatactgatgtgggcattgtattggaagaggttttggaggaggcaccgaaatggaaagtgttatgggggggaagtggcaatggcgcagacgccggcccctggcttcgcaggtggtgtgggcaatcggctgggcgccgatctgtgctgggcagcaaggagggagaccggagtagcagggaagaaagacggtttagagataattcattgcttgctttatttcataactttccattacataaataggccggctattggcctggccgcagccttctaactgcttgactctatctccttaaactctcctaaaaaatctcaacaacttctaatctgttattatccctagatattctcaactaatatctctagataaactcaactaggcctcttatccttaggcctgtgcctgtacgtggcgccccacataacatggtgtgtatagcatgttgaactattgtttgttgtgctaaatgctaattcttaactatctctgttttttctattcttgtagcaaactagcaacctcatccctaactatcagataatatgagtattaatcataaaaaatgtttttgctttgagttgactgctttgaagtttgcaggaattgttgcaagagatagcagaacaacggatgaagagcagtgccgggaatgtgcatgatgaggacaaaaatgatgaaagtggcatagttttggtatcatgtaaagatgaacgcacatgcttgcagctgcaggaatgcatattaaaaggcccctgtcaggatggccgttgcattggaccaactgttgcaaatgaaccagagcctcctttatgtcagaactcaattacaagaaaggcaggtggtaaaaaggcgcccgagaaggagatgcaggttattgtagacatgagagagttcatgagcagccttccgaatgtattacatcaaaaaggttgagacaatggcacgttactacaagatcccggttctcctcatcgagttctcacaagataagagcttttcctttcagtctgcaaatgagattggtgatgatgtctctccgaccaacattatctcgaagctttctctgctagtgctgcattttcctcggcttcgcataatctggtcacgcagcttgcatgctacagcagaaatatttatgtcactgaaaacaaaccaggatgaacctgatgagaaaaaagcaacaagagttggcgtgccatccgaggatggtatcgtggaggatgatgtgaggtctgaaaattacaacacatcagccattgagttcttaagaaggcttcctggggtgacggattctaactaccgagcaatcatggatggatgcaatagcttggccgagctggccctgcttccagtggaaaggttggcggagctaatgggtggtcagaaagctgcgcggacgctcaaggagtttctcgatgccaagtgcccaaccatgttgtagccagagtgacgctctagcaggagtcaagggtctctcctatttaggagctcccttgctggtcgtctaaagactcctctttctcatggatttgtttctttatgtttatttctgcactccgtaaggagcgttttttttatttgtatttcggtcttctatggaccttttttctctgtaaaaggttccatttcacatgtttcacataatctttcagatatactgcattactactatcttgatgcttttgtcttctgtgctagtccaacaaagttttattttctactgtccttcaattttggttcgttg

SEQ ID NO: 46189 - DNA, 3349 bp, Zea Mays
aaactgctggaatatacttacaccgggaagaaggcgaaggccgtcgcgctctcggcggcggcggcggcggcggcagcggcgatgcttgcgttcgagcagcaggtgttggcggatctggtggaagatccgaacggaggtctggtggtgctctcctcgggtctccctctcgcttccctagccgctaccctcctcctccatctccaccagacccccggcaacgcggctggaggaggatgtctcctcgtcctctccgccaccgataccctcaaggcccggatccggcgccgcctccaagacaagctgcaggttcacgacgtgccccctgacctcgccgcgcagcagcgcgccaccctttacgcctctggcgctgctctcttcctctctccccgcgccctcgccgccgacctcctcacctcccgcctcctcccctcccgcgtccaagccctactcctcctctccgcccaccgctccaccgatacctcctccgatgccttcatctgccgcctcctccgtcaacgcaatcttctccccgtttacgccttctccgattgcccccatgccatggtcgccggtttctccaaggccgagcgtaccatgaagagcctctacgtccgccgtctccacctctggccccgcttccacgttctcgccgcagccgacctggaacgcgccccgcctgacgtcgtagacgtgcgcgttcccatgacgccgcccatgaggggtatccaggctgctgtcctcgctaccatggacgcttgtctcaaggaacttaggcgcaccaacaaggtggatgttgaggacctcaccgtcgacaagggcctcttcaagtccttcgatgagatcgtccggaggcagctcgaccccatctggcacactcttgggaagaagacaaagcagcttgtggctgacctcaggacgctacgcaagctgcttgattacctcgtcaggtatgacgccgttacatacttgaagtaccttgacacattgagagtatcagaaggtgtcagatcagtttggatacttgctgactcaagccataggatatttgagcttgcaaaaaggcgcgtttaccaggcagtgagaacagatggtgttaatgttagcatagataataagggcacaccaacaaagaagaggaaagtggcacataattctaccaagaaaggaaaagtaactggtagctgctcttggccccttcatttgcaggaattgttgcaagagatagcagaacaacggatgaagagcagtgccgggaatgtgcatgatgaggacaaaaatgatgaaagtggcatagttttggtatcatgtaaagatgaacgcacatgcttgcagctgcaggaatgcatattaaaaggcccctgtcaggttatgcgagaagagtgggagaagtatctgattggaaaagctgagctgcatggattgaataaggacaagagaaaatctgagcaaccaaaaggtgttggtgtcctggatggtgaagttcaaatgggatctagtgagagtgtgtgtccagttagcattagcaaactcgaaactaatgccttacttgccgctgcctctgaattaagaaatatatcaaatgaagcagatgtcaagagtagctcaaatagcagctgcagcaaggctgggggagcaaaggggaaaccaaagaaaaccacttcaaagagacaaggcagcaatcgaaaaaataaaagtaaggagggaaatgacaatagccaaggtactggtctggattctgaaggtcaatcaggaaaagcagatgtacaggctgagattgttgcttctaagatgtccgcatatgatgcttccatgtcagcctctacttctaatgttaaatttaaccattcatctgctttcggaaacttggcaaacgccaagccactacctcctgtgcagtttcatgctctagacagtgaccaccaggttcttgatgtatggaagccatctgtcattattgtttatcatccagatattacctttgtaagagaaattgaagtatacaaggcagaaaactcatcaaggaagttaaaagtttacttccttttttatgaagattccactgaggtgcaaaaatatgagtccagcattcgacgggaaaatgaagcatttgaatctttgatcagacagaagtccctgatgatgatacctgttgatcaggatggccgttgcattggaccaactgttgcaaatgaaccagagcctcctttatgtcagaactcaattacaagaaaggcaggtggtaaaaaggcgcccgagaaggagatgcaggttattgtagacatgagagagttcatgagcagccttccgaatgtattacatcaaaaaggttgagacaatggcacgttactacaagatcccggttctcctcatcgagttctcacaagataagagcttttcctttcagtctgcaaatgagattggtgatgatgtctctccgaccaacattatctcgaagctttctctgctagtgctgcattttcctcggcttcgcataatctggtcacgcagcttgcatgctacagcagaaatatttatgtcactgaaaacaaaccaggatgaacctgatgagaaaaaagcaacaagagttggcgtgccatccgaggatggtatcgtggaggatgatgtgaggtctgaaaattacaacacatcagccattgagttcttaagaaggcttcctggggtgacggattctaactaccgagcaatcatggatggatgcaatagcttggccgagctggccctgcttccagtggaaagcaaacatgcagaaaatgagcagcagattatgggctgggcaggctctaacccagcccaggaactccccctctcccccacgttcttctttgttgttgttgggcaagtaataagtagggtttttggtttcaccagtctctggccatcccaatacccgtcttcgcttctcaagtggaaatggcacatcagtacaataattgtttatacaggcacttttagcttatgttgcgttggttgtccaataaccatattcaggtagtgcggctgtttgagtctacgctacagaatgactatctaaatcacacctcctgtggagcctttcatgctcagatggaatcttgggaaagaattttgtactggatggcagttttgtgggagcgtgggttcagtcatgagaatcctcaagtgagatgcctggttatgcaatcctttttggatattgcatgggaacgctacaaggattgcactcagataattccaaggggttttgtgcttggtcctctgatacgtggtttgaatgatgtggttcatcataaggattttggcattgggggtgcttatagttcgaaaaccataaaagatgctgagagatttt

SEQ ID NO: 46190 - DNA, 3828 bp, Zea Mays
aaactgctggaatatacttacaccgggaagaaggcgaaggccgtcgcgctctcggcggcggcggcggcggcggcagcggcgatgcttgcgttcgagcagcaggtgttggcggatctggtggaagatccgaacggaggtctggtggtgctctcctcgggtctccctctcgcttccctagccgctaccctcctcctccatctccaccagacccccggcaacgcggctggaggaggatgtctcctcgtcctctccgccaccgataccctcaaggcccggatccggcgccgcctccaagacaagctgcaggttcacgacgtgccccctgacctcgccgcgcagcagcgcgccaccctttacgcctctggcgctgctctcttcctctctccccgcgccctcgccgccgacctcctcacctcccgcctcctcccctcccgcgtccaagccctactcctcctctccgcccaccgctccaccgatacctcctccgatgccttcatctgccgcctcctccgtcaacgcaatcttctccccgtttacgccttctccgattgcccccatgccatggtcgccggtttctccaaggccgagcgtaccatgaagagcctctacgtccgccgtctccacctctggccccgcttccacgttctcgccgcagccgacctggaacgcgccccgcctgacgtcgtagacgtgcgcgttcccatgacgccgcccatgaggggtatccaggctgctgtcctcgctaccatggacgcttgtctcaaggaacttaggcgcaccaacaaggtggatgttgaggacctcaccgtcgacaagggcctcttcaagtccttcgatgagatcgtccggaggcagctcgaccccatctggcacactcttgggaagaagacaaagcagcttgtggctgacctcaggacgctacgcaagctgcttgattacctcgtcaggtatgacgccgttacatacttgaagtaccttgacacattgagagtatcagaaggtgtcagatcagtttggatacttgctgactcaagccataggatatttgagcttgcaaaaaggcgcgtttaccaggcagtgagaacagatggtgttaatgttagcatagataataagggcacaccaacaaagaagaggaaagtggcacataattctaccaagaaaggaaaagtaactgaaaatgaagattccactgtaggtcccaacactcagaaggctaatactgatgtgggcattgtattggaagaggttttggaggaggcaccgaaatggaaagtgttatgggaattgttgcaagagatagcagaacaacggatgaagagcagtgccgggaatgtgcatgatgaggacaaaaatgatgaaagtggcatagttttggtatcatgtaaagatgaacgcacatgcttgcagctgcaggaatgcatattaaaaggcccctgtcaggttatgcgagaagagtgggagaagtatctgattggaaaagctgagctgcatggattgaataaggacaagagaaaatctgagcaaccaaaaggtgttggtgtcctggatggtgaagttcaaatgggatctagtgagagtgtgtgtccagttagcattagcaaactcgaaactaatgccttacttgccgctgcctctgaattaagaaatatatcaaatgaagcagatgtcaagagtagctcaaatagcagctgcagcaaggctgggggagcaaaggggaaaccaaagaaaaccacttcaaagagacaaggcagcaatcgaaaaaataaaagtaaggagggaaatgacaatagccaaggtactggtctggattctgaaggtcaatcaggaaaagcagatgtacaggctgagattgttgcttctaagatgtccgcatatgatgcttccatgtcagcctctacttctaatgttaaatttaaccattcatctgctttcggaaacttggcaaacgccaagccactacctcctgtgcagtttcatgctctagacagtgaccaccaggttcttgatgtatggaagccatctgtcattattgtttatcatccagatattacctttgtaagagaaattgaagtatacaaggcagaaaactcatcaaggaagttaaaagtttacttccttttttatgaagattccactgaggtgcaaaaatatgagtccagcattcgacgggaaaatgaagcatttgaatctttgatcagacagaagtccctgatgatgatacctgttgatcaggatggccgttgcattggaccaactgttgcaaatgaaccagagcctcctttatgtcagaactcaattacaagaaaggcaggtggtaaaaaggcgcccgagaaggagatgcaggttattgtagacatgagagagttcatgagcagccttccgaatgtattacatcaaaaaggtatccgaatcgtaccggtcacccttgaagttggtgactatgtgctctctcctttgatctgtgttgaacggaaaagtattgcggacttgttccaaagctttgcttctggtcgtctgtacaatcaggttgagacaatggcacgttactacaagatcccggttctcctcatcgagttctcacaagataagagcttttcctttcagtctgcaaatgagattggtgatgatgtctctccgaccaacattatctcgaagctttctctgctagtgctgcattttcctcggcttcgcataatctggtcacgcagcttgcatgctacagcagaaatatttatgtcactgaaaacaaaccaggatgaacctgatgagaaaaaagcaacaagagttggcgtgccatccgaggatggtatcgtggaggatgatgtgaggtctgaaaattacaacacatcagccattgagttcttaagaaggcttcctggggtgacggattctaactaccgagcaatcatggatggatgcaatagcttggccgagctggccctgcttccagtggaaaggttggcggagctaatgggtggtcagaaagctgcgcggacgctcaaggagtttctcgatgccaagtgcccaaccatgttgtagccagagtgacgctgtactgtttgtattgtgtcctgtgggatacaaatacttcagttgatgtgccttatatatatatattaaaaaaaacaaatgttgtaccaatgccaatgcctgtgcatgttgttgtctggaatcgatagacacatgtgctgtgcatggtaaattttgcagaatcgtgtgcttgtgggccaaagcaaacatgcagaaaatgagcagcagattatgggctgggcaggctctaacccagcccaggaactccccctctcccccacgttcttctttgttgttgttgggcaagtaataagtagggtttttggtttcaccagtctctggccatcccaatacccgtcttcgcttctcaagtggaaatggcacatcagtacaataattgtttatacaggcacttttagcttatgttgcgttggttgtccaataaccatattcaggtagtgcggctgtttgagtctacgctacagaatgactatctaaatcacacctcctgtggagcctttcatgctcagatggaatcttgggaaagaattttgtactggatggcagttttgtgggagcgtgggttcagtcatgagaatcctcaagtgagatgcctggttatgcaatcctttttggatattgcatgggaacgctacaaggattgcactcagataattccaaggggttttgtgcttggtcctctgatacgtggtttgaatgatgtggttcatcataaggattttggcattgggggtgcttatagttcgaaaaccataaaagatgctgagagatttt

SEQ ID NO: 46191 - DNA, 3278 bp, Zea Mays
aaactgctggaatatacttacaccgggaagaaggcgaaggccgtcgcgctctcggcggcggcggcggcggcggcagcggcgatgcttgcgttcgagcagcaggtgttggcggatctggtggaagatccgaacggaggtctggtggtgctctcctcgggtctccctctcgcttccctagccgctaccctcctcctccatctccaccagacccccggcaacgcggctggaggaggatgtctcctcgtcctctccgccaccgataccctcaaggcccggatccggcgccgcctccaagacaagctgcaggttcacgacgtgccccctgacctcgccgcgcagcagcgcgccaccctttacgcctctggcgctgctctcttcctctctccccgcgccctcgccgccgacctcctcacctcccgcctcctcccctcccgcgtccaagccctactcctcctctccgcccaccgctccaccgatacctcctccgatgccttcatctgccgcctcctccgtcaacgcaatcttctccccgtttacgccttctccgattgcccccatgccatggtcgccggtttctccaaggccgagcgtaccatgaagagcctctacgtccgccgtctccacctctggccccgcttccacgttctcgccgcagccgacctggaacgcgccccgcctgacgtcgtagacgtgcgcgttcccatgacgccgcccatgaggggtatccaggctgctgtcctcgctaccatggacgcttgtctcaaggaacttaggcgcaccaacaaggtggatgttgaggacctcaccgtcgacaagggcctcttcaagtccttcgatgagatcgtccggaggcagctcgaccccatctggcacactcttgggaagaagacaaagcagcttgtggctgacctcaggacgctacgcaagctgcttgattacctcgtcaggtatgacgccgttacatacttgaagtaccttgacacattgagagtatcagaaggtgtcagatcagtttggatacttgctgactcaagccataggatatttgagcttgcaaaaaggcgcgtttaccaggcagtgagaacagatggtgttaatgttagcatagataataagggcacaccaacaaagaagaggaaagtggcacataattctaccaagaaaggaaaagtaactgaaaatgaagattccactgtaggtcccaacactcagaaggctaatactgatgtgggcattgtattggaagaggttttggaggaggcaccgaaatggaaagtgttatgggaattgttgcaagagatagcagaacaacggatgaagagcagtgccgggaatgtgcatgatgaggacaaaaatgatgaaagtggcatagttttggtatcatgtaaagatgaacgcacatgcttgcagctgcaggaatgcatattaaaaggcccctgtcaggttatgcgagaagagtgggagaagtatctgattggaaaagctgagctgcatggattgaataaggacaagagaaaatctgagcaaccaaaaggtgttggtgtcctggatggtgaagttcaaatgggatctagtgagagtgtgtgtccagttagcattagcaaactcgaaactaatgccttacttgccgctgcctctgaattaagaaatatatcaaatgaagcagatgtcaagagtagctcaaatagcagctgcagcaaggctgggggagcaaaggggaaaccaaagaaaaccacttcaaagagacaaggcagcaatcgaaaaaataaaagtaaggagggaaatgacaatagccaaggtactggtctggattctgaaggtcaatcaggaaaagcagatgtacaggctgagattgttgcttctaagatgtccgcatatgatgcttccatgtcagcctctacttctaatgttaaatttaaccattcatctgctttcggaaacttggcaaacgccaagccactacctcctgtgcagtttcatgctctagacagtgaccaccaggttcttgatgtatggaagccatctgtcattattgtttatcatccagatattacctttgtaagagaaattgaagtatacaaggcagaaaactcatcaaggaagttaaaagtttacttccttttttatgaagattccactgaggtgcaaaaatatgagtccagcattcgacgggaaaatgaagcatttgaatctttgatcagacagaagtccctgatgatgatacctgttgatcaggatggccgttgcattggaccaactgttgcaaatgaaccagagcctcctttatgtcagaactcaattacaagaaaggcaggtggtaaaaaggcgcccgagaaggagatgcaggttattgtagacatgagagagttcatgagcagccttccgaatgtattacatcaaaaaggttgagacaatggcacgttactacaagatcccggttctcctcatcgagttctcacaagataagagcttttcctttcagtctgcaaatgagattggtgatgatgtctctccgaccaacattatctcgaagctttctctgctagtgctgcattttcctcggcttcgcataatctggtcacgcagcttgcatgctacagcagaaatatttatgtcactgaaaacaaaccaggatgaacctgatgagaaaaaagcaacaagagttggcgtgccatccgaggatggtatcgtggaggatgatgtgaggtctgaaaattacaacacatcagccattgagttcttaagaaggcttcctggggtgacggattctaactaccgagcaatcatggatggatgcaatagcttggccgagctggccctgcttccagtggaaagcaaacatgcagaaaatgagcagcagattatgggctgggcaggctctaacccagcccaggaactccccctctcccccacgttcttctttgttgttgttgggcaagtagtgcggctgtttgagtctacgctacagaatgactatctaaatcacacctcctgtggagcctttcatgctcagatggaatcttgggaaagaattttgtactggatggcagttttgtgggagcgtgggttcagtcatgagaatcctcaagtgagatgcctggttatgcaatcctttttggatattgcatgggaacgctacaaggattgcactcagataattccaaggggttttgtgcttggtcctctgatacgtggtttgaatgatgtggttcatcataaggattttggcattgggggtgcttatagttcgaaaaccataaaagatgctgagagatttt

SEQ ID NO: 46192 - DNA, 1451 bp, Zea Mays
tgtttgtatactacaactattcaatagattttattgtatctgtggtgcttggcagattcagcagaaaggttgctggtcaccaccaaaatgaagagttttctgtgagagggaaagaaccaaaggatgaagttcagatttacacatggaaggatgccactctccgtgagcttactgatcttgtgaaagaggttgctcttccagcaaggaaaaggaacgcgaggctttcttttgcatttgtatacccagacaagaatggtcgttttgttgtcagacaggtaacgctataagaatttgggcatgtttggacccttagctccatctcgccttgcttcgctgggcaaactagccttgccaggaaaggtggacgctctgtttgtttccctgggcgggctaggttactaggtgctgtatgctttcctagttaaaaacttgcttttgcttgcaagctttgtgatttaactgcttggtactcttgctcatggagaattggagatgcaatcaccaaatttccttatatgtgagattgcctccatccatctaaaggaacacaacctgcttgaaaatttgcagtacacataccataccaagtcatatatacaatacaagacgactagagaaccatcccaggcattaccatggacacaatcttccacatgtcattcacccaaaatacaccgtgccatatatagtctcatttgtccaagctgcgtattatgccttgtattcattatgccctgtataggttcaaatggcctatataccgtttcatcattgtgtaaatttccatgtgtatgcactgcactgttgcccttcgcttatggccatgtgtatttcgtcgtgcttgaacatctgaaggtgggttcgaccttcgcttatggccatggaagaggtgatgatgccaaaactcttgcagagcttgggttccagattggcgattatctgagcgtcgcgatcatgtaactgcagattggcgattacctgagcgtcgcgatcatgtaagccggtgcccgcaatgagttccggtgactgcaccggatagaactgatgtgatgtaaaaaatgcattggttgcgacgagcaagggaggagtatctgttagcgctaggaagtggaaccaaaactgtctgtaatgccggtactaccaaagttgcctagacactttgaacgatcaaagcgtatggtatggtttcttgttggtatggtgcttgtctgcggtgcctgaaatttccaatccattgagctgcacgtcaatggctccatgttaagatgggctgaacggtattccaaggggtgggcaagatacccattatctgaaccgttatccaaacctgaactacctgaacctgtacccgacctacccaaacctgaattaaccaaacactagtttggatcctaggtctcaaaacccaaaattatattgggtaccgggtaacatgtctcgtgcctgaatta

SEQ ID NO: 46193 - DNA, 1366 bp, Zea Mays
ccaaaaaaaaagaaaaatgtactcggagtcaatagttgcccaaattgtttcgatcgcccatttcgacatcgtatcggattttttcaaaataatggggaaaatagcgaagggaaaaaaaaaccctccgtgtggccgtcccaaactcccaatgagatgaagagaacgcaccacacgaccgcgtgacagaggcacagagcaaaagccaaactggcagccagcacagcagagcgccactcgactcgactcatcctttcggttcccctcccccctccgcgttccacaaccctcgagaagcttccaccctcccctcctgcgacgccgccagagccgcggaaaccctacccaccccggccgctcacgcaccgggcgcccgccgccgccggtcgcgtacctgccgccgacaccgcccaaagcgattggatctagagatcgtcagtagccacgatggaggactgggattctgaagaattccagccagttgtgcctgttgtgaaagccgagccacttaaaaatcagtgggctgatgaagatgttgaagaagatgatgtaaaagaatcatgggaagaagaggaggaggaggagaaacctaagccagcgccagtggaaaaggtcgctgcaaaacctagcactaaggctcctgctaaaaagggaaaacagcaagcattgacaagtgctgaagaaccagatgagcctcctcttagtcccacttcacagaaaattcgccaacaaagacttgtggaagaagctgacttcaagtctaccaccgagctttttgcaaagaagggcagtgagcaaaagtcactagatacttttattccaaagtccgagagtgactttgcggaatacgcggagcttattgcaaacaaactacgcccctatgagaaaagctttcactacatggctctgcttaagaatgtcatgagactttccatgacatcgttgaaaggtgcggacgccaaagatatatcttcttccgtgacggcaattgctaacgagaagatcaaggctgagaaggaggctgcagcaggcaaaaagaaacaaggagcgaaaaagaagcaactccacatcgagaaaggagacgacgacttcatccccggccggggtggtggctacgatgaccccgatgactgtatgaccgtgtgcattgtttttggagatcttgtgtgatccactgactactccgactggcatggttgtcttcctttttctgacgctcggacgagacacagcaagacactattggtgtgctagtttgctgcacggaggtgttgttaggttgcacactgttggtgtgctaatcttacttctggaaacaggggaaaatgaggctaaggccctgttccaatctcgcgagataaactttagc

SEQ ID NO: 46194 - DNA, 1689 bp, Zea Mays
ccaaaaaaaaagaaaaatgtactcggagtcaatagttgcccaaattgtttcgatcgcccatttcgacatcgtatcggattttttcaaaataatggggaaaatagcgaagggaaaaaaaaaccctccgtgtggccgtcccaaactcccaatgagatgaagagaacgcaccacacgaccgcgtgacagaggcacagagcaaaagccaaactggcagccagcacagcagagcgccactcgactcgactcatcctttcggttcccctcccccctccgcgttccacaaccctcgagaagcttccaccctcccctcctgcgacgccgccagagccgcggaaaccctacccaccccggccgctcacgcaccgggcgcccgccgccgccggtcgcgtacctgccgccgacaccgcccaaagcgattggatctagagatcgtcagtagccacgatggaggactgggaattccagccagttgtgcctgttgtgaaagccgagccacttaaaaatcagtgggctgatgaagatgttgaagaagatgatgtaaaagaatcatgggaagaagaggaggaggaggagaaacctaagccagcgccagtggaaaaggtcgctgcaaaacctagcactaaggctcctgctaaaaagggaaaacagcaagcattgacaagtgctgaagaaccagatgagcctcctcttagtcccacttcacagaaaattcgccaacaaagacttgtggaagaagctgacttcaagtctaccaccgagctttttgcaaagaagggcagtgagcaaaagtcactagatacttttattccaaagtccgagagtgactttgcggaatacgcggagcttattgcaaacaaactacgcccctatgagaaaagctttcactacatggctctgcttaagaatgtcatgagactttccatgacatcgttgaaaggtgcggacgccaaagatatatcttcttccgtgacggcaattgctaacgagaagatcaaggctgagaaggaggctgcagcaggcaaaaagaaacaaggagcgaaaaagaagcaactccacatcgagaaaggagacgacgacttcatccccggccggggtggtggctacgatgaccccgatgagtacgacttcatgtgatctggctgggagggatagtaggtttctgttatgtatacctttggcgggcagagaatatatcactagagtttgcggcatactattgcatggaacatgcgttatctattcgagaatgatttttgactctgcaggataagaagagcacttgtgatctggatgcatgggtgttttcttatttatccttgaatctttgtgttatttttttttcaacattgcattttttgccaaatgtactatagtaccttgtactatctggttactccgtgagtcatgaaagcaattaaatccctggagggtgtctcgcttgtgtttgcagctgtatgaccgtgtgcattgtttttggagatcttgtgtgatccactgactactccgactggcatggttgtcttcctttttctgacgctcggacgagacacagcaagacactattggtgtgctagtttgctgcacggaggtgttgttaggttgcacactgttggtgtgctaatcttacttctggaaacaggggaaaatgaggctaaggccctgttccaatctcgcgagataaactttagc

SEQ ID NO: 46195 - DNA, 3585 bp, Zea Mays
gcggctgcaatccggctgcggctgcggcttctacagtatttttctctctatggattgcagctgcagcagtccaaacagctgcaacagtgtcggcttgtagccagccgaacacgcccagtgttcccagccctaaaacacttgacactacgacactaccgtatcagtctggcaggtcctgtgcataatccaccatctcgctcacaggctcgccgcccccgccggcaatggagggcgttcacagcctcctggcccggcccaactccgcgccgttcgccttctcaccgctgcccctccgcaggagccacatttcctaggcgatggcattcggagggcgttcgagtcgcggatagctaagccacctcagtatgggtacagcacagaagctcttgttgggcgacggcaaatgctgcagattgcccatgatactctcacaaaccagagctcgcgcaccgagtacgaccgtgcgctttccgaggaccgtgatgcggcactcaccatggatgttgcctgggataaggttccaggtgtgctgtgtgtgcttcaggaggctggggaggcacaactggtgttagcaactggagagcacttgcttcaggaccgtccacctaagcggttcaagcaggatgtggtgctagcaatggcattggcttatgtggacatatcaagggatgctatggcagcaagccctccagatgtaatctgctgttgtgaggtgcttgagagggcactgaagctcctgcaggaggatggtgcaagcaatcttgcacctgaactgcttgcacagattgatgaaactttggaggagattacacctcgttgtgtattggagcttcttgctcttcctactgatgaaaaacataaaaataaacgccaagaaggtctgcaaggtgcaaaaaacatattgtggagtgttggcaggggtggtattgctactgttggaggaggattttctcgtgaggccttcatgaatgaggctttcttgcagatgacatcagctgagcagatggatttcttctctaaaacaccgaatagcataccacctgaatggtttgagatctatagtgtcgcacttgcccacattgctcaagcaattgcaagtaaaaggccacaattcatcatgatggcagatgaactcttcgaacaacttcagaagttcaatataggttctcaatatccttatgaaaacgagatggacctcgcattagaaagggcactctgctcgttacttgtgggggatatttgcaattgcagaatgtggcttggaattgataatgagtcctcgtcatatagggaccccaaaaatatcgagtttgtggtgaataactctagcatgaacgaagagaatgatcttcttccagggctgtgcaagctcttggagacatggcttgtctccgaggtattcccaaggagcagagatacccgagggacgcagttcagactgggagactattacgacgacccaaaagttctaagctacttagaaaggatggaaggcggtggtgcttcccatttagctgcagctgccgctatagcaaaacttggtgctcaagctactgctgcgcttggtactgtaaaatcaagtgctcttcaagctttcagtaaggttttcccattgacagaacagctagacatgtcaggcaaggatatcccaagtgatgatcttgataaatctcttgaaaaactcgcccaaggaagtgttgctggagacgctatccatgattccagaaatgacgccttgaagattatctctgctggtacactgcttgcactatttgcagtgttaggtctcaagtgcttgcctcgtaacaagtcacttcctgctcttaggggcgagtatgggtctgtggcggttgttgactccattgatggtccagcggcagatgaagagccactggaaatccctaggatggacgcgaagttggctgaagacattgttcgcaggtggcaaagcatcaagtccaaggctttggggccagaacacactgtcacggcattgcaagaggtcctcggcggcaacatgctgaaggtgtgggcggaccgagctgcagagatcgagcgccacggctggttctgggagtacgcgctctctggcgtgacgatcgacagcatcaccgtctccgtggacggccggcgggcagcggtggaggcgacgatcgaggaggtgggccggcttaccgacgtgaccgaccctaagaacgacgacgcgtacgacaccaagtacaccgcccggtacgagatgacctactccaggccagcagggtggaggatcaccgaaggcgcagtcctcaggtcgtaggtagaacggctgtgcttgtgcagctgcagcaggagtaggcgagtagcgattctgaagaattccagccagttgtgcctgttgtgaaagccgagccacttaaaaatcagtgggctgatgaagatgttgaagaagatgatgtaaaagaatcatgggaagaagaggaggaggaggagaaacctaagccagcgccagtggaaaaggtcgctgcaaaacctagcactaaggctcctgctaaaaagggaaaacagcaagcattgacaagtgctgaagaaccagatgagcctcctcttagtcccacttcacagaaaattcgccaacaaagacttgtggaagaagctgacttcaagtctaccaccgagctttttgcaaagaagggcagtgagcaaaagtcactagatacttttattccaaagtccgagagtgactttgcggaatacgcggagcttattgcaaacaaactacgcccctatgagaaaagctttcactacatggctctgcttaagaatgtcatgagactttccatgacatcgttgaaaggtgcggacgccaaagatatatcttcttccgtgacggcaattgctaacgagaagatcaaggctgagaaggaggctgcagcaggcaaaaagaaacaaggagcgaaaaagaagcaactccacatcgagaaaggagacgacgacttcatccccggccggggtggtggctacgatgaccccgatgagtacgacttcatgtgatctggctgggagggatagtaggtttctgttatgtatacctttggcgggcagagaatatatcactagagtttgcggcatactattgcatggaacatgcgttatctattcgagaatgatttttgactctgcaggataagaagagcacttgtgatctggatgcatgggtgttttcttatttatccttgaatctttgtgttatttttttttcaacattgcattttttgccaaatgtactatagtaccttgtactatctggttactccgtgagtcatgaaagcaattaaatccctggagggtgtctcgcttgtgtttgcagctgtatgaccgtgtgcattgtttttggagatcttgtgtgatccactgactactccgactggcatggttgtcttcctttttctgacgctcggacgagacacagcaagacactattggtgtgctagtttgctgcacggaggtgttgttaggttgcacactgttggtgtgctaatcttacttctggaaacaggggaaaatgaggctaaggccctgttccaatctcgcgagataaactttagc

SEQ ID NO: 46196 - DNA, 3253 bp, Zea Mays
gcggctgcaatccggctgcggctgcggcttctacagtatttttctctctatggattgcagctgcagcagtccaaacagctgcaacagtgtcggcttgtagccagccgaacacgcccagtgttcccagccctaaaacacttgacactacgacactaccgtatcagtctggcaggtcctgtgcataatccaccatctcgctcacaggctcgccgcccccgccggcaatggagggcgttcacagcctcctggcccggcccaactccgcgccgttcgccttctcaccgctgcccctccgcaggagccacatttcctaggcgatggcattcggagggcgttcgagtcgcggatagctaagccacctcagtatgggtacagcacagaagctcttgttgggcgacggcaaatgctgcagattgcccatgatactctcacaaaccagagctcgcgcaccgagtacgaccgtgcgctttccgaggaccgtgatgcggcactcaccatggatgttgcctgggataaggttccaggtgtgctgtgtgtgcttcaggaggctggggaggcacaactggtgttagcaactggagagcacttgcttcaggaccgtccacctaagcggttcaagcaggatgtggtgctagcaatggcattggcttatgtggacatatcaagggatgctatggcagcaagccctccagatgtaatctgctgttgtgaggtgcttgagagggcactgaagctcctgcaggaggatggtgcaagcaatcttgcacctgaactgcttgcacagattgatgaaactttggaggagattacacctcgttgtgtattggagcttcttgctcttcctactgatgaaaaacataaaaataaacgccaagaaggtctgcaaggtgcaaaaaacatattgtggagtgttggcaggggtggtattgctactgttggaggaggattttctcgtgaggccttcatgaatgaggctttcttgcagatgacatcagctgagcagatggatttcttctctaaaacaccgaatagcataccacctgaatggtttgagatctatagtgtcgcacttgcccacattgctcaagcaattgcaagtaaaaggccacaattcatcatgatggcagatgaactcttcgaacaacttcagaagttcaatataggttctcaatatccttatgaaaacgagatggacctcgcattagaaagggcactctgctcgttacttgtgggggatatttgcaattgcagaatgtggcttggaattgataatgagtcctcgtcatatagggaccccaaaaatatcgagtttgtggtgaataactctagcatgaacgaagagaatgatcttcttccagggctgtgcaagctcttggagacatggcttgtctccgaggtattcccaaggagcagagatacccgagggacgcagttcagactgggagactattacgacgacccaaaagttctaagctacttagaaaggatggaaggcggtggtgcttcccatttagctgcagctgccgctatagcaaaacttggtgctcaagctactgctgcgcttggtactgtaaaatcaagtgctcttcaagctttcagtaaggttttcccattgacagaacagctagacatgtcaggcaaggatatcccaagtgatgatcttgataaatctcttgaaaaactcgcccaaggaagtgttgctggagacgctatccatgattccagaaatgacgccttgaagattatctctgctggtacactgcttgcactatttgcagtgttaggtctcaagtgcttgcctcgtaacaagtcacttcctgctcttaggggcgagtatgggtctgtggcggttgttgactccattgatggtccagcggcagatgaagagccactggaaatccctaggatggacgcgaagttggctgaagacattgttcgcaggtggcaaagcatcaagtccaaggctttggggccagaacacactgtcacggcattgcaagaggtcctcggcggcaacatgctgaaggtgtgggcggaccgagctgcagagatcgagcgccacggctggttctgggagtacgcgctctctggcgtgacgatcgacagcatcaccgtctccgtggacggccggcgggcagcggtggaggcgacgatcgaggaggtgggccggcttaccgacgtgaccgaccctaagaacgacgacgcgtacgacaccaagtacaccgcccggtacgagatgacctactccaggccagcagggtggaggatcaccgaaggcgcagtcctcaggtcgtaggtagaacggctgtgcttgtgcagctgcagcaggagtaggcgagtagcgattctgaagaattccagccagttgtgcctgttgtgaaagccgagccacttaaaaatcagtgggctgatgaagatgttgaagaagatgatgtaaaagaatcatgggaagaagaggaggaggaggagaaacctaagccagcgccagtggaaaaggtcgctgcaaaacctagcactaaggctcctgctaaaaagggaaaacagcaagcattgacaagtgctgaagaaccagatgagcctcctcttagtcccacttcacagaaaattcgccaacaaagacttgtggaagaagctgacttcaagtctaccaccgagctttttgcaaagaagggcagtgagcaaaagtcactagatacttttattccaaagtccgagagtgactttgcggaatacgcggagcttattgcaaacaaactacgcccctatgagaaaagctttcactacatggctctgcttaagaatgtcatgagactttccatgacatcgttgaaaggtgcggacgccaaagatatatcttcttccgtgacggcaattgctaacgagaagatcaaggctgagaaggaggctgcagcaggcaaaaagaaacaaggagcgaaaaagaagcaactccacatcgagaaaggagacgacgacttcatccccggccggggtggtggctacgatgaccccgatgactgtatgaccgtgtgcattgtttttggagatcttgtgtgatccactgactactccgactggcatggttgtcttcctttttctgacgctcggacgagacacagcaagacactattggtgtgctagtttgctgcacggaggtgttgttaggttgcacactgttggtgtgctaatcttacttctggaaacaggggaaaatgaggctaaggccctgttccaatctcgcgagataaactttagc

SEQ ID NO: 46197 - DNA, 3799 bp, Zea Mays
gcggctgcaatccggctgcggctgcggcttctacagtatttttctctctatggattgcagctgcagcagtccaaacagctgcaacagtgtcggcttgtagccagccgaacacgcccagtgttcccagccctaaaacacttgacactacgacactaccgtatcagtctggcaggtcctgtgcataatccaccatctcgctcacaggctcgccgcccccgccggcaatggagggcgttcacagcctcctggcccggcccaactccgcgccgttcgccttctcaccgctgcccctccgcaggagccacaggccgccaccgcctggcccctccacctgccgcgccgccagccgctgggccgaccgcctcttcgccgacttccacctcctccccgccgccgccgacccgccagccgcggcctcctcttcctcctcgtccccgttcgtcccgatcttccccgaagccgccgaccgcgccttgcccctcccggtcgacttctacaagattcttggtgcggagccacatttcctaggcgatggcattcggagggcgttcgagtcgcggatagctaagccacctcagtatgggtacagcacagaagctcttgttgggcgacggcaaatgctgcagattgcccatgatactctcacaaaccagagctcgcgcaccgagtacgaccgtgcgctttccgaggaccgtgatgcggcactcaccatggatgttgcctgggataaggttccaggtgtgctgtgtgtgcttcaggaggctggggaggcacaactggtgttagcaactggagagcacttgcttcaggaccgtccacctaagcggttcaagcaggatgtggtgctagcaatggcattggcttatgtggacatatcaagggatgctatggcagcaagccctccagatgtaatctgctgttgtgaggtgcttgagagggcactgaagctcctgcaggaggatggtgcaagcaatcttgcacctgaactgcttgcacagattgatgaaactttggaggagattacacctcgttgtgtattggagcttcttgctcttcctactgatgaaaaacataaaaataaacgccaagaaggtctgcaaggtgcaaaaaacatattgtggagtgttggcaggggtggtattgctactgttggaggaggattttctcgtgaggccttcatgaatgaggctttcttgcagatgacatcagctgagcagatggatttcttctctaaaacaccgaatagcataccacctgaatggtttgagatctatagtgtcgcacttgcccacattgctcaagcaattgcaagtaaaaggccacaattcatcatgatggcagatgaactcttcgaacaacttcagaagttcaatataggttctcaatatccttatgaaaacgagatggacctcgcattagaaagggcactctgctcgttacttgtgggggatatttgcaattgcagaatgtggcttggaattgataatgagtcctcgtcatatagggaccccaaaaatatcgagtttgtggtgaataactctagcatgaacgaagagaatgatcttcttccagggctgtgcaagctcttggagacatggcttgtctccgaggtattcccaaggagcagagatacccgagggacgcagttcagactgggagactattacgacgacccaaaagttctaagctacttagaaaggatggaaggcggtggtgcttcccatttagctgcagctgccgctatagcaaaacttggtgctcaagctactgctgcgcttggtactgtaaaatcaagtgctcttcaagctttcagtaaggttttcccattgacagaacagctagacatgtcaggcaaggatatcccaagtgatgatcttgataaatctcttgaaaaactcgcccaaggaagtgttgctggagacgctatccatgattccagaaatgacgccttgaagattatctctgctggtacactgcttgcactatttgcagtgttaggtctcaagtgcttgcctcgtaacaagtcacttcctgctcttaggggcgagtatgggtctgtggcggttgttgactccattgatggtccagcggcagatgaagagccactggaaatccctaggatggacgcgaagttggctgaagacattgttcgcaggtggcaaagcatcaagtccaaggctttggggccagaacacactgtcacggcattgcaagaggtcctcggcggcaacatgctgaaggtgtgggcggaccgagctgcagagatcgagcgccacggctggttctgggagtacgcgctctctggcgtgacgatcgacagcatcaccgtctccgtggacggccggcgggcagcggtggaggcgacgatcgaggaggtgggccggcttaccgacgtgaccgaccctaagaacgacgacgcgtacgacaccaagtacaccgcccggtacgagatgacctactccaggccagcagggtggaggatcaccgaaggcgcagtcctcaggtcgtaggtagaacggctgtgcttgtgcagctgcagcaggagtaggcgagtagcgattctgaagaattccagccagttgtgcctgttgtgaaagccgagccacttaaaaatcagtgggctgatgaagatgttgaagaagatgatgtaaaagaatcatgggaagaagaggaggaggaggagaaacctaagccagcgccagtggaaaaggtcgctgcaaaacctagcactaaggctcctgctaaaaagggaaaacagcaagcattgacaagtgctgaagaaccagatgagcctcctcttagtcccacttcacagaaaattcgccaacaaagacttgtggaagaagctgacttcaagtctaccaccgagctttttgcaaagaagggcagtgagcaaaagtcactagatacttttattccaaagtccgagagtgactttgcggaatacgcggagcttattgcaaacaaactacgcccctatgagaaaagctttcactacatggctctgcttaagaatgtcatgagactttccatgacatcgttgaaaggtgcggacgccaaagatatatcttcttccgtgacggcaattgctaacgagaagatcaaggctgagaaggaggctgcagcaggcaaaaagaaacaaggagcgaaaaagaagcaactccacatcgagaaaggagacgacgacttcatccccggccggggtggtggctacgatgaccccgatgagtacgacttcatgtgatctggctgggagggatagtaggtttctgttatgtatacctttggcgggcagagaatatatcactagagtttgcggcatactattgcatggaacatgcgttatctattcgagaatgatttttgactctgcaggataagaagagcacttgtgatctggatgcatgggtgttttcttatttatccttgaatctttgtgttatttttttttcaacattgcattttttgccaaatgtactatagtaccttgtactatctggttactccgtgagtcatgaaagcaattaaatccctggagggtgtctcgcttgtgtttgcagctgtatgaccgtgtgcattgtttttggagatcttgtgtgatccactgactactccgactggcatggttgtcttcctttttctgacgctcggacgagacacagcaagacactattggtgtgctagtttgctgcacggaggtgttgttaggttgcacactgttggtgtgctaatcttacttctggaaacaggggaaaatgaggctaaggccctgttccaatctcgcgagataaactttagc

SEQ ID NO: 46198 - DNA, 2490 bp, Zea Mays
gcggctgcaatccggctgcggctgcggcttctacagtatttttctctctatggattgcagctgcagcagtccaaacagctgcaacagtgtcggcttgtagccagccgaacacgcccagtgttcccagccctaaaacacttgacactacgacactaccgtatcagtctggcaggtcctgtgcataatccaccatctcgctcacaggctcgccgcccccgccggcaatggagggcgttcacagcctcctggcccggcccaactccgcgccgttcgccttctcaccgctgcccctccgcaggagccacatttcctaggcgatggcattcggagggcgttcgagtcgcggatagctaagccacctcagtatgggtacagcacagaagctcttgttgggcgacggcaaatgctgcagattgcccatgatactctcacaaaccagagctcgcgcaccgagtacgaccgtgcgctttccgaggaccgtgatgcggcactcaccatggatgttgcctgggataaggttccaggtgtgctgtgtgtgcttcaggaggctggggaggcacaactggtgttagcaactggagagcacttgcttcaggaccgtccacctaagcggttcaagcaggatgtggtgctagcaatggcattggcttatgtggacatatcaagggatgctatggcagcaagccctccagatgtaatctgctgttgtgaggtgcttgagagggcactgaagctcctgcaggaggatggtgcaagcaatcttgcacctgaactgcttgcacagattgatgaaactttggaggagattacacctcgttgtgtattggagcttcttgctcttcctactgatgaaaaacataaaaataaacgccaagaaggtctgcaaggtgcaaaaaacatattgtggagtgttggcaggggtggtattgctactgttggaggaggattttctcgtgaggccttcatgaatgaggctttcttgcagatgacatcagctgagcagatggatttcttctctaaaacaccgaatagcataccacctgaatggtttgagatctatagtgtcgcacttgcccacattgctcaagcaattgcaagtaaaaggccacaattcatcatgatggcagatgaactcttcgaacaacttcagaagttcaatataggttctcaatatccttatgaaaacgagatggacctcgcattagaaagggcactctgctcgttacttgtgggggatatttgcaattgcagaatgtggcttggaattgataatgagtcctcgtcatatagggaccccaaaaatatcgagtttgtggtgaataactctagcatgaacgaagagaatgatcttcttccagggctgtgcaagctcttggagacatggcttgtctccgaggtattcccaaggagcagagatacccgagggacgcagttcagactgggagactattacgacgacccaaaagttctaagctacttagaaaggatggaaggcggtggtgcttcccatttagctgcagctgccgctatagcaaaacttggtgctcaagctactgctgcgcttggtactgtaaaatcaagtgctcttcaagctttcagaagtgttgctggagacgctatccatgattccagaaatgacgccttgaagattatctctgctggtacactgcttgcactatttgcagtgttaggtctcaagtgcttgcctcgtaacaagtcacttcctgctcttaggggcgagtatgggtctgtggcggttgttgactccattgatggtccagcggcagatgaagagccactggaaatccctaggatggacgcgaagttggctgaagacattgttcgcaggtggcaaagcatcaagtccaaggctttggggccagaacacactgtcacggcattgcaagaggtcctcggcggcaacatgctgaaggtgtgggcggaccgagctgcagagatcgagcgccacggctggttctgggagtacgcgctctctggcgtgacgatcgacagcatcaccgtctccgtggacggccggcgggcagcggtggaggcgacgatcgaggaggtgggccggcttaccgacgtgaccgaccctaagaacgacgacgcgtacgacaccaagtacaccgcccggtacgagatgacctactccaggccagcagggtggaggatcaccgaaggcgcagtcctcaggtcgtaggtagaacggctgtgcttgtgcagctgcagcaggagtaggcgagtagcggtaagctcgattcccattcttttcttttcttttggcagcgtgtgtaaataaacagtgtgagcactggctcgttccagtactagaaagcttggttaggttgctgagtgatgagctcctgaggtcgaaatttgtcatgtagtttttattgatagataatttggtgttactattgctgggtcagatcctctgaaacgattgatcttaatgaaggcggcagtgcatcactgcttaccacatca

SEQ ID NO: 46199 - DNA, 2631 bp, Zea Mays
gcggctgcaatccggctgcggctgcggcttctacagtatttttctctctatggattgcagctgcagcagtccaaacagctgcaacagtgtcggcttgtagccagccgaacacgcccagtgttcccagccctaaaacacttgacactacgacactaccgtatcagtctggcaggtcctgtgcataatccaccatctcgctcacaggctcgccgcccccgccggcaatggagggcgttcacagcctcctggcccggcccaactccgcgccgttcgccttctcaccgctgcccctccgcaggagccacaggccgccaccgcctggcccctccacctgccgcgccgccagccgctgggccgaccgcctcttcgccgacttccacctcctccccgccgccgccgacccgccagccgcggcctcctcttcctcctcgtccccgttcgtcccgatcttccccgaagccgccgaccgcgccttgcccctcccggtcgacttctacaagattcttggtgcggagccacatttcctaggcgatggcattcggagggcgttcgagtcgcggatagctaagccacctcagtatgggtacagcacagaagctcttgttgggcgacggcaaatgctgcagattgcccatgatactctcacaaaccagagctcgcgcaccgagtacgaccgtgcgctttccgaggaccgtgatgcggcactcaccatggatgttgcctgggataaggttccaggtgtgctgtgtgtgcttcaggaggctggggaggcacaactggtgttagcaactggagagcacttgcttcaggaccgtccacctaagcggttcaagcaggatgtggtgctagcaatggcattggcttatgtggacatatcaagggatgctatggcagcaagccctccagatgtaatctgctgttgtgaggtgcttgagagggcactgaagctcctgcaggaggatggtgcaagcaatcttgcacctgaactgcttgcacagattgatgaaactttggaggagattacacctcgttgtgtattggagcttcttgctcttcctactgatgaaaaacataaaaataaacgccaagaaggtctgcaaggtgcaaaaaacatattgtggagtgttggcaggggtggtattgctactgttggaggaggattttctcgtgaggccttcatgaatgaggctttcttgcagatgacatcagctgagcagatggatttcttctctaaaacaccgaatagcataccacctgaatggtttgagatctatagtgtcgcacttgcccacattgctcaagcaattgcaagtaaaaggccacaattcatcatgatggcagatgaactcttcgaacaacttcagaagttcaatataggttctcaatatccttatgaaaacgagatggacctcgcattagaaagggcactctgctcgttacttgtgggggatatttgcaattgcagaatgtggcttggaattgataatgagtcctcgtcatatagggaccccaaaaatatcgagtttgtggtgaataactctagcatgaacgaagagaatgatcttcttccagggctgtgcaagctcttggagacatggcttgtctccgaggtattcccaaggagcagagatacccgagggacgcagttcagactgggagactattacgacgacccaaaagttctaagctacttagaaaggatggaaggcggtggtgcttcccatttagctgcagctgccgctatagcaaaacttggtgctcaagctactgctgcgcttggtactgtaaaatcaagtgctcttcaagctttcagaagtgttgctggagacgctatccatgattccagaaatgacgccttgaagattatctctgctggggcgagtatgggtctgtggcggttgttgactccattgatggtccagcggcagatgaagagccactggaaatccctaggatggacgcgaagttggctgaagacattgttcgcaggtggcaaagcatcaagtccaaggctttggggccagaacacactgtcacggcattgcaagaggtcctcggcggcaacatgctgaaggtgtgggcggaccgagctgcagagatcgagcgccacggctggttctgggagtacgcgctctctggcgtgacgatcgacagcatcaccgtctccgtggacggccggcgggcagcggtggaggcgacgatcgaggaggtgggccggcttaccgacgtgaccgaccctaagaacgacgacgcgtacgacaccaagtacaccgcccggtacgagatgacctactccaggccagcagggtggaggatcaccgaaggcgcagtcctcaggtcgtaggtagaacggctgtgcttgtgcagctgcagcaggagtaggcgagtagcggtaagctcgattcccattcttttcttttcttttggcagcgtgtgtaaataaacagtgtgagcactggctcgttccagtactagaaagcttggttaggttgctgagtgatgagctcctgaggtcgaaatttgtcatgtagtttttattgatagataatttggtgttactattgctgggtcagatcctctgaaacgattgatcttaatgaaggcggcagtgcatcactgcttaccacatca

SEQ ID NO: 46200 - DNA, 1924 bp, Zea Mays
cttgtatcctatgaaggaggtgcagatatgcttatctttttggtagagctgaaagcgatggaatataactttgacctgtaaaatgaggccagttttttgcgggaaccttgactatgatgttcgcatctctgaggtcgagcgccttttcgggaagtatggaagggtggaacgagtggatctgaagacaggaatatcatggagcatatgtgctcttcctggttgatggactggttctacctttactgcctctgcctgagcccccacctcatgcctggtccatctccaggagttcactgtccaccacggcatctgtgcacatggaaacgaccacctcgtgaccgatgtcttacttttacgatcaacactgcatcctcgtaccctgcctgatcaccattccttcgccaatccaaccatgccaatctcatgtctggctggagagtggagataagtggaggttgcaccaccaattccttgatgtaccatgaatgtttggattgttgtattctgaaatcatttagttcaacatatacaaggtctgttcctgtttattctagcatatctgactgtagatttgcgaggcggccttagaaaaatttcctgcaaaggctgcatctcgattcatgttgttgccctttctgttcccgggaccatactatgatttctttgaacaatcagtcacttctcttttcaccttgtgttcaacatgaagggtttgcattcatctacatggaagacgaacgtgacgctgaagatgctatcagtagacttgatggaattgattttggcagaaaaggaaggagaatcaaagttgagtggaccaaggaggatcgcactgctgatcgaagaggcaactcaaggaggtctccaaccaatgcaaaaccgaccaaaaccttgttcgtgatcaactttgacccgatcaacacgagaattcgagatctggagaggcactttgataaatatggcagggtcgcgaatgtaaggatcaaaaagaacttcgcctttatacagtttgaggcgcaggaggatgctactagagcattggagggtgctaatgggagccatttcatggacagggtcatctcagttgagtatgcgctccgtgacgacgatgaaaaaggtgaaagggcgacgaacggatacagcccagacaggagaggccgcgaaagatccccaggtgcaagacggtctcctagtccttacggcagaggtcgggagagaggtagcccagactatgggagaggcaaggagaggggcagcccagactacggcaggggaggccgcagccctgataatggcaggggaggccgcccagccggcggtggcggcggcggcagaggtgatcacgccaggggaggaggacgacgacgcagccctgactattatgaccgcgagcgccgagaagctagtcctggctatgacaggccccccagctgctcacctggaactgggagggacgcgagagactagaaaagcgccccatgcctgtgttgtagaattcaagcatcaaagcctcccgcgtcagatgaagttagagttggtgatgttagccagcaggaaactcgtttacttatgtgcgttagctcgtgctgactttgcaagttagcttaccatttcccatttgcgactccagaatgtaactcgtatggtctggaatggtagctttcaggactcgtttgaacctttcttggagtttttttcttcttttccggctaccttgattgccctgtgcatgcgctgatgaatctacagattgtttcgtctgtcaagtgttccgctgtaatgtaagagacgaaattatttgttccttgttgatgtagtccctgttttgtgcagcgagaaatttcagtatcttacgctcagtatgcgcgcctctccagatctgacacctaatatccacgcgaccacgctgatcagcccaaacggc

SEQ ID NO: 46201 - DNA, 1369 bp, Zea Mays
gtgtctcccatctttctgcaaaaagggaatataactttgacctgtaaaatgaggccagttttttgcgggaaccttgactatgatgttcgcatctctgaggtcgagcgccttttcgggaagtatggaagggtggaacgagtggatctgaagacagggtttgcattcatctacatggaagacgaacgtgacgctgaagatgctatcagtagacttgatggaattgattttggcagaaaaggaaggagaatcaaagttgagtggaccaaggaggatcgcactgctgatcgaagaggcaactcaaggaggtctccaaccaatgcaaaaccgaccaaaaccttgttcgtgatcaactttgacccgatcaacacgagaattcgagatctggagaggcactttgataaatatggcagggtcgcgaatgtaaggatcaaaaagaacttcgcctttatacagtttgaggcgcaggaggatgctactagagcattggagggtgctaatgggagccatttcatggacagggtcatctcagttgagtatgcgctccgtgacgacgatgaaaaaggtgaaagggcgacgaacggatacagcccagacaggagaggccgcgaaagatccccaggtgcaagacggtctcctagtccttacggcagaggtcgggagagaggtagcccagactatgggagaggcaaggagaggggcagcccagactacggcaggggaggccgcagccctgataatggcaggggaggccgcccagccggcggtggcggcggcggcagaggtgatcacgccaggggaggaggacgacgacgcagccctgactattatgaccgcgagcgccgagaagctagtcctggctatgacaggccccccagctgctcacctggaactgggagggacgcgagagactagaaaagcgccccatgcctgtgttgtagaattcaagcatcaaagcctcccgcgtcagatgaagttagagttggtgatgttagccagcaggaaactcgtttacttatgtgcgttagctcgtgctgactttgcaagttagcttaccatttcccatttgcgactccagaatgtaactcgtatggtctggaatggtagctttcaggactcgtttgaacctttcttggagtttttttcttcttttccggctaccttgattgccctgtgcatgcgctgatgaatctacagattgtttcgtctgtcaagtgttccgctgtaatgtaagagacgaaattatttgttccttgttgatgtagtccctgttttgtgcagcgagaaatttcagtatcttacgctcagtatgcgcgcctctccagatctgacacctaatatccacgcgaccacgctgatcagcccaaacggc

SEQ ID NO: 46202 - DNA, 2027 bp, Zea Mays
ctagacacgctgtcgggatcaaaacaaggcagaatcgggccctttccaggcccagccaaattttcgttcacctggcttcacccacccgcgtgccctcgccgacaactgagccaccgccgccgccgccctacccccaggtgcccaggtcgtttcggtccctttgccaggtcttcgccggcgacgagcaccagccaccagccagggaatataactttgacctgtaaaatgaggccagttttttgcgggaaccttgactatgatgttcgcatctctgaggtcgagcgccttttcgggaagtatggaagggtggaacgagtggatctgaagacagagattgtcgatcttccttcagccatgcttggtgttagaagcgacaaacagaccaagttgttcatccgatgtcgaagccagaggagtttcaggaaaatcggcttatgtttatgttttattgttatgtcattggacgagtgtgtatcaggataaatttagaaaaaagaaatttttccttaaaatttggtcatgtactcaattatttctttgccgcaggaatatcatggagcatatgtgctcttcctggttgatggactggttctacctttactgcctctgcctgagcccccacctcatgcctggtccatctccaggagttcactgtccaccacggcatctgtgcacatggaaacgaccacctcgtgaccgatgtcttacttttacgatcaacactgcatcctcgtaccctgcctgatcaccattccttcgccaatccaaccatgccaatctcatgtctggctggagagtggagataagtggagggtttgcattcatctacatggaagacgaacgtgacgctgaagatgctatcagtagacttgatggaattgattttggcagaaaaggaaggagaatcaaagttgagtggaccaaggaggatcgcactgctgatcgaagaggcaactcaaggaggtctccaaccaatgcaaaaccgaccaaaaccttgttcgtgatcaactttgacccgatcaacacgagaattcgagatctggagaggcactttgataaatatggcagggtcgcgaatgtaaggatcaaaaagaacttcgcctttatacagtttgaggcgcaggaggatgctactagagcattggagggtgctaatgggagccatttcatggacagggtcatctcagttgagtatgcgctccgtgacgacgatgaaaaaggtgaaagggcgacgaacggatacagcccagacaggagaggccgcgaaagatccccaggtgcaagacggtctcctagtccttacggcagaggtcgggagagaggtagcccagactatgggagaggcaaggagaggggcagcccagactacggcaggggaggccgcagccctgataatggcaggggaggccgcccagccggcggtggcggcggcggcagaggtgatcacgccaggggaggaggacgacgacgcagccctgactattatgaccgcgagcgccgagaagctagtcctggctatgacaggccccccagctgctcacctggaactgggagggacgcgagagactagaaaagcgccccatgcctgtgttgtagaattcaagcatcaaagcctcccgcgtcagatgaagttagagttggtgatgttagccagcaggaaactcgtttacttatgtgcgttagctcgtgctgactttgcaagttagcttaccatttcccatttgcgactccagaatgtaactcgtatggtctggaatggtagctttcaggactcgtttgaacctttcttggagtttttttcttcttttccggctaccttgattgccctgtgcatgcgctgatgaatctacagattgtttcgtctgtcaagtgttccgctgtaatgtaagagacgaaattatttgttccttgttgatgtagtccctgttttgtgcagcgagaaatttcagtatcttacgctcagtatgcgcgcctctccagatctgacacctaatatccacgcgaccacgctgatcagcccaaacggc

SEQ ID NO: 46203 - DNA, 1812 bp, Zea Mays
ctagacacgctgtcgggatcaaaacaaggcagaatcgggccctttccaggcccagccaaattttcgttcacctggcttcacccacccgcgtgccctcgccgacaactgagccaccgccgccgccgccctacccccaggtgcccaggtcgtttcggtccctttgccaggtcttcgccggcgacgagcaccagccaccagccagggaatataactttgacctgtaaaatgaggccagttttttgcgggaaccttgactatgatgttcgcatctctgaggtcgagcgccttttcgggaagtatggaagggtggaacgagtggatctgaagacaggaatatcatggagcatatgtgctcttcctggttgatggactggttctacctttactgcctctgcctgagcccccacctcatgcctggtccatctccaggagttcactgtccaccacggcatctgtgcacatggaaacgaccacctcgtgaccgatgtcttacttttacgatcaacactgcatcctcgtaccctgcctgatcaccattccttcgccaatccaaccatgccaatctcatgtctggctggagagtggagataagtggagggtttgcattcatctacatggaagacgaacgtgacgctgaagatgctatcagtagacttgatggaattgattttggcagaaaaggaaggagaatcaaagttgagtggaccaaggaggatcgcactgctgatcgaagaggcaactcaaggaggtctccaaccaatgcaaaaccgaccaaaaccttgttcgtgatcaactttgacccgatcaacacgagaattcgagatctggagaggcactttgataaatatggcagggtcgcgaatgtaaggatcaaaaagaacttcgcctttatacagtttgaggcgcaggaggatgctactagagcattggagggtgctaatgggagccatttcatggacagggtcatctcagttgagtatgcgctccgtgacgacgatgaaaaaggtgaaagggcgacgaacggatacagcccagacaggagaggccgcgaaagatccccaggtgcaagacggtctcctagtccttacggcagaggtcgggagagaggtagcccagactatgggagaggcaaggagaggggcagcccagactacggcaggggaggccgcagccctgataatggcaggggaggccgcccagccggcggtggcggcggcggcagaggtgatcacgccaggggaggaggacgacgacgcagccctgactattatgaccgcgagcgccgagaagctagtcctggctatgacaggccccccagctgctcacctggaactgggagggacgcgagagactagaaaagcgccccatgcctgtgttgtagaattcaagcatcaaagcctcccgcgtcagatgaagttagagttggtgatgttagccagcaggaaactcgtttacttatgtgcgttagctcgtgctgactttgcaagttagcttaccatttcccatttgcgactccagaatgtaactcgtatggtctggaatggtagctttcaggactcgtttgaacctttcttggagtttttttcttcttttccggctaccttgattgccctgtgcatgcgctgatgaatctacagattgtttcgtctgtcaagtgttccgctgtaatgtaagagacgaaattatttgttccttgttgatgtagtccctgttttgtgcagcgagaaatttcagtatcttacgctcagtatgcgcgcctctccagatctgacacctaatatccacgcgaccacgctgatcagcccaaacggc

SEQ ID NO: 46204 - DNA, 2283 bp, Zea Mays
cctagacacgctgtcgggatcaaaacaaggcagaatcgggccctttccaggcccagccaaattttcgttcacctggcttcacccacccgcgtgccctcgccgacaactgagccaccgccgccgccgccctacccccaggtgcccaggtcgtttcggtccctttgccaggtcttcgccggcgacgagcaccagccaccagccagggaatataactttgacctgtaaaatgaggccagttttttgcgggaaccttgactatgatgttcgcatctctgaggtcgagcgccttttcgggaagtatggaagggtggaacgagtggatctgaagacagagattgtcgatcttccttcagccatgcttggtgttagaagcgacaaacagaccaagttgttcatccgatgtcgaagccagaggagtttcaggaaaatcggcttatgtttatgttttattgttatgtcattggacgagtgtgtatcaggataaatttagaaaaaagaaatttttccttaaaatttggtcatgtactcaattatttctttgccgcaggaatatcatggagcatatgtgctcttcctggttgatggactggttctacctttactgcctctgcctgagcccccacctcatgcctggtccatctccaggagttcactgtccaccacggcatctgtgcacatggaaacgaccacctcgtgaccgatgtcttacttttacgatcaacactgcatcctcgtaccctgcctgatcaccattccttcgccaatccaaccatgccaatctcatgtctggctggagagtggagataagtggaggttgcaccaccaattccttgatgtaccatgaatgtttggattgttgtattctgaaatcatttagttcaacatatacaaggtctgttcctgtttattctagcatatctgactgtagatttgcgaggcggccttagaaaaatttcctgcaaaggctgcatctcgattcatgttgttgccctttctgttcccgggaccatactatgatttctttgaacaatcagtcacttctcttttcaccttgtgttcaacatgaagggtttgcattcatctacatggaagacgaacgtgacgctgaagatgctatcagtagacttgatggaattgattttggcagaaaaggaaggagaatcaaagttgagtggaccaaggaggatcgcactgctgatcgaagaggcaactcaaggaggtctccaaccaatgcaaaaccgaccaaaaccttgttcgtgatcaactttgacccgatcaacacgagaattcgagatctggagaggcactttgataaatatggcagggtcgcgaatgtaaggatcaaaaagaacttcgcctttatacagtttgaggcgcaggaggatgctactagagcattggagggtgctaatgggagccatttcatggacagggtcatctcagttgagtatgcgctccgtgacgacgatgaaaaaggtgaaagggcgacgaacggatacagcccagacaggagaggccgcgaaagatccccaggtgcaagacggtctcctagtccttacggcagaggtcgggagagaggtagcccagactatgggagaggcaaggagaggggcagcccagactacggcaggggaggccgcagccctgataatggcaggggaggccgcccagccggcggtggcggcggcggcagaggtgatcacgccaggggaggaggacgacgacgcagccctgactattatgaccgcgagcgccgagaagctagtcctggctatgacaggccccccagctgctcacctggaactgggagggacgcgagagactagaaaagcgccccatgcctgtgttgtagaattcaagcatcaaagcctcccgcgtcagatgaagttagagttggtgatgttagccagcaggaaactcgtttacttatgtgcgttagctcgtgctgactttgcaagttagcttaccatttcccatttgcgactccagaatgtaactcgtatggtctggaatggtagctttcaggactcgtttgaacctttcttggagtttttttcttcttttccggctaccttgattgccctgtgcatgcgctgatgaatctacagattgtttcgtctgtcaagtgttccgctgtaatgtaagagacgaaattatttgttccttgttgatgtagtccctgttttgtgcagcgagaaatttcagtatcttacgctcagtatgcgcgcctctccagatctgacacctaatatccacgcgaccacgctgatcagcccaaacggc

SEQ ID NO: 46205 - DNA, 2729 bp, Zea Mays
ggcatctatagaatcagaaaaggtttatagagcaaaatgaactccctccaactatataaatatagaatcacagactgtttgaaaacgactgggcctagacacgctgtcgggatcaaaacaaggcagaatcgggccctttccaggcccagccaaattttcgttcacctggcttcacccacccgcgtgccctcgccgacaactgagccaccgccgccgccgccctacccccaggtgcccaggtcgtttcggtccctttgccaggtcttcgccggcgacgagcaccagccaccagccagggaatataactttgacctgtaaaatgaggccagttttttgcgggaaccttgactatgatgttcgcatctctgaggtcgagcgccttttcgggaagtatggaagggtggaacgagtggatctgaagacaggttagttcgttactatgttctcaaactttatgatctattttagcaaaacgacaattgctgctacatctatatgttgtttttagtcaaaggcagtgctttatttcatcaagtgaattacaaccagtcatcaactgcagctttggaccattttgtttctttgatttagatactgaagcattactgaatatattcataagacaatgccatctgaaaacataacatggcctttgtttaaattttgattttgaccatttcatatggaatattggtttgatcacaaatacatgatcttcgcataactcctctaagaatgtgatcttcacgtggaaactgctatcgccatgacttggcagagattgtcgatcttccttcagccatgcttggtgttagaagcgacaaacagaccaagttgttcatccgatgtcgaagccagaggagtttcaggaaaatcggcttatgtttatgttttattgttatgtcattggacgagtgtgtatcaggataaatttagaaaaaagaaatttttccttaaaatttggtcatgtactcaattatttctttgccgcaggaatatcatggagcatatgtgctcttcctggttgatggactggttctacctttactgcctctgcctgagcccccacctcatgcctggtccatctccaggagttcactgtccaccacggcatctgtgcacatggaaacgaccacctcgtgaccgatgtcttacttttacgatcaacactgcatcctcgtaccctgcctgatcaccattccttcgccaatccaaccatgccaatctcatgtctggctggagagtggagataagtggaggttgcaccaccaattccttgatgtaccatgaatgtttggattgttgtattctgaaatcatttagttcaacatatacaaggtctgttcctgtttattctagcatatctgactgtagatttgcgaggcggccttagaaaaatttcctgcaaaggctgcatctcgattcatgttgttgccctttctgttcccgggaccatactatgatttctttgaacaatcagtcacttctcttttcaccttgtgttcaacatgaagggtttgcattcatctacatggaagacgaacgtgacgctgaagatgctatcagtagacttgatggaattgattttggcagaaaaggaaggagaatcaaagttgagtggaccaaggaggatcgcactgctgatcgaagaggcaactcaaggaggtctccaaccaatgcaaaaccgaccaaaaccttgttcgtgatcaactttgacccgatcaacacgagaattcgagatctggagaggcactttgataaatatggcagggtcgcgaatgtaaggatcaaaaagaacttcgcctttatacagtttgaggcgcaggaggatgctactagagcattggagggtgctaatgggagccatttcatggacagggtcatctcagttgagtatgcgctccgtgacgacgatgaaaaaggtgaaagggcgacgaacggatacagcccagacaggagaggccgcgaaagatccccaggtgcaagacggtctcctagtccttacggcagaggtcgggagagaggtagcccagactatgggagaggcaaggagaggggcagcccagactacggcaggggaggccgcagccctgataatggcaggggaggccgcccagccggcggtggcggcggcggcagaggtgatcacgccaggggaggaggacgacgacgcagccctgactattatgaccgcgagcgccgagaagctagtcctggctatgacaggccccccagctgctcacctggaactgggagggacgcgagagactagaaaagcgccccatgcctgtgttgtagaattcaagcatcaaagcctcccgcgtcagatgaagttagagttggtgatgttagccagcaggaaactcgtttacttatgtgcgttagctcgtgctgactttgcaagttagcttaccatttcccatttgcgactccagaatgtaactcgtatggtctggaatggtagctttcaggactcgtttgaacctttcttggagtttttttcttcttttccggctaccttgattgccctgtgcatgcgctgatgaatctacagattgtttcgtctgtcaagtgttccgctgtaatgtaagagacgaaattatttgttccttgttgatgtagtccctgttttgtgcagcgagaaatttcagtatcttacgctcagtatgcgcgcctctccagatctgacacctaatatccacgcgaccacgctgatcagcccaaacggc

SEQ ID NO: 46206 - DNA, 2536 bp, Zea Mays
ggaggtttgcttggggatttgcatttatagaatcagatgggttaagaaaatgtttgctctttggcatctatagaatcagaaaaggtttatagagcaaaatgaactccctccaactatataaatatagaatcacagactgtttgaaaacgactgggcctagacacgctgtcgggatcaaaacaaggcagaatcgggccctttccaggcccagccaaattttcgttcacctggcttcacccacccgcgtgccctcgccgacaactgagccaccgccgccgccgccctacccccaggtgcccaggtcgtttcggtccctttgccaggtcttcgccggcgacgagcaccagccaccagccagggaatataactttgacctgtaaaatgaggccagttttttgcgggaaccttgactatgatgttcgcatctctgaggtcgagcgccttttcgggaagtatggaagggtggaacgagtggatctgaagacaggttagttcgttactatgttctcaaactttatgatctattttagcaaaacgacaattgctgctacatctatatgttgtttttagtcaaaggcagtgctttatttcatcaagtgaattacaaccagtcatcaactgcagctttggaccattttgtttctttgatttagatactgaagcattactgaatatattcataagacaatgccatctgaaaacataacatggcctttgtttaaattttgattttgaccatttcatatggaatattggtttgatcacaaatacatgatcttcgcataactcctctaagaatgtgatcttcacgtggaaactgctatcgccatgacttggcagagattgtcgatcttccttcagccatgcttggtgttagaagcgacaaacagaccaagttgttcatccgatgtcgaagccagaggagtttcaggaaaatcggcttatgtttatgttttattgttatgtcattggacgagtgtgtatcaggataaatttagaaaaaagaaatttttccttaaaatttggtcatgtactcaattatttctttgccgcaggaatatcatggagcatatgtgctcttcctggttgatggactggttctacctttactgcctctgcctgagcccccacctcatgcctggtccatctccaggagttcactgtccaccacggcatctgtgcacatggaaacgaccacctcgtgaccgatgtcttacttttacgatcaacactgcatcctcgtaccctgcctgatcaccattccttcgccaatccaaccatgccaatctcatgtctggctggagagtggagataagtggagggtttgcattcatctacatggaagacgaacgtgacgctgaagatgctatcagtagacttgatggaattgattttggcagaaaaggaaggagaatcaaagttgagtggaccaaggaggatcgcactgctgatcgaagaggcaactcaaggaggtctccaaccaatgcaaaaccgaccaaaaccttgttcgtgatcaactttgacccgatcaacacgagaattcgagatctggagaggcactttgataaatatggcagggtcgcgaatgtaaggatcaaaaagaacttcgcctttatacagtttgaggcgcaggaggatgctactagagcattggagggtgctaatgggagccatttcatggacagggtcatctcagttgagtatgcgctccgtgacgacgatgaaaaaggtgaaagggcgacgaacggatacagcccagacaggagaggccgcgaaagatccccaggtgcaagacggtctcctagtccttacggcagaggtcgggagagaggtagcccagactatgggagaggcaaggagaggggcagcccagactacggcaggggaggccgcagccctgataatggcaggggaggccgcccagccggcggtggcggcggcggcagaggtgatcacgccaggggaggaggacgacgacgcagccctgactattatgaccgcgagcgccgagaagctagtcctggctatgacaggccccccagctgctcacctggaactgggagggacgcgagagactagaaaagcgccccatgcctgtgttgtagaattcaagcatcaaagcctcccgcgtcagatgaagttagagttggtgatgttagccagcaggaaactcgtttacttatgtgcgttagctcgtgctgactttgcaagttagcttaccatttcccatttgcgactccagaatgtaactcgtatggtctggaatggtagctttcaggactcgtttgaacctttcttggagtttttttcttcttttccggctaccttgattgccctgtgcatgcgctgatgaatctacagattgtttcgtctgtcaagtgttccgctgtaatgtaagagacgaaattatttgttccttgttgatgtagtccctgttttgtgcagcgagaaatttcagtatcttacgctcagtatgcgcgcctctccagatctgacacctaatatccacgcgaccacgctgatcagcccaaacggc

SEQ ID NO: 46207 - DNA, 2717 bp, Zea Mays
aagggcgagcaaaactggaagcctacgaaaatggtggagctcacctccttatccccagggccaccacgtccttctcggctgactcctcgccgccggccgccgccgccgacacctcatgttcatacctcctcgcgtcgtcgcgggaggatcctcggcgccgcgaccgccacgcctggcgccgacgactaccactccaccatccgctccctcaactcccgcggccgccacgtcccccgaaaatccctcgggcagaactacacgctcaactccaaggtgaacgaggagctggtggcggcggcgggggtggaggagggtgacgtcgtgctcgagatcggcccaggcaccggctcgctcacttccgcgctgctccaggccggcgctaccgtctttgccgtcgagaaggacaagcatatggctactctcgttaaagataggtttggatctacagaacagttgaaggtcattgaagaagacatcacaaaatttcacatccgttcccattttcttcctttcatgaaggagaaatacggtgccaccaaaaaacttgcaaaggtgagatgatgcccaaccacagaaatcaatatggagcttgtttttgtgatcatgttccagtttctactttgcaggttgcatcaaacttaccattcaatgtcagcaccgaagttgtcaaactactactcccaatgggggatgttttctctgtcgtggtgcttatgcttcaggatgaaacagcagtacgccttgcagatgcttcaatacaaagtccagagtaccgatctatcaatgtgtttgtggatttttactcggaacctgaatacaagttcagagtagacagagagaattttttccctcggcctaaggttgatggtgctgttatcagcttcaaactaaagaatgcggaggagtatccgccagttagttccccaaaaagcttcttttcaatggtgagtagtgggtcatggggtcatggtgtgcagaaacttgtcccaaatctgaattgctttctgtggttgagggagaaaggacgtgaatggaagcaattgtttatctttggatatcgttacaaggccgctcattcttggtggtcttggagtccctaatctgtatttccaaagctgggcactgtaagctaaatggttgtggctggagaaaacagacactaacagaccttggcatgggttaaaactgcatgtactaaagcaagtaaggaagttctttcaatcttcggttgttactgtggttggaaatgagaacaagactttattctagtcggacagatggttagacggcggctgcatcaaggaatttgctcctgctgttgttgctaaagtcggtaaaagtgttgtttccactagaactgcggcccaagctattggaaactggcaatggatcagtgaaatcatgacacccctttcctgggttgggttacaacagttcttgcttttatgggatgctgtaagaagagtggtgttaacacatgaagctgataaacatatatggctgcatacttcctctggccagttctcctcctaagtcatgttacaaggcatttttcatgggatccattacttttgagccttggaggaggctgtggaagtcttggactcctccaaaatgcaaatttttccagtggctggctatacggaataaatgttggacatcagatagattggaaattggaaaggagaggtttggatcacccaaaatcttgtttattatgtgatcaaacacaagaaaccatccaatatctattgtgtacgtgcgtctttgcaagacagttttggcataccatcttttcgcccttggggtttgttaatctctctccgtctggagatgagatcttctttgccgattggtggcgaaaggtgaattccgctttcatggggaagcgcaagatgcttaggaaatctcttcagcacatatgctcttcttctgagattgaggctgctcttgacaacattggccttccagttacaaccttctgatttgattttggatgatttcgtgagattgcacaatcatttagcgaaagtatgactaagaagtgcctttcaaaatgcctaaggaattgcttgttggcatggtgttcaacagttggagtaacttacgcctgaccgctgagagttgctatgcaggtgcattcagctcagctccggggcgaagccaggaattacatgtagggaggccggccgaaagagccatcttgtaaaaaaatgatcgcgggttcaactggtttggttactcgcacttagcgtctgtctgagttaatacttgacaaaaaaaaaaaaacaagcacagctcaactggttaggtttctcgtagtggtggtggtcgtttgggttaattcatcgacttgacacggttgctcctatttttttttctatatgtattctagatagtgagggtttattgtattttgatcgtagacgctaatcagaaactctactgaatggatgccttcgttctctctgagtacaaaggccccattgaaatatgtatgagaaataaagcaaatttagaggaccggtagcatttccttctgcttatttgcctcctttttcaccacgtgagcatctaaccaatacaagactgtttagcagatctgtaaggccttgttcgtttacgtcggattgcatccgaaatcgttccagttaatcaaagtttatataaattagagaagcaatccggttatgaatcgttccgatccaccaatccgg

SEQ ID NO: 46208 - DNA, 1658 bp, Zea Mays
aagggcgagcaaaactggaagcctacgaaaatggtggagctcacctccttatccccagggccaccacgtccttctcggctgactcctcgccgccggccgccgccgccgacacctcatgttcatacctcctcgcgtcgtcgcgggaggatcctcggcgccgcgaccgccacgcctggcgccgacgactaccactccaccatccgctccctcaactcccgcggccgccacgtcccccgaaaatccctcgggcagaactacacgctcaactccaaggtgaacgaggagctggtggcggcggcgggggtggaggagggtgacgtcgtgctcgagatcggcccaggcaccggctcgctcacttccgcgctgctccaggccggcgctaccgtctttgccgtcgagaaggacaagcatatggctactctcgttaaagataggtttggatctacagaacagttgaaggtcattgaagaagacatcacaaaatttcacatccgttcccattttcttcctttcatgaaggagaaatacggtgccaccaaaaaacttgcaaaggttgcatcaaacttaccattcaatgtcagcaccgaagttgtcaaactactactcccaatgggggatgttttctctgtcgtggtgcttatgcttcaggatgaaacagcagtacgccttgcagatgcttcaatacaaagtccagagtaccgatctatcaatgtgtttgtggatttttactcggaacctgaatacaagttcagagtagacagagagaattttttccctcggcctaaggttgatggtgctgttatcagcttcaaactaaagaatgcggaggagtatccgccagttagttccccaaaaagcttcttttcaatggtgaattccgctttcatggggaagcgcaagatgcttaggaaatctcttcagcacatatgctcttcttctgagattgaggctgctcttgacaacattggccttccagttacagctagaccttctgatttgattttggatgatttcgtgagattgcacaatcatttagcgaaagtatgactaagaagtgcctttcaaaatgcctaaggaattgcttgttggcatggtgttcaacagttggagtaacttacgcctgaccgctgagagttgctatgcagctacaggtgcattcagctcagctccggggcgaagccaggaattacatgtagggaggccggccgaaagagccatcttgtaaaaaaatgatcgcggctcaactggttaggtttctcgtagtggtggtggtcgtttgggttaattcatcgacttgacacggttgctcctatttttttttctatatgtattctagatagtgagggtttattgtattttgatcgtagacgctaatcagaaactctactgaatggatgccttcgttctctctgagtacaaaggccccattgaaatatgtatgagaaataaagcaaatttagaggaccggtagcatttccttctgcttatttgcctcctttttcaccacgtgagcatctaaccaatacaagactgtttagcagatctgtaaggccttgttcgtttacgtcggattgcatccgaaatcgttccagttaatcaaagtttatataaattagagaagcaatccggttatgaatcgttccgatccaccaatccgg

SEQ ID NO: 46209 - DNA, 3119 bp, Zea Mays
aagggcgagcaaaactggaagcctacgaaaatggtggagctcacctccttatccccagggccaccacgtccttctcggctgactcctcgccgccggccgccgccgccgacacctcatgttcatacctcctcgcgtcgtcgcgggaggatcctcggcgccgcgaccgccacgcctggcgccgacgactaccactccaccatccgctccctcaactcccgcggccgccacgtcccccgaaaatccctcgggcagaactacacgctcaactccaaggtgaacgaggagctggtggcggcggcgggggtggaggagggtgacgtcgtgctcgagatcggcccaggcaccggctcgctcacttccgcgctgctccaggccggcgctaccgtctttgccgtcgagaaggacaagcatatggctactctcgttaaagataggtttggatctacagaacagttgaaggtcattgaagaagacatcacaaaatttcacatccgttcccattttcttcctttcatgaaggagaaatacggtgccaccaaaaaacttgcaaaggttgcatcaaacttaccattcaatgtcagcaccgaagttgtcaaactactactcccaatgggggatgttttctctgtcgtggtgcttatgcttcaggatgaaacagcagtacgccttgcagatgcttcaatacaaagtccagagtaccgatctatcaatgtgtttgtggatttttactcggaacctgaatacaagttcagagtagacagagagaattttttccctcggcctaaggttgatggtgctgttatcagcttcaaactaaagaatgcggaggagtatccgccagttagttccccaaaaagcttcttttcaatggtgagtagtgggtcatggggtcatggtgtgcagaaacttgtcccaaatctgaattgctttctgtggttgagggagaaaggacgtgaatggaagcaattgtttatctttggatatcgttacaaggccgctcattcttggtggtcttggagtccctaatctgtatttccaaagctgggcactgtaagctaaatggttgtggctggagaaaacagacactaacagaccttggcatgggttaaaactgcatgtactaaagcaagtaaggaagttctttcaatcttcggttgttactgtggttggaaatgagaacaagactttattctagtcggacagatggttagacggcggctgcatcaaggaatttgctcctgctgttgttgctaaagtcggtaaaagtgttgtttccactagaactgcggcccaagctattggaaactggcaatggatcagtgaaatcatgacacccctttcctgggttgggttacaacagttcttgcttttatgggatgctgtaagaagagtggtgttaacacatgaagctgataaacatatatggctgcatacttcctctggccagttctcctcctaagtcatgttacaaggcatttttcatgggatccattacttttgagccttggaggaggctgtggaagtcttggactcctccaaaatgcaaatttttccagtggctggctatacggaataaatgttggacatcagatagattggaaattggaaaggagaggtttggatcacccaaaatcttgtttattatgtgatcaaacacaagaaaccatccaatatctattgtgtacgtgcgtctttgcaagacagttttggcataccatcttttcgcccttggggtttgttaatctctctccgtctggagatgagatcttctttgccgattggtggcgaaaggtatgtaagaagatacatagaagcaagagaaagggtatgaacatcaccattattttgggggcctggtatttatggattcaccgcaacaaggcagtcttcaatggagagaacccttctctgggcacaatctgatgtgtttttgtagatgagttggtgtgttggattaaggctggagctaaacatcttgagaacttaggcctagaggtcgcacttaatatgaacatgacataatttttgtgggtgtggagtcccccttagtcccgccatggccttcctctgttctggtggaggctgtagtttggctgcaggatagtatgtgtttaccttgcctgttaggctctgtaccttggtccattttggatcttttcttctctaattaaatgatgcacaactctcctgctctttcgaaaaaattaatttctttgtaactaccatcaaaggttggcccatatccttgatttacaggtgaattccgctttcatggggaagcgcaagatgcttaggaaatctcttcagcacatatgctcttcttctgagattgaggctgctcttgacaacattggccttccagttacagctagaccttctgatttgattttggatgatttcgtgagattgcacaatcatttagcgaaagtatgactaagaagtgcctttcaaaatgcctaaggaattgcttgttggcatggtgttcaacagttggagtaacttacgcctgaccgctgagagttgctatgcagctacaggtgcattcagctcagctccggggcgaagccaggaattacatgtagggaggccggccgaaagagccatcttgtaaaaaaatgatcgcgggttcaactggtttggttactcgcacttagcgtctgtctgagttaatacttgacaaaaaaaaaaaaacaagcacagctcaactggttaggtttctcgtagtggtggtggtcgtttgggttaattcatcgacttgacacggttgctcctatttttttttctatatgtattctagatagtgagggtttattgtattttgatcgtagacgctaatcagaaactctactgaatggatgccttcgttctctctgagtacaaaggccccattgaaatatgtatgagaaataaagcaaatttagaggaccggtagcatttccttctgcttatttgcctcctttttcaccacgtgagcatctaaccaatacaagactgtttagcagatctgtaaggccttgttcgtttacgtcggattgcatccgaaatcgttccagttaatcaaagtttatataaattagagaagcaatccggttatgaatcgttccgatccaccaatccgg

SEQ ID NO: 46210 - DNA, 2654 bp, Zea Mays
aagggcgagcaaaactggaagcctacgaaaatggtggagctcacctccttatccccagggccaccacgtccttctcggctgactcctcgccgccggccgccgccgccgacacctcatgttcatacctcctcgcgtcgtcgcgggaggatcctcggcgccgcgaccgccacgcctggcgccgacgactaccactccaccatccgctccctcaactcccgcggccgccacgtcccccgaaaatccctcgggcagaactacacgctcaactccaaggtgaacgaggagctggtggcggcggcgggggtggaggagggtgacgtcgtgctcgagatcggcccaggcaccggctcgctcacttccgcgctgctccaggccggcgctaccgtctttgccgtcgagaaggacaagcatatggctactctcgttaaagataggtttggatctacagaacagttgaaggtcattgaagaagacatcacaaaatttcacatccgttcccattttcttcctttcatgaaggagaaatacggtgccaccaaaaaacttgcaaaggttgcatcaaacttaccattcaatgtcagcaccgaagttgtcaaactactactcccaatgggggatgttttctctgtcgtggtgcttatgcttcaggatgaaacagcagtacgccttgcagatgcttcaatacaaagtccagagtaccgatctatcaatgtgtttgtggatttttactcggaacctgaatacaagttcagagtagacagagagaattttttccctcggcctaaggttgatggtgctgttatcagcttcaaactaaagaatgcggaggagtatccgccagttagttccccaaaaagcttcttttcaatggtgagtagtgggtcatggggtcatggtgtgcagaaacttgtcccaaatctgaattgctttctgtggttgagggagaaaggacgtgaatggaagcaattgtttatctttggatatcgttacaaggccgctcattcttggtggtcttggagtccctaatctgtatttccaaagctgggcactgtaagctaaatggttgtggctggagaaaacagacactaacagaccttggcatgggttaaaactgcatgtactaaagcaagtaaggaagttctttcaatcttcggttgttactgtggttggaaatgagaacaagactttattctagtcggacagatggttagacggcggctgcatcaaggaatttgctcctgctgttgttgctaaagtcggtaaaagtgttgtttccactagaactgcggcccaagctattggaaactggcaatggatcagtgaaatcatgacacccctttcctgggttgggttacaacagttcttgcttttatgggatgctgtaagaagagtggtgttaacacatgaagctgataaacatatatggctgcatacttcctctggccagttctcctcctaagtcatgttacaaggcatttttcatgggatccattacttttgagccttggaggaggctgtggaagtcttggactcctccaaaatgcaaatttttccagtggctggctatacggaataaatgttggacatcagatagattggaaattggaaaggagaggtttggatcacccaaaatcttgtttattatgtgatcaaacacaagaaaccatccaatatctattgtgtacgtgcgtctttgcaagacagttttggcataccatcttttcgcccttggggtttgttaatctctctccgtctggagatgagatcttctttgccgattggtggcgaaaggtgaattccgctttcatggggaagcgcaagatgcttaggaaatctcttcagcacatatgctcttcttctgagattgaggctgctcttgacaacattggccttccagttacagctagaccttctgatttgattttggatgatttcgtgagattgcacaatcatttagcgaaagtatgactaagaagtgcctttcaaaatgcctaaggaattgcttgttggcatggtgttcaacagttggagtaacttacgcctgaccgctgagagttgctatgcagctacaggtgcattcagctcagctccggggcgaagccaggaattacatgtagggaggccggccgaaagagccatcttgtaaaaaaatgatcgcgggttcaactggtttggttactcgcacttagcgtctgtctgagttaatacttgacaaaaaaaaaaaaacaagcacagctcaactggttaggtttctcgtagtggtggtggtcgtttgggttaattcatcgacttgacacggttgctcctatttttttttctatatgtattctagatagtgagggtttattgtattttgatcgtagacgctaatcagaaactctactgaatggatgccttcgttctctctgagtacaaaggccccattgaaatatgtatgagaaataaagcaaatttagaggaccggtagcatttccttctgcttatttgcctcctttttcaccacgtgagcatctaaccaatacaagactgtttagcagatctgtaaggccttgttcgtttacgtcggattgcatccgaaatcgttccagttaatcaaagtttatataaattagagaagcaatccggttatgaatcgttccgatccaccaatccgg

SEQ ID NO: 46211 - DNA, 3114 bp, Zea Mays
aagggcgagcaaaactggaagcctacgaaaatggtggagctcacctccttatccccagggccaccacgtccttctcggctgactcctcgccgccggccgccgccgccgacacctcatgttcatacctcctcgcgtcgtcgcgggaggatcctcggcgccgcgaccgccacgcctggcgccgacgactaccactccaccatccgctccctcaactcccgcggccgccacgtcccccgaaaatccctcgggcagaactacacgctcaactccaaggtgaacgaggagctggtggcggcggcgggggtggaggagggtgacgtcgtgctcgagatcggcccaggcaccggctcgctcacttccgcgctgctccaggccggcgctaccgtctttgccgtcgagaaggacaagcatatggctactctcgttaaagataggtttggatctacagaacagttgaaggtcattgaagaagacatcacaaaatttcacatccgttcccattttcttcctttcatgaaggagaaatacggtgccaccaaaaaacttgcaaaggttgcatcaaacttaccattcaatgtcagcaccgaagttgtcaaactactactcccaatgggggatgttttctctgtcgtggtgcttatgcttcaggatgaaacagcagtacgccttgcagatgcttcaatacaaagtccagagtaccgatctatcaatgtgtttgtggatttttactcggaacctgaatacaagttcagagtagacagagagaattttttccctcggcctaaggttgatggtgctgttatcagcttcaaactaaagaatgcggaggagtatccgccagttagttccccaaaaagcttcttttcaatggtgagtagtgggtcatggggtcatggtgtgcagaaacttgtcccaaatctgaattgctttctgtggttgagggagaaaggacgtgaatggaagcaattgtttatctttggatatcgttacaaggccgctcattcttggtggtcttggagtccctaatctgtatttccaaagctgggcactgtaagctaaatggttgtggctggagaaaacagacactaacagaccttggcatgggttaaaactgcatgtactaaagcaagtaaggaagttctttcaatcttcggttgttactgtggttggaaatgagaacaagactttattctagtcggacagatggttagacggcggctgcatcaaggaatttgctcctgctgttgttgctaaagtcggtaaaagtgttgtttccactagaactgcggcccaagctattggaaactggcaatggatcagtgaaatcatgacacccctttcctgggttgggttacaacagttcttgcttttatgggatgctgtaagaagagtggtgttaacacatgaagctgataaacatatatggctgcatacttcctctggccagttctcctcctaagtcatgttacaaggcatttttcatgggatccattacttttgagccttggaggaggctgtggaagtcttggactcctccaaaatgcaaatttttccagtggctggctatacggaataaatgttggacatcagatagattggaaattggaaaggagaggtttggatcacccaaaatcttgtttattatgtgatcaaacacaagaaaccatccaatatctattgtgtacgtgcgtctttgcaagacagttttggcataccatcttttcgcccttggggtttgttaatctctctccgtctggagatgagatcttctttgccgattggtggcgaaaggtatgtaagaagatacatagaagcaagagaaagggtatgaacatcaccattattttgggggcctggtatttatggattcaccgcaacaaggcagtcttcaatggagagaacccttctctgggcacaatctgatgtgtttttgtagatgagttggtgtgttggattaaggctggagctaaacatcttgagaacttaggcctagaggtcgcacttaatatgaacatgacataatttttgtgggtgtggagtcccccttagtcccgccatggccttcctctgttctggtggaggctgtagtttggctgcaggatagtatgtgtttaccttgcctgttaggctctgtaccttggtccattttggatcttttcttctctaattaaatgatgcacaactctcctgctctttcgaaaaaattaatttctttgtaactaccatcaaaggttggcccatatccttgatttacaggtgaattccgctttcatggggaagcgcaagatgcttaggaaatctcttcagcacatatgctcttcttctgagattgaggctgctcttgacaacattggccttccagttacaaccttctgatttgattttggatgatttcgtgagattgcacaatcatttagcgaaagtatgactaagaagtgcctttcaaaatgcctaaggaattgcttgttggcatggtgttcaacagttggagtaacttacgcctgaccgctgagagttgctatgcagctacaggtgcattcagctcagctccggggcgaagccaggaattacatgtagggaggccggccgaaagagccatcttgtaaaaaaatgatcgcgggttcaactggtttggttactcgcacttagcgtctgtctgagttaatacttgacaaaaaaaaaaaaacaagcacagctcaactggttaggtttctcgtagtggtggtggtcgtttgggttaattcatcgacttgacacggttgctcctatttttttttctatatgtattctagatagtgagggtttattgtattttgatcgtagacgctaatcagaaactctactgaatggatgccttcgttctctctgagtacaaaggccccattgaaatatgtatgagaaataaagcaaatttagaggaccggtagcatttccttctgcttatttgcctcctttttcaccacgtgagcatctaaccaatacaagactgtttagcagatctgtaaggccttgttcgtttacgtcggattgcatccgaaatcgttccagttaatcaaagtttatataaattagagaagcaatccggttatgaatcgttccgatccaccaatccgg

SEQ ID NO: 46212 - DNA, 2996 bp, Zea Mays
aagggcgagcaaaactggaagcctacgaaaatggtggagctcacctccttatccccagggccaccacgtccttctcggctgactcctcgccgccggccgccgccgccgacacctcatgttcatacctcctcgcgtcgtcgcgggaggatcctcggcgccgcgaccgccacgcctggcgccgacgactaccactccaccatccgctccctcaactcccgcggccgccacgtcccccgaaaatccctcgggcagaactacacgctcaactccaaggtgaacgaggagctggtggcggcggcgggggtggaggagggtgacgtcgtgctcgagatcggcccaggcaccggctcgctcacttccgcgctgctccaggccggcgctaccgtctttgccgtcgagaaggacaagcatatggctactctcgttaaagataggtttggatctacagaacagttgaaggtcattgaagaagacatcacaaaatttcacatccgttcccattttcttcctttcatgaaggagaaatacggtgccaccaaaaaacttgcaaaggttgcatcaaacttaccattcaatgtcagcaccgaagttgtcaaactactactcccaatgggggatgttttctctgtcgtggtgcttatgcttcaggatgaaacagcagtacgccttgcagatgcttcaatacaaagtccagagtaccgatctatcaatgtgtttgtggatttttactcggaacctgaatacaagttcagagtagacagagagaattttttccctcggcctaaggttgatggtgctgttatcagcttcaaactaaagaatgcggaggagtatccgccagttagttccccaaaaagcttcttttcaatggtgagtagtgggtcatggggtcatggtgtgcagaaacttgtcccaaatctgaattgctttctgtggttgagggagaaaggacgtgaatggaagcaattgtttatctttggatatcgttacaaggccgctcattcttggtggtcttggagtccctaatctgtatttccaaagctgggcactgtaagctaaatggttgtggctggagaaaacagacactaacagaccttggcatgggttaaaactgcatgtactaaagcaagtaaggaagttctttcaatcttcggttgttactgtggttggaaatgagaacaagactttattctagtcggacagatggttagacggcggctgcatcaaggaatttgctcctgctgttgttgctaaagtcggtaaaagtgttgtttccactagaactgcggcccaagctattggaaactggcaatggatcagtgaaatcatgacacccctttcctgggttgggttacaacagttcttgcttttatgggatgctgtaagaagagtggtgttaacacatgaagctgataaacatatatggctgcatacttcctctggccagttctcctcctaagtcatgttacaaggcatttttcatgggatccattacttttgagccttggaggaggctgtggaagtcttggactcctccaaaatgcaaatttttccagtggctggctatacggaataaatgttggacatcagatagattggaaattggaaaggagaggtttggatcacccaaaatcttgtttattatgtgatcaaacacaagaaaccatccaatatctattgtgtacgtgcgtctttgcaagacagttttggcataccatcttttcgcccttggggtttgttaatctctctccgtctggagatgagatcttctttgccgattggtggcgaaaggtatgtaagaagatacatagaagcaagagaaagggtatgaacatcaccattattttgggggcctggtatttatggattcaccgcaacaaggcagtcttcaatggagagaacccttctctgggcacaatctgatgtgtttttgtagatgagttggtgtgttggattaaggctggagctaaacatcttgagaacttaggcctagaggtcgcacttaatatgaacatgacataatttttgtgggtgtggagtcccccttagtcccgccatggccttcctctgttctggtggaggctgtagtttggctgcaggatagtatgtgtttaccttgcctgttaggctctgtaccttggtccattttggatcttttcttctctaattaaatgatgcacaactctcctgctctttcgaaaaaattaatttctttgtaactaccatcaaaggttggcccatatccttgatttacaggtgaattccgctttcatggggaagcgcaagatgcttaggaaatctcttcagcacatatgctcttcttctgagattgaggctgctcttgacaacattggccttccagttacattggagtaacttacgcctgaccgctgagagttgctatgcagctacaggtgcattcagctcagctccggggcgaagccaggaattacatgtagggaggccggccgaaagagccatcttgtaaaaaaatgatcgcgggttcaactggtttggttactcgcacttagcgtctgtctgagttaatacttgacaaaaaaaaaaaaacaagcacagctcaactggttaggtttctcgtagtggtggtggtcgtttgggttaattcatcgacttgacacggttgctcctatttttttttctatatgtattctagatagtgagggtttattgtattttgatcgtagacgctaatcagaaactctactgaatggatgccttcgttctctctgagtacaaaggccccattgaaatatgtatgagaaataaagcaaatttagaggaccggtagcatttccttctgcttatttgcctcctttttcaccacgtgagcatctaaccaatacaagactgtttagcagatctgtaaggccttgttcgtttacgtcggattgcatccgaaatcgttccagttaatcaaagtttatataaattagagaagcaatccggttatgaatcgttccgatccaccaatccgg

SEQ ID NO: 46213 - DNA, 1649 bp, Zea Mays
aagggcgagcaaaactggaagcctacgaaaatggtggagctcacctccttatccccagggccaccacgtccttctcggctgactcctcgccgccggccgccgccgccgacacctcatgttcatacctcctcgcgtcgtcgcgggaggatcctcggcgccgcgaccgccacgcctggcgccgacgactaccactccaccatccgctccctcaactcccgcggccgccacgtcccccgaaaatccctcgggcagaactacacgctcaactccaaggtgaacgaggagctggtggcggcggcgggggtggaggagggtgacgtcgtgctcgagatcggcccaggcaccggctcgctcacttccgcgctgctccaggccggcgctaccgtctttgccgtcgagaaggacaagcatatggctactctcgttaaagataggtttggatctacagaacagttgaaggtcattgaagaagacatcacaaaatttcacatccgttcccattttcttcctttcatgaaggagaaatacggtgccaccaaaaaacttgcaaaggttgcatcaaacttaccattcaatgtcagcaccgaagttgtcaaactactactcccaatgggggatgttttctctgtcgtggtgcttatgcttcaggatgaaacagcagtacgccttgcagatgcttcaatacaaagtccagagtaccgatctatcaatgtgtttgtggatttttactcggaacctgaatacaagttcagagtagacagagagaattttttccctcggcctaaggtgaattccgctttcatggggaagcgcaagatgcttaggaaatctcttcagcacatatgctcttcttctgagattgaggctgctcttgacaacattggccttccagttacagctagaccttctgatttgattttggatgatttcgtgagattgcacaatcatttagcgaaagtatgactaagaagtgcctttcaaaatgcctaaggaattgcttgttggcatggtgttcaacagttggagtaacttacgcctgaccgctgagagttgctatgcagctacaggtgcattcagctcagctccggggcgaagccaggaattacatgtagggaggccggccgaaagagccatcttgtaaaaaaatgatcgcgggttcaactggtttggttactcgcacttagcgtctgtctgagttaatacttgacaaaaaaaaaaaaacaagcacagctcaactggttaggtttctcgtagtggtggtggtcgtttgggttaattcatcgacttgacacggttgctcctatttttttttctatatgtattctagatagtgagggtttattgtattttgatcgtagacgctaatcagaaactctactgaatggatgccttcgttctctctgagtacaaaggccccattgaaatatgtatgagaaataaagcaaatttagaggaccggtagcatttccttctgcttatttgcctcctttttcaccacgtgagcatctaaccaatacaagactgtttagcagatctgtaaggccttgttcgtttacgtcggattgcatccgaaatcgttccagttaatcaaagtttatataaattagagaagcaatccggttatgaatcgttccgatccaccaatccgg

SEQ ID NO: 46214 - DNA, 3025 bp, Zea Mays
aagggcgagcaaaactggaagcctacgaaaatggtggagctcacctccttatccccagggccaccacgtccttctcggctgactcctcgccgccggccgccgccgccgacacctcatgttcatacctcctcgcgtcgtcgcgggaggatcctcggcgccgcgaccgccacgcctggcgccgacgactaccactccaccatccgctccctcaactcccgcggccgccacgtcccccgaaaatccctcgggcagaactacacgctcaactccaaggtgaacgaggagctggtggcggcggcgggggtggaggagggtgacgtcgtgctcgagatcggcccaggcaccggctcgctcacttccgcgctgctccaggccggcgctaccgtctttgccgtcgagaaggacaagcatatggctactctcgttaaagataggtttggatctacagaacagttgaaggtcattgaagaagacatcacaaaatttcacatccgttcccattttcttcctttcatgaaggagaaatacggtgccaccaaaaaacttgcaaaggttgcatcaaacttaccattcaatgtcagcaccgaagttgtcaaactactactcccaatgggggatgttttctctgtcgtggtgcttatgcttcaggatgaaacagcagtacgccttgcagatgcttcaatacaaagtccagagtaccgatctatcaatgtgtttgtggatttttactcggaacctgaatacaagttcagagtagacagagagaattttttccctcggcctaaggttgatggtgctgttatcagcttcaaactaaagaatgcggaggagtatccgccagttagttccccaaaaagcttcttttcaatggtgagtagtgggtcatggggtcatggtgtgcagaaacttgtcccaaatctgaattgctttctgtggttgagggagaaaggacgtgaatggaagcaattgtttatctttggatatcgttacaaggccgctcattcttggtggtcttggagtccctaatctgtatttccaaagctgggcactgtaagctaaatggttgtggctggagaaaacagacactaacagaccttggcatgggttaaaactgcatgtactaaagcaagtaaggaagttctttcaatcttcggttgttactgtggttggaaatgagaacaagactttattctagtcggacagatggttagacggcggctgcatcaaggaatttgctcctgctgttgttgctaaagtcggtaaaagtgttgtttccactagaactgcggcccaagctattggaaactggcaatggatcagtgaaatcatgacacccctttcctgggttgggttacaacagttcttgcttttatgggatgctgtaagaagagtggtgttaacacatgaagctgataaacatatatggctgcatacttcctctggccagttctcctcctaagtcatgttacaaggcatttttcatgggatccattacttttgagccttggaggaggctgtggaagtcttggactcctccaaaatgcaaatttttccagtggctggctatacggaataaatgttggacatcagatagattggaaattggaaaggagaggtttggatcacccaaaatcttgtttattatgtgatcaaacacaagaaaccatccaatatctattgtgtacgtgcgtctttgcaagacagttttggcataccatcttttcgcccttggggtttgttaatctctctccgtctggagatgagatcttctttgccgattggtggcgaaaggtatgtaagaagatacatagaagcaagagaaagggtatgaacatcaccattattttgggggcctggtatttatggattcaccgcaacaaggcagtcttcaatggagagaacccttctctgggcacaatctgatgtgtttttgtagatgagttggtgtgttggattaaggctggagctaaacatcttgagaacttaggcctagaggtcgcacttaatatgaacatgacataatttttgtgggtgtggagtcccccttagtcccgccatggccttcctctgttctggtggaggctgtagtttggctgcaggatagtatgtgtttaccttgcctgttaggctctgtaccttggtccattttggatcttttcttctctaattaaatgatgcacaactctcctgctctttcgaaaaaattaatttctttgtaactaccatcaaaggttggcccatatccttgatttacaggtgaattccgctttcatggggaagcgcaagatgcttaggaaatctcttcagcacatatgctcttcttctgagattgaggctgctcttgacaacattggccttccagttacagaattgcttgttggcatggtgttcaacagttggagtaacttacgcctgaccgctgagagttgctatgcagctacaggtgcattcagctcagctccggggcgaagccaggaattacatgtagggaggccggccgaaagagccatcttgtaaaaaaatgatcgcgggttcaactggtttggttactcgcacttagcgtctgtctgagttaatacttgacaaaaaaaaaaaaacaagcacagctcaactggttaggtttctcgtagtggtggtggtcgtttgggttaattcatcgacttgacacggttgctcctatttttttttctatatgtattctagatagtgagggtttattgtattttgatcgtagacgctaatcagaaactctactgaatggatgccttcgttctctctgagtacaaaggccccattgaaatatgtatgagaaataaagcaaatttagaggaccggtagcatttccttctgcttatttgcctcctttttcaccacgtgagcatctaaccaatacaagactgtttagcagatctgtaaggccttgttcgtttacgtcggattgcatccgaaatcgttccagttaatcaaagtttatataaattagagaagcaatccggttatgaatcgttccgatccaccaatccgg

SEQ ID NO: 46215 - DNA, 2649 bp, Zea Mays
aagggcgagcaaaactggaagcctacgaaaatggtggagctcacctccttatccccagggccaccacgtccttctcggctgactcctcgccgccggccgccgccgccgacacctcatgttcatacctcctcgcgtcgtcgcgggaggatcctcggcgccgcgaccgccacgcctggcgccgacgactaccactccaccatccgctccctcaactcccgcggccgccacgtcccccgaaaatccctcgggcagaactacacgctcaactccaaggtgaacgaggagctggtggcggcggcgggggtggaggagggtgacgtcgtgctcgagatcggcccaggcaccggctcgctcacttccgcgctgctccaggccggcgctaccgtctttgccgtcgagaaggacaagcatatggctactctcgttaaagataggtttggatctacagaacagttgaaggtcattgaagaagacatcacaaaatttcacatccgttcccattttcttcctttcatgaaggagaaatacggtgccaccaaaaaacttgcaaaggttgcatcaaacttaccattcaatgtcagcaccgaagttgtcaaactactactcccaatgggggatgttttctctgtcgtggtgcttatgcttcaggatgaaacagcagtacgccttgcagatgcttcaatacaaagtccagagtaccgatctatcaatgtgtttgtggatttttactcggaacctgaatacaagttcagagtagacagagagaattttttccctcggcctaaggttgatggtgctgttatcagcttcaaactaaagaatgcggaggagtatccgccagttagttccccaaaaagcttcttttcaatggtgagtagtgggtcatggggtcatggtgtgcagaaacttgtcccaaatctgaattgctttctgtggttgagggagaaaggacgtgaatggaagcaattgtttatctttggatatcgttacaaggccgctcattcttggtggtcttggagtccctaatctgtatttccaaagctgggcactgtaagctaaatggttgtggctggagaaaacagacactaacagaccttggcatgggttaaaactgcatgtactaaagcaagtaaggaagttctttcaatcttcggttgttactgtggttggaaatgagaacaagactttattctagtcggacagatggttagacggcggctgcatcaaggaatttgctcctgctgttgttgctaaagtcggtaaaagtgttgtttccactagaactgcggcccaagctattggaaactggcaatggatcagtgaaatcatgacacccctttcctgggttgggttacaacagttcttgcttttatgggatgctgtaagaagagtggtgttaacacatgaagctgataaacatatatggctgcatacttcctctggccagttctcctcctaagtcatgttacaaggcatttttcatgggatccattacttttgagccttggaggaggctgtggaagtcttggactcctccaaaatgcaaatttttccagtggctggctatacggaataaatgttggacatcagatagattggaaattggaaaggagaggtttggatcacccaaaatcttgtttattatgtgatcaaacacaagaaaccatccaatatctattgtgtacgtgcgtctttgcaagacagttttggcataccatcttttcgcccttggggtttgttaatctctctccgtctggagatgagatcttctttgccgattggtggcgaaaggtgaattccgctttcatggggaagcgcaagatgcttaggaaatctcttcagcacatatgctcttcttctgagattgaggctgctcttgacaacattggccttccagttacaaccttctgatttgattttggatgatttcgtgagattgcacaatcatttagcgaaagtatgactaagaagtgcctttcaaaatgcctaaggaattgcttgttggcatggtgttcaacagttggagtaacttacgcctgaccgctgagagttgctatgcagctacaggtgcattcagctcagctccggggcgaagccaggaattacatgtagggaggccggccgaaagagccatcttgtaaaaaaatgatcgcgggttcaactggtttggttactcgcacttagcgtctgtctgagttaatacttgacaaaaaaaaaaaaacaagcacagctcaactggttaggtttctcgtagtggtggtggtcgtttgggttaattcatcgacttgacacggttgctcctatttttttttctatatgtattctagatagtgagggtttattgtattttgatcgtagacgctaatcagaaactctactgaatggatgccttcgttctctctgagtacaaaggccccattgaaatatgtatgagaaataaagcaaatttagaggaccggtagcatttccttctgcttatttgcctcctttttcaccacgtgagcatctaaccaatacaagactgtttagcagatctgtaaggccttgttcgtttacgtcggattgcatccgaaatcgttccagttaatcaaagtttatataaattagagaagcaatccggttatgaatcgttccgatccaccaatccgg

SEQ ID NO: 46216 - DNA, 1728 bp, Zea Mays
aagggcgagcaaaactggaagcctacgaaaatggtggagctcacctccttatccccagggccaccacgtccttctcggctgactcctcgccgccggccgccgccgccgacacctcatgttcatacctcctcgcgtcgtcgcgggaggatcctcggcgccgcgaccgccacgcctggcgccgacgactaccactccaccatccgctccctcaactcccgcggccgccacgtcccccgaaaatccctcgggcagaactacacgctcaactccaaggtgaacgaggagctggtggcggcggcgggggtggaggagggtgacgtcgtgctcgagatcggcccaggcaccggctcgctcacttccgcgctgctccaggccggcgctaccgtctttgccgtcgagaaggacaagcatatggctactctcgttaaagataggtttggatctacagaacagttgaaggtcattgaagaagacatcacaaaatttcacatccgttcccattttcttcctttcatgaaggagaaatacggtgccaccaaaaaacttgcaaaggttgcatcaaacttaccattcaatgtcagcaccgaagttgtcaaactactactcccaatgggggatgttttctctgtcgtggtgcttatgcttcaggatgaaacagcagtacgccttgcagatgcttcaatacaaagtccagagtaccgatctatcaatgtgtttgtggatttttactcggaacctgaatacaagttcagagtagacagagagaattttttccctcggcctaaggttgatggtgctgttatcagcttcaaactaaagaatgcggaggagtatccgccagttagttccccaaaaagcttcttttcaatggtgaattccgctttcatggggaagcgcaagatgcttaggaaatctcttcagcacatatgctcttcttctgagattgaggctgctcttgacaacattggccttccagttacaaccttctgatttgattttggatgatttcgtgagattgcacaatcatttagcgaaagtatgactaagaagtgcctttcaaaatgcctaaggaattgcttgttggcatggtgttcaacagttggagtaacttacgcctgaccgctgagagttgctatgcagctacaggtgcattcagctcagctccggggcgaagccaggaattacatgtagggaggccggccgaaagagccatcttgtaaaaaaatgatcgcgggttcaactggtttggttactcgcacttagcgtctgtctgagttaatacttgacaaaaaaaaaaaaacaagcacagctcaactggttaggtttctcgtagtggtggtggtcgtttgggttaattcatcgacttgacacggttgctcctatttttttttctatatgtattctagatagtgagggtttattgtattttgatcgtagacgctaatcagaaactctactgaatggatgccttcgttctctctgagtacaaaggccccattgaaatatgtatgagaaataaagcaaatttagaggaccggtagcatttccttctgcttatttgcctcctttttcaccacgtgagcatctaaccaatacaagactgtttagcagatctgtaaggccttgttcgtttacgtcggattgcatccgaaatcgttccagttaatcaaagtttatataaattagagaagcaatccggttatgaatcgttccgatccaccaatccgg

SEQ ID NO: 46217 - DNA, 2688 bp, Zea Mays
aagggcgagcaaaactggaagcctacgaaaatggtggagctcacctccttatccccagggccaccacgtccttctcggctgactcctcgccgccggccgccgccgccgacacctcatgttcatacctcctcgcgtcgtcgcgggaggatcctcggcgccgcgaccgccacgcctggcgccgacgactaccactccaccatccgctccctcaactcccgcggccgccacgtcccccgaaaatccctcgggcagaactacacgctcaactccaaggtgaacgaggagctggtggcggcggcgggggtggaggagggtgacgtcgtgctcgagatcggcccaggcaccggctcgctcacttccgcgctgctccaggccggcgctaccgtctttgccgtcgagaaggacaagcatatggctactctcgttaaagataggtttggatctacagaacagttgaaggtcattgaagaagacatcacaaaatttcacatccgttcccattttcttcctttcatgaaggagaaatacggtgccaccaaaaaacttgcaaaggttgcatcaaacttaccattcaatgtcagcaccgaagttgtcaaactactactcccaatgggggatgttttctctgtcgtggtgcttatgcttcaggatgaaacagcagtacgccttgcagatgcttcaatacaaagtccagagtaccgatctatcaatgtgtttgtggatttttactcggaacctgaatacaagttcagagtagacagagagaattttttccctcggcctaaggttgatggtgctgttatcagcttcaaactaaagaatgcggaggagtatccgccagttagttccccaaaaagcttcttttcaatggtgagtagtgggtcatggggtcatggtgtgcagaaacttgtcccaaatctgaattgctttctgtggttgagggagaaaggacgtgaatggaagcaattgtttatctttggatatcgttacaaggccgctcattcttggtggtcttggagtccctaatctgtatttccaaagctgggcactgtaagctaaatggttgtggctggagaaaacagacactaacagaccttggcatgggttaaaactgcatgtactaaagcaagtaaggaagttctttcaatcttcggttgttactgtggttggaaatgagaacaagactttattctagtcggacagatggttagacggcggctgcatcaaggaatttgctcctgctgttgttgctaaagtcggtaaaagtgttgtttccactagaactgcggcccaagctattggaaactggcaatggatcagtgaaatcatgacacccctttcctgggttgggttacaacagttcttgcttttatgggatgctgtaagaagagtggtgttaacacatgaagctgataaacatatatggctgcatacttcctctggccagttctcctcctaagtcatgttacaaggcatttttcatgggatccattacttttgagccttggaggaggctgtggaagtcttggactcctccaaaatgcaaatttttccagtggctggctatacggaataaatgttggacatcagatagattggaaattggaaaggagaggtttggatcacccaaaatcttgtttattatgtgatcaaacacaagaaaccatccaatatctattgtgtacgtgcgtctttgcaagacagttttggcataccatcttttcgcccttggggtttgttaatctctctccgtctggagatgagatcttctttgccgattggtggcgaaaggtatgtaagaagatacatagaagcaagagaaagggtgaattccgctttcatggggaagcgcaagatgcttaggaaatctcttcagcacatatgctcttcttctgagattgaggctgctcttgacaacattggccttccagttacagctagaccttctgatttgattttggatgatttcgtgagattgcacaatcatttagcgaaagtatgactaagaagtgcctttcaaaatgcctaaggaattgcttgttggcatggtgttcaacagttggagtaacttacgcctgaccgctgagagttgctatgcagctacaggtgcattcagctcagctccggggcgaagccaggaattacatgtagggaggccggccgaaagagccatcttgtaaaaaaatgatcgcgggttcaactggtttggttactcgcacttagcgtctgtctgagttaatacttgacaaaaaaaaaaaaacaagcacagctcaactggttaggtttctcgtagtggtggtggtcgtttgggttaattcatcgacttgacacggttgctcctatttttttttctatatgtattctagatagtgagggtttattgtattttgatcgtagacgctaatcagaaactctactgaatggatgccttcgttctctctgagtacaaaggccccattgaaatatgtatgagaaataaagcaaatttagaggaccggtagcatttccttctgcttatttgcctcctttttcaccacgtgagcatctaaccaatacaagactgtttagcagatctgtaaggccttgttcgtttacgtcggattgcatccgaaatcgttccagttaatcaaagtttatataaattagagaagcaatccggttatgaatcgttccgatccaccaatccgg

SEQ ID NO: 46218 - DNA, 795 bp, Zea Mays
aagggcgagcaaaactggaagcctacgaaaatggtggagctcacctccttatccccagggccaccacgtccttctcggctgactcctcgccgccggccgccgccgccgacacctcatgttcatacctcctcgcgtcgtcgcgggaggatcctcggcgccgcgaccgccacgcctggcgccgacgactaccactccaccatccgctccctcaactcccgcggccgccacgtcccccgaaaatccctcgggcagaactacacgctcaactccaaggtgaacgaggagctggtggcggcggcgggggtggaggagggtgacgtcgtgctcgagatcggcccaggcaccggctcgctcacttccgcgctgctccaggccggcgctaccgtctttgccgtcgagaaggacaagcatatggctactctcgttaaagataggtttggatctacagaacagttgaaggtcattgaagaagacatcacaaaatttcacatccgttcccattttcttcctttcatgaaggagaaatacggtgccaccaaaaaacttgcaaaggttgcatcaaacttaccattcaatgtcagcaccgaagttgtcaaactactactcccaatgggggatgttttctctgtcgtggtgcttatgcttcaggatgaaacagcagtacgccttgcagatgcttcaatacaaagtccagagtaccgatctatcaatgtgtttgtggatttttactcggaatcatcataaagatctgctagttactctgatcctcgaccctgctcagcagcttatgacaac

SEQ ID NO: 46219 - DNA, 3078 bp, Zea Mays
gcctccccccccccaaaaggcagcagcaaaacccccattaaatccctctcctccccgatcgcaggccgatcgacggcggcgatggggcagagaatcgatatcaattggactgaggtgtttggcaagtcatcctcccccgaccgcgaggccgacgtctgcttcgcctccccctcgtcggcgtcggcagcaccgcggacgcgggcgcgggcgttgggcgccgcgaaggtgttaccgggcgacgagcggcggcgggggtccccagacagacaccaacggaagaggctcgggaagctgcgcatcgacgatgactggtccgtcggcgggcagcgccacaccgccgtgcatggggatgacggggcgcgccgaccacggacccgcggggccgccaaggctgcagatggtcgggtacaggatgctcattccgtttctaaggatgtgtatgatttcagtaagatttccactcttcccgatgctatcatttctaaccttctgtcagccgcaaaaggtggattgggactttgggagactttagtcagatgccatgggttagtggattaatcacgggaaatgcatgatatccatgtggaatatcaataatcagaatgaagcttccgttgaatctgttacagtcattcactggtacaaactgttattgatttgttatgtgtcatttatttgtaggtccagaagatgagcaggcggaacgtgtgggcaacagattctgttcgaggttaactcccattcaggaaaataaatactgccagttacctttgaataatctcaaaaggcaagggtgtgcggaaaaaaggaaacctatatcggtggacaagatgtactcagagtctgaccgaccaagttccacatcttcatctgcgaagaggactcatgccattgatccagaggtgtcagatcatgaaaaatgtcacaagactgaaagttcccatcccagtagattctctaagaggaggaaggaacaacttcagaattcatcttctgtgtaccctcgaaaggttcaagatgtggttctattggatgacgaagatatgcagcctgaggaagaagtaaactgtgacatgtctgacggacagaatggaccaaagatctactacccatcgagagataatcgggaatctgttgagctcagcagatctgatattaaatgtcttgatcctggagtatatttgtcatcaccagtgataaacttctacatccagtacattaaaaggaacagactgtctagtgaagattttagagacaaattttacatatttaacacatatttttatggaaagcttgaagaagcattgtgtcggcaggatgagttctcaaagttgagaagatggtggaaaggtgtcaatatattaaataaagcatacataatcttgccgatccatgggatggcgcactggagcttggtaatcatttgcattcctgcaaaagagagtatttcaggaccaatcatacttcatctggactccctagcgatgcatcccagtactaagatcttgaacacagttgagagataccttgaaaaagaatggtgccaattatcatcatgggaggattttaaaaataatatacataagcaaagcgttgaggttccacgacagaataatgagtatgactgtggcatcttcatgctttattatattgaacggtttataaaagaggctccagaaagattcacaattgataaacttgatatgtttaatcggagttggttcaaacctgaagaagcatctggtctaaggcggagaataagagagcttctgctggaagaatttgaaagtgccaagctggatgatgctttaccaggagcggatgcatctgagcgtgatgacagcataaatgatggagaattgaaaccagatgcatcttctgacagttcagaaatggtcgtagaggtggtaggagggttgggaggcactgacaagagcaatgaaggcatcaaggttgtagcatcagaagaggcaagtggagagtcaggagatgctggtaagagtaccgaaggtactgttgcagcatcagaagaaaagagtattgaaggcatcaatgttgcagaaccagaagatgcttgtgagagtataggaggcatctatgttgcagaatcagatgaagcaagtggggagtttggagagattggtaagaccaacaaaggcaccaaagttgcagtgtcagaaggagcaagtgtgtctggatacactgataagaatatggaagacatctctgactctgaggttgcagtattagacaaagctcccactagcagctacagacgtggagagaagaccacagcctgtgttctatcagaagcagcttcactttccgatagcgtcaaagatgaacaaggtatggtgaaaccagattctggcagctcaaaagctgagagagaaggagatttgattgtaattgcatcgccggaaagatcggaagggaatgatgagatcattggtagcatgccaattacagatgtagtttgtgacagctgcgacagcgacaccgagaccaaggtgaggatcgtaaaaattcacagaagaaaatttgtcccatcgtgtggttgcagcaattgacacaaggggccatgcaccgtgcaaaccttctggttgcgttctcacgaagatgcgaaattgtgacagattttggtaatgatattttgaggttcctgtggccgtataccaagcacatagatgaccaggccaggcggtgatctcagtaaaccgaataggtagcgggtcgatgcatggcctgcttccccctgatctcgggcactaggctcctggaaagcagttttgggtaggcagttcattggcttgggcccgggacttgtaaagtgtacaggcgattggacgttattacgtatgttatggtgtttacattagaagatctgtgactgtgaacacctgccacaatttgagataatatgcgcgtaaggtcttgcgttttcctttttgttctgccccagagctgccaaacatgcatccttgttcttctccagccttgatatgatggcatttcttttgaccttggagtagagttatcgtgtgaatgaaggaagctattacagtacagtgcaaattt

SEQ ID NO: 46220 - DNA, 2809 bp, Zea Mays
gcctccccccccccaaaaggcagcagcaaaacccccattaaatccctctcctccccgatcgcaggccgatcgacggcggcgatggggcagagaatcgatatcaattggactgaggtgtttggcaagtcatcctcccccgaccgcgaggccgacgtctgcttcgcctccccctcgtcggcgtcggcagcaccgcggacgcgggcgcgggcgttgggcgccgcgaaggtgttaccgggcgacgagcggcggcgggggtccccagacagacaccaacggaagaggctcgggaagctgcgcatcgacgatgactggtccgtcggcgggcagcgccacaccgccgtgcatggggatgacggggcgcgccgaccacggacccgcggggccgccaaggctgcagatggtcgggtacaggatgctcattccgtttctaaggatgtgtatgatttcaaagatgagcaggcggaacgtgtgggcaacagattctgttcgaggttaactcccattcaggaaaataaatactgccagttacctttgaataatctcaaaaggcaagggtgtgcggaaaaaaggaaacctatatcggtggacaagatgtactcagagtctgaccgaccaagttccacatcttcatctgcgaagaggactcatgccattgatccagaggtgtcagatcatgaaaaatgtcacaagactgaaagttcccatcccagtagattctctaagaggaggaaggaacaacttcagaattcatcttctgtgtaccctcgaaaggttcaagatgtggttctattggatgacgaagatatgcagcctgaggaagaagtaaactgtgacatgtctgacggacagaatggaccaaagatctactacccatcgagatctgatattaaatgtcttgatcctggagtatatttgtcatcaccagtgataaacttctacatccagtacattaaaaggaacagactgtctagtgaagattttagagacaaattttacatatttaacacatatttttatggaaagcttgaagaagcattgtgtcggcaggatgagttctcaaagttgagaagatggtggaaaggtgtcaatatattaaataaagcatacataatcttgccgatccatgggatggcgcactggagcttggtaatcatttgcattcctgcaaaagagagtatttcaggaccaatcatacttcatctggactccctagcgatgcatcccagtactaagatcttgaacacagttgagagataccttgaaaaagaatggtgccaattatcatcatgggaggattttaaaaataatatacataagcaaagcgttgaggttccacgacagaataatgagtatgactgtggcatcttcatgctttattatattgaacggtttataaaagaggctccagaaagattcacaattgataaacttgatatgtttaatcggagttggttcaaacctgaagaagcatctggtctaaggcggagaataagagagcttctgctggaagaatttgaaagtgccaagctggatgatgctttaccaggagcggatgcatctgagcgtgatgacagcataaatgatggagaattgaaaccagatgcatcttctgacagttcagaaatggtcgtagaggtggtaggagggttgggaggcactgacaagagcaatgaaggcatcaaggttgtagcatcagaagaggcaagtggagagtcaggagatgctggtaagagtaccgaaggtactgttgcagcatcagaagaaaagagtattgaaggcatcaatgttgcagaaccagaagatgcttgtgagagtataggaggcatctatgttgcagaatcagatgaagcaagtggggagtttggagagattggtaagaccaacaaaggcaccaaagttgcagtgtcagaaggagcaagtgtgtctggatacactgataagaatatggaagacatctctgactctgaggttgcagtattagacaaagctcccactagcagctacagacgtggagagaagaccacagcctgtgttctatcagaagcagcttcactttccgatagcgtcaaagatgaacaaggtatggtgaaaccagattctggcagctcaaaagctgagagagaaggagatttgattgtaattgcatcgccggaaagatcggaagggaatgatgagatcattggtagcatgccaattacagatgtagtttgtgacagctgcgacagcgacaccgagaccaaggtgaggatcgtaaaaattcacagaagaaaatttgtcccatcgtgtggttgcagcaattgacacaaggggccatgcaccgtgcaaaccttctggttgcgttctcacgaagatgcgaaattgtgacagattttggtaatgatattttgaggttcctgtggccgtataccaagcacatagatgaccaggccaggcggtgatctcagtaaaccgaataggtagcgggtcgatgcatggcctgcttccccctgatctcgggcactaggctcctggaaagcagttttgggtaggcagttcattggcttgggcccgggacttgtaaagtgtacaggcgattggacgttattacgtatgttatggtgtttacattagaagatctgtgactgtgaacacctgccacaatttgagataatatgcgcgtaaggtcttgcgttttcctttttgttctgccccagagctgccaaacatgcatccttgttcttctccagccttgatatgatggcatttcttttgaccttggagtagagttatcgtgtgaatgaaggaagctattacagtacagtgcaaattt

SEQ ID NO: 46221 - DNA, 2676 bp, Zea Mays
ggcaacctccgctccgcctccccccccccaaaaggcagcagcaaaacccccattaaatccctctcctccccgatcgcaggccgatcgacggcggcgatggggcagagaatcgatatcaattggactgaggtgtttggcaagtcatcctcccccgaccgcgaggccgacgtctgcttcgcctccccctcgtcggcgtcggcagcaccgcggacgcgggcgcgggcgttgggcgccgcgaaggtgttaccgggcgacgagcggcggcgggggtccccagacagacaccaacggaagaggctcgggaagctgcgcatcgacgatgactggtccgtcggcgggcagcgccacaccgccgtgcatggggatgacggggcgcgccgaccacggacccgcggggccgccaaggctgcagatggtcgggtacaggatgctcattccgtttctaaggatgtgtatgatttcagtccagaagatgagcaggcggaacgtgtgggcaacagattctgttcgaggttaactcccattcaggaaaataaatactgccagttacctttgaataatctcaaaaggcaagggtgtgcggaaaaaaggaaacctatatcggtggacaagatgtactcagagtctgaccgaccaagttccacatcttcatctgcgaagaggactcatgccattgatccagaggtgtcagatcatgaaaaatgtcacaagactgaaagttcccatcccagtagattctctaagaggaggaaggaacaacttcagaattcatcttctgtgtaccctcgaaaggttcaagatgtggttctattggatgacgaagatatgcagcctgaggaagaagtaaactgtgacatgtctgacggacagaatggaccaaagatctactacccatcgagagataatcgggaatctgttgagctcagcagatctgatattaaatgtcttgatcctggagtatatttgtcatcaccagtgataaacttctacatccagtacattaaaaggaacagactgtctagtgaagattttagagacaaattttacatatttaacacatatttttatggaaagcttgaagaagcattgtgtcggcaggatgagttctcaaagttgagaagatggtggaaaggtgtcaatatattaaataaagcatacataatcttgccgatccatgggatggcgcactggagcttggtaatcatttgcattcctgcaaaagagagtatttcaggaccaatcatacttcatctggactccctagcgatgcatcccagtactaagatcttgaacacagttgagagtttaatcggagttggttcaaacctgaagaagcatctggtctaaggcggagaataagagagcttctgctggaagaatttgaaagtgccaagctggatgatgctttaccaggagcggatgcatctgagcgtgatgacagcataaatgatggagaattgaaaccagatgcatcttctgacagttcagaaatggtcgtagaggtggtaggagggttgggaggcactgacaagagcaatgaaggcatcaaggttgtagcatcagaagaggcaagtggagagtcaggagatgctggtaagagtaccgaaggtactgttgcagcatcagaagaaaagagtattgaaggcatcaatgttgcagaaccagaagatgcttgtgagagtataggaggcatctatgttgcagaatcagatgaagcaagtggggagtttggagagattggtaagaccaacaaaggcaccaaagttgcagtgtcagaaggagcaagtgtgtctggatacactgataagaatatggaagacatctctgactctgaggttgcagtattagacaaagctcccactagcagctacagacgtggagagaagaccacagcctgtgttctatcagaagcagcttcactttccgatagcgtcaaagatgaacaaggtatggtgaaaccagattctggcagctcaaaagctgagagagaaggagatttgattgtaattgcatcgccggaaagatcggaagggaatgatgagatcattggtagcatgccaattacagatgtagtttgtgacagctgcgacagcgacaccgagaccaaggtgaggatcgtaaaaattcacagaagaaaatttgtcccatcgtgtggttgcagcaattgacacaaggggccatgcaccgtgcaaaccttctggttgcgttctcacgaagatgcgaaattgtgacagattttggtaatgatattttgaggttcctgtggccgtataccaagcacatagatgaccaggccaggcggtgatctcagtaaaccgaataggtagcgggtcgatgcatggcctgcttccccctgatctcgggcactaggctcctggaaagcagttttgggtaggcagttcattggcttgggcccgggacttgtaaagtgtacaggcgattggacgttattacgtatgttatggtgtttacattagaagatctgtgactgtgaacacctgccacaatttgagataatatgcgcgtaaggtcttgcgttttcctttttgttctgccccagagctgccaaacatgcatccttgttcttctccagccttgatatgatggcatttcttttgaccttggagtagagttatcgtgtgaatgaaggaagctattacagtacagtgcaaattt

SEQ ID NO: 46222 - DNA, 2862 bp, Zea Mays
ggcaacctccgctccgcctccccccccccaaaaggcagcagcaaaacccccattaaatccctctcctccccgatcgcaggccgatcgacggcggcgatggggcagagaatcgatatcaattggactgaggtgtttggcaagtcatcctcccccgaccgcgaggccgacgtctgcttcgcctccccctcgtcggcgtcggcagcaccgcggacgcgggcgcgggcgttgggcgccgcgaaggtgttaccgggcgacgagcggcggcgggggtccccagacagacaccaacggaagaggctcgggaagctgcgcatcgacgatgactggtccgtcggcgggcagcgccacaccgccgtgcatggggatgacggggcgcgccgaccacggacccgcggggccgccaaggctgcagatggtcgggtacaggatgctcattccgtttctaaggatgtgtatgatttcagtccagaagatgagcaggcggaacgtgtgggcaacagattctgttcgaggttaactcccattcaggaaaataaatactgccagttacctttgaataatctcaaaaggcaagggtgtgcggaaaaaaggaaacctatatcggtggacaagatgtactcagagtctgaccgaccaagttccacatcttcatctgcgaagaggactcatgccattgatccagaggtgtcagatcatgaaaaatgtcacaagactgaaagttcccatcccagtagattctctaagaggaggaaggaacaacttcagaattcatcttctgtgtaccctcgaaaggtgttcaagatgtggttctattggatgacgaagatatgcagcctgaggaagaagtaaactgtgacatgtctgacggacagaatggaccaaagatctactacccatcgagagataatcgggaatctgttgagctcagcagatctgatattaaatgtcttgatcctggagtatatttgtcatcaccagtgataaacttctacatccagtacattaaaaggaacagactgtctagtgaagattttagagacaaattttacatatttaacacatatttttatggaaagcttgaagaagcattgtgtcggcaggatgagttctcaaagttgagaagatggtggaaaggtgtcaatatattaaataaagcatacataatcttgccgatccatgggatggcgcactggagcttggtaatcatttgcattcctgcaaaagagagtatttcaggaccaatcatacttcatctggactccctagcgatgcatcccagtactaagatcttgaacacagttgagagataccttgaaaaagaatggtgccaattatcatcatgggaggattttaaaaataatatacataagcaaagcgttgaggttccacgacagaataatgagtatgactgtggcatcttcatgctttattatattgaacggtttataaaagaggctccagaaagattcacaattgataaacttgatatgtttaatcggagttggttcaaacctgaagaagcatctggtctaaggcggagaataagagagcttctgctggaagaatttgaaagtgccaagctggatgatgctttaccaggagcggatgcatctgagcgtgatgacagcataaatgatggagaattgaaaccagatgcatcttctgacagttcagaaatggtcgtagaggtggtaggagggttgggaggcactgacaagagcaatgaaggcatcaaggttgtagcatcagaagaggcaagtggagagtcaggagatgctggtaagagtaccgaaggtactgttgcagcatcagaagaaaagagtattgaaggcatcaatgttgcagaaccagaagatgcttgtgagagtataggaggcatctatgttgcagaatcagatgaagcaagtggggagtttggagagattggtaagaccaacaaaggcaccaaagttgcagtgtcagaaggagcaagtgtgtctggatacactgataagaatatggaagacatctctgactctgaggttgcagtattagacaaagctcccactagcagctacagacgtggagagaagaccacagcctgtgttctatcagaagcagcttcactttccgatagcgtcaaagatgaacaaggtatggtgaaaccagattctggcagctcaaaagctgagagagaaggagatttgattgtaattgcatcgccggaaagatcggaagggaatgatgagatcattggtagcatgccaattacagatgtagtttgtgacagctgcgacagcgacaccgagaccaaggtgaggatcgtaaaaattcacagaagaaaatttgtcccatcgtgtggttgcagcaattgacacaaggggccatgcaccgtgcaaaccttctggttgcgttctcacgaagatgcgaaattgtgacagattttggtaatgatattttgaggttcctgtggccgtataccaagcacatagatgaccaggccaggcggtgatctcagtaaaccgaataggtagcgggtcgatgcatggcctgcttccccctgatctcgggcactaggctcctggaaagcagttttgggtaggcagttcattggcttgggcccgggacttgtaaagtgtacaggcgattggacgttattacgtatgttatggtgtttacattagaagatctgtgactgtgaacacctgccacaatttgagataatatgcgcgtaaggtcttgcgttttcctttttgttctgccccagagctgccaaacatgcatccttgttcttctccagccttgatatgatggcatttcttttgaccttggagtagagttatcgtgtgaatgaaggaagctattacagtacagtgcaaattt

SEQ ID NO: 46223 - DNA, 2746 bp, Zea Mays
cggcaacctccgctccgcctccccccccccaaaaggcagcagcaaaacccccattaaatccctctcctccccgatcgcaggccgatcgacggcggcgatggggcagagaatcgatatcaattggactgaggtgtttggcaagtcatcctcccccgaccgcgaggccgacgtctgcttcgcctccccctcgtcggcgtcggcagcaccgcggacgcgggcgcgggcgttgggcgccgcgaaggtgttaccgggcgacgagcggcggcgggggtccccagacagacaccaacggaagaggctcgggaagctgcgcatcgacgatgactggtccgtcggcgggcagcgccacaccgccgtgcatggggatgacggggcgcgccgaccacggacccgcggggccgccaaggctgcagatggtcgggtacaggatgctcattccgtttctaaggatgtgtatgatttcagtccagaagatgagcaggcggaacgtgtgggcaacagattctgttcgaggttaactcccattcaggaaaataaatactgccagttacctttgaataatctcaaaaggcaagggtgtgcggaaaaaaggaaacctatatcggtggacaagatgtactcagagtctgaccgaccaagttccacatcttcatctgcgaagaggactcatgccattgatccagaggtgtcagatcatgaaaaatgtcacaagactgaaagttcccatcccagtagattctctaagaggaggaaggaacaacttcagaattcatcttctgtgtaccctcgaaagatgtggttctattggatgacgaagatatgcagcctgaggaagaagtaaactgtgacatgtctgacggacagaatggaccaaagatctactacccatcgagagataatcgggaatctgttgagctcagcagatctgatattaaatgtcttgatcctggagtatatttgtcatcaccagtgataaacttctacatccagtacattaaaaggaacagactgtctagtgaagattttagagacaaattttacatatttaacacatatttttatggaaagcttgaagaagcattgtgtcggcaggatgagttctcaaagttgagaagatggtggaaaggtgtcaatatattaaataaagcatacataatcttgccgatccatgggatggcgcactggagcttggtaatcatttgcattcctgcaaaagagagtatttcaggaccaatcatacttcatctggactccctagcgatgcatcccagtactaagatcttgaacacagttgagagataccttgaaaaagaatggtgccaattatcatcatgggaggattttaaaaataatatacataagcaaagcgttgagtttaatcggagttggttcaaacctgaagaagcatctggtctaaggcggagaataagagagcttctgctggaagaatttgaaagtgccaagctggatgatgctttaccaggagcggatgcatctgagcgtgatgacagcataaatgatggagaattgaaaccagatgcatcttctgacagttcagaaatggtcgtagaggtggtaggagggttgggaggcactgacaagagcaatgaaggcatcaaggttgtagcatcagaagaggcaagtggagagtcaggagatgctggtaagagtaccgaaggtactgttgcagcatcagaagaaaagagtattgaaggcatcaatgttgcagaaccagaagatgcttgtgagagtataggaggcatctatgttgcagaatcagatgaagcaagtggggagtttggagagattggtaagaccaacaaaggcaccaaagttgcagtgtcagaaggagcaagtgtgtctggatacactgataagaatatggaagacatctctgactctgaggttgcagtattagacaaagctcccactagcagctacagacgtggagagaagaccacagcctgtgttctatcagaagcagcttcactttccgatagcgtcaaagatgaacaaggtatggtgaaaccagattctggcagctcaaaagctgagagagaaggagatttgattgtaattgcatcgccggaaagatcggaagggaatgatgagatcattggtagcatgccaattacagatgtagtttgtgacagctgcgacagcgacaccgagaccaaggtgaggatcgtaaaaattcacagaagaaaatttgtcccatcgtgtggttgcagcaattgacacaaggggccatgcaccgtgcaaaccttctggttgcgttctcacgaagatgcgaaattgtgacagattttggtaatgatattttgaggttcctgtggccgtataccaagcacatagatgaccaggccaggcggtgatctcagtaaaccgaataggtagcgggtcgatgcatggcctgcttccccctgatctcgggcactaggctcctggaaagcagttttgggtaggcagttcattggcttgggcccgggacttgtaaagtgtacaggcgattggacgttattacgtatgttatggtgtttacattagaagatctgtgactgtgaacacctgccacaatttgagataatatgcgcgtaaggtcttgcgttttcctttttgttctgccccagagctgccaaacatgcatccttgttcttctccagccttgatatgatggcatttcttttgaccttggagtagagttatcgtgtgaatgaaggaagctattacagtacagtgcaaattt

SEQ ID NO: 46224 - DNA, 2788 bp, Zea Mays
ccatattaagcggcaacctccgctccgcctccccccccccaaaaggcagcagcaaaacccccattaaatccctctcctccccgatcgcaggccgatcgacggcggcgatggggcagagaatcgatatcaattggactgaggtgtttggcaagtcatcctcccccgaccgcgaggccgacgtctgcttcgcctccccctcgtcggcgtcggcagcaccgcggacgcgggcgcgggcgttgggcgccgcgaaggtgttaccgggcgacgagcggcggcgggggtccccagacagacaccaacggaagaggctcgggaagctgcgcatcgacgatgactggtccgtcggcgggcagcgccacaccgccgtgcatggggatgacggggcgcgccgaccacggacccgcggggccgccaaggctgcagatggtcgggtacaggatgctcattccgtttctaaggatgtgtatgatttcagtccagaagatgagcaggcggaacgtgtgggcaacagattctgttcgaggttaactcccattcaggaaaataaatactgccagttacctttgaataatctcaaaaggcaagggtgtgcggaaaaaaggaaacctatatcggtggacaagatgtactcagagtctgaccgaccaagttccacatcttcatctgcgaagaggactcatgccattgatccagaggtgtcagatcatgaaaaatgtcacaagactgaaagttcccatcccagtagattctctaagaggaggaaggaacaacttcagaattcatcttctgtgtaccctcgaaaggttcaagatgtggttctattggatgacgaagatatgcagcctgaggaagaagtaaactgtgacatgtctgacggacagaatggaccaaagatctactacccatcgagagataatcgggaatctgttgagctcagcagatctgatattaaatgtcttgatcctggagtatatttgtcatcaccagtgataaacttctacatccagtacattaaaaggaacagactgtctagtgaagattttagagacaaattttacatatttaacacatatttttatggaaagcttgaagaagcattgtgtcggcagggcgcactggagcttggtaatcatttgcattcctgcaaaagagagtatttcaggaccaatcatacttcatctggactccctagcgatgcatcccagtactaagatcttgaacacagttgagagataccttgaaaaagaatggtgccaattatcatcatgggaggattttaaaaataatatacataagcaaagcgttgaggttccacgacagaataatgagtatgactgtggcatcttcatgctttattatattgaacggtttataaaagaggctccagaaagattcacaattgataaacttgatatgtttaatcggagttggttcaaacctgaagaagcatctggtctaaggcggagaataagagagcttctgctggaagaatttgaaagtgccaagctggatgatgctttaccaggagcggatgcatctgagcgtgatgacagcataaatgatggagaattgaaaccagatgcatcttctgacagttcagaaatggtcgtagaggtggtaggagggttgggaggcactgacaagagcaatgaaggcatcaaggttgtagcatcagaagaggcaagtggagagtcaggagatgctggtaagagtaccgaaggtactgttgcagcatcagaagaaaagagtattgaaggcatcaatgttgcagaaccagaagatgcttgtgagagtataggaggcatctatgttgcagaatcagatgaagcaagtggggagtttggagagattggtaagaccaacaaaggcaccaaagttgcagtgtcagaaggagcaagtgtgtctggatacactgataagaatatggaagacatctctgactctgaggttgcagtattagacaaagctcccactagcagctacagacgtggagagaagaccacagcctgtgttctatcagaagcagcttcactttccgatagcgtcaaagatgaacaaggtatggtgaaaccagattctggcagctcaaaagctgagagagaaggagatttgattgtaattgcatcgccggaaagatcggaagggaatgatgagatcattggtagcatgccaattacagatgtagtttgtgacagctgcgacagcgacaccgagaccaaggtgaggatcgtaaaaattcacagaagaaaatttgtcccatcgtgtggttgcagcaattgacacaaggggccatgcaccgtgcaaaccttctggttgcgttctcacgaagatgcgaaattgtgacagattttggtaatgatattttgaggttcctgtggccgtataccaagcacatagatgaccaggccaggcggtgatctcagtaaaccgaataggtagcgggtcgatgcatggcctgcttccccctgatctcgggcactaggctcctggaaagcagttttgggtaggcagttcattggcttgggcccgggacttgtaaagtgtacaggcgattggacgttattacgtatgttatggtgtttacattagaagatctgtgactgtgaacacctgccacaatttgagataatatgcgcgtaaggtcttgcgttttcctttttgttctgccccagagctgccaaacatgcatccttgttcttctccagccttgatatgatggcatttcttttgaccttggagtagagttatcgtgtgaatgaaggaagctattacagtacagtgcaaattt

SEQ ID NO: 46225 - DNA, 2874 bp, Zea Mays
ccatattaagcggcaacctccgctccgcctccccccccccaaaaggcagcagcaaaacccccattaaatccctctcctccccgatcgcaggccgatcgacggcggcgatggggcagagaatcgatatcaattggactgaggtgtttggcaagtcatcctcccccgaccgcgaggccgacgtctgcttcgcctccccctcgtcggcgtcggcagcaccgcggacgcgggcgcgggcgttgggcgccgcgaaggtgttaccgggcgacgagcggcggcgggggtccccagacagacaccaacggaagaggctcgggaagctgcgcatcgacgatgactggtccgtcggcgggcagcgccacaccgccgtgcatggggatgacggggcgcgccgaccacggacccgcggggccgccaaggctgcagatggtcgggtacaggatgctcattccgtttctaaggatgtgtatgatttcagtccagaagatgagcaggcggaacgtgtgggcaacagattctgttcgaggttaactcccattcaggaaaataaatactgccagttacctttgaataatctcaaaaggcaagggtgtgcggaaaaaaggaaacctatatcggtggacaagatgtactcagagtctgaccgaccaagttccacatcttcatctgcgaagaggactcatgccattgatccagaggtgtcagatcatgaaaaatgtcacaagactgaaagttcccatcccagtagattctctaagaggaggaaggaacaacttcagaattcatcttctgtgtaccctcgaaaggttcaagatgtggttctattggatgacgaagatatgcagcctgaggaagaagtaaactgtgacatgtctgacggacagaatggaccaaagatctactacccatcgagagataatcgggaatctgttgagctcagcagatctgatattaaatgtcttgatcctggagtatatttgtcatcaccagtgataaacttctacatccagtagtacattaaaaggaacagactgtctagtgaagattttagagacaaattttacatatttaacacatatttttatggaaagcttgaagaagcattgtgtcggcaggatgagttctcaaagttgagaagatggtggaaaggtgtcaatatattaaataaagcatacataatcttgccgatccatgggatggcgcactggagcttggtaatcatttgcattcctgcaaaagagagtatttcaggaccaatcatacttcatctggactccctagcgatgcatcccagtactaagatcttgaacacagttgagagataccttgaaaaagaatggtgccaattatcatcatgggaggattttaaaaataatatacataagcaaagcgttgaggttccacgacagaataatgagtatgactgtggcatcttcatgctttattatattgaacggtttataaaagaggctccagaaagattcacaattgataaacttgatatgtttaatcggagttggttcaaacctgaagaagcatctggtctaaggcggagaataagagagcttctgctggaagaatttgaaagtgccaagctggatgatgctttaccaggagcggatgcatctgagcgtgatgacagcataaatgatggagaattgaaaccagatgcatcttctgacagttcagaaatggtcgtagaggtggtaggagggttgggaggcactgacaagagcaatgaaggcatcaaggttgtagcatcagaagaggcaagtggagagtcaggagatgctggtaagagtaccgaaggtactgttgcagcatcagaagaaaagagtattgaaggcatcaatgttgcagaaccagaagatgcttgtgagagtataggaggcatctatgttgcagaatcagatgaagcaagtggggagtttggagagattggtaagaccaacaaaggcaccaaagttgcagtgtcagaaggagcaagtgtgtctggatacactgataagaatatggaagacatctctgactctgaggttgcagtattagacaaagctcccactagcagctacagacgtggagagaagaccacagcctgtgttctatcagaagcagcttcactttccgatagcgtcaaagatgaacaaggtatggtgaaaccagattctggcagctcaaaagctgagagagaaggagatttgattgtaattgcatcgccggaaagatcggaagggaatgatgagatcattggtagcatgccaattacagatgtagtttgtgacagctgcgacagcgacaccgagaccaaggtgaggatcgtaaaaattcacagaagaaaatttgtcccatcgtgtggttgcagcaattgacacaaggggccatgcaccgtgcaaaccttctggttgcgttctcacgaagatgcgaaattgtgacagattttggtaatgatattttgaggttcctgtggccgtataccaagcacatagatgaccaggccaggcggtgatctcagtaaaccgaataggtagcgggtcgatgcatggcctgcttccccctgatctcgggcactaggctcctggaaagcagttttgggtaggcagttcattggcttgggcccgggacttgtaaagtgtacaggcgattggacgttattacgtatgttatggtgtttacattagaagatctgtgactgtgaacacctgccacaatttgagataatatgcgcgtaaggtcttgcgttttcctttttgttctgccccagagctgccaaacatgcatccttgttcttctccagccttgatatgatggcatttcttttgaccttggagtagagttatcgtgtgaatgaaggaagctattacagtacagtgcaaattt

SEQ ID NO: 46226 - DNA, 2865 bp, Zea Mays
cccatattaagcggcaacctccgctccgcctccccccccccaaaaggcagcagcaaaacccccattaaatccctctcctccccgatcgcaggccgatcgacggcggcgatggggcagagaatcgatatcaattggactgaggtgtttggcaagtcatcctcccccgaccgcgaggccgacgtctgcttcgcctccccctcgtcggcgtcggcagcaccgcggacgcgggcgcgggcgttgggcgccgcgaaggtgttaccgggcgacgagcggcggcgggggtccccagacagacaccaacggaagaggctcgggaagctgcgcatcgacgatgactggtccgtcggcgggcagcgccacaccgccgtgcatggggatgacggggcgcgccgaccacggacccgcggggccgccaaggctgcagatggtcgggtacaggatgctcattccgtttctaaggatgtgtatgatttcagtccagaagatgagcaggcggaacgtgtgggcaacagattctgttcgaggttaactcccattcaggaaaataaatactgccagttacctttgaataatctcaaaaggcaagggtgtgcggaaaaaaggaaacctatatcggtggacaagatgtactcagagtctgaccgaccaagttccacatcttcatctgcgaagaggactcatgccattgatccagaggtgtcagatcatgaaaaatgtcacaagactgaaagttcccatcccagtagattctctaagaggaggaaggaacaacttcagaattcatcttctgtgtaccctcgaaagatgtggttctattggatgacgaagatatgcagcctgaggaagaagtaaactgtgacatgtctgacggacagaatggaccaaagatctactacccatcgagagataatcgggaatctgttgagctcagcagatctgatattaaatgtcttgatcctggagtatatttgtcatcaccagtgataaacttctacatccagtacattaaaaggaacagactgtctagtgaagattttagagacaaattttacatatttaacacatatttttatggaaagcttgaagaagcattgtgtcggcaggatgagttctcaaagttgagaagatggtggaaaggtgtcaatatattaaataaagcatacataatcttgccgatccatgggatggcgcactggagcttggtaatcatttgcattcctgcaaaagagagtatttcaggaccaatcatacttcatctggactccctagcgatgcatcccagtactaagatcttgaacacagttgagagataccttgaaaaagaatggtgccaattatcatcatgggaggattttaaaaataatatacataagcaaagcgttgaggttccacgacagaataatgagtatgactgtggcatcttcatgctttattatattgaacggtttataaaagaggctccagaaagattcacaattgataaacttgatatgtttaatcggagttggttcaaacctgaagaagcatctggtctaaggcggagaataagagagcttctgctggaagaatttgaaagtgccaagctggatgatgctttaccaggagcggatgcatctgagcgtgatgacagcataaatgatggagaattgaaaccagatgcatcttctgacagttcagaaatggtcgtagaggtggtaggagggttgggaggcactgacaagagcaatgaaggcatcaaggttgtagcatcagaagaggcaagtggagagtcaggagatgctggtaagagtaccgaaggtactgttgcagcatcagaagaaaagagtattgaaggcatcaatgttgcagaaccagaagatgcttgtgagagtataggaggcatctatgttgcagaatcagatgaagcaagtggggagtttggagagattggtaagaccaacaaaggcaccaaagttgcagtgtcagaaggagcaagtgtgtctggatacactgataagaatatggaagacatctctgactctgaggttgcagtattagacaaagctcccactagcagctacagacgtggagagaagaccacagcctgtgttctatcagaagcagcttcactttccgatagcgtcaaagatgaacaaggtatggtgaaaccagattctggcagctcaaaagctgagagagaaggagatttgattgtaattgcatcgccggaaagatcggaagggaatgatgagatcattggtagcatgccaattacagatgtagtttgtgacagctgcgacagcgacaccgagaccaaggtgaggatcgtaaaaattcacagaagaaaatttgtcccatcgtgtggttgcagcaattgacacaaggggccatgcaccgtgcaaaccttctggttgcgttctcacgaagatgcgaaattgtgacagattttggtaatgatattttgaggttcctgtggccgtataccaagcacatagatgaccaggccaggcggtgatctcagtaaaccgaataggtagcgggtcgatgcatggcctgcttccccctgatctcgggcactaggctcctggaaagcagttttgggtaggcagttcattggcttgggcccgggacttgtaaagtgtacaggcgattggacgttattacgtatgttatggtgtttacattagaagatctgtgactgtgaacacctgccacaatttgagataatatgcgcgtaaggtcttgcgttttcctttttgttctgccccagagctgccaaacatgcatccttgttcttctccagccttgatatgatggcatttcttttgaccttggagtagagttatcgtgtgaatgaaggaagctattacagtacagtgcaaattt

SEQ ID NO: 46227 - DNA, 2881 bp, Zea Mays
ccgcgcaaccttcccatattaagcggcaacctccgctccgcctccccccccccaaaaggcagcagcaaaacccccattaaatccctctcctccccgatcgcaggccgatcgacggcggcgatggggcagagaatcgatatcaattggactgaggtgtttggcaagtcatcctcccccgaccgcgaggccgacgtctgcttcgcctccccctcgtcggcgtcggcagcaccgcggacgcgggcgcgggcgttgggcgccgcgaaggtgttaccgggcgacgagcggcggcgggggtccccagacagacaccaacggaagaggctcgggaagctgcgcatcgacgatgactggtccgtcggcgggcagcgccacaccgccgtgcatggggatgacggggcgcgccgaccacggacccgcggggccgccaaggctgcagatggtcgggtacaggatgctcattccgtttctaaggatgtgtatgatttcagtccagaagatgagcaggcggaacgtgtgggcaacagattctgttcgaggttaactcccattcaggaaaataaatactgccagttacctttgaataatctcaaaaggcaagggtgtgcggaaaaaaggaaacctatatcggtggacaagatgtactcagagtctgaccgaccaagttccacatcttcatctgcgaagaggactcatgccattgatccagaggtgtcagatcatgaaaaatgtcacaagactgaaagttcccatcccagtagattctctaagaggaaggaacaacttcagaattcatcttctgtgtaccctcgaaaggttcaagatgtggttctattggatgacgaagatatgcagcctgaggaagaagtaaactgtgacatgtctgacggacagaatggaccaaagatctactacccatcgagagataatcgggaatctgttgagctcagcagatctgatattaaatgtcttgatcctggagtatatttgtcatcaccagtgataaacttctacatccagtacattaaaaggaacagactgtctagtgaagattttagagacaaattttacatatttaacacatatttttatggaaagcttgaagaagcattgtgtcggcaggatgagttctcaaagttgagaagatggtggaaaggtgtcaatatattaaataaagcatacataatcttgccgatccatgggatggcgcactggagcttggtaatcatttgcattcctgcaaaagagagtatttcaggaccaatcatacttcatctggactccctagcgatgcatcccagtactaagatcttgaacacagttgagagataccttgaaaaagaatggtgccaattatcatcatgggaggattttaaaaataatatacataagcaaagcgttgaggttccacgacagaataatgagtatgactgtggcatcttcatgctttattatattgaacggtttataaaagaggctccagaaagattcacaattgataaacttgatatgtttaatcggagttggttcaaacctgaagaagcatctggtctaaggcggagaataagagagcttctgctggaagaatttgaaagtgccaagctggatgatgctttaccaggagcggatgcatctgagcgtgatgacagcataaatgatggagaattgaaaccagatgcatcttctgacagttcagaaatggtcgtagaggtggtaggagggttgggaggcactgacaagagcaatgaaggcatcaaggttgtagcatcagaagaggcaagtggagagtcaggagatgctggtaagagtaccgaaggtactgttgcagcatcagaagaaaagagtattgaaggcatcaatgttgcagaaccagaagatgcttgtgagagtataggaggcatctatgttgcagaatcagatgaagcaagtggggagtttggagagattggtaagaccaacaaaggcaccaaagttgcagtgtcagaaggagcaagtgtgtctggatacactgataagaatatggaagacatctctgactctgaggttgcagtattagacaaagctcccactagcagctacagacgtggagagaagaccacagcctgtgttctatcagaagcagcttcactttccgatagcgtcaaagatgaacaaggtatggtgaaaccagattctggcagctcaaaagctgagagagaaggagatttgattgtaattgcatcgccggaaagatcggaagggaatgatgagatcattggtagcatgccaattacagatgtagtttgtgacagctgcgacagcgacaccgagaccaaggtgaggatcgtaaaaattcacagaagaaaatttgtcccatcgtgtggttgcagcaattgacacaaggggccatgcaccgtgcaaaccttctggttgcgttctcacgaagatgcgaaattgtgacagattttggtaatgatattttgaggttcctgtggccgtataccaagcacatagatgaccaggccaggcggtgatctcagtaaaccgaataggtagcgggtcgatgcatggcctgcttccccctgatctcgggcactaggctcctggaaagcagttttgggtaggcagttcattggcttgggcccgggacttgtaaagtgtacaggcgattggacgttattacgtatgttatggtgtttacattagaagatctgtgactgtgaacacctgccacaatttgagataatatgcgcgtaaggtcttgcgttttcctttttgttctgccccagagctgccaaacatgcatccttgttcttctccagccttgatatgatggcatttcttttgaccttggagtagagttatcgtgtgaatgaaggaagctattacagtacagtgcaaattt

SEQ ID NO: 46228 - DNA, 2786 bp, Zea Mays
tcttccttccggcgtactgatgatttcgccgcgcaaccttcccatattaagcggcaacctccgctccgcctccccccccccaaaaggcagcagcaaaacccccattaaatccctctcctccccgatcgcaggccgatcgacggcggcgatggggcagagaatcgatatcaattggactgaggtgtttggcaagtcatcctcccccgaccgcgaggccgacgtctgcttcgcctccccctcgtcggcgtcggcagcaccgcggacgcgggcgcgggcgttgggcgccgcgaaggtgttaccgggcgacgagcggcggcgggggtccccagacagacaccaacggaagaggctcgggaagctgcgcatcgacgatgactggtccgtcggcgggcagcgccacaccgccgtgcatggggatgacggggcgcgccgaccacggacccgcggggccgccaaggctgcagatggtcgggtacaggatgctcattccgtttctaaggatgtgtatgatttcagtccagaagatgagcaggcggaacgtgtgggcaacagattctgttcgaggttaactcccattcaggaaaataaatactgccagttacctttgaataatctcaaaaggcaagggtgtgcggaaaaaaggaaacctatatcggtggacaagatgtactcagagtctgaccgaccaagttccacatcttcatctgcgaagaggactcatgccattgatccagaggtgtcagatcatgaaaaatgtcacaagactgaaagttcccatcccagtagattctctaagaggaggaaggaacaacttcagaattcatcttctgtgtaccctcgaaaggttcaagatgtggttctattggatgacgaagatatgcagcctgaggaagaagtaaactgtgacatgtctgacggacagaatggaccaaagatctactacccatcgagagataatcgggaatctgttgagctcagcagatctgatattaaatgtcttgatcctggagtatatttgtcatcaccagtgataaacttctacatccagtacattaaaaggaacagactgtctagtgaagattttagagacaaattttacatatttaacacatatttttatggaaagcttgaagaagcattgtgtcggcaggatgagttctcaaagttgagaagatggtggaaaggtgtcaatatattaaataaagcatacataatcttgccgatccatgggatggcgcactggagcttggtaatcatttgcattcctgcaaaagagagtatttcaggaccaatcatacttcatctggactccctagcgatgcatcccagtactaagatcttgaacacagttgagagataccttgaaaaagaatggtgccaattatcatcatgggaggattttaaaaataatatacataagcaaagcgttgaggttccacgacagaataatgagtatgactgtggcatcttcatgctttattatattgaacggtttataaaagaggctccagaaagattcacaattgataaacttgatatgtttaatcggagttggttcaaacctgaagaagcatctggtctaaggcggagaataagagagcttctgctggaagaatttgaaagtgccaagctggatgatgctttaccaggagcggatgcatctgagcgtgatgacagcataaatgatggagaattgaaaccagatgcatcttctgacagttcagaaatggtcgtagaggtggtaggagggttgggaggcactgacaagagcaatgaaggcatcaaggttgtagcatcagaagaggcaagtggagagtcaggagatgctggtaagagtaccgaaggtactgttgcagcatcagaagaaaagagtattgaaggcatcaatgttgcagaaccagaagatgcttgtgagagtataggaggcatctatgttgcagaatcagatgaagcaagtggggagtttggagagattggtaagaccaacaaaggcaccaaagttgcagtgtcagaaggagcaagtgtgtctggatacactgataagaatatggaagacatctctgactctgaggttgcagtattagacaaagctcccactagcagctacagacgtggagagaagaccacagcctgtgttctatcagaagcagcttcactttccgatagcgtcaaagatgaacaaggtatggtgaaaccagattctggcagctcaaaagctgagagagaaggagatttgattgtaattgcatcgccggaaagatcggaagggaatgatgagatcattggtagcatgccaattacagatgtagtttgtgacagctgcgacagcgacaccgagaccaagattttggtaatgatattttgaggttcctgtggccgtataccaagcacatagatgaccaggccaggcggtgatctcagtaaaccgaataggtagcgggtcgatgcatggcctgcttccccctgatctcgggcactaggctcctggaaagcagttttgggtaggcagttcattggcttgggcccgggacttgtaaagtgtacaggcgattggacgttattacgtatgttatggtgtttacattagaagatctgtgactgtgaacacctgccacaatttgagataatatgcgcgtaaggtcttgcgttttcctttttgttctgccccagagctgccaaacatgcatccttgttcttctccagccttgatatgatggcatttcttttgaccttggagtagagttatcgtgtgaatgaaggaagctattacagtacagtgcaaattt

SEQ ID NO: 46229 - DNA, 2950 bp, Zea Mays
ctggcccatcaggcccaccactagaggacccgtgacccgtccccctcggacgccgcaaaacccgtctgtcttccttccggcgtactgatgatttcgccgcgcaaccttcccatattaagcggcaacctccgctccgcctccccccccccaaaaggcagcagcaaaacccccattaaatccctctcctccccgatcgcaggccgatcgacggcggcgatggggcagagaatcgatatcaattggactgaggtgtttggcaagtcatcctcccccgaccgcgaggccgacgtctgcttcgcctccccctcgtcggcgtcggcagcaccgcggacgcgggcgcgggcgttgggcgccgcgaaggtgttaccgggcgacgagcggcggcgggggtccccagacagacaccaacggaagaggctcgggaagctgcgcatcgacgatgactggtccgtcggcgggcagcgccacaccgccgtgcatggggatgacggggcgcgccgaccacggacccgcggggccgccaaggctgcagatggtcgggtacaggatgctcattccgtttctaaggatgtgtatgatttcagtccagaagatgagcaggcggaacgtgtgggcaacagattctgttcgaggttaactcccattcaggaaaataaatactgccagttacctttgaataatctcaaaaggcaagggtgtgcggaaaaaaggaaacctatatcggtggacaagatgtactcagagtctgaccgaccaagttccacatcttcatctgcgaagaggactcatgccattgatccagaggtgtcagatcatgaaaaatgtcacaagactgaaagttcccatcccagtagattctctaagaggaggaaggaacaacttcagaattcatcttctgtgtaccctcgaaaggttcaagatgtggttctattggatgacgaagatatgcagcctgaggaagaagtaaactgtgacatgtctgacggacagaatggaccaaagatctactacccatcgagatctgatattaaatgtcttgatcctggagtatatttgtcatcaccagtgataaacttctacatccagtacattaaaaggaacagactgtctagtgaagattttagagacaaattttacatatttaacacatatttttatggaaagcttgaagaagcattgtgtcggcaggatgagttctcaaagttgagaagatggtggaaaggtgtcaatatattaaataaagcatacataatcttgccgatccatgggatggcgcactggagcttggtaatcatttgcattcctgcaaaagagagtatttcaggaccaatcatacttcatctggactccctagcgatgcatcccagtactaagatcttgaacacagttgagagataccttgaaaaagaatggtgccaattatcatcatgggaggattttaaaaataatatacataagcaaagcgttgaggttccacgacagaataatgagtatgactgtggcatcttcatgctttattatattgaacggtttataaaagaggctccagaaagattcacaattgataaacttgatatgtttaatcggagttggttcaaacctgaagaagcatctggtctaaggcggagaataagagagcttctgctggaagaatttgaaagtgccaagctggatgatgctttaccaggagcggatgcatctgagcgtgatgacagcataaatgatggagaattgaaaccagatgcatcttctgacagttcagaaatggtcgtagaggtggtaggagggttgggaggcactgacaagagcaatgaaggcatcaaggttgtagcatcagaagaggcaagtggagagtcaggagatgctggtaagagtaccgaaggtactgttgcagcatcagaagaaaagagtattgaaggcatcaatgttgcagaaccagaagatgcttgtgagagtataggaggcatctatgttgcagaatcagatgaagcaagtggggagtttggagagattggtaagaccaacaaaggcaccaaagttgcagtgtcagaaggagcaagtgtgtctggatacactgataagaatatggaagacatctctgactctgaggttgcagtattagacaaagctcccactagcagctacagacgtggagagaagaccacagcctgtgttctatcagaagcagcttcactttccgatagcgtcaaagatgaacaaggtatggtgaaaccagattctggcagctcaaaagctgagagagaaggagatttgattgtaattgcatcgccggaaagatcggaagggaatgatgagatcattggtagcatgccaattacagatgtagtttgtgacagctgcgacagcgacaccgagaccaaggtgaggatcgtaaaaattcacagaagaaaatttgtcccatcgtgtggttgcagcaattgacacaaggggccatgcaccgtgcaaaccttctggttgcgttctcacgaagatgcgaaattgtgacagattttggtaatgatattttgaggttcctgtggccgtataccaagcacatagatgaccaggccaggcggtgatctcagtaaaccgaataggtagcgggtcgatgcatggcctgcttccccctgatctcgggcactaggctcctggaaagcagttttgggtaggcagttcattggcttgggcccgggacttgtaaagtgtacaggcgattggacgttattacgtatgttatggtgtttacattagaagatctgtgactgtgaacacctgccacaatttgagataatatgcgcgtaaggtcttgcgttttcctttttgttctgccccagagctgccaaacatgcatccttgttcttctccagccttgatatgatggcatttcttttgaccttggagtagagttatcgtgtgaatgaaggaagctattacagtacagtgcaaattt

SEQ ID NO: 46230 - DNA, 1857 bp, Zea Mays
aaccaaacgaacaaaaaaaaatccaaaaaaaacgagtctttaatcctcgccatcgaccgcaaagcccccctctgccccctccttttcccctccctcccacacgcaccgccgcgtccgcccccttcgctgcccctgcccggtcggttccgatggggtacgtgctgtcggcggtggcgagggtgctggagcagcccacggcgtggggggcggccccggagatggcgctcctcgcggggccgctctgggcggcggtcctcctcggcctcctgctcggctgggcctggcgcccgcgctgggcagctggcctcgtcgccgcccccgcccccgccgccgctgcgcagccgcccttcgccacgctcggtttctggaaggcccagctccccgcccgtctccgcgccccgctcggctccgccgccgccgtgcggcacggggaggaggaggaggaggacgaggtctccgtgcgaggtggcaggtcgtcggaggcggggagcgaggagctggcggtggggaagcgtgacctggccaacctctggaggctggtggagggcagggacggcggcccggcctggatcaagatgatggacaggtcgcttcccaccatgacctaccaggcgtggcggagggacgcgcagaccggaccaccacagtatcagagtagcagcatctttgaggacgccactccggaggaagtgagggacttcttcggggacgacgagttccgtgtgtccaacaagtgggacgacatgcttgtttaccataagacgctggaggagtgccagaccaccgggacgatgaaagtgcattgggtccggaagtgacagagagtacataattgctcgccggatatggaaactggggggcgcctattattgtgtcacaaagggtataccatgctcgtccattccacggcgcaacaaacctcgaagagttgatctgtattattcaagctggtgcatccgtgcagtggaatccaggagagggaacggagggtcgacagcttgtgaggtgctcttgttccaccacgaggacatgggcatcccgtacgagatcgcaaagctcggtatccggcaagggatgtggggatgcgtgaagagaatcgagcctgggctccgggcctatcagcaagccagggctgcaggggagccggtgtcacggagtgccctgatggcccagatcaacaccaaagtcggcgacagctttgtccggtcgctggagtccgacagcgacgggtccgaaaccgtggaagcggaagagaagcctgcgaggaaccgtgtggcgaggttccttgtgcttggaggggcagttgctctggcctgtactcttgaccaagggctcctgacgaaggctctcatcttcggcgtcgcgcggaaattcgtcgggcagaggaaggcactgtagcatctctggcatttatttctcagcgtcgtccgcttggcccgtggtccgcactaaccggacctgtcctttcactgtcgtagagtggaggatagaggtggttcagtgtctgcctaattggggcaaatgccattgaccattgtggctgaaagagaacagagctgatgaaaaacattttggtgtacagatatgctgccggctgttggatagcgaggaatggggaatagagcaaacaatgtacttctcgtttggagaacggaactcctacgatatatataaatgtgtttcatctaatcttgtatctcagacaagaacagatcagatgactgtgcagatgagaacaagcatttttctatgtagcttactgcggctacggcttctacaatattttgtttctatggattgcaggattgcagccgcagccacttgcagccgcagcagtggctgtcagccaactgaaca

SEQ ID NO: 46231 - DNA, 1398 bp, Zea Mays
ccaaaaacagtcatgtacttagttatatcatgcaaagaacccacacatattacacatcaaaatgagcagtcacgaaaacaatccctacatgtttatctacatgtttatcaatggatataccaattcatgataaactctggcagcaacagcaatctaccaagcaaattgtgtggttaaaatggatcaacattcaacaagacaattaatcgccaaaaaaccaatatacaactcaatttaatacatgttcatggaaatgtccattgatcgttgatttacaaacacaaaagaataggaatttgatatacaagatataaggaaataaaataaaataccagcctcttctctagtgtctatagcctgatttatgctacttcatacataacaagcatatttgctaactctgccctcatctttgctccaaacatgctgcatcaaagaagataaaattagcaacaacatcagagtcagggaatgaatggtagacacatagacacagtcctatggaaaaacatgaaaaaatcacactggaacatgattttttaatatctagattctagaaactactagtgtgcatagatattatcatgaaagtcaacatcatgaaaaaactaatgatattgagtattatctaccagtctagataattataatgtgaaactttcagaaaatcaaatgtgcatgcaaaaaagctttagtaatgattatggacccctttttttccttataagaaactcttaaaggtgtaccatcgagaacctaattatgatgcaatttactattcagtgttactctcttttgcctcttcttatacctagtctgcaacactgtaggatttatgatttgtagataccacaatagcgtctttatgcattaaaacaaatgcttgcaacaaaactttaaagctgagatgtgcaccccctccgagactgggccttcgggttaccgattagttcaggtcgggtagtttggattttattaaattcgggtaatagaaagtgttactagatcacagattttttaaaaaaagctacccgcaatttcaggttcgcgtatacccaatttacccgagatattaaaagcacaagtacctcagtatctgaatgcacattgtaacaagaacaaaatgcatatatagaaagcaacatctcactgaacaaaacgcagattaatgaattactactaacagaacatcttaagatcataatctagtatagagaacaaaccttatgcagaggagcgagaattcaagaaccaatacagccgacaggtactacctactactacactaatgtactgagtactcgacgacgacaaaagatacaaaagtgcaaggctgtaaggcattaagcctgctgcggtgctgctgctgcctgccagtgacagccgccaagtgccatt

SEQ ID NO: 46232 - DNA, 1077 bp, Zea Mays
cagtatctggtgcgacctacaaatcaatggagtttgttggatcaactatggaagagcgtatgacactatgcaacatggttattgaagctggtggaaagaacggtgttgtgcctgctgatgaaactacatttaaataccttgagggtaagacatcagtcgattatgaacctgtctacagtgatgctcaagccagattttttagcgactaccggtttgatgtatcaaaactggagccagtagttgccaagccacattcgcctgacaaccgtgctccagcaagagaatgcaaagatgtgaagatcgaccgagtctatattggttcttgcactggtggtaagaccgaggatttccttgctgctgcaaaggtgttcttagcctcgggaaagaaggttaaagttcccacatttcttgtccctgccacgcaaaaggtgtggttggacgtatatagcctccctgtaccaggatctggtggcaaaacttgctcccaggtatttgaggaggctggttgtgacacaccagcaagtcctaattgtggtgcttgtttgggtggccctcgtgatacatatgcacggatgaatgaacctactgtctgtgtgtccaccacgaacaggaactttccgggcaggatggggcacaaggaagggaaaatctacctggcgtctccctacaccgcggctgcctcagccctgacggggtacgttacggaccctagggacttcctcatgtaaccgtcttgaaacaacaacagatttcatgatgtaacagagcggttgtactgctgtttttcgtgatgaacttttgtctaggcatgtccttcgttgagaaataaactgcactagaataagcagcgacctctcgggcgccatagcagatgtgacctcatatttatttgtgcaactttttttgtttttggctctgaagtcatgcaaggaaaccacatcatatccaccatagctgtacaaagcttgaacttttgtcaacataaaaaataaaagagtgatttatgtatgcgtcagaatcaaacaataatttgatgtcaaaagctcaagatagacatggttctgtaataagaacaca

SEQ ID NO: 46233 - DNA, 826 bp, Zea Mays
atgcccccaaccctagccgccactaccctgctccctctcccaagccgccgccactccttctccctccccctttctctctcttctctctctaccgccccaggccccccgatctcctcctcccactccgatcgcccgaccgatcgccgagcttccctgttccctccccgcccccgcgacgccatggagccgccgcacgccgagcaggccgtcgccgtcgcacgctgagcaggccgtcgccgctgtagcagcaggaggagaggatctatggccggacgaggcggactgtggctactacctccgcacgacgctgcgacgggcgctcctcagatcggcagagacctctttcgaactagccgggagattcggaatcccgcgcgcgagttgggcctggccagcagataatcgaattgctttgccgtggaaacaggagaaggctgcaattgagtatattcattctttatcaagggcacagcctgctcgttctctcaatggtgctggcctttgtcctgctagtagatcacttagcacccaggccgccactacgtcaagcacaccacagttgaaagcacaccccacgtcaagcagccaggccgccactacgttaagcaaaacagaagacgagaagaactgatgtagccatgttcatgcttccactgttgaaatgcatattcagcatagcttacttagttcctatctgctgtttcaacgttgatttaaaagaagagctggtagttgtgagctatctgtaaatgatctagttgtgaatgatattataattgtgatgcttttgtgaatatataattgtggtgcttttgtgtttatgtga

SEQ ID NO: 46234 - DNA, 2184 bp, Zea Mays
taccggacgggtatgcccgttgccatccccacacgccgctcacacgccgcctccctcgttctcgcgccgacgctcgccgcaccgcctccctctccctcgttgtcgcgccgcctccctgtccctcgttctcgagccgccacaccgcctccccagccggccaggtaacacacggcggctcttccctgctgggcttcggagctgccagtctgccacgccgccgccccagcagagaggcgagcacccccgccggcgcctcggagctttgaattggctgggcgcgcgaccggcctctgccgccgggccgcgagcagcagcaacccccctcgccggccatgacctccgctcactccaagctctactccgatgacgtcagcctcgtcgtggtcgtcgtcgacacgaaccccttcttctgggccgccgcggcgctccccttcgccgacttcttcgcgcacctgatccacttcgtgaactccctcctgctgctgaaccacctcaaccgtgtggtcgtcatcgcggcgggagtcagctcgtgtgcctacatcctggattccagcgatgccagcccctccggtggtgtggccgtctcggacaccttcgacaaggcaagccgcaaggcggaggagttcattgcacaagatgcgcgcgccactgcaggcaacggttccgttgcttctgccaatgccgcgtcgctgctctctggggcgctgtccatctctttgtgctatatacagaggattttccggtctgggtctcggcatccacaacctcggattttgtgcctgcagggatctccagacggacctgaacaatatgtggcagtgatgaattcaatattttctgctcaacgttccatggtaccaattgactcttgtattgtgggaacccaggattctgctttcttgcagcaggcttcgtacataacaggaggagtttatttgaagccacaagaactaaatggcctgtttcaataccttgccgctgtatttgcaactgatttacactctagagcttttctgcgccttccaaaaactcttggagtggacttccgtgcttcgtgtttctgccataagaagactattgacatgggatatgtctgttcaatttgtttgtcaatattctgcaagaatcagaagaagtgttcaacctgcgggtcagaattcagtcgtgccatgcctgatttgaactccgtgccggatcaaagcaagtagtgtccagtgcgaagttaacccatcaacagacaacgcttttctctatgcgtctcacagcggagtcatcttgccaggtcgcctgccactgcctgtcatagaacgtggtctcgtcgacgagcttcttcagcgactcgacgtcctcgtttttcctgaccagcagcacgccggcgacggcggcgaacagcagcgtcttgcagaagaagttgcccatctggtcgacgaggcccgcgcccgtcaagctgtccacgaaataggccatgaagaagccgaccatggcggcgcgacctgcattattagacgaggagaagagccgccggttctgaatgcaagcaagatcactgggcaaagaaacgccatatgcacccgcatcatatttcaactgttttttcataccatttagcttctcggcttcgggaaggtggaagcgtttcatccaagcccaccatggaataatggaagtggcgaagacgacagcctcgtctgtgttagtcgcctccggatagtcttcgagccatctccttctcctggcctctggaatcagaaaaataaagatgactggcatcagcggtccgtcccactcgttgcagcaaaacaacaaatgtctgaccgagtttacacaaagcatgtcctgagccccctcaccggcgtcgatgacggcgtcccagtcgacgccgctgcccttgtcgaacttggcgaggtcccaggtgccgttgacccacctggcgtcccggaaggccgggaccggcgctggcgcgggcggcggcggcggggcctcggacttgacggcggccccgttggaggccgcggcaagggccggctccgcctcgtcccgctgctccacgggcggcgcctccccggaggcggtggcgcaggcgaggcggcgcgggaaggggaggagtccgacgggctttccgcccgcccgcaggggcctgaggctggcgggacgcggggagaaggtggaggtcgccatggccat

SEQ ID NO: 46235 - DNA, 2107 bp, Zea Mays
taccggacgggtatgcccgttgccatccccacacgccgctcacacgccgcctccctcgttctcgcgccgacgctcgccgcaccgcctccctctccctcgttgtcgcgccgcctccctgtccctcgttctcgagccgccacaccgcctccccagccggccaggtaacacacggcggctcttccctgctgggcttcggagctgccagtctgccacgccgccgccccagcagagaggcgagcacccccgccggcgcctcggagctttgaattggctgggcgcgcgaccggcctctgccgccgggccgcgagcagcagcaacccccctcgccggccatgacctccgctcactccaagctctactccgatgacgtcagcctcgtcgtggtcgtcgtcgacacgaaccccttcttctgggccgccgcggcgctccccttcgccgacttcttcgcgcacctgatccacttcgtgaactccctcctgctgctgaaccacctcaaccgtgtggtcgtcatcgcggcgggagtcagctcgtgtgcctacatcctggattccagcgatgccagcccctccggtggtgtggccgtctcggacaccttcgacaaggcaagccgcaaggcggaggagttcattgcacaagatgcgcgcgccactgcaggcaacggttccgttgcttctgccaatgccgcgtcgctgctctctggggcgctgtccatctctttgtgctatatacagaggattttccggtctgggtctcggcatccacaacctcggattttgtgcctgcagggatctccagacggacctgaacaatatgtggcagtgatgaattcaatattttctgctcaacgttccatggtaccaattgactcttgtattgtgggaacccaggattctgctttcttgcagcaggcttcgtacataacaggaggagtttatttgaagccacaagaactaaatggcctgtttcaataccttgccgtgtttctgccataagaagactattgacatgggatatgtctgttcaatttgtttgtcaatattctgcaagaatcagaagaagtgttcaacctgcgggtcagaattcagtcgtgccatgcctgatttgaactccgtgccggatcaaagcaagtagtgtccagtgcgaagttaacccatcaacagacaacgcttttctctatgcgtctcacagcggagtcatcttgccaggtcgcctgccactgcctgtcatagaacgtggtctcgtcgacgagcttcttcagcgactcgacgtcctcgtttttcctgaccagcagcacgccggcgacggcggcgaacagcagcgtcttgcagaagaagttgcccatctggtcgacgaggcccgcgcccgtcaagctgtccacgaaataggccatgaagaagccgaccatggcggcgcgacctgcattattagacgaggagaagagccgccggttctgaatgcaagcaagatcactgggcaaagaaacgccatatgcacccgcatcatatttcaactgttttttcataccatttagcttctcggcttcgggaaggtggaagcgtttcatccaagcccaccatggaataatggaagtggcgaagacgacagcctcgtctgtgttagtcgcctccggatagtcttcgagccatctccttctcctggcctctggaatcagaaaaataaagatgactggcatcagcggtccgtcccactcgttgcagcaaaacaacaaatgtctgaccgagtttacacaaagcatgtcctgagccccctcaccggcgtcgatgacggcgtcccagtcgacgccgctgcccttgtcgaacttggcgaggtcccaggtgccgttgacccacctggcgtcccggaaggccgggaccggcgctggcgcgggcggcggcggcggggcctcggacttgacggcggccccgttggaggccgcggcaagggccggctccgcctcgtcccgctgctccacgggcggcgcctccccggaggcggtggcgcaggcgaggcggcgcgggaaggggaggagtccgacgggctttccgcccgcccgcaggggcctgaggctggcgggacgcggggagaaggtggaggtcgccatggccat

SEQ ID NO: 46236 - DNA, 1397 bp, Zea Mays
taccggacgggtatgcccgttgccatccccacacgccgctcacacgccgcctccctcgttctcgcgccgacgctcgccgcaccgcctccctctccctcgttgtcgcgccgcctccctgtccctcgttctcgagccgccacaccgcctccccagccggccaggtaacacacggcggctcttccctgctgggcttcggagctgccagtctgccacgccgccgccccagcagagaggcgagcacccccgccggcgcctcggagctttgaattggctgggcgcgcgaccggcctctgccgccgggccgcgagcagcagcaacccccctcgccggccatgacctccgctcactccaagctctactccgatgacgtcagcctcgtcgtggtcgtcgtcgacacgaaccccttcttctgggccgccgcggcgctccccttcgccgacttcttcgcgcacctgatccacttcgtgaactccctcctgctgctgaaccacctcaaccgtgtggtcgtcatcgcggcgggagtcagctcgtgtgcctacatcctggattccagcgatgccagcccctccggtggtgtggccgtctcggacaccttcgacaaggcaagccgcaaggcggaggagttcattgcacaagatgcgcgcgccactgcaggcaacggttccgttgcttctgccaatgccgcgtcgctgctctctggggcgctgtccatctctttgtgctaggattttccggtctgggtctcggcatccacaacctcggattttgtgcctgcagggatctccagacggacctgaacaatatgtggcagtgatgaattcaatattttctgctcaacgttccatggtaccaattgactcttgtattgtgggaacccaggattctgctttcttgcagcaggcttcgtacataacaggaggagtttatttgaagccacaagaactaaatggcctgtttcaataccttgccgctgtatttgcaactgatttacactctagagcttttctgcgccttccaaaaactcttggagtggacttccgtgcttcgtgtttctgccataagaagactattgacatgggatatgtctgttcaatttgtttgtcaatattctgcaagaatcagaagaagtgttcaacctgcgggtcagaattcagtcgtgccatgcctgatttgaactccgtgccggatcaaagcaagtagtgtccagtgcgaagttaacccatcaacagacaacgcttttctctatgcgtctcacaggttcctttcggactagcaccttcacgtgtgcagtgtgtacgagacgtttctttggtcgatatgtgaatcaatttccatgtctgaatattatcggtttttttttaaaaaaaactgaaactgcagaattattttccatacaa

SEQ ID NO: 46237 - DNA, 1019 bp, Zea Mays
taccggacgggtatgcccgttgccatccccacacgccgctcacacgccgcctccctcgttctcgcgccgacgctcgccgcaccgcctccctctccctcgttgtcgcgccgcctccctgtccctcgttctcgagccgccacaccgcctccccagccggccaggtaacacacggcggctcttccctgctgggcttcggagctgccagtctgccacgccgccgccccagcagagaggcgagcacccccgccggcgcctcggagctttgaattggctgggcgcgcgaccggcctctgccgccgggccgcgagcagcagcaacccccctcgccggccatgacctccgctcactccaagctctactccgatgacgtcagcctcgtcgtggtcgtcgtcgacacgaaccccttcttctgggccgccgcggcgctccccttcgccgacttcttcgcgcacctgatccacttcgtgaactccctcctgctgctgaaccacctcaaccgtgtggtcgtcatcgcggcgggagtcagctcgtgtgcctacatcctggattccagcgatgccagcccctccggtggtgtggccgtctcggacaccttcgacaaggcaagccgcaaggcggaggagttcattgcacaagatgcgcgcgccactgcaggcaacggttccgttgcttctgccaatgccgcgtcgctgctctctggggcgctgtccatctctttgtgctatatacagaggattttccggtctgggtctcggcatccacaacctcggattttgtgcctgcagggatctccagacggacctgaacaatatgtggcagtgatgaattcaatattttctgctcaacgttccatggtaccaattgactcttgtattgtgggaacccaggattctgctttcttgcagcaggcttcgtacataacaggaggagtttatttgaagccacaagaactaaatggcctgtttcaataccttgccgcgtccacatgtgcgtcatgttctgcctctcgacgcccgcct

SEQ ID NO: 46238 - DNA, 1073 bp, Zea Mays
ggcaacttttataggacaatgattaaacctgttatgttgtatggtgcaaaatgttggcctacaaaaagacgacatgttcaatagataagtgttgcgaaaatgtgtgtgtagcttgttgcattggatttgtggctatacaagaaaggattgagtatggaacaatgatatacgtggtaggttaggggtagcaccaattgaagaaaagcttgtctaagaccggttgaaatggtttggacatgtctaatggagacctccagaggcatcaatccatagtgggatcctaagatgcaacagtagtagaaagagaggcagggcatttggtcgtacccctttgactaacataagccctaagaaaaccttggagggtgctttagctggcctagctggctgtgtgctgaccactgtgctgctgtcaactgccttacgctggccaagatcactgttgagtgccacagcttatggaatcctgatctttctgggttcattgtttggggatcttgtcgagtctctgatcaagcgtgacgctggtgtcaaggactctggatcactcattcctggtcacggtgggattctcgaccgagttgacagctacgtgttcacaggggcactctgttactcttttgtcagagtagctctaccctcgtatggggtctgaataaagcacctggatgtttgctggtttgtctctcctgccatcagcaatgcggtaaccgtattttaacataatgttgagtattgcttagaatgccctagacagacaatgtgatcctcctatccaagcaaattgggcgtccgagtttctgactgttgaagatagaaccgaagatcaacgtcgacagtgttacggacttggggcttgagatggcctttccagctcaaccagtctgttgcagacttgtagctttgggtgtacatagtttatcttttttttcatagggtagaaaggaaagcgtaattatccgtcgcaaaagctgttaactgtgtattgaggcagcttatgtcaatatgtactatacctgttggtatcgattgttttaatgatccaatgcatttgattggtaactaagttccct

SEQ ID NO: 46239 - DNA, 1619 bp, Zea Mays
ggtttagtcccttttagcacatatgtgaaggactaaagactaaatcattttagtccatattttagtcctagtgtttgacaaaaaagagactaaataagactaaaaactagagactaatctttagtccctctaaccaaacaccccttgagaaacagggtcgaaaatctctgctcatttcacatcgaacgctccgcctacaatcctgtactgcacgcgctccccatccgcacaacttcccgcctcccatggcggcgccggcgccgggggccacccgcctccaccccccgttcctcctgcttccttccccgccgcgaccccatcctccactccggctccgcttcctcctgccgtccccgccgcctctccgcctccgccgccgcttcccgctgctcgctgccgccgccgtctccgccggcggcggcggtggaggggaggaagccgccggcaggaaggccgataaggccaggcagctgcagaagcgggtcctcgtgggcgtcgccatcggggtgggcgcaggcggcatcgtggtcgccggcggctgggtgttcgcagccgccgtcgcagctgctgtccttgccggctcccgggagtacttcgagctcgtccgcagcactgccagcggaggcgggaccccgccgccgcgatacgtgtcccgcgcgtgctccgccatctgcgctctcatgcccatccttacgctctccggtcaggattagctgcccctgccttaaatacaagtatagcataccgttggccaattcttctcggtggacaagctcactggacagttggacttgtagcaaccttgatggctattagtagcatcattgctgctgatacatctgctttcctttgtggaagggcatttggtcgtacccctttgactaacataagccctaagaaaaccttggagggtgctttagctggcctagctggctgtgtgctgaccactgtgctgctgtcaactgccttacgctggccaagatcactgttgagtgccacagcttatggaatcctgatctttctgggttcattgtttggggatcttgtcgagtctctgatcaagcgtgacgctggtgtcaaggactctggatcactcattcctggtcacggtgggattctcgaccgagttgacagctacgtgttcacaggggcactctgttactcttttgtcagagtagctctaccctcgtatggggtctgaataaagcacctggatgtttgctggtttgtctctcctgccatcagcaatgcggtaaccgtattttaacataatgttgagtattgcttagaatgccctagacagacaatgtgatcctcctatccaagcaaattgggcgtccgagtttctgactgttgaagatagaaccgaagatcaacgtcgacagtgttacggacttggggcttgagatggcctttccagctcaaccagtctgttgcagacttgtagctttgggtgtacatagtttatcttttttttcatagggtagaaaggaaagcgtaattatccgtcgcaaaagctgttaactgtgtattgaggcagcttatgtcaatatgtactatacctgttggtatcgattgttttaatgatccaatgcatttgattggtaactaagttccct

SEQ ID NO: 46240 - DNA, 1639 bp, Zea Mays
ggtttagtcccttttagcacatatgtgaaggactaaagactaaatcattttagtccatattttagtcctagtgtttgacaaaaaagagactaaataagactaaaaactagagactaatctttagtccctctaaccaaacaccccttgagaaacagggtcgaaaatctctgctcatttcacatcgaacgctccgcctacaatcctgtactgcacgcgctccccatccgcacaacttcccgcctcccatggcggcgccggcgccgggggccacccgcctccaccccccgttcctcctgcttccttccccgccgcgaccccatcctccactccggctccgcttcctcctgccgtccccgccgcctctccgcctccgccgccgcttcccgctgctcgctgccgccgccgtctccgccggcggcggcggtggaggggaggaagccgccggcaggaaggccgataaggccaggcagctgcagaagcgggtcctcgtgggcgtcgccatcggggtgggcgcaggcggcatcgtggtcgccggcggctgggtgttcgcagccgccgtcgcagctgctgtccttgccggctcccgggagtacttcgagctcgtccgcagcactgccagcggaggcgggaccccgccgccgcgatacgtgtcccgcgcgtgctccgccatctgcgctctcatgcccatccttacgctgtactatggacgcatggatgttactgtggcattttctgcattcgttattgccatagcattgcttttacaaagaggaaatcctcgttttgctcagctaactagttcagtttttgggttgttttactgtggctatctaccttctttctgggttaagctccggtcaggattagctgcccctgccttaaatacaagtatagcataccgttggccaattcttctcggtggacaagctcactggacagttggacttgtagcaaccttgatggctattagtagcatcattgctgctgatacatctgctttcctttgtggaaggtgccacagcttatggaatcctgatctttctgggttcattgtttggggatcttgtcgagtctctgatcaagcgtgacgctggtgtcaaggactctggatcactcattcctggtcacggtgggattctcgaccgagttgacagctacgtgttcacaggggcactctgttactcttttgtcagagtagctctaccctcgtatggggtctgaataaagcacctggatgtttgctggtttgtctctcctgccatcagcaatgcggtaaccgtattttaacataatgttgagtattgcttagaatgccctagacagacaatgtgatcctcctatccaagcaaattgggcgtccgagtttctgactgttgaagatagaaccgaagatcaacgtcgacagtgttacggacttggggcttgagatggcctttccagctcaaccagtctgttgcagacttgtagctttgggtgtacatagtttatcttttttttcatagggtagaaaggaaagcgtaattatccgtcgcaaaagctgttaactgtgtattgaggcagcttatgtcaatatgtactatacctgttggtatcgattgttttaatgatccaatgcatttgattggtaactaagttccct

SEQ ID NO: 46241 - DNA, 1685 bp, Zea Mays
ggtttagtcccttttagcacatatgtgaaggactaaagactaaatcattttagtccatattttagtcctagtgtttgacaaaaaagagactaaataagactaaaaactagagactaatctttagtccctctaaccaaacaccccttgagaaacagggtcgaaaatctctgctcatttcacatcgaacgctccgcctacaatcctgtactgcacgcgctccccatccgcacaacttcccgcctcccatggcggcgccggcgccgggggccacccgcctccaccccccgttcctcctgcttccttccccgccgcgaccccatcctccactccggctccgcttcctcctgccgtccccgccgcctctccgcctccgccgccgcttcccgctgctcgctgccgccgccgtctccgccggcggcggcggtggaggggaggaagccgccggcaggaaggccgataaggccaggcagctgcagaagcgggtcctcgtgggcgtcgccatcggggtgggcgcaggcggcatcgtggtcgccggcggctgggtgttcgcagccgccgtcgcagctgctgtccttgccggctcccgggagtacttcgagctcgtccgcagcactgccagcggaggcgggaccccgccgccgcgatacgtgtcccgcgcgtgctccgccatctgcgctctcatgcccatccttacgctgtactatggacgcatggatgttactgtggcattttctgcattcgttattgccatagcattgcttttacaaagaggaaatcctcgttttgctcagctaactagttcagtttttgggttgttttactgtggctatctaccttctttctgggttaagctccggtcaggattagctgcccctgccttaaatacaagtatagcataccgttggccaattcttctcggtggacaagctcactggacagttggacttgtagcaaccttgatggctattagtagcatcattgctgctgatacatctgctttcctttgtggaagggcatttggtcgtacccctttgactaacataagccctaagaaaaccttggagggtgctttagctggcctagctggctgtgtgctgaccactgtgctgctgtcaactgccttacgctggccaagatcactgttgaggactctggatcactcattcctggtcacggtgggattctcgaccgagttgacagctacgtgttcacaggggcactctgttactcttttgtcagagtagctctaccctcgtatggggtctgaataaagcacctggatgtttgctggtttgtctctcctgccatcagcaatgcggtaaccgtattttaacataatgttgagtattgcttagaatgccctagacagacaatgtgatcctcctatccaagcaaattgggcgtccgagtttctgactgttgaagatagaaccgaagatcaacgtcgacagtgttacggacttggggcttgagatggcctttccagctcaaccagtctgttgcagacttgtagctttgggtgtacatagtttatcttttttttcatagggtagaaaggaaagcgtaattatccgtcgcaaaagctgttaactgtgtattgaggcagcttatgtcaatatgtactatacctgttggtatcgattgttttaatgatccaatgcatttgattggtaactaagttccct

SEQ ID NO: 46242 - DNA, 1172 bp, Zea Mays
ctcacccgacccgacccggtctcccccaaaccctcgggcagcttctcccgtgcccctcgcgtgcgctctacgactgggcggccgccggcaccctacaccagttgcccaggtctctgtcttcgggaccttccccggcgacgagcatccaccaggtcattgctgagaaggccgagaagagcgacaccctggaaattcacagcaaagtcagttcgtgcccgtttcaagaataattcgattgcatttctaattgtttgggctgatgacgaggacaaacgatgcaagtggtggtgggaagcttccccggaagcgcttctatcgcgccagggcacacagcaacccgctcagcgactcgcacttcccagtcccaatatcgcctgaagaggtcgatctctcacagcactacccgcggtacttccctgctgacaagggcagcgacggtgaggaggctgcagcgccacaacagatccgcttcgccgatgtggggtgcggatttggcgggttgcttgtagggctctcgcctctcttcccagatacgctcatgattggcatggagctcagggacaaggtaacggagtatgtgaaggagaggattttagctctaagaggggcaaacccaggacagtatgataacatatccgttgtccgcacgaactcgatgaaatacattccaaattacttcagaaaggctcagctcaccaagatgttcttcctgttccccgatccccacttcaaggagaagaaccacaggaggagggttatcagcatgcagctgttagacgaatatgcttacgtgatggaagtgggaggaatcatatataccatcactgatgtcgaggagctcggagagtggatgcggtcgtgtctagagaaacacccgttattcgaaaccgttcctgaggaagagattaaggctgaccctgttttcaaactactgtctactgccaccgaagaaagccagaaggtggcaagaaatggaggacagactttctatgccatcttcaggcggatctccttacaagaagaataagtcgcttagagattataagctagatcgtgttacgtgtgtttgtcagttttatacattttttttttaaaaaaatttagcagtaggtgtacttggtactaaatattgcaatgttgctttgcaaggttctgcagacccaaaaaaaaaa

SEQ ID NO: 46243 - DNA, 1106 bp, Zea Mays
aacgtcctaaacgcgcgttttagacgttttagggttctacggacgttctatgtgttagtgggccttaatgggcctttccaggcttcaagcaagcctcccgccagacacgttccagattccaggcttcaagcctcccgctagccagccgccagcctgctaccgccgtcggtcgtcctcagccgcccgccaggctgatgacgaggacaaacgatgcaagtggtggtgggaagcttccccggaagcgcttctatcgcgccagggcacacagcaacccgctcagcgactcgcacttcccagtcccaatatcgcctgaagaggtcgatctctcacagcactacccgcggtacttccctgctgacaagggcagcgacggtgaggaggctgcagcgccacaacagatccgcttcgccgatgtggggtgcggatttggcgggttgcttgtagggctctcgcctctcttcccagatacgctcatgattggcatggagctcagggacaaggtaacggagtatgtgaaggagaggattttagctctaagaggggcaaacccaggacagtatgataacatatccgttgtccgcacgaactcgatgaaatacattccaaattacttcagaaaggctcagctcaccaagatgttcttcctgttccccgatccccacttcaaggagaagaaccacaggaggagggttatcagcatgcagctgttagacgaatatgcttacgtgatggaagtgggaggaatcatatataccatcactgatgtcgaggagctcggagagtggatgcggtcgtgtctagagaaacacccgttattcgaaaccgttcctgaggaagagattaaggctgaccctgttttcaaactactgtctactgccaccgaagaaagccagaaggtggcaagaaatggaggacagactttctatgccatcttcaggcggatctccttacaagaagaataagtcgcttagagattataagctagatcgtgttacgtgtgtttgtcagttttatacattttttttttaaaaaaatttagcagtaggtgtacttggtactaaatattgcaatgttgctttgcaaggttctgcagacccagttaataa

SEQ ID NO: 46244 - DNA, 1174 bp, Zea Mays
caacaatccaatgcgcgtctagccggcccattcccgccccacccttgtggcctgcctcacccgacccgacccggtctcccccaaaccctcgggcagcttctcccgtgcccctcgcgtgcgctctacgactgggcggccgccggcaccctacaccagttgcccaggtctctgtcttcgggaccttccccggcgacgagcatccaccaggtcattgctgagaaggccgagaagagcgacaccctggaaattcacagcaaagctgatgacgaggacaaacgatgcaagtggtggtgggaagcttccccggaagcgcttctatcgcgccagggcacacagcaacccgctcagcgactcgcacttcccagtcccaatatcgcctgaagaggtcgatctctcacagcactacccgcggtacttccctgctgacaagggcagcgacggtgaggaggctgcagcgccacaacagatccgcttcgccgatgtggggtgcggatttggcgggttgcttgtagggctctcgcctctcttcccagatacgctcatgattggcatggagctcagggacaaggtaacggagtatgtgaaggagaggattttagctctaagaggggcaaacccaggacagtatgataacatatccgttgtccgcacgaactcgatgaaatacattccaaattacttcagaaaggctcagctcaccaagatgttcttcctgttccccgatccccacttcaaggagaagaaccacaggaggagggttatcagcatgcagctgttagacgaatatgcttacgtgatggaagtgggaggaatcatatataccatcactgatgtcgaggagctcggagagtggatgcggtcgtgtctagagaaacacccgttattcgaaaccgttcctgaggaagagattaaggctgaccctgttttcaaactactgtctactgccaccgaagaaagccagaaggtggcaagaaatggaggacagactttctatgccatcttcaggcggatctccttacaagaagaataagtcgcttagagattataagctagatcgtgttacgtgtgtttgtcagttttatacattttttttttaaaaaaatttagcagtaggtgtacttggtactaaatattgcaatgttgctttgcaaggttctgcagacccagttaataa

SEQ ID NO: 46245 - DNA, 1312 bp, Zea Mays
cgattaagcgtcgtttaagcgctagaacgcgatttgaatccaaaacgtccgaacgttttaaaaaatagtgttgaacgtctgttttggatgtttaagcatcgtgtaaacgtcctaaacgcgcgttttagacgttttagggttctacggacgttctatgtgttagtgggccttaatgggcctttccaggcttcaagcaagcctcccgccagacacgttccagattccaggcttcaagcctcccgctagccagccgccagcctgctaccgccgtcggtcgtcctcagccgcccgccaggctgatgacgaggacaaacgatgcaagtggtggtgggaagcttccccggaagcgcttctatcgcgccagggcacacagcaacccgctcagcgactcgcacttcccagtcccaatatcgcctgaagaggtcgatctctcacagcactacccgcggtacttccctgctgacaagggcagcgacggtgaggaggctgcagcgccacaacagatccgcttcgccgatgtggggtgcggatttggcgggttgcttgtagggctctcgcctctcttcccagatacgctcatgattggcatggagctcagggacaaggtaacggagtatgtgaaggagaggattttagctctaagaggggcaaacccaggacagtatgataacatatccgttgtccgcacgaactcgatgaaatacattccaaattacttcagaaaggctcagctcaccaagatgttcttcctgttccccgatccccacttcaaggagaagaaccacaggaggagggttatcagcatgcagctgttagacgaatatgcttacgtgatggaagtgggaggaatcatatataccatcactgatgtcgaggagctcggagagtggatgcggtcgtgtctagagaaacacccgttattcgaaaccgttcctgaggaagagattaaggctgaccctgttttcaaactactgtctactgccaccgaagaaagccagaaggtggcaagaaatggaggacagactttctatgccatcttcaggcggatctccttacaagaagaataagtcgcttagagattataagctagatcgtgttacgtgtgtttgtcagttttatacattttttttttaaaaaaatttagcagtaggtgtacttggtactaaatattgcaatgttgctttgcaaggttctgcagacccagttattttgttcagctttaaaagagtttaccaagacgattgtgttgagtttaccaaaataatattccattgtatagagccatgttcctaatggcatagatgccaggatc

SEQ ID NO: 46246 - DNA, 1116 bp, Zea Mays
ctaaaactgaagctgccatagcatgggcggatctacagggtatgtcaggtcattgctgagaaggccgagaagagcgacaccctggaaattcacagcaaagctgatgacgaggacaaacgatgcaagtggtggtgggaagcttccccggaagcgcttctatcgcgccagggcacacagcaacccgctcagcgactcgcacttcccagtcccaatatcgcctgaagaggtcgatctctcacagcactacccgcggtacttccctgctgacaagggcagcgacggtgaggaggctgcagcgccacaacagatccgcttcgccgatgtggggtgcggatttggcgggttgcttgtagggctctcgcctctcttcccagatacgctcatgattggcatggagctcagggacaaggtaacggagtatgtgaaggagaggattttagctctaagaggggcaaacccaggacagtatgataacatatccgttgtccgcacgaactcgatgaaatacattccaaattacttcagaaaggctcagctcaccaagatgttcttcctgttccccgatccccacttcaaggagaagaaccacaggaggagggttatcagcatgcagctgttagacgaatatgcttacgtgatggaagtgggaggaatcatatataccatcactgatgtcgaggagctcggagagtggatgcggtcgtgtctagagaaacacccgttattcgaaaccgttcctgaggaagagattaaggctgaccctgttttcaaactactgtctactgccaccgaagaaagccagaaggtggcaagaaatggaggacagactttctatgccatcttcaggcggatctccttacaagaagaataagtcgcttagagattataagctagatcgtgttacgtgtgtttgtcagttttatacattttttttttaaaaaaatttagcagtaggtgtacttggtactaaatattgcaatgttgctttgcaaggttctgcagacccagttattttgttcagctttaaaagagtttaccaagacgattgtgttgagtttaccaaaataatattccattgtatagagccatgttcctaatggcatagatgccaggatc

SEQ ID NO: 46247 - DNA, 2856 bp, Zea Mays
cacatacaacttcccacaggagaccagtggcgcggcgtctcccatcccccgcccccaaatttgttgcggcgggagagccggagaggaggcagctccacagaaacagagagcgcataaccggcggcgttggcggcgatgaggatcgaggaggtgcagtcgacctcgaagaagcagcgcatcgccacccacacccacatcaagggactcggcctcgacgccaatgggatggcgattgcgttggcggcggggttcgtgggccaggcggcggcgcgcgaggcggccgggctggcggtcgacatgattcgccagaagaagatggccggccgcgcggtgctccttgcgggtccgcccgccacgggcaagacggcgctagcgctcggcatagcccaggagctcggcagcaaggtccctttctgtcctatggtaggatcagaagtgtactcctcggaggtcaagaaaactgaggtgctgatggaaaatttccgtagagctataggtttgcgtataaaggaaaacaaagaggtttatgaaggagaggttactgaactttccccagaagaggctgagagtacaactggtggatatgcaaaaagcattagccatgtaatcatcagcttaaagactgttaaagggactaagcaactgaagttagattcttcaatttatgatgctctgatcaaggaaaaggtggcagtgggtgatgttatatacatcgaagcaaatagtggagcagtgaaaagagttggtagatgtgattcttttgctacagaatacgatcttgaagctgaagagtatgttcctatccccaaaggtgaagtccataagaaaaaagaaattgtgcaggatgtcacacttcatgaccttgatgcagcaaatgctcagccacaaggtggccaagatattttgtcccttatgggccagatgatgaaaccacgaaagactgaaatcaccgaaaaactacgccaagaaattaataagctggtttttaattttatatgatgacaggtggtaaatagatatatcgatgaaggaattgcagagcttgtacctggtgttttgttcattgatgaggtccacatgttggatatcgaatgtttttcttatcttaaccgtgcattggagagcccattatcaccaatcgtgatacttgctacaaataggggaatatgtaatgtaagaggaactgatatgacaagtccacatggtataccggtggatcttctagataggctggtgattattcggacagagacatatggccctactgagatgatacagatattggctatccgagcacaagtggaggagattgatatggatgaagaaagtcttgcttatttaggcgagatcggacagcagacatctttgagacatgctattcaattgatatcacctgccagcgtggtctcaaagactaatggaagagagaaaatctgcaaggctgatctcgaggaagtcagtgggctctatttggatgccaaatcctcggctcggctgctccaggagcaacaagaaagatacatcacctagatttggatctcctgtcgtggaagtctcgaagagaatgtagttgccagctcgaaagtcatctagtgcattgatctgcttcacaggttcatagtctactggtcttggagcgagcacatttcggggggaacggcttgaattttgcagtgcctgcttgtgttagtctccagagaagacttggttccggcatattgctcgttcacgcactgttcgctgattagattggtcaccggtgcaggaattgccgtgtgtgtttttatcttgctcatcggtgtccggagtctgcctccacgggttgtattggcccgaaccctatctttgtaaccatggataatggataggattcttacagaatgcaacttgcatggctttattatttctaaatgtccataaagcataacgaaatgtttctacaacatataagacctcctgcccaaattaaaattcgttttagattagataattagtaggtacatacaatacttgatatatatgttttatgtgtcttgatttattatcatccgtttgaatatatagatataaaaagagctaaaacgactactcctttagttcaaaaatgaactagcggacgttcattttttctttagggtcaaaaatggaaaaaaaaaacttagtaatgatagaaaattaactaataaccaacctattgcttcgtattgtcgagatcctaactaagaaatagtcactattgcttcgtattgtcgagatcttaactaagaaatagtcactatgtgaataaatacatctatcagaaatgagtagatctatcatatagttgtagcatccacattagacaaaatgaactaaagaagaatttagaatttaagtatctttcagtatctaagtataaatactaagaaaaaaaaacagaaagaaggattgatttgtggcaatagatgtctttcacatacaactagaaaaaagtaatttcctttttgaatggcagttccaaaaaaacgtacttagatgtcaaaaaagcgtattcgtaaaaatctttgaaaaagacttatttttccatagtacaatcttattctttagcaaaatcaagatcattttctaggggcaacgagcatccaaaaccaaaaggtttttttctgcgcaacaagcaaacaaataataagattttaaaataatctgaattgaactatccaaaagaaatttcaattatttaatatgaatgaataattcggattaattaataaatgtacttttatgtgtcgaattcctcggtacaatattcttagaacgaatccctccattatcattatattgaacaaaagtttttgattgacatattcgagagcggag

SEQ ID NO: 46248 - DNA, 2787 bp, Zea Mays
cggcagcacatacaacttcccacaggagaccagtggcgcggcgtctcccatcccccgcccccaaatttgttgcggcgggagagccggagaggaggcagctccacagaaacagagagcgcataaccggcggcgttggcggcgatgaggatcgaggaggtgcagtcgacctcgaagaagcagcgcatcgccacccacacccacatcaagggactcggcctcgacgccaatgggatggcgattgcgttggcggcggggttcgtgggccagaagaagatggccggccgcgcggtgctccttgcgggtccgcccgccacgggcaagacggcgctagcgctcggcatagcccaggagctcggcagcaaggtccctttctgtcctatggtaggatcagaagtgtactcctcggaggtcaagaaaactgaggtgctgatggaaaatttccgtagagctataggtttgcgtataaaggaaaacaaagaggtttatgaaggagaggttactgaactttccccagaagaggctgagagtacaactggtggatatgcaaaaagcattagccatgtaatcatcagcttaaagactgttaaagggactaagcaactgaagttagattcttcaatttatgatgctctgatcaaggaaaaggtggcagtgggtgatgttatatacatcgaagcaaatagtggagcagtgaaaagagttggtagatgtgattcttttgctacagaatacgatcttgaagctgaagagtatgttcctatccccaaaggtgaagtccataagaaaaaagaaattgtgcaggatgtcacacttcatgaccttgatgcagcaaatgctcagccacaaggtggccaagatattttgtcccttatgggccagatgatgaaaccacgaaagactgaaatcaccgaaaaactacgccaagaaattaataaggtggtaaatagatatatcgatgaaggaattgcagagcttgtacctggtgttttgttcattgatgaggtccacatgttggatatcgaatgtttttcttatcttaaccgtgcattggagagcccattatcaccaatcgtgatacttgctacaaataggggaatatgtaatgtaagaggaactgatatgacaagtccacatggtataccggtggatcttctagataggctggtgattattcggacagagacatatggccctactgagatgatacagatattggctatccgagcacaagtggaggagattgatatggatgaagaaagtcttgcttatttaggcgagatcggacagcagacatctttgagacatgctattcaattgatatcacctgccagcgtggtctcaaagactaatggaagagagaaaatctgcaaggctgatctcgaggaagtcagtgggctctatttggatgccaaatcctcggctcggctgctccaggagcaacaagaaagatacatcacctagatttggatctcctgtcgtggaagtctcgaagagaatgtagttgccagctcgaaagtcatctagtgcattgatctgcttcacaggttcatagtctactggtcttggagcgagcacatttcggggggaacggcttgaattttgcagtgcctgcttgtgttagtctccagagaagacttggttccggcatattgctcgttcacgcactgttcgctgattagattggtcaccggtgcaggaattgccgtgtgtgtttttatcttgctcatcggtgtccggagtctgcctccacgggttgtattggcccgaaccctatctttgtaaccatggataatggataggattcttacagaatgcaacttgcatggctttattatttctaaatgtccataaagcataacgaaatgtttctacaacatataagacctcctgcccaaattaaaattcgttttagattagataattagtaggtacatacaatacttgatatatatgttttatgtgtcttgatttattatcatccgtttgaatatatagatataaaaagagctaaaacgactactcctttagttcaaaaatgaactagcggacgttcattttttctttagggtcaaaaatggaaaaaaaaaacttagtaatgatagaaaattaactaataaccaacctattgcttcgtattgtcgagatcctaactaagaaatagtcactattgcttcgtattgtcgagatcttaactaagaaatagtcactatgtgaataaatacatctatcagaaatgagtagatctatcatatagttgtagcatccacattagacaaaatgaactaaagaagaatttagaatttaagtatctttcagtatctaagtataaatactaagaaaaaaaaacagaaagaaggattgatttgtggcaatagatgtctttcacatacaactagaaaaaagtaatttcctttttgaatggcagttccaaaaaaacgtacttagatgtcaaaaaagcgtattcgtaaaaatctttgaaaaagacttatttttccatagtacaatcttattctttagcaaaatcaagatcattttctaggggcaacgagcatccaaaaccaaaaggtttttttctgcgcaacaagcaaacaaataataagattttaaaataatctgaattgaactatccaaaagaaatttcaattatttaatatgaatgaataattcggattaattaataaatgtacttttatgtgtcgaattcctcggtacaatattcttagaacgaatccctccattatcattatattgaacaaaagtttttgattgacatattcgagagcggag

SEQ ID NO: 46249 - DNA, 853 bp, Zea Mays
gcacatacaacttcccacaggagaccagtggcgcggcgtctcccatcccccgcccccaaatttgttgcggcgggagagccggagaggaggcagctccacagaaacagagagcgcataaccggcggcgttggcggcgatgaggatcgaggaggtgcagtcgacctcgaagaagcagcgcatcgccacccacacccacatcaagggactcggcctcgacgccaatgggatggcgattgcgttggcggcggggttcgtgggccaggcggcggcgcgcgaggcggccgggctggcggtcgacatgattcgccagaagaagatggccggccgcgcggtgctccttgcgggtccgcccgccacgggcaagacggcgctagcgctcggcatagcccaggagctcggcagcaaggtccctttctgtcctatggtaggatcagaagtgtactcctcggaggtcaagaaaactgaggtgctgatggaaaatttccgtagagctataggtttgcgtataaaggaaaacaaagaggtttatgaaggagaggttactgaactttccccagaagaggctgagagtacaactggtggatatgcaaaaagcattagccatgtaatcatcagcttaaagactgttaaagggactaagcaactgaagttagattcttcaatttatgatgctctgatcaaggaaaaggtggcagtgggtgatgttatatacatcgaagcaaatagtggagcagtgaaaagagttggtagatgtgattcttttgctacagaatacgatcttgaagctgaagagtatgttcctatccccaaagcgatcttttttcacacagtggctctttgttagtgaatgttg

SEQ ID NO: 46250 - DNA, 2313 bp, Zea Mays
atggacggcggcctcgacgacgagtgggaagctagcttcctcgacgagagagagctggaccgtgtctccaaggaaaggaatgaattgaaaaatgaatgcaccgcgctgaaaaaggacagaacaaagaaagatcttcaaatcaaagctaaagaagcggagattcaaaatctgaaaaaagctaatgtcagctccatgaaagatgtttgcagtgcagggatgaacattgatcagtcctttcacgcccctgcaaatgaggctttgcatactggggtttcttctaggcgaacagacaagatgagtggcaaagataaggatgcccattcattgcgagacgatctctatctaaagcaagggcatcaaactgatttacttgaggctttagaactgaggcgtcgcaccatgattgataacggaatgagtacatctggagtagtgtctctggaggaggacacccattttgaaccaagaaacgctacatgcaaggaaattaaggcgataggagtccagacagataacacatctgacaatgaacatcttgactgcaagaaattattggttgagcgtatatctggtaacctacgtgcaatgtggggcatgtcacctaacagtttatcaagcaggaatttgatatcaaagatcaatgtttcttgttcagaagaaattttgtcacttctccagcatacgagattgtcagacaactgtgaaccctcttctcaagcaatctcctccatgaatgaagctatttcccaactgtatgacacgttcattaagatgaatagtgggaagatgtcaatacaaactttccttgaagcattgctaaatctatgtgcttttgatgatgctgctatagtcagtagaactttgagggtattcctcaaagttttacagcacttactgcaacatggagccaagtctagtgaaagtgtaccctcaggaacaatgtttctgttgaaccatatgttaacgtactcatggagaacaaccacaaagactgttcgaccttgttgagaccagtggatgcagaagattcattgagactgcataatatgtttcttccttttactttctggagttcacttttcactggcatgcttcaaattggggtcaagtactcacaagagacaattcgtactgatgcattatccataatgattctcattgtaaggacaacagatcccatagaggaacgccagaaattcggatttacttcagtaatgacgagattgcatctgctattgcagaaagagaacggattgcttgttaagaagcattctgtgcgtctacttttcttgcttctgaattgcccagtgatgttgaagttgctgtgtagtggaggcaaagacggctccaaacagatgggatcggaagcttgtgaaagtaatagatcacaagaagtcataagctcagttcttgtggatttatctgattgtttgacatgtggggaaacttgttctctggggattgagctttgcaggctcgtcatcattctgctagcttatatagcttccagtggcaaattgggatatgaggtgcttttagttccagtgagtgcccgtggtgccagttttttggagatgataatggaagtccttgcatcgcagatgcaatatgaaacacgagagttactaaaagaaagatgtttggtgatgagagaagctcttatcctgctaaaccggctggcatcacacgcaaactattcgaaaccaaccttggaagtgctgacgagaagcaagttatgcgcgacctggacgatcgatgttgcgaaccggctgccccatacgtggatggcaaatgatctcgcggagctggcccagaaattcaggtcgcgagtgtatgctttcatagaggagaaacccttgacaagcgacggtaccaatctgggcgcttctaataagagatgagatacccaggactggcgcagcctgaggtagcttgggtagtaatatggaaagcatattgctagcggctcgacaagtttagtttcttttttttcccttactgacactagggttttgtttaggagttagactggcttggctggggcgagtcgctagcttttgctggcggtgtacagaggcgaatgcttcctcgccatttttgagggggagggagaatgtagttgtactacggcaagtccttgggaacgtacatcataattgttgtttggacatcatctcatggctttggcattgaccatcgcagcttttttgaattgaaagttttagtttttttcttaccaggatgatctgactgtaagcaattgaggatattggatgggtttgttggttgtgaagtatgggtggatgcctgttt

SEQ ID NO: 46251 - DNA, 2717 bp, Zea Mays
atggacggcggcctcgacgacgagtgggaagctagcttcctcgacgaggtgatacgcgcgacggatgaggctgaggctgtcgtctcccgcaaccctaaccccactcccacccccgcgcccgctcccatccccacgtattatcccttggccgccgcccccgtctcctacctcccagcctcttcggtctcctacatccctgccgcttcgcacctccgctccgcgatcagcttctcccctccacgggacctctcccagaggccgccgctcccgccgccgaccgctgccaccagcaccagggatgcgctggcgacgggggccgacgtcggtcgcgacttctctcctccgccccagctctcccagcgcccggcggctgatgagggcagcctcgtggccttcgcggcgtcgagctcagccagcgaccgccgcttcattagcacgggctgtggagaagcgggcgcgaagagggaagcgagggagatcgagaggctcaaaagagagctggaccgtgtctccaaggaaaggaatgaattgaaaaatgaatgcaccgcgctgaaaaaggacagaacaaagaaagatcttcaaatcaaagctaaagaagcggagattcaaaatctgaaaaaagctaatgtggatgaacattgatcagtcctttcacgcccctgcaaatgaggctttgcatactggggtttcttctaggcgaacagacaagatgagtggcaaagataaggatgcccattcattgcgagacgatctctatctaaagcaagggcatcaaactgatttacttgaggctttagaactgaggcgtcgcaccatgattgataacggaatgagtacatctggagtagtgtctctggaggaggacacccattttgaaccaagaaacgctacatgcaaggaaattaaggcgataggagtccagacagataacacatctgacaatgaacatcttgactgcaagaaattattggttgagcgtatatctggtaacctacgtgcaatgtggggcatgtcacctaacagtttatcaagcaggaatttgatatcaaagatcaatgtttcttgttcagaagaaattttgtcacttctccagcatacgagattgtcagacaactgtgaaccctcttctcaagcaatctcctccatgaatgaagctatttcccaactgtatgacacgttcattaagatgaatagtgggaagatgtcaatacaaactttccttgaagcattgctaaatctatgtgcttttgatgatgctgctatagtcagtagaactttgagggtattcctcaaagttttacagcacttactgcaacatggagccaagtctagtgaaaggaacaatgtttctgttgaaccatatgttaacgtactcatggagaacaaccacaaagactgttcgaccttgttgagaccagtggatgcagaagattcattgagactgcataatatgtttcttccttttactttctggagttcacttttcactggcatgcttcaaattggggtcaagtactcacaagagacaattcgtactgatgcattatccataatgattctcattgtaaggacaacagatcccatagaggaacgccagaaattcggatttacttcagtaatgacgagattgcatctgctattgcagaaagagaacggattgcttgttaagaagcattctgtgcgtctacttttcttgcttctgaattgcccagtgatgttgaagttgctgtgtagtggaggcaaagacggctccaaacagatgggatcggaagcttgtgaaagtaatagatcacaagaagtcataagctcagttcttgtggatttatctgattgtttgacatgtggggaaacttgttctctggggattgagctttgcaggctcgtcatcattctgctagcttatatagcttccagtggcaaattgggatatgaggtgcttttagttccagtgagtgcccgtggtgccagttttttggagatgataatggaagtccttgcatcgcagatgcaatatgaaacacgagagttactaaaagaaagatgtttggtgatgagagaagctcttatcctgctaaaccggctggcatcacacgcaaactattcgaaaccaaccttggaagtgctgacgagaagcaagttatgcgcgacctggacgatcgatgttgcgaaccggctgccccatacgtggatggcaaatgatctcgcggagctggcccagaaattcaggtcgcgagtgtatgctttcatagaggagaaacccttgacaagcgacggtaccaatctgggcgcttctaataagagatgagatacccaggactggcgcagcctgaggtagcttgggtagtaatatggaaagcatattgctagcggctcgacaagtttagtttcttttttttcccttactgacactagggttttgtttaggagttagactggcttggctggggcgagtcgctagcttttgctggcggtgtacagaggcgaatgcttcctcgccatttttgagggggagggagaatgtagttgtactacggcaagtccttgggaacgtacatcataattgttgtttggacatcatctcatggctttggcattgaccatcgcagcttttttgaattgaaagttttagtttttttcttaccaggatgatctgactgtaagcaattgaggatattggatgggtttgttggttgtgaagtatgggtggatgcctgttt

SEQ ID NO: 46252 - DNA, 2712 bp, Zea Mays
ggggatggacggcggcctcgacgacgagtgggaagctagcttcctcgacgaggtgatacgcgcgacggatgaggctgaggctgtcgtctcccgcaaccctaaccccactcccacccccgcgcccgctcccatccccacgtattatcccttggccgccgcccccgtctcctacctcccagcctcttcggtctcctacatccctgccgcttcgcacctccgctccgcgatcagcttctcccctccacgggacctctcccagaggccgccgctcccgccgccgaccgctgccaccagcaccagggatgcgctggcgacgggggccgacgtcggtcgcgacttctctcctccgccccagctctcccagcgcccggcggctgatgagggcagcctcgtggccttcgcggcgtcgagctcagccagcgaccgccgcttcattagcacgggctgtggagaagcgggcgcgaagagggaagcgagggagatcgagaggctcaaaagagagctggaccgtgtctccaaggaaaggaatgaattgaaaaatgaatgcaccgcgctgaaaaaggacagaacaaagaaagatcttcaaatcaaagctaaagaagcggagattcaaaatctgaaaaaagctaatgtctccatgaaagatgtttgcagtgcagggatgaacattgatcagtcctttcacgcccctgcaaatgaggctttgcatactggggtttcttctaggcgaacagacaagatgagtggcaaagataaggatgcccattcattgcgagacgatctctatctaaagcaagggcatcaaactgatttacttgaggctttagaactgaggcgtcgcaccatgattgataacggaatgagtacatctggagtagtgtctctggaggaggacacccattttgaaccaagaaacgctacatgcaaggaaattaaggcgataggagtccagacagataacacatctgacaatgaacatcttgactgcaagaaattattggttgagcgtatatctggtaacctacgtgcaatgtggggcatgtcacctaacagtttatcaagcaggaatttgatatcaaagatcaatgtttcttgttcagaagaaattttgtcacttctccagcatacgagattgtcagacaactgtgaaccctcttctcaagcaatctcctccatgaatgaagctatttcccaactgtatgacacgttcattaagatgaatagtgggaagatgtcaatacaaactttccttgaagcattgctaaatctatgtgcttttgatgatgctgctatagtcagtagaactttgagggtattcctcaaagttttacagcacttactgcaacatggagccaagtctagtgaaagtgtaccctcaggaacaatgtttctgttgaaccatatgttaacgtactcatggagaacaaccacaaagactgttcgaccttgttgagaccagtggatgcagaagattcattgagactgcataatatgtttcttccttttactttctggagttcacttttcactggcatgcttcaaattggggtcaagtactcacaagagacaattcgtactgatgcattatccataatgattctcattgtaaggacaacagatcccatagaggaacgccagaaaaagagaacggattgcttgttaagaagcattctgtgcgtctacttttcttgcttctgaattgcccagtgatgttgaagttgctgtgtagtggaggcaaagacggctccaaacagatgggatcggaagcttgtgaaagtaatagatcacaagaagtcataagctcagttcttgtggatttatctgattgtttgacatgtggggaaacttgttctctggggattgagctttgcaggctcgtcatcattctgctagcttatatagcttccagtggcaaattgggatatgaggtgcttttagttccagtgagtgcccgtggtgccagttttttggagatgataatggaagtccttgcatcgcagatgcaatatgaaacacgagagttactaaaagaaagatgtttggtgatgagagaagctcttatcctgctaaaccggctggcatcacacgcaaactattcgaaaccaaccttggaagtgctgacgagaagcaagttatgcgcgacctggacgatcgatgttgcgaaccggctgccccatacgtggatggcaaatgatctcgcggagctggcccagaaattcaggtcgcgagtgtatgctttcatagaggagaaacccttgacaagcgacggtaccaatctgggcgcttctaataagagatgagatacccaggactggcgcagcctgaggtagcttgggtagtaatatggaaagcatattgctagcggctcgacaagtttagtttcttttttttcccttactgacactagggttttgtttaggagttagactggcttggctggggcgagtcgctagcttttgctggcggtgtacagaggcgaatgcttcctcgccatttttgagggggagggagaatgtagttgtactacggcaagtccttgggaacgtacatcataattgttgtttggacatcatctcatggctttggcattgaccatcgcagcttttttgaattgaaagttttagtttttttcttaccaggatgatctgactgtaagcaattgaggatattggatgggtttgttggttgtgaagtatgggtggatgcctgttt

SEQ ID NO: 46253 - DNA, 2594 bp, Zea Mays
agaagagtagggaggcgcagcgcggggatggacggcggcctcgacgacgagtgggaagctagcttcctcgacgaggtgatacgcgcgacggatgaggctgaggctgtcgtctcccgcaaccctaaccccactcccacccccgcgcccgctcccatccccacgtattatcccttggccgccgcccccgtctcctacctcccagcctcttcggtctcctacatccctgccgcttcgcacctccgctccgcgatcagcttctcccctccacgggacctctcccagaggccgccgctcccgccgccgaccgctgccaccagcaccagggatgcgctggcgacgggggccgacgtcggtcgcgacttctctcctccgccccagctctcccagcgcccggcggctgatgagggcagcctcgtggccttcgcggcgtcgagctcagccagcgaccgccgcttcattagcacgggctgtggagaagcgggcgcgaagagggaagcgagggagatcgagaggctcaaaagagagctggaccgtgtctccaaggaaaggaatgaattgaaaaatgaatgcaccgcgctgaaaaaggacagaacaaagaaagatcttcaaatcaaagctaaagaagcggagattcaaaatctgaaaaaagctaatgtcagctccatgaaagatgtttgcagtgcagggatgaacattgatcagtcctttcacgcccctgcaaatgaggctttgcatactggggtttcttctaggcgaacagacaagatgagtggcaaagataaggatgcccattcattgcgagacgatctctatctaaagcaagggcatcaaactgatttacttgaggctttagaactgaggcgtcgcaccatgattgataacggaatgagtacatctggagtagtgtctctggaggaggacacccattttgaaccaagaaacgctacatgcaaggaaattaaggcgataggagtccagacagataacacatctgacaatgaacatcttgactgcaagaaattattggttgagcgtatatctggtaacctacgtgcaatgtggggcatgtcacctaacagtttatcaagcaggaatttgatatcaaagatcaatgtttcttgttcagaagaaattttgtcacttctccagcatacgagattgtcagacaactgtgaaccctcttctcaagcaatctcctccatgaatgaagctatttcccaactgtatgacacgttcattaagatgaatagtgggaagatgtcaatacaaactttccttgaagcattgctaaatctatgtgcttttgatgatgctgctatagtcagtagaactttgagggtattcctcaaagttttacagcacttactgcaacatggagccaagtctagtgaaaggaacaatgtttctgttgaaccatatgttaacgtactcatggagaacaaccacaaagactgttcgaccttgttgagaccagtggatgcagaagattcattgagactgcataatatgtttcttccttttactttctggagttcacttttcactggcatgcttcaaattggggtcaagtactcacaagagacaattcgtactgatgcattatccataatgattctcattgtaaggacaacagatcccatagaggaacgccagaaattcggatttacttcagtaatgacgagattgcatctgctattgcagaaagagaacggattgcttgttaagaagcattctgtgcgtctacttttcttgcttctgaattgcccagtgatgttgaagttgctgtgtagtggaggcaaagacggctccaaacagatgggatcggaagcttgtgaaagtaatagatcacaagaagtcataagctcagttcttgtggatttatctgattgtttgacatgtggggaaacttgttctctgatgtttggtgatgagagaagctcttatcctgctaaaccggctggcatcacacgcaaactattcgaaaccaaccttggaagtgctgacgagaagcaagttatgcgcgacctggacgatcgatgttgcgaaccggctgccccatacgtggatggcaaatgatctcgcggagctggcccagaaattcaggtcgcgagtgtatgctttcatagaggagaaacccttgacaagcgacggtaccaatctgggcgcttctaataagagatgagatacccaggactggcgcagcctgaggtagcttgggtagtaatatggaaagcatattgctagcggctcgacaagtttagtttcttttttttcccttactgacactagggttttgtttaggagttagactggcttggctggggcgagtcgctagcttttgctggcggtgtacagaggcgaatgcttcctcgccatttttgagggggagggagaatgtagttgtactacggcaagtccttgggaacgtacatcataattgttgtttggacatcatctcatggctttggcattgaccatcgcagcttttttgaattgaaagttttagtttttttcttaccaggatgatctgactgtaagcaattgaggatattggatgggtttgttggttgtgaagtatgggtggatgcctgttt

SEQ ID NO: 46254 - DNA, 2857 bp, Zea Mays
gccggtgagaagagtagggaggcgcagcgcggggatggacggcggcctcgacgacgagtgggaagctagcttcctcgacgaggtgatacgcgcgacggatgaggctgaggctgtcgtctcccgcaaccctaaccccactcccacccccgcgcccgctcccatccccacgtattatcccttggccgccgcccccgtctcctacctcccagcctcttcggtctcctacatccctgccgcttcgcacctccgctccgcgatcagcttctcccctccacgggacctctcccagaggccgccgctcccgccgccgaccgctgccaccagcaccagggatgcgctggcgacgggggccgacgtcggtcgcgacttctctcctccgccccagctctcccagcgcccggcggctgatgagggcagcctcgtggccttcgcggcgtcgagctcagccagcgaccgccgcttcattagcacgggctgtggagaagcgggcgcgaagagggaagcgagggagatcgagaggctcaaagtgattactttctggctttttttcgtgtttggggcggagcggttttttgccttttgttcctaatgctctaatgctcttggtcttcacaaccgcagagagagctggaccgtgtctccaaggaaaggaatgaattgaaaaatgaatgcaccgcgctgaaaaaggacagaacaaagaaagatcttcaaatcaaagctaaagaagcggagattcaaaatctgaaaaaagctaatgtggatgaacattgatcagtcctttcacgcccctgcaaatgaggctttgcatactggggtttcttctaggcgaacagacaagatgagtggcaaagataaggatgcccattcattgcgagacgatctctatctaaagcaagggcatcaaactgatttacttgaggctttagaactgaggcgtcgcaccatgattgataacggaatgagtacatctggagtagtgtctctggaggaggacacccattttgaaccaagaaacgctacatgcaaggaaattaaggcgataggagtccagacagataacacatctgacaatgaacatcttgactgcaagaaattattggttgagcgtatatctggtaacctacgtgcaatgtggggcatgtcacctaacagtttatcaagcaggaatttgatatcaaagatcaatgtttcttgttcagaagaaattttgtcacttctccagcatacgagattgtcagacaactgtgaaccctcttctcaagcaatctcctccatgaatgaagctatttcccaactgtatgacacgttcattaagatgaatagtgggaagatgtcaatacaaactttccttgaagcattgctaaatctatgtgcttttgatgatgctgctatagtcagtagaactttgagggtattcctcaaagttttacagcacttactgcaacatggagccaagtctagtgaaagtgtaccctcaggaacaatgtttctgttgaaccatatgttaacgtactcatggagaacaaccacaaagactgttcgaccttgttgagaccagtggatgcagaagattcattgagactgcataatatgtttcttccttttactttctggagttcacttttcactggcatgcttcaaattggggtcaagtactcacaagagacaattcgtactgatgcattatccataatgattctcattgtaaggacaacagatcccatagaggaacgccagaaattcggatttacttcagtaatgacgagattgcatctgctattgcagaaagagaacggattgcttgttaagaagcattctgtgcgtctacttttcttgcttctgaattgcccagtgatgttgaagttgctgtgtagtggaggcaaagacggctccaaacagatgggatcggaagcttgtgaaagtaatagatcacaagaagtcataagctcagttcttgtggatttatctgattgtttgacatgtggggaaacttgttctctggggattgagctttgcaggctcgtcatcattctgctagcttatatagcttccagtggcaaattgggatatgaggtgcttttagttccagtgagtgcccgtggtgccagttttttggagatgataatggaagtccttgcatcgcagatgcaatatgaaacacgagagttactaaaagaaagatgtttggtgatgagagaagctcttatcctgctaaaccggctggcatcacacgcaaactattcgaaaccaaccttggaagtgctgacgagaagcaagttatgcgcgacctggacgatcgatgttgcgaaccggctgccccatacgtggatggcaaatgatctcgcggagctggcccagaaattcaggtcgcgagtgtatgctttcatagaggagaaacccttgacaagcgacggtaccaatctgggcgcttctaataagagatgagatacccaggactggcgcagcctgaggtagcttgggtagtaatatggaaagcatattgctagcggctcgacaagtttagtttcttttttttcccttactgacactagggttttgtttaggagttagactggcttggctggggcgagtcgctagcttttgctggcggtgtacagaggcgaatgcttcctcgccatttttgagggggagggagaatgtagttgtactacggcaagtccttgggaacgtacatcataattgttgtttggacatcatctcatggctttggcattgaccatcgcagcttttttgaattgaaagttttagtttttttcttaccaggatgatctgactgtaagcaattgaggatattggatgggtttgttggttgtgaagtatgggtggatgcctgttt

SEQ ID NO: 46255 - DNA, 2776 bp, Zea Mays
tcgcagctgccgccgccagtgccggtgagaagagtagggaggcgcagcgcggggatggacggcggcctcgacgacgagtgggaagctagcttcctcgacgaggtgatacgcgcgacggatgaggctgaggctgtcgtctcccgcaaccctaaccccactcccacccccgcgcccgctcccatccccacgtattatcccttggccgccgcccccgtctcctacctcccagcctcttcggtctcctacatccctgccgcttcgcacctccgctccgcgatcagcttctcccctccacgggacctctcccagaggccgccgctcccgccgccgaccgctgccaccagcaccagggatgcgctggcgacgggggccgacgtcggtcgcgacttctctcctccgccccagctctcccagcgcccggcggctgatgagggcagcctcgtggccttcgcggcgtcgagctcagccagcgaccgccgcttcattagcacgggctgtggagaagcgggcgcgaagagggaagcgagggagatcgagaggctcaaaagagagctggaccgtgtctccaaggaaaggaatgaattgaaaaatgaatgcaccgcgctgaaaaaggacagaacaaagaaagatcttcaaatcaaagctaaagaagcggagattcaaaatctgaaaaaagctaatgttgcagggatgaacattgatcagtcctttcacgcccctgcaaatgaggctttgcatactggggtttcttctaggcgaacagacaagatgagtggcaaagataaggatgcccattcattgcgagacgatctctatctaaagcaagggcatcaaactgatttacttgaggctttagaactgaggcgtcgcaccatgattgataacggaatgagtacatctggagtagtgtctctggaggaggacacccattttgaaccaagaaacgctacatgcaaggaaattaaggcgataggagtccagacagataacacatctgacaatgaacatcttgactgcaagaaattattggttgagcgtatatctggtaacctacgtgcaatgtggggcatgtcacctaacagtttatcaagcaggaatttgatatcaaagatcaatgtttcttgttcagaagaaattttgtcacttctccagcatacgagattgtcagacaactgtgaaccctcttctcaagcaatctcctccatgaatgaagctatttcccaactgtatgacacgttcattaagatgaatagtgggaagatgtcaatacaaactttccttgaagcattgctaaatctatgtgcttttgatgatgctgctatagtcagtagaactttgagggtattcctcaaagttttacagcacttactgcaacatggagccaagtctagtgaaaggaacaatgtttctgttgaaccatatgttaacgtactcatggagaacaaccacaaagactgttcgaccttgttgagaccagtggatgcagaagattcattgagactgcataatatgtttcttccttttactttctggagttcacttttcactggcatgcttcaaattggggtcaagtactcacaagagacaattcgtactgatgcattatccataatgattctcattgtaaggacaacagatcccatagaggaacgccagaaattcggatttacttcagtaatgacgagattgcatctgctattgcagaaagagaacggattgcttgttaagaagcattctgtgcgtctacttttcttgcttctgaattgcccagtgatgttgaagttgctgtgtagtggaggcaaagacggctccaaacagatgggatcggaagcttgtgaaagtaatagatcacaagaagtcataagctcagttcttgtggatttatctgattgtttgacatgtggggaaacttgttctctggggattgagctttgcaggctcgtcatcattctgctagcttatatagcttccagtggcaaattgggatatgaggtgcttttagttccagtgagtgcccgtggtgccagttttttggagatgataatggaagtccttgcatcgcagatgcaatatgaaacacgagagttactaaaagaaagatgtttggtgatgagagaagctcttatcctgctaaaccggctggcatcacacgcaaactattcgaaaccaaccttggaagtgctgacgagaagcaagttatgcgcgacctggacgatcgatgttgcgaaccggctgccccatacgtggatggcaaatgatctcgcggagctggcccagaaattcaggtcgcgagtgtatgctttcatagaggagaaacccttgacaagcgacggtaccaatctgggcgcttctaataagagatgagatacccaggactggcgcagcctgaggtagcttgggtagtaatatggaaagcatattgctagcggctcgacaagtttagtttcttttttttcccttactgacactagggttttgtttaggagttagactggcttggctggggcgagtcgctagcttttgctggcggtgtacagaggcgaatgcttcctcgccatttttgagggggagggagaatgtagttgtactacggcaagtccttgggaacgtacatcataattgttgtttggacatcatctcatggctttggcattgaccatcgcagcttttttgaattgaaagttttagtttttttcttaccaggatgatctgactgtaagcaattgaggatattggatgggtttgttggttgtgaagtatgggtggatgcctgttt

SEQ ID NO: 46256 - DNA, 2801 bp, Zea Mays
ttcgcagctgccgccgccagtgccggtgagaagagtagggaggcgcagcgcggggatggacggcggcctcgacgacgagtgggaagctagcttcctcgacgaggtgatacgcgcgacggatgaggctgaggctgtcgtctcccgcaaccctaaccccactcccacccccgcgcccgctcccatccccacgtattatcccttggccgccgcccccgtctcctacctcccagcctcttcggtctcctacatccctgccgcttcgcacctccgctccgcgatcagcttctcccctccacgggacctctcccagaggccgccgctcccgccgccgaccgctgccaccagcaccagggatgcgctggcgacgggggccgacgtcggtcgcgacttctctcctccgccccagctctcccagcgcccggcggctgatgagggcagcctcgtggccttcgcggcgtcgagctcagccagcgaccgccgcttcattagcacgggctgtggagaagcgggcgcgaagagggaagcgagggagatcgagaggctcaaaagagagctggaccgtgtctccaaggaaaggaatgaattgaaaaatgaatgcaccgcgctgaaaaaggacagaacaaagaaagatcttcaaatcaaagctaaagaagcggagattcaaaatctgaaaaaagctaatgtcagctccatgaaagatgtttgcagtgcagggatgaacattgatcagtcctttcacgcccctgcaaatgaggctttgcatactggggtttcttctaggcgaacagacaagatgagtggcaaagataaggatgcccattcattgcgagacgatctctatctaaagcaagggcatcaaactgatttacttgaggctttagaactgaggcgtcgcaccatgattgataacggaatgagtacatctggagtagtgtctctggaggaggacacccattttgaaccaagaaacgctacatgcaaggaaattaaggcgataggagtccagacagataacacatctgacaatgaacatcttgactgcaagaaattattggttgagcgtatatctggtaacctacgtgcaatgtggggcatgtcacctaacagtttatcaagcaggaatttgatatcaaagatcaatgtttcttgttcagaagaaattttgtcacttctccagcatacgagattgtcagacaactgtgaaccctcttctcaagcaatctcctccatgaatgaagctatttcccaactgtatgacacgttcattaagatgaatagtgggaagatgtcaatacaaactttccttgaagcattgctaaatctatgtgcttttgatgatgctgctatagtcagtagaactttgagggtattcctcaaagttttacagcacttactgcaacatggagccaagtctagtgaaaggaacaatgtttctgttgaaccatatgttaacgtactcatggagaacaaccacaaagactgttcgaccttgttgagaccagtggatgcagaagattcattgagactgcataatatgtttcttccttttactttctggagttcacttttcactggcatgcttcaaattggggtcaagtactcacaagagacaattcgtactgatgcattatccataatgattctcattgtaaggacaacagatcccatagaggaacgccagaaattcggatttacttcagtaatgacgagattgcatctgctattgcagaaagagaacggattgcttgttaagaagcattctgtgcgtctacttttcttgcttctgaattgcccagtgatgttgaagttgctgtgtagtggaggcaaagacggctccaaacagatgggatcggaagcttgtgaaagtaatagatcacaagaagtcataagctcagttcttgtggatttatctgattgtttgacatgtggggaaacttgttctctggggattgagctttgcaggctcgtcatcattctgctagcttatatagcttccagtggcaaattgggatatgaggtgcttttagttccagtgagtgcccgtggtgccagttttttggagatgataatggaagtccttgcatcgcagatgcaatatgaaacacgagagttactaaaagaaagatgtttggtgatgagagaagctcttatcctgctaaaccggctggcatcacacgcaaactattcgaaaccaaccttggaagtgctgacgagaagcaagttatgcgcgacctggacgatcgatgttgcgaaccggctgccccatacgtggatggcaaatgatctcgcggagctggcccagaaattcaggtcgcgagtgtatgctttcatagaggagaaacccttgacaagcgacggtaccaatctgggcgcttctaataagagatgagatacccaggactggcgcagcctgaggtagcttgggtagtaatatggaaagcatattgctagcggctcgacaagtttagtttcttttttttcccttactgacactagggttttgtttaggagttagactggcttggctggggcgagtcgctagcttttgctggcggtgtacagaggcgaatgcttcctcgccatttttgagggggagggagaatgtagttgtactacggcaagtccttgggaacgtacatcataattgttgtttggacatcatctcatggctttggcattgaccatcgcagcttttttgaattgaaagttttagtttttttcttaccaggatgatctgactgtaagcaattgaggatattggatgggtttgttggttgtgaagtatgggtggatgcctgttt

SEQ ID NO: 46257 - DNA, 3099 bp, Zea Mays
aataacaaataactctcccacaaaacaccacaagtccacaacacctaccattcgcagctgccgccgccagtgccggtgagaagagtagggaggcgcagcgcggggatggacggcggcctcgacgacgagtgggaagctagcttcctcgacgaggtgatacgcgcgacggatgaggctgaggctgtcgtctcccgcaaccctaaccccactcccacccccgcgcccgctcccatccccacgtattatcccttggccgccgcccccgtctcctacctcccagcctcttcggtctcctacatccctgccgcttcgcacctccgctccgcgatcagcttctcccctccacgggacctctcccagaggccgccgctcccgccgccgaccgctgccaccagcaccagggatgcgctggcgacgggggccgacgtcggtcgcgacttctctcctccgccccagctctcccagcgcccggcggctgatgagggcagcctcgtggccttcgcggcgtcgagctcagccagcgaccgccgcttcattagcacgggctgtggagaagcgggcgcgaagagggaagcgagggagatcgagaggctcaaagtgattactttctggctttttttcgtgtttggggcggagcggttttttgccttttgttcctaatgctctaatgctcttggtcttcacaaccgcagagagagctggaccgtgtctccaaggaaaggaatgaattgaaaaatgaatgcaccgcgctgaaaaaggacagaacaaagaaagatcttcaaatcaaagctaaagaagcggagattcaaaatctgaaaaaagctaatgtgtaagtactactggtttcatatgtactcattatttcagtcaccatgatgctgactgtgagctaacatactagtcatctatctgtatctgaagaatttgaacatgtcttgcttcttctgagcgaaggactgtgcgggggtgttttttttaaatattacttgagtcaccatatattgttttctgcatcagttccaaggctgttgacactgttttctgcttcaatttcttttttactcagcagctccatgaaagatgtttgcagtgcagggatgaacattgatcagtcctttcacgcccctgcaaatgaggctttgcatactggggtttcttctaggcgaacagacaagatgagtggcaaagataaggatgcccattcattgcgagacgatctctatctaaagcaagggcatcaaactgatttacttgaggctttagaactgaggcgtcgcaccatgattgataacggaatgagtacatctggagtagtgtctctggaggaggacacccattttgaaccaagaaacgctacatgcaaggaaattaaggcgataggagtccagacagataacacatctgacaatgaacatcttgactgcaagaaattattggttgagcgtatatctgaagaaattttgtcacttctccagcatacgagattgtcagacaactgtgaaccctcttctcaagcaatctcctccatgaatgaagctatttcccaactgtatgacacgttcattaagatgaatagtgggaagatgtcaatacaaactttccttgaagcattgctaaatctatgtgcttttgatgatgctgctatagtcagtagaactttgagggtattcctcaaagttttacagcacttactgcaacatggagccaagtctagtgaaaggaacaatgtttctgttgaaccatatgttaacgtactcatggagaacaaccacaaagactgttcgaccttgttgagaccagtggatgcagaagattcattgagactgcataatatgtttcttccttttactttctggagttcacttttcactggcatgcttcaaattggggtcaagtactcacaagagacaattcgtactgatgcattatccataatgattctcattgtaaggacaacagatcccatagaggaacgccagaaattcggatttacttcagtaatgacgagattgcatctgctattgcagaaagagaacggattgcttgttaagaagcattctgtgcgtctacttttcttgcttctgaattgcccagtgatgttgaagttgctgtgtagtggaggcaaagacggctccaaacagatgggatcggaagcttgtgaaagtaatagatcacaagaagtcataagctcagttcttgtggatttatctgattgtttgacatgtggggaaacttgttctctggggattgagctttgcaggctcgtcatcattctgctagcttatatagcttccagtggcaaattgggatatgaggtgcttttagttccagtgagtgcccgtggtgccagttttttggagatgataatggaagtccttgcatcgcagatgcaatatgaaacacgagagttactaaaagaaagatgtttggtgatgagagaagctcttatcctgctaaaccggctggcatcacacgcaaactattcgaaaccaaccttggaagtgctgacgagaagcaagttatgcgcgacctggacgatcgatgttgcgaaccggctgccccatacgtggatggcaaatgatctcgcggagctggcccagaaattcaggtcgcgagtgtatgctttcatagaggagaaacccttgacaagcgacggtaccaatctgggcgcttctaataagagatgagatacccaggactggcgcagcctgaggtagcttgggtagtaatatggaaagcatattgctagcggctcgacaagtttagtttcttttttttcccttactgacactagggttttgtttaggagttagactggcttggctggggcgagtcgctagcttttgctggcggtgtacagaggcgaatgcttcctcgccatttttgagggggagggagaatgtagttgtactacggcaagtccttgggaacgtacatcataattgttgtttggacatcatctcatggctttggcattgaccatcgcagcttttttgaattgaaagttttagtttttttcttaccaggatgatctgactgtaagcaattgaggatattggatgggtttgttggttgtgaagtatgggtggatgcctgttt

SEQ ID NO: 46258 - DNA, 2234 bp, Zea Mays
ctttactgaaaaatgaatgcaccgcgctgaaaaaggacagaacaaagaaagatcttcaaatcaaagctaaagaagcggagattcaaaatctgaaaaaagctaatgtcagctccatgaaagatgtttgcagtgcagggatgaacattgatcagtcctttcacgcccctgcaaatgaggctttgcatactggggtttcttctaggcgaacagacaagatgagtggcaaagataaggatgcccattcattgcgagacgatctctatctaaagcaagggcatcaaactgatttacttgaggctttagaactgaggcgtcgcaccatgattgataacggaatgagtacatctggagtagtgtctctggaggaggacacccattttgaaccaagaaacgctacatgcaaggaaattaaggcgataggagtccagacagataacacatctgacaatgaacatcttgactgcaagaaattattggttgagcgtatatctggtaacctacgtgcaatgtggggcatgtcacctaacagtttatcaagcaggaatttgatatcaaagatcaatgtttcttgttcagaagaaattttgtcacttctccagcatacgagattgtcagacaactgtgaaccctcttctcaagcaatctcctccatgaatgaagctatttcccaactgtatgacacgttcattaagatgaatagtgggaagatgtcaatacaaactttccttgaagcattgctaaatctatgtgcttttgatgatgctgctatagtcagtagaactttgagggtattcctcaaagttttacagcacttactgcaacatggagccaagtctagtgaaagtgtaccctcaggaacaatgtttctgttgaaccatatgttaacgtactcatggagaacaaccacaaagactgttcgaccttgttgagaccagtggatgcagaagattcattgagactgcataatatgtttcttccttttactttctggagttcacttttcactggcatgcttcaaattggggtcaagtactcacaagagacaattcgtactgatgcattatccataatgattctcattgtaaggacaacagatcccatagaggaacgccagaaattcggatttacttcagtaatgacgagattgcatctgctattgcagaaagagaacggattgcttgttaagaagcattctgtgcgtctacttttcttgcttctgaattgcccagtgatgttgaagttgctgtgtagtggaggcaaagacggctccaaacagatgggatcggaagcttgtgaaagtaatagatcacaagaagtcataagctcagttcttgtggatttatctgattgtttgacatgtggggaaacttgttctctggggattgagctttgcaggctcgtcatcattctgctagcttatatagcttccagtggcaaattgggatatgaggtgcttttagttccagtgagtgcccgtggtgccagttttttggagatgataatggaagtccttgcatcgcagatgcaatatgaaacacgagagttactaaaagaaagatgtttggtgatgagagaagctcttatcctgctaaaccggctggcatcacacgcaaactattcgaaaccaaccttggaagtgctgacgagaagcaagttatgcgcgacctggacgatcgatgttgcgaaccggctgccccatacgtggatggcaaatgatctcgcggagctggcccagaaattcaggtcgcgagtgtatgctttcatagaggagaaacccttgacaagcgacggtaccaatctgggcgcttctaataagagatgagatacccaggactggcgcagcctgaggtagcttgggtagtaatatggaaagcatattgctagcggctcgacaagtttagtttcttttttttcccttactgacactagggttttgtttaggagttagactggcttggctggggcgagtcgctagcttttgctggcggtgtacagaggcgaatgcttcctcgccatttttgagggggagggagaatgtagttgtactacggcaagtccttgggaacgtacatcataattgttgtttggacatcatctcatggctttggcattgaccatcgcagcttttttgaattgaaagttttagtttttttcttaccaggatgatctgactgtaagcaattgaggatattggatgggtttgttggttgtgaagtatgggtggatgcctgttt

SEQ ID NO: 46259 - DNA, 1371 bp, Zea Mays
taacttaaaaaaagaaacatgtccccttccctccgcagcgcgcgcgctctctcccaccctctttcccgtgggccgtggccacgaccgcgcgaccgccgccgccctacgccaggtgccctggtcggtcccttcgagccaggtcgtcgtcgtcccttcgcagccgacgagcgcccgtcaggtactaagtgatccagagaagcgtgcaatttatgatcagtatggtgaggagggcttaaaggggatgcctccacctggttcccagagccggtcctccacaactgctggcccaagtgccaaggtcacattggacttcagccaggaacagtagaagtgaagctccttctggttcacagaaagagaatggtgccagtacaagcaatatagaaaagccaccacctgtggagaaaacattactttgtactcttgaagagttgtataatggaacaaaaaggaaaatgaagatcactaggaatgttgcaaagccagatggaagaatagaagttgaaacagaggtcttggcagttgaagtgttacctggctggaaaaagggaaccaagattacattccccaacaaaggcgataagctacatggccagttagcacaagacctgacctttgtcctcgattcgaagccccatgatgtgtacaatcttgaagggaacaaccttcttgtaaagcaggtgatccctctggtagatgccctcgctggggcagagataaacctcacaacccttgatggtcggaatctgcctgtgagggtggaggaagtggtgcgccctggatacgaagttgtgctggagaacgaagggtggccgatcaggaaggaacctgggaagaagggaaagctggtaatcaagtttgatgtgaccttcccgatgaggttatcgccgtcacagcgggcagccatcaggcgaatcatgggcagctaactgggggaagagaaagagaaggggcattgcattcttttacatggagaaggaacagtctctacattggcactagaattcagatggatagttggaacttggaagtaacttgagtcaatcagataggcatttccatggttaaatatcccgttactaatcctacctatttgctttggttaattgaatgtgacctagttttttttttcgttttctttgttatatcgtgtgaatccgtagaaaaggtgggtgatttcgaggataatgtaagctgatttttccatccgaattttttctggggcatgtgatggttttttcattggaaaactgtagcatacccgggaaatggaaggaaaggaaaaaaagatagaaaagacaagaaaggagcctttaagcaaatattcatgtgcctctttcttgtatcatgtatcagttgggcagggttcat

SEQ ID NO: 46260 - DNA, 1662 bp, Zea Mays
taacttaaaaaaagaaacatgtccccttccctccgcagcgcgcgcgctctctcccaccctctttcccgtgggccgtggccacgaccgcgcgaccgccgccgccctacgccaggtgccctggtcggtcccttcgagccaggtcgtcgtcgtcccttcgcagccgacgagcgcccgtcaggttcgcttgcgttacacgctcgggaatggattactacaacatcctcaaggtgaatcgcaatgcgaccttggaggacctcaagaagtcgtaccggcggctcgcgaggacgtggcaccctgacaagaatctgactggaggggcggaggctgaggccaagttcaagcagataaccgaggcctacgaggtactaagtgatccagagaagcgtgcaatttatgatcagtatggtgaggagggcttaaaggggatgcctccacctggttcccagagccggtcctccacaactgctggcccaagtggtccgagtaatttccattacaatcctagtgacccagatgatttctttgctgagttcatggcaagcaacaagacttactcctttgaccatgaccggaggcgattccagccaaggtcacattggacttcagccaggaacagtagaagtgaagctccttctggttcacagaaagagaatggtgccagtacaagcaatatagaaaagccaccacctgtggagaaaacattactttgtactcttgaagagttgtataatggaacaaaaaggaaaatgaagatcactaggaatgttgcaaagccagatggaagaatagaagttgaaacagaggtcttggcagttgaagtgttacctggctggaaaaagggaaccaagattacattccccaacaaaggcgataagctacatggccagttagcacaagacctgacctttgtcctcgattcgaagccccatgatgtgtacaatcttgaagggaacaaccttcttgtaaagcaggtgatccctctggtagatgccctcgctggggcagagataaacctcacaacccttgatggtcggaatctgcctgtgagggtggaggaagtggtgcgccctggatacgaagttgtgctggagaacgaagggtggccgatcaggaaggaacctgggaagaagggaaagctggtaatcaagtttgatgtgaccttcccgatgaggttatcgccgtcacagcgggcagccatcaggcgaatcatgggcagctaactgggggaagagaaagagaaggggcattgcattcttttacatggagaaggaacagtctctacattggcactagaattcagatggatagttggaacttggaagtaacttgagtcaatcagataggcatttccatggttaaatatcccgttactaatcctacctatttgctttggttaattgaatgtgacctagttttttttttcgttttctttgttatatcgtgtgaatccgtagaaaaggtgggtgatttcgaggataatgtaagctgatttttccatccgaattttttctggggcatgtgatggttttttcattggaaaactgtagcatacccgggaaatggaaggaaaggaaaaaaagatagaaaagacaagaaaggagcctttaagcaaatattcatgtgcctctttcttgtatcatgtatcagttgggcagggttcat

SEQ ID NO: 46261 - DNA, 1613 bp, Zea Mays
taacttaaaaaaagaaacatgtccccttccctccgcagcgcgcgcgctctctcccaccctctttcccgtgggccgtggccacgaccgcgcgaccgccgccgccctacgccaggtgccctggtcggtcccttcgagccaggtcgtcgtcgtcccttcgcagccgacgagcgcccgtcaggtgaatcgcaatgcgaccttggaggacctcaagaagtcgtaccggcggctcgcgaggacgtggcaccctgacaagaatctgactggaggggcggaggctgaggccaagttcaagcagataaccgaggcctacgaggtactaagtgatccagagaagcgtgcaatttatgatcagtatggtgaggagggcttaaaggggatgcctccacctggttcccagagccggtcctccacaactgctggcccaagtggtccgagtaatttccattacaatcctagtgacccagatgatttctttgctgagttcatggcaagcaacaagacttactcctttgaccatgaccggaggcgattccagccaaggtcacattggacttcagccaggaacagtagaagtgaagctccttctggttcacagaaagagaatggtgccagtacaagcaatatagaaaagccaccacctgtggagaaaacattactttgtactcttgaagagttgtataatggaacaaaaaggaaaatgaagatcactaggaatgttgcaaagccagatggaagaatagaagttgaaacagaggtcttggcagttgaagtgttacctggctggaaaaagggaaccaagattacattccccaacaaaggcgataagctacatggccagttagcacaagacctgacctttgtcctcgattcgaagccccatgatgtgtacaatcttgaagggaacaaccttcttgtaaagcaggtgatccctctggtagatgccctcgctggggcagagataaacctcacaacccttgatggtcggaatctgcctgtgagggtggaggaagtggtgcgccctggatacgaagttgtgctggagaacgaagggtggccgatcaggaaggaacctgggaagaagggaaagctggtaatcaagtttgatgtgaccttcccgatgaggttatcgccgtcacagcgggcagccatcaggcgaatcatgggcagctaactgggggaagagaaagagaaggggcattgcattcttttacatggagaaggaacagtctctacattggcactagaattcagatggatagttggaacttggaagtaacttgagtcaatcagataggcatttccatggttaaatatcccgttactaatcctacctatttgctttggttaattgaatgtgacctagttttttttttcgttttctttgttatatcgtgtgaatccgtagaaaaggtgggtgatttcgaggataatgtaagctgatttttccatccgaattttttctggggcatgtgatggttttttcattggaaaactgtagcatacccgggaaatggaaggaaaggaaaaaaagatagaaaagacaagaaaggagcctttaagcaaatattcatgtgcctctttcttgtatcatgtatcagttgggcagggttcat

SEQ ID NO: 46262 - DNA, 1070 bp, Zea Mays
taacttaaaaaaagaaacatgtccccttccctccgcagcgcgcgcgctctctcccaccctctttcccgtgggccgtggccacgaccgcgcgaccgccgccgccctacgccaggtgccctggtcggtcccttcgagccaggtcgtcgtcgtcccttcgcagccgacgagcgcccgtcagcctggaggaccactcgatgtaatcgaagacaccgggggttcacagctgtttttttgtgtgtgaatttacgttcctgaaaggttcgcttgcgttacacgctcgggaatggattactacaacatcctcaaggtgaatcgcaatgcgaccttggaggacctcaagaagtcgtaccggcggctcgcgaggacgtggcaccctgacaagaatctgactggaggggcggaggctgaggccaagttcaagcagataaccgaggcctacgaggtactaagtgatccagagaagcgtgcaatttatgatcagtatggtgaggagggcttaaaggggatgcctccacctggttcccagagccggtcctccacaactgctggcccaagtggtccgagtaatttccattacaatcctagtgacccagatgatttctttgctgagttcatggcaagcaacaagacttactcctttgaccatgaccggaggcgattccagccaaggtcacattggacttcagccaggaacagtagaagtgaagctccttctggttcacagaaagagaatggtgccagtacaagcaatatagaaaagccaccacctgtggagaaaacattactttgtactcttgaagagttgtataatggaacaaaaaggaaaatgaagatcactaggaatgttgcaaagccagatgggtatgttgttgaactactttcctcaaatttctgtgatatctttgtagtgataggttgttcctcaatgttgcggttttctcctttttgctgcacaagagtttgggtcaatgaacatttagataatctggaaattcaaacctgtacagatgacttttctgcgactattaagatatgttttgctaatatatatctttgaaattcaatctaca

SEQ ID NO: 46263 - DNA, 969 bp, Zea Mays
ctcctccagtcctgttcttggacgtttttgtacccctttagcacaagtcatgctgataataatcgttaatgggggaataacactactgaaattaagttggagcggctccattcgatctggttctggagctcacttcatggatctggatctagttagacccaacaaagagaagtaactctccaagaagaaaatgcagcctatgagaaagctatatcagagtgtaaacagaaaattcaggaaaagcagatggaggccactcagcttctgagtaatctggaggaaatggaagtaacagagcataatttaaagacacagcttgaaaatgctctgaaggagctagaggctgctcaacataaagcatcaacagcaacctctggaacagctgaaaatgctctactggaagctaagtcagtgactgaccttaaatctaaagatttggaggagaagaaaagggagcttgaactattggataacaaggtgcaaacattagagaaagagtggtctgtggttgaagaagaatctttaaagaaacccactcctgcacaaagggagaaggtcctggagaggcaactgcatagcctcatcgagcagttgacagctaagcaagctcaagctgaaattctggccactgatgtgcattccaaagaaaaggagctggaacggctgaaccatctgcatagaaacctctacggcggtgccaacgaaactggcgcaccccggagccgcctcagcagaggcctcttgagcggccctgaagattactattacgaccctaaagcgggccggaaaccgtaccaggctggcgctagaacagaaggccagaaccggctgatgatccttaggtccgcaattgtactgtatgttctgctgctccatgtcatcgttttcataaagatatcagtctgaaagcagttgagctagcgcttcataagttcatatagggaaacagatacttgcttttggtccaaa

SEQ ID NO: 46264 - DNA, 1182 bp, Zea Mays
acagcgccgccgtcacgccctccacgccggcagaggctgccggcgacggtggggggtgacttcctctccccctacccttccgatctctttccctctgcgaattgttctattagcgaccttcctcgggggtgctagccggatccgcgatcgtcgaaatcccaagctcctccacaggcccgagggtcggtcgtcctcatggcggggatcctggcgtgggcggctgacgtggtcggcggggccggcggcagcgacgacgaggcggacgacgacgcgcgcgccgcggcgtcggccgccatgaccccggcccagcggctccgcgccgccgacctggacgcgcgggcggcctcgctgcgccgcgccatccaggacctccgcctccgggtgcccccgccgcacgtcgcgcagcgcctgccccacctccacgccgactcactcgcgtcgtccgccgcgctcgcgctccagctcaacgcgcactcctccaccaaggagcaggaaatggaagtaacagagcataatttaaagacacagcttgaaaatgctctgaaggagctagaggctgctcaacataaagcatcaacagcaacctctggaacagctgaaaatgctctactggaagctaagtcagtgactgaccttaaatctaaagatttggaggagaagaaaagggagcttgaactattggataacaaggtgcaaacattagagaaagagtggtctgtggttgaagaagaatctttaaagaaacccactcctgcacaaagggagaaggtcctggagaggcaactgcatagcctcatcgagcagttgacagctaagcaagctcaagctgaaattctggccactgatgtgcattccaaagaaaaggagctggaacggctgaaccatctgcatagaaacctctacggcggtgccaacgaaactggcgcaccccggagccgcctcagcagaggcctcttgagcggccctgaagattactattacgaccctaaagcgggccggaaaccgtaccaggctggcgctagaacagaaggccagaaccggctgatgatccttaggtccgcaattgtactgtatgttctgctgctccatgtcatcgttttcataaagatatcagtctgaaagcagttgagctagcgcttcataagttcatatagggaaacagatacttgcttttggtccaaa

SEQ ID NO: 46265 - DNA, 1237 bp, Zea Mays
cgctagcccactagccgcccgcatcgcgcgccggcccgcacgacagcgccgccgtcacgccctccacgccggcagaggctgccggcgacggtggggggtgacttcctctccccctacccttccgatctctttccctctgcgaattgttctattagttaccatctccagcgaccttcctcgggggtgctagccggatccgcgatcgtcgaaatcccaagctcctccacaggcccgagggtcggtcgtcctcatggcggggatcctggcgtgggcggctgacgtggtcggcggggccggcggcagcgacgacgaggcggacgacgacgcgcgcgccgcggcgtcggccgccatgaccccggcccagcggctccgcgccgccgacctggacgcgcgggcggcctcgctgcgccgcgccatccaggacctccgcctccgggtgcccccgccgcacgtcgcgcagcgcctgccccacctccacgccgactcactcgcgtcgtccgccgcgctcgcgctccagctcaacgcgcactcctccaccaaggagcaggaaatggaagtaacagagcataatttaaagacacagcttgaaaatgctctgaaggagctagaggctgctcaacataaagcatcaacagcaacctctggaacagctgaaaatgctctactggaagctaagtcagtgactgaccttaaatctaaagatttggaggagaagaaaagggagcttgaactattggataacaaggtgcaaacattagagaaagagtggtctgtggttgaagaagaatctttaaagaaacccactcctgcacaaagggagaaggtcctggagaggcaactgcatagcctcatcgagcagttgacagctaagcaagctcaagctgaaattctggccactgatgtgcattccaaagaaaaggagctggaacggctgaaccatctgcatagaaacctctacggcggtgccaacgaaactggcgcaccccggagccgcctcagcagaggcctcttgagcggccctgaagattactattacgaccctaaagcgggccggaaaccgtaccaggctggcgctagaacagaaggccagaaccggctgatgatccttaggtccgcaattgtactgtatgttctgctgctccatgtcatcgttttcataaagatatcagtctgaaagcagttgagctagcgcttcataagttcatatagggaaacagatacttgcttttggtccaaa

SEQ ID NO: 46266 - DNA, 860 bp, Zea Mays
gcgcatagctccctcgcctcggacaccgcgtcgtccaccctcttcagacccaacaaagagaagtaactctccaagaagaaaatgcagcctatgagaaagctatatcagagtgtaaacagaaaattcaggaaaagcagatggaggccactcagcttctgagtaatctggaggaaatggaagtaacagagcataatttaaagacacagcttgaaaatgctctgaaggagctagaggctgctcaacataaagcatcaacagcaacctctggaacagctgaaaatgctctactggaagctaagtcagtgactgaccttaaatctaaagatttggaggagaagaaaagggagcttgaactattggataacaaggtgcaaacattagagaaagagtggtctgtggttgaagaagaatctttaaagaaacccactcctgcacaaagggagaaggtcctggagaggcaactgcatagcctcatcgagcagttgacagctaagcaagctcaagctgaaattctggccactgatgtgcattccaaagaaaaggagctggaacggctgaaccatctgcatagaaacctctacggcggtgccaacgaaactggcgcaccccggagccgcctcagcagaggcctcttgagcggccctgaagattactattacgaccctaaagcgggccggaaaccgtaccaggctggcgctagaacagaaggccagaaccggctgatgatccttaggtccgcaattgtactgtatgttctgctgctccatgtcatcgttttcataaagatatcagtctgaaagcagttgagctagcgcttcataagttcatatagggaaacagatacttgcttttggtccaaa

SEQ ID NO: 46267 - DNA, 1283 bp, Zea Mays
atcagtccccactctgactctctccagtctggggctctgggcccaaatacaaaagggtttgtgggaaagccgctcgaatccgtaaccctaaccccacacccactcataaaccctccgcctcctcgcctccctcccttccatccaatcctcggaacgagcgcgcgggcgaggaggacccccgacggaggatggcggcggcggctagggttttccgcgggtccctcttcctgatgtccccggcggcgggcgccaaggcgtcggcagccaagaaggcgggcgcggcggcggcggcggcggcggtggccaagaagaccgaggcggccactacgaagccgagactgccgaccgggatcacgaagccgatgccggtctccgatgagttccgcaggttcgccggcggcgcgcccgaggtcgcacgctccgaggccatcaagctcatctgggcccacatcaaggcccacggcctccagacccaacaaagagaagtaactctccaagaagaaaatgcagcctatgagaaagctatatcagagtgtaaacagaaaattcaggaaaagcagatggaggccactcagcttctgagtaatctggaggaaatggaagtaacagagcataatttaaagacacagcttgaaaatgctctgaaggagctagaggctgctcaacataaagcatcaacagcaacctctggaacagctgaaaatgctctactggaagctaagtcagtgactgaccttaaatctaaagatttggaggagaagaaaagggagcttgaactattggataacaaggtgcaaacattagagaaagagtggtctgtggttgaagaagaatctttaaagaaacccactcctgcacaaagggagaaggtcctggagaggcaactgcatagcctcatcgagcagttgacagctaagcaagctcaagctgaaattctggccactgatgtgcattccaaagaaaaggagctggaacggctgaaccatctgcatagaaacctctacggcggtgccaacgaaactggcgcaccccggagccgcctcagcagaggcctcttgagcggccctgaagattactattacgaccctaaagcgggccggaaaccgtaccaggctggcgctagaacagaaggccagaaccggctgatgatccttaggtccgcaattgtactgtatgttctgctgctccatgtcatcgttttcataaagatatcagtctgaaagcagttgagctagcgcttcataagttcatatagggaaacagatacttgcttttggtccaaa

SEQ ID NO: 46268 - DNA, 949 bp, Zea Mays
catcgccgtctgctggatcctggcaccatctcccctgagctgcgccagatcgacaggagcataatgttccctgcacttcgagagttcgtcggaggtggaaagcctgtctggggaacctgtgctgggctcatctttcttgcaaacaaagcagtagggcaaaaaacaggggggcaggaacttgttggaggattagattgtacagtccaccgaaacttttttgggagtcagcttcaaagctttgagacagagctttccgtgccaaagctttcggagaaggaaggagggaatgatacatgccgcggtgtatttatacgggcacctgctatattggaagtaggtccagatgttgaaatattggcggattgccctgttcctgttgacagacccagcattacaatatcatttggggagggtactgaggaagaagagtattcaaaagatcgggtaattgttgcagtgcggcaagggaacatcctcgcaactgctttccacccagaattgacatcagactccagatggcatcgtttcttcttggacatggataaagaatccccagcaaaggcgttttctgcgctctccctgtcgtcatcgtcaagagacactgaaggcctgccaaagaataagccgtttgatctgcccatttttgagtaacgctaaagacaagacaaaccaaaagattgaaggaacgaagaaactgaccgtatttattatcgatcatcatttagccggttacaaaaacagccagctgagaatctgtcatactcagccgaaaaaagtgttgtctggtagctaacttgtacggataaaaaataatcacgctgtgtgctgtacgcaattctcatcagataaagcgaaacattgttttcctgggaattatagttttgctgaaggtgaccagttgaacacttgaacatggtaatactttccccctctatgtgcaacttcgttc

SEQ ID NO: 46269 - DNA, 868 bp, Zea Mays
ggacaacatcgccgtctgctggatcctggcaccatctcccctgagctgcgccagatcgacaggagcataatgttccctgcacttcgagagttcgtcggaggtggaaagcctgtctggggaacctgtgctgggctcatctttcttgcaaacaaagcagtagggcaaaaaacaggggggcaggaacttgttggaggattagattgtacagtccaccgaaacttttttgggagtcagcttcaaagctttgagacagagctttccgtgccaaagctttcggagaaggaaggagggaatgatacatgccgcggtgtatttatacgggcacctgctatattggaagaagaagagtattcaaaagatcgggtaattgttgcagtgcggcaagggaacatcctcgcaactgctttccacccagaattgacatcagactccagatggcatcgtttcttcttggacatggataaagaatccccagcaaaggcgttttctgcgctctccctgtcgtcatcgtcaagagacactgaaggcctgccaaagaataagccgtttgatctgcccatttttgagtaacgctaaagacaagacaaaccaaaagattgaaggaacgaagaaactgaccgtatttattatcgatcatcatttagccggttacaaaaacagccagctgagaatctgtcatactcagccgaaaaaagtgttgtctggtagctaacttgtacggataaaaaataatcacgctgtgtgctgtacgcaattctcatcagataaagcgaaacattgttttcctgggaattatagttttgctgaaggtgaccagttgaacacttgaacatggtaatactttccccctctatgtgcaacttcgttc

SEQ ID NO: 46270 - DNA, 1064 bp, Zea Mays
gctaacctccacctttaggagggtactaggatcagatggacaacatcgccgtctgctggatcctggcaccatctcccctgagctgcgccagatcgacaggagcataatgttccctgcacttcgagagttcgtcggaggtggaaagcctgtctggggaacctgtgctgggctcatctttcttgcaaacaaagcagtagtgttgctttcagggcaaaaaacaggggggcaggaacttgttggaggattagattgtacagtccaccgaaacttttttgggagtcagcttcaaagctttgagacagagctttccgtgccaaagctttcggagaaggaaggagggaatgatacatgccgcggtgtatttatacgggcacctgctatattggaagtaggtccagatgttgaaatattggcggattgccctgttcctgttgacagacccagcattacaatatcatttggggagggtactgagttccttttagttctttaatgagcagtgagccagtgaatatggccatttcttggaaagcaggaagaagagtattcaaaagatcgggtaattgttgcagtgcggcaagggaacatcctcgcaactgctttccacccagaattgacatcagactccagatggcatcgtttcttcttggacatggataaagaatccccagcaaaggcgttttctgcgctctccctgtcgtcatcgtcaagagacactgaaggcctgccaaagaataagccgtttgatctgcccatttttgagtaacgctaaagacaagacaaaccaaaagattgaaggaacgaagaaactgaccgtatttattatcgatcatcatttagccggttacaaaaacagccagctgagaatctgtcatactcagccgaaaaaagtgttgtctggtagctaacttgtacggataaaaaataatcacgctgtgtgctgtacgcaattctcatcagataaagcgaaacattgttttcctgggaattatagttttgctgaaggtgaccagttgaacacttgaacatggtaatactttccccctctatgtgcaacttcgttc

SEQ ID NO: 46271 - DNA, 1000 bp, Zea Mays
ttcgtctcactcactctactcaccaccatggccaagctcgccaactaccacaatctgttccctgcacttcgagagttcgtcggaggtggaaagcctgtctggggaacctgtgctgggctcatctttcttgcaaacaaagcagtagggcaaaaaacaggggggcaggaacttgttggaggattagattgtacagtccaccgaaacttttttgggagtcagcttcaaagctttgagacagagctttccgtgccaaagctttcggagaaggaaggagggaatgatacatgccgcggtgtatttatacgggcacctgctatattggaagtaggtccagatgttgaaatattggcggattgccctgttcctgttgacagacccagcattacaatatcatttggggagggtactgagttccttttagttctttaatgagcagtgagccagtgaatatggccatttcttggaaagcaggaagaagagtattcaaaagatcgggtaattgttgcagtgcggcaagggaacatcctcgcaactgctttccacccagaattgacatcagactccagatggcatcgtttcttcttggacatggataaagaatccccagcaaaggcgttttctgcgctctccctgtcgtcatcgtcaagagacactgaaggcctgccaaagaataagccgtttgatctgcccatttttgagtaacgctaaagacaagacaaaccaaaagattgaaggaacgaagaaactgaccgtatttattatcgatcatcatttagccggttacaaaaacagccagctgagaatctgtcatactcagccgaaaaaagtgttgtctggtagctaacttgtacggataaaaaataatcacgctgtgtgctgtacgcaattctcatcagataaagcgaaacattgttttcctgggaattatagttttgctgaaggtgaccagttgaacacttgaacatggtaatactttccccctctatgtgcaacttcgttc

SEQ ID NO: 46272 - DNA, 1918 bp, Zea Mays
cggcgatctccccgccgacgtgggcgaacggctccacggcgatcggatggccacgagcggccgtcgcctaccctcccacagtcccactcccacactagtccttttcccctgacgtggcagcggcaagtgcacccaaacgtttcgatatcccagagtggtgtggccgccgccggcggcttctttctccccttccattccgctccccgtgacgtcaccgaccaggcaagcactccgctccaccagagccgcctcgcctgtctgtccgacccacacacctaccggagcgcgcgtcccgaggtcggcggagcagggtcgggaggagggtatggcggtggtgggcgtcctcgcgctgcagggatcctacaacgagcacatggccgcgctgaggaggatcggggtgaagggggtggaggtgcgcaagccagagcagctcctcggcatcgactcgctcatcatccccggtggcgagagcaccaccatggccaagctcgccaactaccacaatctgttccctgcacttcgagagttcgtcggaggtggaaagcctgtctggggaacctgtgctgggctcatctttcttgcaaacaaagcagtagggcaaaaaacaggggggcaggaacttgttggaggattagattgtacagtccaccgaaacttttttgggagtcagcttcaaagctttgagacagagctttccgtgccaaagctttcggagaaggaaggagggaatgatacatgccgcggtgtatttatacgggcacctgctatattggaagtaggtccagatgttgaaatattggcggattgccctgttcctgttgacagacccagcattacaatatcatttggggagggtactgagttccttttagttctttaatgagcagtgagccagtgaatatggccatttcttggaaagcaggtacaagatactatggtcagatctgggcatacttgcatataacatgctgattctacatgtggtctctgccttcttgtgtagtcctgattattcaaactggctttgagatctgaaatgatatatagttttaacccgttggccattgcaactcaaatattcagacaaatggactaatgggttcttcgatgattcgatcaaatttgtctcctttggggtattactggtttgctaaagcatctgaatgggctgccctgtcacggcagcatgacatgtgtttttgttcattggcttgtttttctgcatgaaatgtgttcatgtaaccgtgccttttgggaattggccaagtttttccttatattaggaaaaaaacagcgaaagtgctagttggcaatcttgtaacgcttaattccgtattctgaatggggcctgcttatcctctgttgactgacgagaatatatactttcaggaagaagagtattcaaaagatcgggtaattgttgcagtgcggcaagggaacatcctcgcaactgctttccacccagaattgacatcagactccagatggcatcgtttcttcttggacatggataaagaatccccagcaaaggcgttttctgcgctctccctgtcgtcatcgtcaagagacactgaaggcctgccaaagaataagccgtttgatctgcccatttttgagtaacgctaaagacaagacaaaccaaaagattgaaggaacgaagaaactgaccgtatttattatcgatcatcatttagccggttacaaaaacagccagctgagaatctgtcatactcagccgaaaaaagtgttgtctggtagctaacttgtacggataaaaaataatcacgctgtgtgctgtacgcaattctcatcagataaagcgaaacattgttttcctgggaattatagttttgctgaaggtgaccagttgaacacttgaacatggtaatactttccccctctatgtgcaacttcgttc

SEQ ID NO: 46273 - DNA, 1403 bp, Zea Mays
cggcgatctccccgccgacgtgggcgaacggctccacggcgatcggatggccacgagcggccgtcgcctaccctcccacagtcccactcccacactagtccttttcccctgacgtggcagcggcaagtgcacccaaacgtttcgatatcccagagtggtgtggccgccgccggcggcttctttctccccttccattccgctccccgtgacgtcaccgaccaggcaagcactccgctccaccagagccgcctcgcctgtctgtccgacccacacacctaccggagcgcgcgtcccgaggtcggcggagcagggtcgggaggagggtatggcggtggtgggcgtcctcgcgctgcagggatcctacaacgagcacatggccgcgctgaggaggatcggggtgaagggggtggaggtgcgcaagccagagcagctcctcggcatcgactcgctcatcatccccggtggcgagagcaccaccatggccaagctcgccaactaccacaatctgttccctgcacttcgagagttcgtcggaggtggaaagcctgtctggggaacctgtgctgggctcatctttcttgcaaacaaagcagtagtgttgctttcagggcaaaaaacaggggggcaggaacttgttggaggattagattgtacagtccaccgaaacttttttgggagtcagcttcaaagctttgagacagagctttccgtgccaaagctttcggagaaggaaggagggaatgatacatgccgcggtgtatttatacgggcacctgctatattggaagtaggtccagatgttgaaatattggcggattgccctgttcctgttgacagacccagcattacaatatcatttggggagggtactgaggaagaagagtattcaaaagatcgggtaattgttgcagtgcggcaagggaacatcctcgcaactgctttccacccagaattgacatcagactccagatggcatcgtttcttcttggacatggataaagaatccccagcaaaggcgttttctgcgctctccctgtcgtcatcgtcaagagacactgaaggcctgccaaagaataagccgtttgatctgcccatttttgagtaacgctaaagacaagacaaaccaaaagattgaaggaacgaagaaactgaccgtatttattatcgatcatcatttagccggttacaaaaacagccagctgagaatctgtcatactcagccgaaaaaagtgttgtctggtagctaacttgtacggataaaaaataatcacgctgtgtgctgtacgcaattctcatcagataaagcgaaacattgttttcctgggaattatagttttgctgaaggtgaccagttgaacacttgaacatggtaatactttccccctctatgtgcaacttcgttc

SEQ ID NO: 46274 - DNA, 1407 bp, Zea Mays
cggcgatctccccgccgacgtgggcgaacggctccacggcgatcggatggccacgagcggccgtcgcctaccctcccacagtcccactcccacactagtccttttcccctgacgtggcagcggcaagtgcacccaaacgtttcgatatcccagagtggtgtggccgccgccggcggcttctttctccccttccattccgctccccgtgacgtcaccgaccaggcaagcactccgctccaccagagccgcctcgcctgtctgtccgacccacacacctaccggagcgcgcgtcccgaggtcggcggagcagggtcgggaggagggtatggcggtggtgggcgtcctcgcgctgcagggatcctacaacgagcacatggccgcgctgaggaggatcggggtgaagggggtggaggtgcgcaagccagagcagctcctcggcatcgactcgctcatcatccccggtggcgagagcaccaccatggccaagctcgccaactaccacaatctgttccctgcacttcgagagttcgtcggaggtggaaagcctgtctggggaacctgtgctgggctcatctttcttgcaaacaaagcagtagggcaaaaaacaggggggcaggaacttgttggaggattagattgtacagtccaccgaaacttttttgggagtcagactgtttctcttgcagcttcaaagctttgagacagagctttccgtgccaaagctttcggagaaggaaggagggaatgatacatgccgcggtgtatttatacgggcacctgctatattggaagtaggtccagatgttgaaatattggcggattgccctgttcctgttgacagacccagcattacaatatcatttggggagggtactgaggaagaagagtattcaaaagatcgggtaattgttgcagtgcggcaagggaacatcctcgcaactgctttccacccagaattgacatcagactccagatggcatcgtttcttcttggacatggataaagaatccccagcaaaggcgttttctgcgctctccctgtcgtcatcgtcaagagacactgaaggcctgccaaagaataagccgtttgatctgcccatttttgagtaacgctaaagacaagacaaaccaaaagattgaaggaacgaagaaactgaccgtatttattatcgatcatcatttagccggttacaaaaacagccagctgagaatctgtcatactcagccgaaaaaagtgttgtctggtagctaacttgtacggataaaaaataatcacgctgtgtgctgtacgcaattctcatcagataaagcgaaacattgttttcctgggaattatagttttgctgaaggtgaccagttgaacacttgaacatggtaatactttccccctctatgtgcaacttcgttc

SEQ ID NO: 46275 - DNA, 1946 bp, Zea Mays
cggcgatctccccgccgacgtgggcgaacggctccacggcgatcggatggccacgagcggccgtcgcctaccctcccacagtcccactcccacactagtccttttcccctgacgtggcagcggcaagtgcacccaaacgtttcgatatcccagagtggtgtggccgccgccggcggcttctttctccccttccattccgctccccgtgacgtcaccgaccaggcaagcactccgctccaccagagccgcctcgcctgtctgtccgacccacacacctaccggagcgcgcgtcccgaggtcggcggagcagggtcgggaggagggtatggcggtggtgggcgtcctcgcgctgcagggatcctacaacgagcacatggccgttccctgcacttcgagagttcgtcggaggtggaaagcctgtctggggaacctgtgctgggctcatctttcttgcaaacaaagcagtagtgttgctttcagggcaaaaaacaggggggcaggaacttgttggaggattagattgtacagtccaccgaaacttttttgggagtcagactgtttctcttgcagcttcaaagctttgagacagagctttccgtgccaaagctttcggagaaggaaggagggaatgatacatgccgcggtgtatttatacgggcacctgctatattggaagtaggtccagatgttgaaatattggcggattgccctgttcctgttgacagacccagcattacaatatcatttggggagggtactgaggtttgtatgttgctttttttttactagaatactgcaattgtcttcaaatggccaaactgagttctgatatatttctagtaaactagatttttagcatgagcgctcattatttcttctcgttttaacagttccttttagttctttaatgagcagtgagccagtgaatatggccatttcttggaaagcaggtacaagatactatggtcagatctgggcatacttgcatataacatgctgattctacatgtggtctctgccttcttgtgtagtcctgattattcaaactggctttgagatctgaaatgatatatagttttaacccgttggccattgcaactcaaatattcagacaaatggactaatgggttcttcgatgattcgatcaaatttgtctcctttggggtattactggtttgctaaagcatctgaatgggctgccctgtcacggcagcatgacatgtgtttttgttcattggcttgtttttctgcatgaaatgtgttcatgtaaccgtgccttttgggaattggccaagtttttccttatattaggaaaaaaacagcgaaagtgctagttggcaatcttgtaacgcttaattccgtattctgaatggggcctgcttatcctctgttgactgacgagaatatatactttcaggaagaagagtattcaaaagatcgggtaattgttgcagtgcggcaagggaacatcctcgcaactgctttccacccagaattgacatcagactccagatggcatcgtttcttcttggacatggataaagaatccccagcaaaggcgttttctgcgctctccctgtcgtcatcgtcaagagacactgaaggcctgccaaagaataagccgtttgatctgcccatttttgagtaacgctaaagacaagacaaaccaaaagattgaaggaacgaagaaactgaccgtatttattatcgatcatcatttagccggttacaaaaacagccagctgagaatctgtcatactcagccgaaaaaagtgttgtctggtagctaacttgtacggataaaaaataatcacgctgtgtgctgtacgcaattctcatcagataaagcgaaacattgttttcctgggaattatagttttgctgaaggtgaccagttgaacacttgaacatggtaatactttccccctctatgtgcaacttcgttc

SEQ ID NO: 46276 - DNA, 2659 bp, Zea Mays
caataacagatattttggatgagcccttgctcaagtacaatacaaatacaaatggaggccaaagcgactagccccacacgctgcttcattctgtgcactgctgcccgccgtggctcctagcttattctctggaaaagaacgaaggagcaggatcgtgccgagctaagctatggaaggggctgcgagtggtcgctgcaggatgggcatggccatcgcagcagccgtctgcctgatgccgttgctgcagctgtggggttgcgtcgccgtagaggcgaatgcgggaccctatcattttgttaagaggcatttagatgaggtcgaccgcatgaggtacaaggacccaacgcagccgctgaacacgcggatcgacgacctgctggggcggatgacgctggcggagaagatcgggcagatgtcgcagatcgagcgcgagaacgccaccgccgacgtcgtcagcaagtacctcgtaggcagcgtgctcagcggcggcggcagcgtgccggcgaagaacgcgccgccggaggcgtgggtggagatggtgaacgggatgcagcgcgccgcgatgtcgacgcggctcgggatcccggtcatctacggcatcgacgccgtccacggccacggcaacgtgtacaaagccaccatcttcccgcacaacgtcggcctcggctgcaccagggagccagagctggcgcggaggatcggagctgccgtggcgctggaggtcagggccaccggcatcccctacgtcttcgctccctgcgtcgcggtgtgcagggacccgcggtggggccggtgctacgagagcttcagcgaggacccggaggtggtgcgcgacatgaccgccatcatctccgggttccagggcgagatcccggacgcgaccgacgccggccggccctacgtcgcccctggccaccgcaacgtggcggcctgctccaagcactacgtcggcgacggcggcaccactaagggcgtcaacgagggcaacacggtcgcgtccttccacgacctcatggccgtccacatgccgccctactacaacgccgtcatacggggcgtgtcaaccgtcatggtctccttctccagctggaacggcgtcaagatgcacgccaaccacttcctcgtcaccgaccacctcaagaacaggctccgcttcaggggtttcatcatctcggactggcaagggctggacaggatcacgaccccggaccacgccgactacctcctgtccatcaagctgggcatcctggccgggatcgacatggtgatgatcccgtacacgtacacggagttcatcgacgacctcacgctgctggtgcggaacggcaccatccccatgagccgcatcgacgacgccgtgcgccgcatcctgcgcgtcaagttcaccatgggcctcttcgaccacccctacgccgacgccagcctggcgggcgagctcggcaagcaggagcaccgcgacctggcgcgcgaggccgtgcgcaagtccctcgtcctcctcaagaacggcaagccgggcgccggcccgatgctgccgctgcccaagaacggcgccgtcctggtcgccggcagccacgccgacgacctcggcagccagtgcggcgggtggaccatcacctggcagggcctcacggggaacaacctcaccgccgggaccaccatcctcgacggcgtccggcgcgccgtcgcccccggcacggacgtcgtctactccgagaaccccgacgcggcattcctccagcagaaccgcgcccgctttggctacgccatcgtcgtcgtcggcgagcccccctacgccgagacgttcggcgacaacctcaacctgaccatccccgcgcccgggccggacgtcatccggaacgtgtgcggcgccatcaagtgcgtcgttgtgctcgtctccgggcggccgctggtggtggagccgttcgtcgatgtcatcgacgcgctggtggcggcgtggctgccgggcacggaggggcagggcgtcagcgacgtgctgttcggcgactacggcttcaccgggaagctgtccaggacgtggttccggtcggtggaccagctgcccatgaacgtcggcgatgcgcactgcgaggatgcactgttcccgtttggctttggaatcgagacacagccggccacatattagaaggttattgcatggcccaaaattgagctaaattcttggactttgttagcgtcggtagtgggaagcttctagaagagagcaggaaggagtgaggattcgggaagaagacttggaaacgaggaaagcagggaggaaggcgaggctgagaactagtgtctttgtctgttcattaattgttcgataccttcttacaatactagagagagcttataaactaccacccagtccggccaaatacacgacccattcggacccaaatactcatgtgttgtctcgcctctaccgctccgtcgttgtggcaacgtcagtatcgttggtcagctttttcatcttcagtgctccatcttcagtgctggtgagcttctgacgtctttcttgtattgttgctgacagacttccccgtgaaatatccaaagagagaactatcattcgtatccgagttttattactagatccttcagtgtagtttgtcgtagacaataattaataatgtaatatggtctctcttcggtgaca

SEQ ID NO: 46277 - DNA, 2639 bp, Zea Mays
caataacagatattttggatgagcccttgctcaagtacaatacaaatacaaatggaggccaaagcgactagccccacacgctgcttcattctgtgcactgctgcccgccgtggctcctagcttattctctggaaaagaacgaaggagcaggatcgtgccgagctaagctatggaaggggctgcgagtggtcgctgcaggatgggcatggccatcgcagcagccgtctgcctgatgccgttgctgcagctgtggggttgcgtcgccgtagaggcgaatgcggaggcatttagatgaggtcgaccgcatgaggtacaaggacccaacgcagccgctgaacacgcggatcgacgacctgctggggcggatgacgctggcggagaagatcgggcagatgtcgcagatcgagcgcgagaacgccaccgccgacgtcgtcagcaagtacctcgtaggcagcgtgctcagcggcggcggcagcgtgccggcgaagaacgcgccgccggaggcgtgggtggagatggtgaacgggatgcagcgcgccgcgatgtcgacgcggctcgggatcccggtcatctacggcatcgacgccgtccacggccacggcaacgtgtacaaagccaccatcttcccgcacaacgtcggcctcggctgcaccagggagccagagctggcgcggaggatcggagctgccgtggcgctggaggtcagggccaccggcatcccctacgtcttcgctccctgcgtcgcggtgtgcagggacccgcggtggggccggtgctacgagagcttcagcgaggacccggaggtggtgcgcgacatgaccgccatcatctccgggttccagggcgagatcccggacgcgaccgacgccggccggccctacgtcgcccctggccaccgcaacgtggcggcctgctccaagcactacgtcggcgacggcggcaccactaagggcgtcaacgagggcaacacggtcgcgtccttccacgacctcatggccgtccacatgccgccctactacaacgccgtcatacggggcgtgtcaaccgtcatggtctccttctccagctggaacggcgtcaagatgcacgccaaccacttcctcgtcaccgaccacctcaagaacaggctccgcttcaggggtttcatcatctcggactggcaagggctggacaggatcacgaccccggaccacgccgactacctcctgtccatcaagctgggcatcctggccgggatcgacatggtgatgatcccgtacacgtacacggagttcatcgacgacctcacgctgctggtgcggaacggcaccatccccatgagccgcatcgacgacgccgtgcgccgcatcctgcgcgtcaagttcaccatgggcctcttcgaccacccctacgccgacgccagcctggcgggcgagctcggcaagcaggagcaccgcgacctggcgcgcgaggccgtgcgcaagtccctcgtcctcctcaagaacggcaagccgggcgccggcccgatgctgccgctgcccaagaacggcgccgtcctggtcgccggcagccacgccgacgacctcggcagccagtgcggcgggtggaccatcacctggcagggcctcacggggaacaacctcaccgccgggaccaccatcctcgacggcgtccggcgcgccgtcgcccccggcacggacgtcgtctactccgagaaccccgacgcggcattcctccagcagaaccgcgcccgctttggctacgccatcgtcgtcgtcggcgagcccccctacgccgagacgttcggcgacaacctcaacctgaccatccccgcgcccgggccggacgtcatccggaacgtgtgcggcgccatcaagtgcgtcgttgtgctcgtctccgggcggccgctggtggtggagccgttcgtcgatgtcatcgacgcgctggtggcggcgtggctgccgggcacggaggggcagggcgtcagcgacgtgctgttcggcgactacggcttcaccgggaagctgtccaggacgtggttccggtcggtggaccagctgcccatgaacgtcggcgatgcgcactgcgaggatgcactgttcccgtttggctttggaatcgagacacagccggccacatattagaaggttattgcatggcccaaaattgagctaaattcttggactttgttagcgtcggtagtgggaagcttctagaagagagcaggaaggagtgaggattcgggaagaagacttggaaacgaggaaagcagggaggaaggcgaggctgagaactagtgtctttgtctgttcattaattgttcgataccttcttacaatactagagagagcttataaactaccacccagtccggccaaatacacgacccattcggacccaaatactcatgtgttgtctcgcctctaccgctccgtcgttgtggcaacgtcagtatcgttggtcagctttttcatcttcagtgctccatcttcagtgctggtgagcttctgacgtctttcttgtattgttgctgacagacttccccgtgaaatatccaaagagagaactatcattcgtatccgagttttattactagatccttcagtgtagtttgtcgtagacaataattaataatgtaatatggtctctcttcggtgaca

SEQ ID NO: 46278 - DNA, 2412 bp, Zea Mays
cttcagcacagatggtttttgatgctgctttgagaacatgtgggcagaaggaagtgctctattgcttaatgtgcactgaactctctacctatggtaaatggattgaagccaagaacattctagaaatggcacttgaaatgagggtctctatccagagtttcccatataagcagataatttcagggctctgtgaagttggggaggtggatcttgcacatagccttctcaagttgttaatagctaaacgacatttgtttgatccagcagtgttcatgccagtgatagatgcattaggtgataggggaaagaaacaggatgttgatatgctgtcagcaaaaatgatggaaatggctgaccgtaatgatggtcttggaactgattctggtaagattacccctggaagctgtaagcatgagcatgacaggaatggtgaaagcgattggcgtaatcttttgcacagagatgacagtgcccgcacgattatgaaaattacaaagagagtgcggacagggtggggtcaaagaggcaatgtatatgagcataaacagcaacagggtgatggcttttatgtactcgagaacactggctaagcgttatgtgatcttatcaaactgtccaagtaggcaagtactgcagcgctataattttgtgctaccatctgagacacagcttttgttctatcatggattcttcatcactgtcgggagctcagtttatatctggtttggtcatgggcatcactgggctctcttcagacatacctgtggtggtgactgcgaacaacattgcaacgaggctgtcgctcccctcagcggcatcgtcaacctcaggtggcggtcgtgtaaggtgctccgcgacgcaacggtgacaagggaagttcagctatgcatggccgtgcggagagaatggaggctgcaccggtgacgaggttcatgtccgtgcttcggcggtgtgcgacaagcggcaacccgaggcattggttaaccgcgcaggcatgagactttcccttcttcggtctaaactgcgtcagcttttgcgggttcttcacctttagggatcagtacaaggactatattgttaaacacctccgaaaatataaatcacccccgttgaggagctcaagaatcgcccttgaaatttcgtctctcagcaagttccagcgtcgacgatagaagccaacggcaaagcaattgactgggccatggagctttatttggcttcagcatgaaaaggacttccttaatttatgtccctgtgaaagatttgaagggcttatctactggagacgttcacttgtattgcagaaattgttcgtcaaggttgacaaaacagccactaagtggtttgcactttgcaccactagaaatggtagcttgttctccccttggtagagattttgttgatatgaaaaaagctatttttgatgttagtgacgaaaacgatcataccgctgggaagataaagttgaagaattcagaagagcaagcaaagatcatagctacacatgcacaaccgcctactattttggaagaggggcctagtgttagtagtagtgaaacaattggagtcagtcagactaatcagcctgtcacttctcagatagaaactgatactgatgtgtactttgagaaggagcttgatttgttgctgggagatttgggccattgttgttgtgtcaatggatccaatgggaaagttgaagatagcccttcacaaatctccttgaggaacaggcagaatatgttggagattaaaagagattacaaactaacaaaaactatttctcttggtagtagctttgttattaaagcttcaaaccttttgaatgattttgagtgggttgaacttttttgtggtcgatgttcatcacctcttggctcatacccttctcagagttcgcttgttccggctgatggccgtgtacgactcttcaaatgctacacatctacagaaattcctgtaacagggtctcatgatgtgtttagggggcatacattggaaagagtttttgtgaatctgctgctcgaagtcgcagaagatgaaatatcttttcggacagtagtcagagatttgaaaaccaaaaggccaatgctgcaattagttcttcttagctcaaaagcatggttatcttctggttggtgctatgaaaatgataccaatggttcacatggaacaacagatctgcagcctagtgttaaactcttgtattctgattataggaatgcttcagaagcagacttaaggacagtagaagagtgggcatccaaataccgggctgaagagctgtacatgatgaggcggcaaatagacgaactcactgaatgcctgggctcggcaatggacaactttccagtttcttgttcttcccttgaaggcttgctgctctcttctcttaggcgctgacttgagtat

SEQ ID NO: 46279 - DNA, 1643 bp, Zea Mays
cttcagcacagatggtttttgatgctgctttgagaacatgtgggcagaaggaagtgctctattgcttaatgtgcactgaactctctacctatggtaaatggattgaagccaagaacattctagaaatggcacttgaaatgagggtctctatccagagtttcccatataagcagataatttcagggctctgtgaagttggggaggtggatcttgcacatagccttctcaagttgttaatagctaaacgacatttgtttgatccagcagtgttcatgccagtgatagatgcattaggtgataggggaaagaaacaggatgttgatatgctgtcagcaaaaatgatggaaatggctgaccgtaatgatggtcttggaactgattctggtaagattacccctggaagctgtaagcatgagcatgacaggaatggtgaaagcgattggcgtaatcttttgcacagagatgacagtgcccgcacgattatgaaaattacaaagagagtgcggacagggtggggtcaaagaggcaatgtatatgagcataaacagcaacagggtgatggcttttatgtactcgagaacactggctaagcgttatgtgatcttatcaaactgtccaagtaggcaagtactgcagcgctataattttgtgctaccatctgagacacagcttttgttctatcatggattcttcatcactgtcgggagctcagtttatatctggtttggtcatgggcatcactgggctctcttcagacatacctgtggtggtgactgcgaacaacattgcaacgaggctgtcgctcccctcagcggcatcgtcaacctcaggtgtaaggtgctccgcgacgcaacggtgacaagggaagttcagctatgcatggccgtgcggagagaatggaggctgcaccggtgacgaggttcatgtccgtgcttcggcggtgtgcgacaagcggcaacccgaggcattggttaaccgcgcaggcatgagactttcccttcttcggtctaaactgcgtcagcttttgcgggttcttcacctttagggatcagtacaaggactatattgttaaacacctccgaaaatataaatcacccccgttgaggagctcaagaatcgcccttgaaatttcgtctctcagcaagttccagcgtcgacgatagaagccaacggcaaagcaattgactgggccatggagctttatttggcttcagcatgaaaaggacttccttaatttatgtccctgtgaaaggtgaacataggacttccttaatcgttttcagaatcagttacattcctggggacatcacacaacacctcctctggattagtatcttgtgtcgagaaaacacgtttgtagaattcagctgctcactttgatcaatgcaaactgaaccatcctggcgttaaagggcggtaaatttaggccctgttcggttgtaccggaataagccatgattcattccagctcatcaaaatctatataaattagagaagtaatccggctaggaattaatccggggctccaatccaaaacaaccgaacagggccttatttgctcgttccctttgtcgtgctttggcctggaagaaccatgtatccaatcaccagccagcaatagcgtgcaaacactgatgcattgt

SEQ ID NO: 46280 - DNA, 2107 bp, Zea Mays
ctttaccttaaatcggaacgggctggactagaaactggtgtcagttcgttggggctgtcgttgttgcttgaattctaagcagctctgcgcttgctcgtcgcagtgctgcttagatctctaggccccgatgcgtgttcttcagcacctcaatccaagggccggagttctggaatctttgggtcaacctgaagcacatttgcacacatgtaccatggatgttcctcagttgactgctgaaggtgccacacaacttggagatagagtgtctttattacaccagacagggacacttcagtcagaaactccttgtctgaccttaggccgtgattctaatgcagtatcaatggagaagctgcatgctagcgattgcttgccctgtggtaaagagaatgtcgggacaggactacaacctaaatctgatccagaacgtgctgataataggatgagtgttgcacgtcttgggttggaccttaacacagtagatagtcctgatgtagcagagcctaaccctttcttcccttacaagaaattggggcagtcaaaagtcagcgatccatcggaatgtggcagcactactggtgctatagaagaaagcgagtcacacagaaagtggagagaaatgaagcagaatggctttctttcttcatttcatgggaatgcggtggtgcctaggccacgtggtcgaccccccaaaaggaaaagggatgatgaattcaaaaagagcagttccacacagcatgtacaggctaacaagtctgtgaaggttgctgctcctagtggtctattatctgggctaaaccctggaatcattaaccatgtgagaaatagcaagcaagtttactccataataaaggctatggtacactctgagaggcttgagaatgagaaccactctagtcaaacaggtgaaagagggagagaagttaatgagagaattcaggatcagaaatatggtggtggtttcatgaagtgccatttgttgataaatgataataatgcggtgtttcaccaaacactgcctaacacatcgcagttccttgcacaggatggtgatagtcttaaactgcaactcccatccgcagtcactatgtcttcagataggaccttcagtacgtcagctgatgatcctgcatctaatcatgattacatgactgtactgtcagtaaaagcggctagtgttgcttctcaatggttggaattactgcatcaggacataaggggacgtcttgctgctttaaagcgcagcaggaagagagtcagaaatgctcttcacacggaactgccatacctaaccgcgacagaattttcatctaatcaagagaacgaatcatccattgcaaatacttctgagattggatgtactgacaaagcggtttcagaagctcatgtggcacgatggaggtctctgtttgttcagatggacaaaacacttcaggaggaagggaaacagctggagaacaagttgaagcaagtgcaagaaatgcaattgaattgtgataaaggcctcaaacacatgacctgtgaagctcctctgctaggacctatggctgaactatggaagctgaagaacccaaatatttccgagagcgagtgggcggtgcaagccgctgccgcatcgatctactcgacctgcaacatggtcatgagaacggagaacgtgccttgcttttgataccacacttgtactttagttttttgctttgggcgtgttcggctggctacaagccgacactgttgcagctgtttggattgctgcagctgcaatccatagagagaaaaatactgtagaagccgcagccgcagccggattgcagccgcagcaagccgcagcgaacaagcttacctcaaaccaggtcttctttcttacctttaccctatgtgaatcgtgatcccttgtccattacagtagtggcgactggcgagtgatgtaacaagaacaaacttgtgatgtatgttatcccgagcctacaatttcacaggcacatgaaacagcacattctttttcatggagttgaggatattcatatcctaccgttttggttcggtgagatggtcgaaatagagattgccaccttgttaaatttttaactgacatggtcgatcttct

SEQ ID NO: 46281 - DNA, 2515 bp, Zea Mays
ggcgcagctataaatcccccacgcgaatgtcgcaatcccgtccgatccatctcgatttgaaaaccgcgcaggagcttcgcgtctcttcctccctcactaccgctccgctccgctccaaaaccctagacggcgcccgcagcccggagccccggatccgcgtcccgctcccccggcgtctctgcccgctgtcgccggctccccgatggacctcgcggggccgcgcggggccacggatcccgccggatcgagggccgcgccgccgcacgaggaattggacgggagaggaggaggggcgtgcagcggcgcggcagcagtggaggggagcgcgtggcggctggcggtcgctggactgggagatccaagggccggagttctggaatctttgggtcaacctgaagcacatttgcacacatgtaccatggatgttcctcagttgactgctgaaggtgccacacaacttggagatagagtgtctttattacaccagacagggacacttcagtcagaaactccttgtctgaccttaggccgtgattctaatgcagtatcaatggagaagctgcatgctagcgattgcttgccctgtggtaaagagaatgtcgggacaggactacaacctaaatctgatccagaacgtgctgataataggatgagtgttgcacgtcttgggttggaccttaacacagtagatagtcctgatgtagcagagcctaaccctttcttcccttacaagaaattggggcagtcaaaagtcagcgatccatcggaatgtggcagcactactggtgctatagaagaaagcgagtcacacagaaagtggagagaaatgaagcagaatggctttctttcttcatttcatgggaatgcggtggtgcctaggccacgtggtcgaccccccaaaaggaaaagggatgatgaattcaaaaagagcagttccacacagcatgtacaggctaacaagtctgtgaaggttgctgctcctagtggtctattatctgggctaaaccctggaatcattaaccatgtgagaaatagcaagcaagtttactccataataaaggctatggtacactctgagaggcttgagaatgagaaccactctagtcaaacaggtgaaagagggagagaagttaatgagagaattcaggatcagaaatatggtggtggtttcatgaagtgccatttgttgataaatgataataatgcggtgtttcaccaaacactgcctaacacatcgcagttccttgcacaggatggtgatagtcttaaactgcaactcccatccgcagtcactatgtcttcagataggaccttcagtacgtcagctgatgatcctgcatctaatcatgattacatgactgtactgtcagtaaaagcggctagtgttgcttctcaatggttggaattactgcatcaggacataaggggacgtcttgctgctttaaagcgcagcaggaagagagtcagaaatgctcttcacacggaactgccatacctaaccgcgacagaattttcatctaatcaagagaacgaatcatccattgcaaatacttctgagattggatgtactgacaaagcggtttcagaagctcatgtggcacgatggaggtctctgtttgttcagatggacaaaacacttcaggaggaagggaaacagctggctcgtcacgcgcgttgaccgcatgcatgcatatgattggtgacctgcaccggccgagcgtagtctgcatgcgcgagtacaacctagttattttccaccacttccacctgcacacgcagagatgctaggagagagcttcgctggtcacccaggccgacgcgagcctgattcccacgaacacatcaaccaatcacgcagattgagaacaagttgaagcaagtgcaagaaatgcaattgaattgtgataaaggcctcaaacacatgacctgtgaagctcctctgctaggacctatggctgaactatggaagctgaagaacccaaatatttccgagagcgagtgggcggtgcaagccgctgccgcatcgatctactcgacctgcaacatggtcatgagaacggagaacgtgccttgcttttgataccacacttgtactttagttttttgctttgggcgtgttcggctggctacaagccgacactgttgcagctgtttggattgctgcagctgcaatccatagagagaaaaatactgtagaagccgcagccgcagccggattgcagccgcagcaagccgcagcgaacaagcttacctcaaaccaggtcttctttcttacctttaccctatgtgaatcgtgatcccttgtccattacagtagtggcgactggcgagtgatgtaacaagaacaaacttgtgatgtatgttatcccgagcctacaatttcacaggcacatgaaacagcacattctttttcatggagttgaggatattcatatcctaccgttttggttcggtgagatggtcgaaatagagattgccaccttgttaaatttttaactgacatggtcgatcttct

SEQ ID NO: 46282 - DNA, 2435 bp, Zea Mays
cgcccacctccactcgaattcaaaatcaaagaaaaagaaaacgcaggcgcagctataaatcccccacgcgaatgtcgcaatcccgtccgatccatctcgatttgaaaaccgcgcaggagcttcgcgtctcttcctccctcactaccgctccgctccgctccaaaaccctagacggcgcccgcagcccggagccccggatccgcgtcccgctcccccggcgtctctgcccgctgtcgccggctccccgatggacctcgcggggccgcgcggggccacggatcccgccggatcgagggccgcgccgccgcacgaggaattggacgggagaggaggaggggcgtgcagcggcgcggcagcagtggaggggagcgcgtggcggctggcggtcgctggactgggagatccaagggccggagttctggaatctttgggtcaacctgaagcacatttgcacacatgtaccatggatgttcctcagttgactgctgaaggtgccacacaacttggagatagagtgtctttattacaccagacagggacacttcagtcagaaactccttgtctgaccttaggccgtgattctaatgcagtatcaatggagaagctgcatgctagcgattgcttgccctgtggtaaagagaatgtcgggacaggactacaacctaaatctgatccagaacgtgctgataataggatgagtgttgcacgtcttgggttggaccttaacacagtagatagtcctgatgtagcagagcctaaccctttcttcccttacaagaaattggggcagtcaaaagtcagcgatccatcggaatgtggcagcactactggtgctatagaagaaagcgagtcacacagaaagtggagagaaatgaagcagaatggctttctttcttcatttcatgggaatgcggtggtgcctaggccacgtggtcgaccccccaaaaggaaaagggatgatgaattcaaaaagagcagttccacacagcatgtacaggctaacaagtctgtgaaggttgctgctcctagtggtctattatctgggctaaaccctggaatcattaaccatgtgagaaatagcaagcaagtttactccataataaaggctatggtacactctgagaggcttgagaatgagaaccactctagtcaaacaggtgaaagagggagagaagttaatgagagaattcaggatcagaaatatggtggtggtttcatgaagtgccatttgttgataaatgataataatgcggtgtttcaccaaacactgcctaacacatcgcagttccttgcacaggatggtgatagtcttaaactgcaactcccatccgcagtcactatgtcttcagataggaccttcagtacgtcagctgatgatcctgcatctaatcatgattacatgactgtactgtcagtaaaagcggctagtgttgcttctcaatggttggaattactgcatcaggacataaggggacgtcttgctgctttaaagcgcagcaggaagagagtcagaaatgctcttcacacggaactgccatacctaaccgcgacagaattttcatctaatcaagagaacgaatcatccattgcaaatacttctgagattggatgtactgacaaagcggtttcagaagctcatgtggcacgatggaggtctctgtttgttcagatggacaaaacacttcaggaggaagggaaacagctggctcgtcacgcgcgttgaccgcatgcatgcatatgattggtgacctgcaccggccgagcgtagtctgcatgcgcgagagaacaagttgaagcaagtgcaagaaatgcaattgaattgtgataaaggcctcaaacacatgacctgtgaagctcctctgctaggacctatggctgaactatggaagctgaagaacccaaatatttccgagagcgagtgggcggtgcaagccgctgccgcatcgatctactcgacctgcaacatggtcatgagaacggagaacgtgccttgcttttgataccacacttgtactttagttttttgctttgggcgtgttcggctggctacaagccgacactgttgcagctgtttggattgctgcagctgcaatccatagagagaaaaatactgtagaagccgcagccgcagccggattgcagccgcagcaagccgcagcgaacaagcttacctcaaaccaggtcttctttcttacctttaccctatgtgaatcgtgatcccttgtccattacagtagtggcgactggcgagtgatgtaacaagaacaaacttgtgatgtatgttatcccgagcctacaatttcacaggcacatgaaacagcacattctttttcatggagttgaggatattcatatcctaccgttttggttcggtgagatggtcgaaatagagattgccaccttgttaaatttttaactgacatggtcgatcttct

SEQ ID NO: 46283 - DNA, 162 bp, Zea Mays
gcaggtgttgtcctagtagcagaacattgttttcttctttctctgcaacaggaagcaaggccatcagagactgatacagggattataacacggataggaaaacatcatgatgtagcactgggaacctgagccctggcaatctccttgctgtcgatgttcgcg

SEQ ID NO: 46284 - DNA, 1095 bp, Zea Mays
ctttagcataaaaattactcacataatcacatgccacactatacgaagacatcagctccccccccctatgtttctaaaatctttcccaaattcaaacaccccttaatcttatactttgactgccattagtataagattgaagcctcctaatttgaaggggtgtttatcacaaacaaacttgtacatgagtatttgaaaaccttcaaacgctaatcctagcgagttataagttagtacaaaagggaggcaaatgagttctggacccgagcaggaaagaaaccccactcccaactcgtttccctccacccacatggcgctccaggcgcaggcctccccgtcgccgtccacctcgccgacgcgcgagaggacgggcagcggcgagtggcctgacgacgtggacaagctccccgccggcgcatctgcctctccgccctactcctccgacgccgtcgagctcgtcgtcgtcgcctccacgcaccacgccgccgccgccgccaggtactcggaagccgtgaacgtgatcggtttcctgtactcggtgttccagttcgtcgcgctcgtcgagctcatgaggaggaacaagcatttgatcccccatcgcaagcgtggtctcttcgacttcaccatggaccaggtgctagcataccttctgatatcgtcgtcgtcgtccgcaaccgctcgagtgagcgacctgatcgacaactgggggagcgaccctttcccgacgatggcgaacggctccatcgccatatccttcatggcgttcgcggtgttcggcatctgctccctcatctccgcgtacaacctgttccgccgagacatgtagccgccagccgctctcgtcaacctcttgttgcccttccattgtatttgtggacacgagttttcggcgcggacttcacattgtgctgtacgtgtgtgtatatgtgtgtgtgtgatgggaactctgaactgctagcaaataatatatctctacacggtgaagggcagctcacttgtatggtgaaccgaatgtgggaaaaagaagttctagtggctctgaatcgaagtagttttgctgcatggcatcaagaccaaaggtaatcgattggtggc

SEQ ID NO: 46285 - DNA, 1838 bp, Zea Mays
gttcgttgatactcttcactccgtcgttcgttgacaatacctttgtgggcttggtgcgtggacttccactggatcccaatcagcttatcacctcacctttggtgcggactaaatcgtttccacttaagcatgcgacggaagtaatcttatcaatttatcataacactggacatggacttcttcacggaatatggggaggcgagtcagtatcaaatccaagaggtcattggtaagggaagttatggagtagttgctgctgcaattgatagtcacactggggagcgggttgcgatcaagaagataaatgatatttttggtaatgtctcggatgctgctcgcattttgcgggaaatcaagcttcttcgtctgcttcgtcacccaaacatagtccagattaagcacattatgttgccccctacccgaagggagttcaaagatatctatgttgtttttgagctcatggagtctgacctgcatcaagtgatcaaagcaaatgataacctgactccagagcatcaccgctttttcctgtatcaacttattcgtgctctcaagtacatgcattcagcccatgtatttcatcgtgatttaaagcccaggaacatactggccaattcagacagcaaactaaagatctgcgactttggacttgcacgtgcatcatttaacgactctctttcagctatctattggacagattatgtcgcaacaaggtggtaccgggctcctgaattatgtggctcctttttctccagtattcacagtgataaggccagggaatatttgcttggcatgccgaggaagcgccctattccattttctcataagttccgtaatgccgatcctctggctctccggttgctagagcgtttacttgcatttgacccgaaagatcgacctactgctgaagaggctttagctgatccatacttcagtggcctttctaaattggaacttgagccttcagcacaaccaatttcgaaggttgactttgaattcgagggaaggaaactaacaaaggctggtgtgagagaaatgatatatcgggagattttggagtaccatccccagatgcttcaggagtacatcgaaggtggagatcagattcacttcctatacccaagtggggtcgatcgcttccagcgacagtttgctcatctcgaggagaactacaggagaggagtagctagcaccccgccgcgaaggcagcccacatctctgccgagggagcgagtctgctcatcagaagatggccacagtcaggactctgacagcgaagagcagagagcagcatcctacgttgcccgaacaaccataagccctccaagatcacaagaggagggcggcaagctccagcctgcctaccagagcgccgccgccgccgcagactcctgcgccaagagctatctgaagggtgccgctagtatcagtggtgcttccaggcgtggcatcaagggggataatggccgaaaggagaaggaatctccgaggctgtgaaagaggtggcgcaggctcgtcacctgttaggcaaaagaggtagcaatggcgccaatgcgactgcaacgtgggatgtcttagtcatcatgcatccaacaacgcaggggggcagtacaagtatgcaggtcatcctagctaggtcgcccaaattaaagcagcctgcttggaggaattagatttgtgtactgttgttaagttttttttttttttttttttgaattcaactgctagattctggcagatctgtcaaccgcactctccttggtttcccaaaatttactggtttgaacaagtttattactgaatctcgctgtggtgcttcgtctagcattggactggac

SEQ ID NO: 46286 - DNA, 1713 bp, Zea Mays
gtcgttcgttgatactcttcactccgtcgttcgttgaacactggacatggacttcttcacggaatatggggaggcgagtcagtatcaaatccaagaggtcattggtaagggaagttatggagtagttgctgctgcaattgatagtcacactggggagcgggttgcgatcaagaagataaatgatatttttggtaatgtctcggatgctgctcgcattttgcgggaaatcaagcttcttcgtctgcttcgtcacccaaacatagtccagattaagcacattatgttgccccctacccgaagggagttcaaagatatctatgttgtttttgagctcatggagtctgacctgcatcaagtgatcaaagcaaatgataacctgactccagagcatcaccgctttttcctgtatcaacttattcgtgctctcaagtacatgcattcagcccatgtatttcatcgtgatttaaagcccaggaacatactggccaattcagacagcaaactaaagatctgcgactttggacttgcacgtgcatcatttaacgactctctttcagctatctattggacagattatgtcgcaacaaggtggtaccgggctcctgaattatgtggctcctttttctccagtattcacagtgataaggccagggaatatttgcttggcatgccgaggaagcgccctattccattttctcataagttccgtaatgccgatcctctggctctccggttgctagagcgtttacttgcatttgacccgaaagatcgacctactgctgaagaggctttagctgatccatacttcagtggcctttctaaattggaacttgagccttcagcacaaccaatttcgaaggttgactttgaattcgagggaaggaaactaacaaaggctggtgtgagagaaatgatatatcgggagattttggagtaccatccccagatgcttcaggagtacatcgaaggtggagatcagattcacttcctatacccaagtggggtcgatcgcttccagcgacagtttgctcatctcgaggagaactacaggagaggagtagctagcaccccgccgcgaaggcagcccacatctctgccgagggagcgagtctgctcatcagaagatggccacagtcaggactctgacagcgaagagcagagagcagcatcctacgttgcccgaacaaccataagccctccaagatcacaagaggagggcggcaagctccagcctgcctaccagagcgccgccgccgccgcagactcctgcgccaagagctatctgaagggtgccgctagtatcagtggtgcttccaggcgtggcatcaagggggataatggccgaaaggagaaggaatctccgaggctgtgaaagaggtggcgcaggctcgtcacctgttaggcaaaagaggtagcaatggcgccaatgcgactgcaacgtgggatgtcttagtcatcatgcatccaacaacgcaggggggcagtacaagtatgcaggtcatcctagctaggtcgcccaaattaaagcagcctgcttggaggaattagatttgtgtactgttgttaagttttttttttttttttttttgaattcaactgctagattctggcagatctgtcaaccgcactctccttggtttcccaaaatttactggtttgaacaagtttattactgaatctcgctgtggtgcttcgtctagcattggactggac

SEQ ID NO: 46287 - DNA, 1785 bp, Zea Mays
cttcgtcgttcgttgatactcttcactccgtcgttcgttgacaatacctttgtgggcttggtgcgtggacttccactggatcccaatcagcttatcacctcacctttgaacactggacatggacttcttcacggaatatggggaggcgagtcagtatcaaatccaagaggtcattggtaagggaagttatggagtagttgctgctgcaattgatagtcacactggggagcgggttgcgatcaagaagataaatgatatttttggtaatgtctcggatgctgctcgcattttgcgggaaatcaagcttcttcgtctgcttcgtcacccaaacatagtccagattaagcacattatgttgccccctacccgaagggagttcaaagatatctatgttgtttttgagctcatggagtctgacctgcatcaagtgatcaaagcaaatgataacctgactccagagcatcaccgctttttcctgtatcaacttattcgtgctctcaagtacatgcattcagcccatgtatttcatcgtgatttaaagcccaggaacatactggccaattcagacagcaaactaaagatctgcgactttggacttgcacgtgcatcatttaacgactctctttcagctatctattggacagattatgtcgcaacaaggtggtaccgggctcctgaattatgtggctcctttttctccagtattcacagtgataaggccagggaatatttgcttggcatgccgaggaagcgccctattccattttctcataagttccgtaatgccgatcctctggctctccggttgctagagcgtttacttgcatttgacccgaaagatcgacctactgctgaagaggctttagctgatccatacttcagtggcctttctaaattggaacttgagccttcagcacaaccaatttcgaaggttgactttgaattcgagggaaggaaactaacaaaggctggtgtgagagaaatgatatatcgggagattttggagtaccatccccagatgcttcaggagtacatcgaaggtggagatcagattcacttcctatacccaagtggggtcgatcgcttccagcgacagtttgctcatctcgaggagaactacaggagaggagtagctagcaccccgccgcgaaggcagcccacatctctgccgagggagcgagtctgctcatcagaagatggccacagtcaggactctgacagcgaagagcagagagcagcatcctacgttgcccgaacaaccataagccctccaagatcacaagaggagggcggcaagctccagcctgcctaccagagcgccgccgccgccgcagactcctgcgccaagagctatctgaagggtgccgctagtatcagtggtgcttccaggcgtggcatcaagggggataatggccgaaaggagaaggaatctccgaggctgtgaaagaggtggcgcaggctcgtcacctgttaggcaaaagaggtagcaatggcgccaatgcgactgcaacgtgggatgtcttagtcatcatgcatccaacaacgcaggggggcagtacaagtatgcaggtcatcctagctaggtcgcccaaattaaagcagcctgcttggaggaattagatttgtgtactgttgttaagttttttttttttttttttttgaattcaactgctagattctggcagatctgtcaaccgcactctccttggtttcccaaaatttactggtttgaacaagtttattactgaatctcgctgtggtgcttcgtctagcattggactggac

SEQ ID NO: 46288 - DNA, 1987 bp, Zea Mays
gctttacccctcttatttctcttcccatttcactttccccttcctctacccactctctcgatctctagcgccgcttcgtcgttcgttgatactcttcactccgtcgttcgttgattcatttttagacataaaaacctagtacaaattatgatgtttacagaacactggacatggacttcttcacggaatatggggaggcgagtcagtatcaaatccaagaggtcattggtaagggaagttatggagtagttgctgctgcaattgatagtcacactggggagcgggttgcgatcaagaagataaatgatatttttggtaatgtctcggatgctgctcgcattttgcgggaaatcaagcttcttcgtctgcttcgtcacccaaacatagtccagattaagcacattatgttgccccctacccgaagggagttcaaagatatctatgttgtttttgagctcatggagtctgacctgcatcaagtgatcaaagcaaatgataacctgactccagagcatcaccgctttttcctgtatcaacttattcgtgctctcaagtacatgcattcagcccatgtatttcatcgtgatttaaagcccaggaacatactggccaattcagacagcaaactaaagatctgcgactttggacttgcacgtgcatcatttaacgactctctttcagctatctattggacagattatgtcgcaacaaggtggtaccgggctcctgaattatgtggctcctttttctccagttacacccctgcaattgatatttggagtatagggtgcatttttgctgaagttctcaccggaacgccattgtttcctgggaggaatgttgtgcaccaattagacttaataacagatctccttggaacaccatcgtttagatccttatcccagattcacagtgataaggccagggaatatttgcttggcatgccgaggaagcgccctattccattttctcataagttccgtaatgccgatcctctggctctccggttgctagagcgtttacttgcatttgacccgaaagatcgacctactgctgaagaggctttagctgatccatacttcagtggcctttctaaattggaacttgagccttcagcacaaccaatttcgaaggttgactttgaattcgagggaaggaaactaacaaaggctggtgtgagagaaatgatatatcgggagattttggagtaccatccccagatgcttcaggagtacatcgaaggtggagatcagattcacttcctatacccaagtggggtcgatcgcttccagcgacagtttgctcatctcgaggagaactacaggagaggagtagctagcaccccgccgcgaaggcagcccacatctctgccgagggagcgagtctgctcatcagaagatggccacagtcaggactctgacagcgaagagcagagagcagcatcctacgttgcccgaacaaccataagccctccaagatcacaagaggagggcggcaagctccagcctgcctaccagagcgccgccgccgccgcagactcctgcgccaagagctatctgaagggtgccgctagtatcagtggtgcttccaggcgtggcatcaagggggataatggccgaaaggagaaggaatctccgaggctgtgaaagaggtggcgcaggctcgtcacctgttaggcaaaagaggtagcaatggcgccaatgcgactgcaacgtgggatgtcttagtcatcatgcatccaacaacgcaggggggcagtacaagtatgcaggtcatcctagctaggtcgcccaaattaaagcagcctgcttggaggaattagatttgtgtactgttgttaagttttttttttttttttttttgaattcaactgctagattctggcagatctgtcaaccgcactctccttggtttcccaaaatttactggtttgaacaagtttattactgaatctcgctgtggtgcttcgtctagcattggactggac

SEQ ID NO: 46289 - DNA, 2155 bp, Zea Mays
caacagtctaaaaatatttggatttttctgcatttttctctggatttgtggatctgggatctgttcccttttgtcgcacgaattcttcgttttttccatatccagggtgaaaatcatgtcacgtttaaatggtgatgcatcagatagggtgtggatggctggaaccccatttctctcttcattgttaattaatatatacccatattttttggacagctttacccctcttatttctcttcccatttcactttccccttcctctacccactctctcgatctctagcgccgcttcgtcgttcgttgatactcttcactccgtcgttcgttgaacactggacatggacttcttcacggaatatggggaggcgagtcagtatcaaatccaagaggtcattggtaagggaagttatggagtagttgctgctgcaattgatagtcacactggggagcgggttgcgatcaagaagataaatgatatttttggtaatgtctcggatgctgctcgcattttgcgggaaatcaagcttcttcgtctgcttcgtcacccaaacatagtccagattaagcacattatgttgccccctacccgaagggagttcaaagatatctatgttgtttttgagctcatggagtctgacctgcatcaagtgatcaaagcaaatgataacctgactccagagcatcaccgctttttcctgtatcaacttattcgtgctctcaagtacatgcattcagcccatgtatttcatcgtgatttaaagcccaggaacatactggccaattcagacagcaaactaaagatctgcgactttggacttgcacgtgcatcatttaacgactctctttcagctatctattggacagattatgtcgcaacaaggtggtaccgggctcctgaattatgtggctcctttttctccagttacacccctgcaattgatatttggagtatagggtgcatttttgctgaagttctcaccggaacgccattgtttcctgggaggaatgttgtgcaccaattagacttaataacagatctccttggaacaccatcgtttagatccttatcccagattcacagtgataaggccagggaatatttgcttggcatgccgaggaagcgccctattccattttctcataagttccgtaatgccgatcctctggctctccggttgctagagcgtttacttgcatttgacccgaaagatcgacctactgctgaagaggctttagctgatccatacttcagtggcctttctaaattggaacttgagccttcagcacaaccaatttcgaaggttgactttgaattcgagggaaggaaactaacaaaggctggtgtgagagaaatgatatatcgggagattttggagtaccatccccagatgcttcaggagtacatcgaaggtggagatcagattcacttcctatacccaagtggggtcgatcgcttccagcgacagtttgctcatctcgaggagaactacaggagaggagtagctagcaccccgccgcgaaggcagcccacatctctgccgagggagcgagtctgctcatcagaagatggccacagtcaggactctgacagcgaagagcagagagcagcatcctacgttgcccgaacaaccataagccctccaagatcacaagaggagggcggcaagctccagcctgcctaccagagcgccgccgccgccgcagactcctgcgccaagagctatctgaagggtgccgctagtatcagtggtgcttccaggcgtggcatcaagggggataatggccgaaaggagaaggaatctccgaggctgtgaaagaggtggcgcaggctcgtcacctgttaggcaaaagaggtagcaatggcgccaatgcgactgcaacgtgggatgtcttagtcatcatgcatccaacaacgcaggggggcagtacaagtatgcaggtcatcctagctaggtcgcccaaattaaagcagcctgcttggaggaattagatttgtgtactgttgttaagttttttttttttttttttttgaattcaactgctagattctggcagatctgtcaaccgcactctccttggtttcccaaaatttactggtttgaacaagtttattactgaatctcgctgtggtgcttcgtctagcattggactggac

SEQ ID NO: 46290 - DNA, 3136 bp, Zea Mays
caaagtcccattacattgggaactgaaggtatcaccactagagcattcggtgcaccatgcacatgtgcttcaacagaccacatgctatgatgctacttgcgagcaacgtcaaagagtggtgaacctgcgctgcaacctgaacacgtggcggttgcttagttggttgtttggtttgtagtggtttcatcatcacgatcggagacaacactgctgtgttgtttcctggctaaagttttttgattctttgtaatagtgactaatgagaagttatagagcgtgcgtccaatatttggaagttaatgaggaaggagcaataaattgaaataagctgtttgcatactttcttgatgctggggaacaggatagggaaaggaacacatgtcttcggactccggctacttcgtgatcgagcaaaaatgaattgcagtatttagttcatgatgaaaatataatattaatggaaaggttgaaagtgtgttcctttttactggactactggaggaagttgccagggaatgcaaggaataagaaaataactattgggcttagcttaactgaactatgttaattttttatttaaatttccctccatataccatgcactttttgactttgggtggttttgcctcaatagtcaatacagatgccactttgatcatgtgacattgatttagtaaactttgtagtacctaggcaattcttatacatcttagaatacaatactatattactactaaaattttagcatcttgtaatgttataagcaccaccacaacactaaatgaaattatgaatgcggatcaatgccatgtggtctctacctttaacaagaacattaccaaattccattggtgtcaaactggattttagcaaaagcttcaagattatttctgaagtatgtaatttattttgccaacagtctaaaaatatttggatttttctgcatttttctctggatttgtggatctgggatctgttcccttttgtcgcacgaattcttcgttttttccatatccagggtgaaaatcatgtcacgtttaaatggtgatgcatcagatagggtgtggatggctggaaccccatttctctcttcattgttaattaatatatacccatattttttggacagctttacccctcttatttctcttcccatttcactttccccttcctctacccactctctcgatctctagcgccgcttcgtcgttcgttgatactcttcactccgtcgttcgttgacaatacctttgtgggcttggtgcgtggacttccactggatcccaatcagcttatcacctcacctttgaacactggacatggacttcttcacggaatatggggaggcgagtcagtatcaaatccaagaggtcattggtaagggaagttatggagtagttgctgctgcaattgatagtcacactggggagcgggttgcgatcaagaagataaatgatatttttggtaatgtctcggatgctgctcgcattttgcgggaaatcaagcttcttcgtctgcttcgtcacccaaacatagtccagattaagcacattatgttgccccctacccgaagggagttcaaagatatctatgttgtttttgagctcatggagtctgacctgcatcaagtgatcaaagcaaatgataacctgactccagagcatcaccgctttttcctgtatcaacttattcgtgctctcaagtacatgcattcagcccatgtatttcatcgtgatttaaagcccaggaacatactggccaattcagacagcaaactaaagatctgcgactttggacttgcacgtgcatcatttaacgactctctttcagctatctattggacagattatgtcgcaacaaggtggtaccgggctcctgaattatgtggctcctttttctccagttacacccctgcaattgatatttggagtatagggtgcatttttgctgaagttctcaccggaacgccattgtttcctgggaggaatgttgtgcaccaattagacttaataacagatctccttggaacaccatcgtttagatccttatcccagattcacagtgataaggccagggaatatttgcttggcatgccgaggaagcgccctattccattttctcataagttccgtaatgccgatcctctggctctccggttgctagagcgtttacttgcatttgacccgaaagatcgacctactgctgaagaggctttagctgatccatacttcagtggcctttctaaattggaacttgagccttcagcacaaccaatttcgaaggttgactttgaattcgagggaaggaaactaacaaaggctggtgtgagagaaatgatatatcgggagattttggagtaccatccccagatgcttcaggagtacatcgaaggtggagatcagattcacttcctatacccaagtggggtcgatcgcttccagcgacagtttgctcatctcgaggagaactacaggagaggagtagctagcaccccgccgcgaaggcagcccacatctctgccgagggagcgagtctgctcatcagaagatggccacagtcaggactctgacagcgaagagcagagagcagcatcctacgttgcccgaacaaccataagccctccaagatcacaagaggagggcggcaagctccagcctgcctaccagagcgccgccgccgccgcagactcctgcgccaagagctatctgaagggtgccgctagtatcagtggtgcttccaggcgtggcatcaagggggataatggccgaaaggagaaggaatctccgaggctgtgaaagaggtggcgcaggctcgtcacctgttaggcaaaagaggtagcaatggcgccaatgcgactgcaacgtgggatgtcttagtcatcatgcatccaacaacgcaggggggcagtacaagtatgcaggtcatcctagctaggtcgcccaaattaaagcagcctgcttggaggaattagatttgtgtactgttgttaagttttttttttttttttttttgaattcaactgctagattctggcagatctgtcaaccgcactctccttggtttcccaaaatttactggtttgaacaagtttattactgaatctcgctgtggtgcttcgtctagcattggactggac

SEQ ID NO: 46291 - DNA, 3196 bp, Zea Mays
caaagtcccattacattgggaactgaaggtatcaccactagagcattcggtgcaccatgcacatgtgcttcaacagaccacatgctatgatgctacttgcgagcaacgtcaaagagtggtgaacctgcgctgcaacctgaacacgtggcggttgcttagttggttgtttggtttgtagtggtttcatcatcacgatcggagacaacactgctgtgttgtttcctggctaaagttttttgattctttgtaatagtgactaatgagaagttatagagcgtgcgtccaatatttggaagttaatgaggaaggagcaataaattgaaataagctgtttgcatactttcttgatgctggggaacaggatagggaaaggaacacatgtcttcggactccggctacttcgtgatcgagcaaaaatgaattgcagtatttagttcatgatgaaaatataatattaatggaaaggttgaaagtgtgttcctttttactggactactggaggaagttgccagggaatgcaaggaataagaaaataactattgggcttagcttaactgaactatgttaattttttatttaaatttccctccatataccatgcactttttgactttgggtggttttgcctcaatagtcaatacagatgccactttgatcatgtgacattgatttagtaaactttgtagtacctaggcaattcttatacatcttagaatacaatactatattactactaaaattttagcatcttgtaatgttataagcaccaccacaacactaaatgaaattatgaatgcggatcaatgccatgtggtctctacctttaacaagaacattaccaaattccattggtgtcaaactggattttagcaaaagcttcaagattatttctgaagtatgtaatttattttgccaacagtctaaaaatatttggatttttctgcatttttctctggatttgtggatctgggatctgttcccttttgtcgcacgaattcttcgttttttccatatccagggtgaaaatcatgtcacgtttaaatggtgatgcatcagatagggtgtggatggctggaaccccatttctctcttcattgttaattaatatatacccatattttttggacagctttacccctcttatttctcttcccatttcactttccccttcctctacccactctctcgatctctagcgccgcttcgtcgttcgttgatactcttcactccgtcgttcgttgacaatacctttgtgggcttggtgcgtggacttccactggatcccaatcagcttatcacctcacctttggtgcggactaaatcgtttccacttaagcatgcgacggaagtaatcttatcaatttatcataacactggacatggacttcttcacggaatatggggaggcgagtcagtatcaaatccaagaggtcattggtaagggaagttatggagtagttgctgctgcaattgatagtcacactggggagcgggttgcgatcaagaagataaatgatatttttggtaatgtctcggatgctgctcgcattttgcgggaaatcaagcttcttcgtctgcttcgtcacccaaacatagtccagattaagcacattatgttgccccctacccgaagggagttcaaagatatctatgttgtttttgagctcatggagtctgacctgcatcaagtgatcaaagcaaatgataacctgactccagagcatcaccgctttttcctgtatcaacttattcgtgctctcaagtacatgcattcagcccatgtatttcatcgtgatttaaagcccaggaacatactggccaattcagacagcaaactaaagatctgcgactttggacttgcacgtgcatcatttaacgactctctttcagctatctattggacagattatgtcgcaacaaggtggtaccgggctcctgaattatgtggctcctttttctccagttacacccctgcaattgatatttggagtatagggtgcatttttgctgaagttctcaccggaacgccattgtttcctgggaggaatgttgtgcaccaattagacttaataacagatctccttggaacaccatcgtttagatccttatcccagattcacagtgataaggccagggaatatttgcttggcatgccgaggaagcgccctattccattttctcataagttccgtaatgccgatcctctggctctccggttgctagagcgtttacttgcatttgacccgaaagatcgacctactgctgaagaggctttagctgatccatacttcagtggcctttctaaattggaacttgagccttcagcacaaccaatttcgaaggttgactttgaattcgagggaaggaaactaacaaaggctggtgtgagagaaatgatatatcgggagattttggagtaccatccccagatgcttcaggagtacatcgaaggtggagatcagattcacttcctatacccaagtggggtcgatcgcttccagcgacagtttgctcatctcgaggagaactacaggagaggagtagctagcaccccgccgcgaaggcagcccacatctctgccgagggagcgagtctgctcatcagaagatggccacagtcaggactctgacagcgaagagcagagagcagcatcctacgttgcccgaacaaccataagccctccaagatcacaagaggagggcggcaagctccagcctgcctaccagagcgccgccgccgccgcagactcctgcgccaagagctatctgaagggtgccgctagtatcagtggtgcttccaggcgtggcatcaagggggataatggccgaaaggagaaggaatctccgaggctgtgaaagaggtggcgcaggctcgtcacctgttaggcaaaagaggtagcaatggcgccaatgcgactgcaacgtgggatgtcttagtcatcatgcatccaacaacgcaggggggcagtacaagtatgcaggtcatcctagctaggtcgcccaaattaaagcagcctgcttggaggaattagatttgtgtactgttgttaagttttttttttttttttttttgaattcaactgctagattctggcagatctgtcaaccgcactctccttggtttcccaaaatttactggtttgaacaagtttattactgaatctcgctgtggtgcttcgtctagcattggactggac

SEQ ID NO: 46292 - DNA, 1970 bp, Zea Mays
cccctatccgtaccgtactagtttcactctgacttttgcttggattgtcccgtgctagcgcagaacactggacatggacttcttcacggaatatggggaggcgagtcagtatcaaatccaagaggtcattggtaagggaagttatggagtagttgctgctgcaattgatagtcacactggggagcgggttgcgatcaagaagataaatgatatttttggtaatgtctcggatgctgctcgcattttgcgggaaatcaagcttcttcgtctgcttcgtcacccaaacatagtccagattaagcacattatgttgccccctacccgaagggagttcaaagatatctatgttgtttttgagctcatggagtctgacctgcatcaagtgatcaaagcaaatgataacctgactccagagcatcaccgctttttcctgtatcaacttattcgtgctctcaagtacatgcattcagcccatgtatttcatcgtgatttaaagcccaggaacatactggccaattcagacagcaaactaaagatctgcgactttggacttgcacgtgcatcatttaacgactctctttcagctatctattggacagtaagatcctttccatcaattttgtattcaatcatttttttgccccttatttcattaactattgtgcttgcaacttgaaggattatgtcgcaacaaggtggtaccgggctcctgaattatgtggctcctttttctccagttacacccctgcaattgatatttggagtatagggtgcatttttgctgaagttctcaccggaacgccattgtttcctgggaggaatgttgtgcaccaattagacttaataacagatctccttggaacaccatcgtttagatccttatcccagattcacagtgataaggccagggaatatttgcttggcatgccgaggaagcgccctattccattttctcataagttccgtaatgccgatcctctggctctccggttgctagagcgtttacttgcatttgacccgaaagatcgacctactgctgaagaggctttagctgatccatacttcagtggcctttctaaattggaacttgagccttcagcacaaccaatttcgaaggttgactttgaattcgagggaaggaaactaacaaaggctggtgtgagagaaatgatatatcgggagattttggagtaccatccccagatgcttcaggagtacatcgaaggtggagatcagattcacttcctatacccaagtggggtcgatcgcttccagcgacagtttgctcatctcgaggagaactacaggagaggagtagctagcaccccgccgcgaaggcagcccacatctctgccgagggagcgagtctgctcatcagaagatggccacagtcaggactctgacagcgaagagcagagagcagcatcctacgttgcccgaacaaccataagccctccaagatcacaagaggagggcggcaagctccagcctgcctaccagagcgccgccgccgccgcagactcctgcgccaagagctatctgaagggtgccgctagtatcagtggtgcttccaggcgtggcatcaagggggataatggccgaaaggagaaggaatctccgaggctgtgaaagaggtggcgcaggctcgtcacctgttaggcaaaagaggtagcaatggcgccaatgcgactgcaacgtgggatgtcttagtcatcatgcatccaacaacgcaggggggcagtacaagtatgcaggtcatcctagctaggtcgcccaaattaaagcagcctgcttggaggaattagatttgtgtactgttgttaagttttttttttttttttttttgaattcaactgctagattctggcagatctgtcaaccgcactctccttggtttcccaaaatttactggtttgaacaagtttattactgaatctcgctgtggtgcttcgtctagcattggactggac

SEQ ID NO: 46293 - DNA, 2178 bp, Zea Mays
gttagctgacgagcggggggtggggcatcaccaactggagcgcgtcttcaaccaactttgtccggatgcgctgaatttttgttgctgtgatctctctttctcaccgcgatcctgcacctttccctcctgtccaagatttccctcccctctaataattcacctgaagtggagttcctgatgcttattctggcgtccgcctagcggcgccgcgctgctactagctcgctcgttaggtggcttctggtgtgggtgttctgaaacaatacgacttctgcccacgcgccgcccccccacactccaccccctctcatccggattggattggttccggctgttgcttgctccaggaagaacactggacatggacttcttcacggaatatggggaggcgagtcagtatcaaatccaagaggtcattggtaagggaagttatggagtagttgctgctgcaattgatagtcacactggggagcgggttgcgatcaagaagataaatgatatttttggtaatgtctcggatgctgctcgcattttgcgggaaatcaagcttcttcgtctgcttcgtcacccaaacatagtccagattaagcacattatgttgccccctacccgaagggagttcaaagatatctatgttgtttttgagctcatggagtctgacctgcatcaagtgatcaaagcaaatgataacctgactccagagcatcaccgctttttcctgtatcaacttattcgtgctctcaagtacatgcattcagcccatgtatttcatcgtgatttaaagcccaggaacatactggccaattcagacagcaaactaaagatctgcgactttggacttgcacgtgcatcatttaacgactctctttcagctatctattggacagattatgtcgcaacaaggtggtaccgggctcctgaattatgtggctcctttttctccagttacacccctgcaattgatatttggagtatagggtgcatttttgctgaagttctcaccggaacgccattgtttcctgggaggaatgttgtgcaccaattagacttaataacagatctccttggaacaccatcgtttagatccttatcccagattcacagtgataaggccagggaatatttgcttggcatgccgaggaagcgccctattccattttctcataagttccgtaatgccgatcctctggctctccggttgctagagcgtttacttgcatttgacccgaaagatcgacctactgctgaagaggctttagctgatccatacttcagtggcctttctaaattggaacttgagccttcagcacaaccaatttcgaaggttgactttgaattcgagggaaggaaactaacaaaggctggtgtgagagaaatgatatatcgggagattttggagtaccatccccagatgcttcaggagtacatcgaaggtggagatcagattcacttcctatacccaagtggggtcgatcgcttccagcgacagtttgctcatctcgaggagaactacaggagaggagtagctagcaccccgccgcgaaggcagcccacatctctgccgagggagcgagtctgctcatcagaagatggccacagtcaggactctgacagcgaagagcagagagcagcatcctacgttgcccgaacaaccataagccctccaagatcacaagaggagggcggcaagctccagcctgcctaccagagcgccgccgccgccgcagactcctgcgccaagagctatctgaagggtgccgctagtatcagtggtgcttccaggcgtggcatcaagggggataatggccgaaaggagaaggaatctccgaggctgtgaaagaggtggcgcaggctcgtcacctgttaggcaaaagaggtagcaatggcgccaatgcgactgcaacgtgggatgtcttagtcatcatgcatccaacaacgcaggggggcagtacaagtatgcaggtcatcctagctaggtcgcccaaattaaagcagcctgcttggaggaattagatttgtgtactgttgttaagttttttttttttttttttttgaattcaactgctagattctggcagatctgtcaaccgcactctccttggtttcccaaaatttactggtttgaacaagtttattactgaatctcgctgtggtgcttcgtctagcattggactggac

SEQ ID NO: 46294 - DNA, 2111 bp, Zea Mays
cactttctcatctttgactgcttggtgcccgcgcgatgtttcctcggtgggctggtgcggtgcagtgcagcgtcacccaaatttcttcgccgctaaagctagccgctagcccgctagtactagtatatacagcgtagtgcgtgcctgttggttagctgacgagcggggggtggggcatcaccaactggagcgcgtcttcaaccaactttgtccggatgcgctgaatttttgttgctcctctcatccggattggattggttccggctgttgcttgctccaggaagaacactggacatggacttcttcacggaatatggggaggcgagtcagtatcaaatccaagaggtcattggtaagggaagttatggagtagttgctgctgcaattgatagtcacactggggagcgggttgcgatcaagaagataaatgatatttttggtaatgtctcggatgctgctcgcattttgcgggaaatcaagcttcttcgtctgcttcgtcacccaaacatagtccagattaagcacattatgttgccccctacccgaagggagttcaaagatatctatgttgtttttgagctcatggagtctgacctgcatcaagtgatcaaagcaaatgataacctgactccagagcatcaccgctttttcctgtatcaacttattcgtgctctcaagtacatgcattcagcccatgtatttcatcgtgatttaaagcccaggaacatactggccaattcagacagcaaactaaagatctgcgactttggacttgcacgtgcatcatttaacgactctctttcagctatctattggacagattatgtcgcaacaaggtggtaccgggctcctgaattatgtggctcctttttctccagttacacccctgcaattgatatttggagtatagggtgcatttttgctgaagttctcaccggaacgccattgtttcctgggaggaatgttgtgcaccaattagacttaataacagatctccttggaacaccatcgtttagatccttatcccagattcacagtgataaggccagggaatatttgcttggcatgccgaggaagcgccctattccattttctcataagttccgtaatgccgatcctctggctctccggttgctagagcgtttacttgcatttgacccgaaagatcgacctactgctgaagaggctttagctgatccatacttcagtggcctttctaaattggaacttgagccttcagcacaaccaatttcgaaggttgactttgaattcgagggaaggaaactaacaaaggctggtgtgagagaaatgatatatcgggagattttggagtaccatccccagatgcttcaggagtacatcgaaggtggagatcagattcacttcctatacccaagtggggtcgatcgcttccagcgacagtttgctcatctcgaggagaactacaggagaggagtagctagcaccccgccgcgaaggcagcccacatctctgccgagggagcgagtctgctcatcagaagatggccacagtcaggactctgacagcgaagagcagagagcagcatcctacgttgcccgaacaaccataagccctccaagatcacaagaggagggcggcaagctccagcctgcctaccagagcgccgccgccgccgcagactcctgcgccaagagctatctgaagggtgccgctagtatcagtggtgcttccaggcgtggcatcaagggggataatggccgaaaggagaaggaatctccgaggctgtgaaagaggtggcgcaggctcgtcacctgttaggcaaaagaggtagcaatggcgccaatgcgactgcaacgtgggatgtcttagtcatcatgcatccaacaacgcaggggggcagtacaagtatgcaggtcatcctagctaggtcgcccaaattaaagcagcctgcttggaggaattagatttgtgtactgttgttaagttttttttttttttttttttgaattcaactgctagattctggcagatctgtcaaccgcactctccttggtttcccaaaatttactggtttgaacaagtttattactgaatctcgctgtggtgcttcgtctagcattggactggac

SEQ ID NO: 46295 - DNA, 1966 bp, Zea Mays
ctccttccgggacgctcgggcaacctgccatctagattgggagcctctcatccggattggattggttccggctgttgcttgctccaggaaggccctcttcatttgagacacatctgttaccgagcgagttctagattcgaacactggacatggacttcttcacggaatatggggaggcgagtcagtatcaaatccaagaggtcattggtaagggaagttatggagtagttgctgctgcaattgatagtcacactggggagcgggttgcgatcaagaagataaatgatatttttggtaatgtctcggatgctgctcgcattttgcgggaaatcaagcttcttcgtctgcttcgtcacccaaacatagtccagattaagcacattatgttgccccctacccgaagggagttcaaagatatctatgttgtttttgagctcatggagtctgacctgcatcaagtgatcaaagcaaatgataacctgactccagagcatcaccgctttttcctgtatcaacttattcgtgctctcaagtacatgcattcagcccatgtatttcatcgtgatttaaagcccaggaacatactggccaattcagacagcaaactaaagatctgcgactttggacttgcacgtgcatcatttaacgactctctttcagctatctattggacagattatgtcgcaacaaggtggtaccgggctcctgaattatgtggctcctttttctccagttacacccctgcaattgatatttggagtatagggtgcatttttgctgaagttctcaccggaacgccattgtttcctgggaggaatgttgtgcaccaattagacttaataacagatctccttggaacaccatcgtttagatccttatcccagattcacagtgataaggccagggaatatttgcttggcatgccgaggaagcgccctattccattttctcataagttccgtaatgccgatcctctggctctccggttgctagagcgtttacttgcatttgacccgaaagatcgacctactgctgaagaggctttagctgatccatacttcagtggcctttctaaattggaacttgagccttcagcacaaccaatttcgaaggttgactttgaattcgagggaaggaaactaacaaaggctggtgtgagagaaatgatatatcgggagattttggagtaccatccccagatgcttcaggagtacatcgaaggtggagatcagattcacttcctatacccaagtggggtcgatcgcttccagcgacagtttgctcatctcgaggagaactacaggagaggagtagctagcaccccgccgcgaaggcagcccacatctctgccgagggagcgagtctgctcatcagaagatggccacagtcaggactctgacagcgaagagcagagagcagcatcctacgttgcccgaacaaccataagccctccaagatcacaagaggagggcggcaagctccagcctgcctaccagagcgccgccgccgccgcagactcctgcgccaagagctatctgaagggtgccgctagtatcagtggtgcttccaggcgtggcatcaagggggataatggccgaaaggagaaggaatctccgaggctgtgaaagaggtggcgcaggctcgtcacctgttaggcaaaagaggtagcaatggcgccaatgcgactgcaacgtgggatgtcttagtcatcatgcatccaacaacgcaggggggcagtacaagtatgcaggtcatcctagctaggtcgcccaaattaaagcagcctgcttggaggaattagatttgtgtactgttgttaagttttttttttttttttttttgaattcaactgctagattctggcagatctgtcaaccgcactctccttggtttcccaaaatttactggtttgaacaagtttattactgaatctcgctgtggtgcttcgtctagcattggactggac

SEQ ID NO: 46296 - DNA, 2184 bp, Zea Mays
gccgctgtgcttcgcgtgggccgtgcaactcgccggagacggaagcgacgtcggcgagaaccgcgctgccgttgccgtcgaggcgatatggtcctaccctcgtcgacggagacacggagtccgcagccgcctccgcctccggggcgctcgtcgtggtcggcgccgcgtgatccgacgggggtctagaatccgggcctcgtcttcatcacccgccacccgccggcgtccgcaagatgcgcgagatggcaccgccgctacaagcctctcatccggattggattggttccggctgttgcttgctccaggaaggccctcttcatttgagacacatctgttaccgagcgagttctagattcgaacactggacatggacttcttcacggaatatggggaggcgagtcagtatcaaatccaagaggtcattggtaagggaagttatggagtagttgctgctgcaattgatagtcacactggggagcgggttgcgatcaagaagataaatgatatttttggtaatgtctcggatgctgctcgcattttgcgggaaatcaagcttcttcgtctgcttcgtcacccaaacatagtccagattaagcacattatgttgccccctacccgaagggagttcaaagatatctatgttgtttttgagctcatggagtctgacctgcatcaagtgatcaaagcaaatgataacctgactccagagcatcaccgctttttcctgtatcaacttattcgtgctctcaagtacatgcattcagcccatgtatttcatcgtgatttaaagcccaggaacatactggccaattcagacagcaaactaaagatctgcgactttggacttgcacgtgcatcatttaacgactctctttcagctatctattggacagattatgtcgcaacaaggtggtaccgggctcctgaattatgtggctcctttttctccagttacacccctgcaattgatatttggagtatagggtgcatttttgctgaagttctcaccggaacgccattgtttcctgggaggaatgttgtgcaccaattagacttaataacagatctccttggaacaccatcgtttagatccttatcccagattcacagtgataaggccagggaatatttgcttggcatgccgaggaagcgccctattccattttctcataagttccgtaatgccgatcctctggctctccggttgctagagcgtttacttgcatttgacccgaaagatcgacctactgctgaagaggctttagctgatccatacttcagtggcctttctaaattggaacttgagccttcagcacaaccaatttcgaaggttgactttgaattcgagggaaggaaactaacaaaggctggtgtgagagaaatgatatatcgggagattttggagtaccatccccagatgcttcaggagtacatcgaaggtggagatcagattcacttcctatacccaagtggggtcgatcgcttccagcgacagtttgctcatctcgaggagaactacaggagaggagtagctagcaccccgccgcgaaggcagcccacatctctgccgagggagcgagtctgctcatcagaagatggccacagtcaggactctgacagcgaagagcagagagcagcatcctacgttgcccgaacaaccataagccctccaagatcacaagaggagggcggcaagctccagcctgcctaccagagcgccgccgccgccgcagactcctgcgccaagagctatctgaagggtgccgctagtatcagtggtgcttccaggcgtggcatcaagggggataatggccgaaaggagaaggaatctccgaggctgtgaaagaggtggcgcaggctcgtcacctgttaggcaaaagaggtagcaatggcgccaatgcgactgcaacgtgggatgtcttagtcatcatgcatccaacaacgcaggggggcagtacaagtatgcaggtcatcctagctaggtcgcccaaattaaagcagcctgcttggaggaattagatttgtgtactgttgttaagttttttttttttttttttttgaattcaactgctagattctggcagatctgtcaaccgcactctccttggtttcccaaaatttactggtttgaacaagtttattactgaatctcgctgtggtgcttcgtctagcattggactggac

SEQ ID NO: 46297 - DNA, 2136 bp, Zea Mays
gccgctgtgcttcgcgtgggccgtgcaactcgccggagacggaagcgacgtcggcgagaaccgcgctgccgttgccgtcgaggcgatatggtcctaccctcgtcgacggagacacggagtccgcagccgcctccgcctccggggcgctcgtcgtggtcggcgccgcgtgatccgacgggggtctagaatccgggcctcgtcttcatcacccgccacccgccggcgtccgcaagatgcgcgagatggcaccgccgctacaagcctctcatccggattggattggttccggctgttgcttgctccaggaagaacactggacatggacttcttcacggaatatggggaggcgagtcagtatcaaatccaagaggtcattggtaagggaagttatggagtagttgctgctgcaattgatagtcacactggggagcgggttgcgatcaagaagataaatgatatttttggtaatgtctcggatgctgctcgcattttgcgggaaatcaagcttcttcgtctgcttcgtcacccaaacatagtccagattaagcacattatgttgccccctacccgaagggagttcaaagatatctatgttgtttttgagctcatggagtctgacctgcatcaagtgatcaaagcaaatgataacctgactccagagcatcaccgctttttcctgtatcaacttattcgtgctctcaagtacatgcattcagcccatgtatttcatcgtgatttaaagcccaggaacatactggccaattcagacagcaaactaaagatctgcgactttggacttgcacgtgcatcatttaacgactctctttcagctatctattggacagattatgtcgcaacaaggtggtaccgggctcctgaattatgtggctcctttttctccagttacacccctgcaattgatatttggagtatagggtgcatttttgctgaagttctcaccggaacgccattgtttcctgggaggaatgttgtgcaccaattagacttaataacagatctccttggaacaccatcgtttagatccttatcccagattcacagtgataaggccagggaatatttgcttggcatgccgaggaagcgccctattccattttctcataagttccgtaatgccgatcctctggctctccggttgctagagcgtttacttgcatttgacccgaaagatcgacctactgctgaagaggctttagctgatccatacttcagtggcctttctaaattggaacttgagccttcagcacaaccaatttcgaaggttgactttgaattcgagggaaggaaactaacaaaggctggtgtgagagaaatgatatatcgggagattttggagtaccatccccagatgcttcaggagtacatcgaaggtggagatcagattcacttcctatacccaagtggggtcgatcgcttccagcgacagtttgctcatctcgaggagaactacaggagaggagtagctagcaccccgccgcgaaggcagcccacatctctgccgagggagcgagtctgctcatcagaagatggccacagtcaggactctgacagcgaagagcagagagcagcatcctacgttgcccgaacaaccataagccctccaagatcacaagaggagggcggcaagctccagcctgcctaccagagcgccgccgccgccgcagactcctgcgccaagagctatctgaagggtgccgctagtatcagtggtgcttccaggcgtggcatcaagggggataatggccgaaaggagaaggaatctccgaggctgtgaaagaggtggcgcaggctcgtcacctgttaggcaaaagaggtagcaatggcgccaatgcgactgcaacgtgggatgtcttagtcatcatgcatccaacaacgcaggggggcagtacaagtatgcaggtcatcctagctaggtcgcccaaattaaagcagcctgcttggaggaattagatttgtgtactgttgttaagttttttttttttttttttttgaattcaactgctagattctggcagatctgtcaaccgcactctccttggtttcccaaaatttactggtttgaacaagtttattactgaatctcgctgtggtgcttcgtctagcattggactggac

SEQ ID NO: 46298 - DNA, 1775 bp, Zea Mays
gcacgaatctcgcagccaaatttccaattattttcttgtccagccattgccacaactcgcaaggaagccctttttctcatggcggcggcggcggcggcggcgggtggagagggagatgtaggaggaggcaacagcgcgggcgccctactgcgcatcttcgtgggcgggctggcggagagcgtgggcgcggccgacctggaggccctgttcgcctccgctgggcgcgtcgccggcgtcgagttcgtgcgcacaaacgggcgcagcttcgcctatgtcgacttccactgccccaacgacaaggccctcgccaggctcttttccaccgtgaaagctttgccactgaaaggcacaggaaaacataaatacagtttccgacatattgaagttccttcttatccaattcatttctgtgactgtgaggagcactgtggacctcctgaggaagctaataatgaatatgcttctgttctcaatgctgctgcatatgagaaggaacgtaacattatgaattctgtgatgaacaagctttttgagaaggaaaatgaacattttgattcaggtgcaatggagaaatgtgatgaccgtactgataccattgaaccctccaatactgtgaatggcatgcaaattgaagagacggaagatgctccagaggacttggatgacttgcaaatggaagaaacggaagagtcttcagatgaagatttagatgatgaccttgtgattaacattgctccccgcaagtccaataagccagcagttcgagagaacataaagcaggaagtgaataaggactcacagttacaaaagcgtccaaggattgaagagacttccctgccaaagaagaggcagaaatctgaagcctcatctgaacctataaaaaggaatggagaacaacatgtttcagttactctagacactagaaccgcaggcaagactttgcctgcaaaatcagaagccagccaaaatgaacagaagtctctggatttgaaaggaaaaagaacatatgagttctcttcggcactcccaaaagacaaaagctctgcagatcctcaaggcattacggctctagcaagttcttctatcaaaactggaagtgcacaaaacactggttctattgaaccgaaaagaggttattcatggattcagaaatcagcctggagagatctggtagggggcacggggagcgcatctttcagcatatcgcaggtgttgcctaacaacaatccagcaccagcagtgttttcaaatgttgctgggagcgagaggtcttcgaaatcctcggaagctacagcacaactcttgagttccgtgggaacgctgtctaccagcactgcagatgagtcgacagaccatgccattggtggcgagcctaaggagagcaataagccgcagaaggtgcgggtggtcccgaagatcaccattagtgaagtttgccctttcatgagaaacacggagtcgcaaaagcaatgggcaaaggcgaagaaagctgtaactgggttcgccaagaagagaaacgagagcagcacaggaaagggaaagccatccaataagcaataaaactattttgaagatgaccgtagctgttgtattacgatgactatcacataccagtggcgttttttttccttgtataagagcaatccaaatttcatgtttctgtctgcgtgttgtgaacactttcttgcaacacgatcgacctctaaactcaagtattattaattatgatatgatctatatagttctgataatgtcataaattcagtgtcctgggc

SEQ ID NO: 46299 - DNA, 6764 bp, Zea Mays
tgtgctgccgcacgtgggatgacctgaccctccgcctgcccccaagatgaatgtgggacatgctgcccacctgtccgggcagacagcgcacatgaatcaagttcctggctccggtgttggcattggtgttggcggctcagacgggctaccgcagcaccagccaatgcaggagatggcggcgctctcaggaatggaccagcagtttgtcatgcttcggaccgctatgcgcgacaagatatctgactatataggaagaaaacagtcaccgggtgattggcggaaacggttgcctgaactggcaaaacggcttgaggagatcttgtacagaaaattcccaaacaagcatgagtactacaatatgatgaagggaccagttgagccacaattgcaatttgctatcaagaccttgagtgctcagaaccaacacaatcaacaaaacccacaaatgacaaggcaaatatcatcgtcctctagctatggtgctatgattcctacccctggtatgacgcaaggcaccagtgcaggttctaggactccttatgtcacggagaccaatgctctttcatcgtctggtgcatgcatggttcctcagaatgctaacatgggtacctcaatgcaaggtccaatgtctaacgggtaccagcatttaaataccaacatttcacaaaattctaccacaaataatgtcgaatctacaatgggttcagttggcgttcagcgacaactatctcatatgatcccaactccaggattcagtaatcaacagaatgtaccttcaaatcctgactattcaaatggaactggatacttcaacggtgagtcagctgtggcgccacatatgcagcaccagaaacaatttcctagcaaccacaatagcaatcaaattcaacatattgggggacacaataattctgggatacattcaagcttgctggacaactcatctgcctatggtttatcagatggccacatgaatggtggcataggagtgcatgggtcaaatatgcagctaacaaacaggactactgccccagaagcatatatgaacatatcctcttatggcaattcgcccaaacctatgcagcagcaattcaatcagcaccctcagcagagaataccgacatcagttgatatggctggttccggcagcttttatgctattggctctacccctttaaccacagcaaatagtcagagcatgaatgttgcaaatttacaatctagatcaagcatgaatcagatgttggtttccaatcagctaaacattcagtccgtccagcaacagtcccagataaaaaatgggcctttggatcaaacagagaaggtgaattttcagtcaacacagctgactcatgatcaactactacaccagcacccaatgtcgcagcatcaggtgcaacctaattcccagtttattcaaaatcagtatcatataaatcagcagcagccaaattcacagcatcagcaggctatgttaaggaacaattcccttaaacagtctcaaatggcttccaaccattcaatgcaactgccagaacaggggactctgccacacactgaactagtttcttcacaagctagtgatcctgctgaccttccaaacttccagggtcaataccagcaaagaaatgctcttgacaatgttaaaggagggcagatgcttggtcatctatctagctctcaaaattttcttccttctgcctcacatggttctcagcaattgttgccctctaatccgcagcttgataacggttcaaatgctgtaagttatgtgctgaaaggatcacagacagagcaaatgctgctttctcaatggcagccacaaacaatggaaaaggctcctgtcgctactaattcatcactcgaaaaacaagtacaagaagattgttgtcaaagaataatgtcacaagatggagtacagcaaccattttcatcagattggtgtctttctaatggcactctcgcttctgttgatcctgcagtgccaaaacccacagctggagggtttgggcaggtcaagagaaatattcattacctccgtcagataaagtggttgctgttgctgtttcatgcaaaaacatgcacataccctgttggaagttgtaagttcaatggttgtgttcaggtgcaggagcttttgaaccattttcagaattgtcaaaggaaagattgttcgtacaggagttgcactaagtcaaaagcaatgtctcaccattataaaacttgtgtcgatgagcaatgtcctgtgtgcagcgttgtaaggaagtttttgcgccaatcaactgaacaggcatctaagcaaaaaactcttgagtctagaaaacttgctcaacaaaatgtgcctcagagaatcatgaacgggatagaaggtgatagaatggatgttgatccaatgtcagctgaagcgttcgaggatcaaccatctgttccaaaacgtttaaagatgcatcttccatcactcagtggcccagaaaatgatatctctgtagtctccaatcatcatgtaaacccaggctttctattgcaggaagcacagcctgagcagcttgagcacaataataggacaacatatctgaaacgagaggtagatgcaaaggctgacattcgggctcctcaaaagcccataaaaataagttatgacattgatgaaaatgtgactacatcaaggcataatgtgattcctggtgttcccagtgagatggactctcatatcaagcaagaaaacttgtcagttaacaaagagacaagtgaaactgcccttgaggttaaaaatgaaacaaatgatctaactgatgcgactgtgactaaatcaggaaaaccaaaaataaaaggtgtttctatgattgaattgttctatccagatgaagtagatgtacatattgacagtctaaagctgtgggttggtcagagtaaggctaaagctgaaaagaatcaagctattggtcattctgagaatgagaactcttgccagctctgtagagtagagaaacttacttttgaacctccaccaatgtattgttctccttgtggagctcggataaagcgaaacgcaccatactacgctgtaggtactggtgatacacgccactatttatgtatcccttgctacaacgagtctcgtggtgagactattgaggttgaaggtcaaacatttccgaaggcaaagttagagaaaaaaagaaatgaggaggaaacggaagaatggtgggttcaatgtgacaaatgtcaatgctggcaacatcaaatttgtgctctatttaatggaagaaggaacggtggaggacaagctgaatatacttgcccccattgctacgttgaggaggtcaaatgtgggctgcgcaaacctttaccacagagtgctgttcttggggcaaaagatttgccaagaactgttcttagtgatcatatagaagatcggttatttaaacgacttaagcaggagaaacaggaccgtgcagctgctgctggcaaaagtattgatgagattcctggagcggaaggacttgtggtcagagttgtttcatcagtggataaaaagctggaggttaaaccacgttttttggaaatttttcaagaagacaactaccctacagagttcccttacaagtccaaggctgttctcttgttccagagaatagaaggtgtggaagtatgtctatttggcatgtatgttcaagaatttggtgcagaatgctcttccccgaaccagcgccgtgtttatttgtcatacttggattctgttaagtactttagacctgagattaaaacagtatccggagaggccttgcgtacatatgtataccatgaaattctgataggatatcttgaatactgtaagctgcgggggttcacaagttgttacatatgggcttgcccacctttgaagggtgaagattacatcttatattgccatcctgagattcaaaagactccgaaatctgacaaactgcgtgagtggtacttatcgatgcttcggaaagcttctaaggaggaaattgttgttgagctgacaaatctatatgaccatttcttcatcactatggggggatgcaaggctaaggtgactgcttctcgcttgccatactttgatggagattattggccaggagctgcagaagatatgatcaatcaactccgacaagaagaagatgaccgtaaacttcagaaaaagagtaagacaaagaagattattacaaaaagagctcttaaagctgctggccacaccgatctcagcgggaatgcttccaaggatgctatgttgatgcaaaagcttggtgaaaccatatatcctatgaaggaagatttcattatggtccatttgcagtattcatgtagtcactgctgtacccttatggtgtctggaagacgttgggtttgtcatcaatgcagaagtttttacatctgtgacaagtgttatgacgcagaacagcaacttgaagacagggagaggcacccgtgtaatagtagagacacgcatatgctccatccggttgatattgttggggtgcccaaagataccaaagatagagatgacatcttagaaagcgagttctttgacaccaggcaggcattccttagcctttgccaaggaaatcattatcagtacgacacgcttcgccgcgcaaagcattcgtcaattatggtgctataccacctgcacaatccaactgcgccagcatttgtcactacgtgcaatgcctgctgccatgatatcgaaactggtcaaagctggcggtgtgagatctgtccagattttgacgtgtgcaacgcttgtttccaaaaaggagcggttactcatcctcacaagttaacgaaccatccatcagctgctgaccgtgacgctcagaacgcagaagctcggcaaatgcgtgttcagcagctaagaaagatgctcgatctcctggtacatgcgtcgatgtgccgctccggcagttgccagtatccccactgccgaaaagtaaagggactattccgtcacgggatgcagtgcaaaacccgtgcttcgggaggatgcgtcctctgcaagaagatgtggtacatgctccaactccacgcccgggcttgcaaagattcagagtgcaaagtgccacggtgcagtataatgggtgcaaatggaaaggagggaagctcaggctggagaaggccaaagagcactacctcactcgccttaaacgagaatgggagcaggatgcggctgcagcggcgtcaaaggaggctgcgctgaaagataatgcagagaaccagaagccgaaactggataaggctgctttggagggcttgaagattaacatctacttcccaaagctgaggaaggtgaaagctttgccactgaaaggcacaggaaaacataaatacagtttccgacatattgaagttccttcttatccaattcatttctgtgactgtgaggagcactgtggacctcctgaggaagctaataatgaatatgcttctgttctcaatgctgctgcatatgagaaggaacgtaacattatgaattctgtgatgaacaagctttttgagaaggaaaatgaacattttgattcaggtgcaatggagaaatgtgatgaccgtactgataccattgaaccctccaatactgtgaatggcatgcaaattgaagagacggaagatgctccagaggacttggatgacttgcaaatggaagaaacggaagagtcttcagatgaagatttagatgatgaccttgtgattaacattgctccccgcaagtccaataagccagcagttcgagagaacataaagcaggaagtgaataaggactcacagttacaaaagcgtccaaggattgaagagacttccctgccaaagaagaggcagaaatctgaagcctcatctgaacctataaaaaggaatggagaacaacatgtttcagttactctagacactagaaccgcaggcaagactttgcctgcaaaatcagaagccagccaaaatgaacagaagtctctggatttgaaaggaaaaagaacatatgagttctcttcggcactcccaaaagacaaaagctctgcagatcctcaaggcattacggctctagcaagttcttctatcaaaactggaagtgcacaaaacactggttctattgaaccgaaaagaggttattcatggattcagaaatcagcctggagagatctggtagggggcacggggagcgcatctttcagcatatcgcaggtgttgcctaacaacaatccagcaccagcagtgttttcaaatgttgctgggagcgagaggtcttcgaaatcctcggaagctacagcacaactcttgagttccgtgggaacgctgtctaccagcactgcagatgagtcgacagaccatgccattggtggcgagcctaaggagagcaataagccgcagaaggtgcgggtggtcccgaagatcaccattagtgaagtttgccctttcatgagaaacacggagtcgcaaaagcaatgggcaaaggcgaagaaagctgtaactgggttcgccaagaagagaaacgagagcagcacaggaaagggaaagccatccaataagcaataaaactattttgaagatgaccgtagctgttgtattacgatgactatcacataccagtggcgttttttttccttgtataagagcaatccaaatttcatgtttctgtctgcgtgttgtgaacactttcttgcaacacgatcgacctctaaactcaagtattattaattatgatatgatctatatagttctgataatgtcataaattcagtgtcctgggc

SEQ ID NO: 46300 - DNA, 4945 bp, Zea Mays
catacacctatatgatctttgctttgggaggcggtacaactcattttcatcagttgatatggctggttccggcagcttttatgctattggctctacccctttaaccacagcaaatagtcagagcatgaatgttgcaaatttacaatctagatcaagcatgaatcagatgttggtttccaatcagctaaacattcagtccgtccagcaacagtcccagataaaaaatgggcctttggatcaaacagagaaggtgaattttcagtcaacacagctgactcatgatcaactactacaccagcacccaatgtcgcagcatcaggtgcaacctaattcccagtttattcaaaatcagtatcatataaatcagcagcagccaaattcacagcatcagcaggctatgttaaggaacaattcccttaaacagtctcaaatggcttccaaccattcaatgcaactgccagaacaggggactctgccacacactgaactagtttcttcacaagctagtgatcctgctgaccttccaaacttccagggtcaataccagcaaagaaatgctcttgacaatgttaaaggagggcagatgcttggtcatctatctagctctcaaaattttcttccttctgcctcacatggttctcagcaattgttgccctctaatccgcagcttgataacggttcaaatgctgtaagttatgtgctgaaaggatcacagacagagcaaatgctgctttctcaatggcagccacaaacaatggaaaaggctcctgtcgctactaattcatcactcgaaaaacaagtacaagaagattgttgtcaaagaataatgtcacaagatggagtacagcaaccattttcatcagattggtgtctttctaatggcactctcgcttctgttgatcctgcagtgccaaaacccacagctggagggtttgggcaggtcaagagaaatattcattacctccgtcagataaagtggttgctgttgctgtttcatgcaaaaacatgcacataccctgttggaagttgtaagttcaatggttgtgttcaggtgcaggagcttttgaaccattttcagaattgtcaaaggaaagattgttcgtacaggagttgcactaagtcaaaagcaatgtctcaccattataaaacttgtgtcgatgagcaatgtcctgtgtgcagcgttgtaaggaagtttttgcgccaatcaactgaacaggcatctaagcaaaaaactcttgagtctagaaaacttgctcaacaaaatgtgcctcagagaatcatgaacgggatagaaggtgatagaatggatgttgatccaatgtcagctgaagcgttcgaggatcaaccatctgttccaaaacgtttaaagatgcatcttccatcactcagtggcccagaaaatgatatctctgtagtctccaatcatcatgtaaacccaggctttctattgcaggaagcacagcctgagcagcttgagcacaataataggacaacatatctgaaacgagaggtagatgcaaaggctgacattcgggctcctcaaaagcccataaaaataagttatgacattgatgaaaatgtgactacatcaaggcataatgtgattcctggtgttcccagtgagatggactctcatatcaagcaagaaaacttgtcagttaacaaagagacaagtgaaactgcccttgaggttaaaaatgaaacaaatgatctaactgatgcgactgtgactaaatcaggaaaaccaaaaataaaaggtgtttctatgattgaattgttctatccagatgaagtagatgtacatattgacagtctaaagctgtgggttggtcagagtaaggctaaagctgaaaagaatcaagctattggtcattctgagaatgagaactcttgccagctctgtagagtagagaaacttacttttgaacctccaccaatgtattgttctccttgtggagctcggataaagcgaaacgcaccatactacgctgtaggtactggtgatacacgccactatttatgtatcccttgctacaacgagtctcgtggtgagactattgaggttgaaggtcaaacatttccgaaggcaaagttagagaaaaaaagaaatgaggaggaaacggaagaatggtgggttcaatgtgacaaatgtcaatgctggcaacatcaaatttgtgctctatttaatggaagaaggaacggtggaggacaagctgaatatacttgcccccattgctacgttgaggaggtcaaatgtgggctgcgcaaacctttaccacagagtgctgttcttggggcaaaagatttgccaagaactgttcttagtgatcatatagaagatcggttatttaaacgacttaagcaggagaaacaggaccgtgcagctgctgctggcaaaagtattgatgagattcctggagcggaaggacttgtggtcagagttgtttcatcagtggataaaaagctggaggttaaaccacgttttttggaaatttttcaagaagacaactaccctacagagttcccttacaagtccaaggctgttctcttgttccagagaatagaaggtgtggaagtatgtctatttggcatgtatgttcaagaatttggtgcagaatgctcttccccgaaccagcgccgtgtttatttgtcatacttggattctgttaagtactttagacctgagattaaaacagtatccggagaggccttgcgtacatatgtataccatgaaattctgataggatatcttgaatactgtaagctgcgggggttcacaagttgttacatatgggcttgcccacctttgaagggtgaagattacatcttatattgccatcctgagattcaaaagactccgaaatctgacaaactgcgtgagtggtacttatcgatgcttcggaaagcttctaaggaggaaattgttgttgagctgacaaatctatatgaccatttcttcatcactatggggggatgcaaggctaaggtgactgcttctcgcttgccatactttgatggagattattggccaggagctgcagaagatatgatcaatcaactccgacaagaagaagatgaccgtaaacttcagaaaaagagtaagacaaagaagattattacaaaaagagctcttaaagctgctggccacaccgatctcagcgggaatgcttccaaggatgctatgttgatgcaaaagcttggtgaaaccatatatcctatgaaggaagatttcattatggtccatttgcagtattcatgtagtcactgctgtacccttatggtgtctggaagacgttgggtttgtcatcaatgcagaagtttttacatctgtgacaagtgttatgacgcagaacagcaacttgaagacagggagaggcacccgtgtaatagtagagacacgcatatgctccatccggtactatacccttttcattctcagtatagagctggagcaaatagactctcaagatatgtcttgattctctcttttctaggttgatattgttggggtgcccaaagataccaaagatagagatgacatcttagaaagcgagttctttgacaccaggcaggcattccttagcctttgccaaggaaatcattatcagtacgacacgcttcgccgcgcaaagcattcgtcaattatggtgctataccacctgcacaatccaactgcgccagcatttgtcactacgtgcaatgcctgctgccatgatatcgaaactggtcaaagctggcggtgtgagatctgtccagattttgacgtgtgcaacgcttgtttccaaaaaggagcggttactcatcctcacaagttaacgaaccatccatcagctgctgaccgtgacgctcagaacgcagaagctcggcaaatgcgtgttcagcagctaagaaagatgctcgatctcctggtacatgcgtcgatgtgccgctccggcagttgccagtatccccactgccgaaaagtaaagggactattccgtcacgggatgcagtgcaaaacccgtgcttcgggaggatgcgtcctctgcaagaagatgtggtacatgctccaactccacgcccgggcttgcaaagattcagagtgcaaagtgccacggtgcagggatctgaaggagcatctcagaaggttgcagcagcagtctgattcccggaggagggctgctgtgaatgagatgatgaggcagagagcggcggaagtggccgcaaactgagtagctgcctctgtacaggggtatatatctttgtggaaagaggataggaagtacgcagggcaacaagaaagattggggcggttgaatttgaagggggggattggttggtgaagacgaagcgcttcaacgtggatttcttatcctctgccccgtcgtcctccaaagagctcaagaaggcacaccattactgatgttaggcagtgctaaccagccacaccctgctcacgttgtctcctcaacccttgggggtgtggtgaattctttgatttgacctggtggtgctagctgggctgaagtgagctgatctcctcgtcgccgggtgtctctggacagtgccagccgtgtagttctgctgagacatttggttagccgctgatcttccccctcaccactctcctctcgtctcggtccaggatagataggagggtataggttaataaaagaaaaaaaagggtaaatagggacgggcgtttatttgtttatttctgcccccttctcccatccattttgtaggactcaaccttgataaaagtgtaaagcaaagtaatctctccatgtcttctcttgttccagtgctgctccatagatcgttgttgaaagtgcaggtggcccaggagggacagatttctgtgtggtatctcggaagcatgaatcatgtggactatctataggattcatgcttccaggtagtgtgatgctttgtgcccacattcctggcaaaggagatttttttt

SEQ ID NO: 46301 - DNA, 5901 bp, Zea Mays
ccaagatgaatgtgggacatgctgcccacctgtccgggcagacagcgcacatgaatcaagttcctggctccggtgttggcattggtgttggcggctcagacgggctaccgcagcaccagccaatgcaggagatggcggcgctctcaggaatggaccagcagtttgtcatgcttcggaccgctatgcgcgacaagatatctgactatataggaagaaaacagtcaccgggtgattggcggaaacggttgcctgaactggcaaaacggcttgaggagatcttgtacagaaaattcccaaacaaggtatcacccatgagtactacaatatgatgaagggaccagttgagccacaattgcaatttgctatcaagaccttgagtgctcagaaccaacacaatcaacaaaacccacaaatgacaaggcaaatatcatcgtcctctagctatggtgctatgattcctacccctggtatgacgcaaggcaccagtgcaggttctaggactccttatgtcacggagaccaatgctctttcatcgtctggtgcatgcatggttcctcagaatgctaacatgggtacctcaatgcaaggtccaatgtctaacgggtaccagcatttaaataccaacatttcacaaaattctaccacaaataatgtcgaatctacaatgggttcagttggcgttcagcgacaactatctcatatgatcccaactccaggattcagtaatcaacagaatgtaccttcaaatcctgactattcaaatggaactggatacttcaacggtgagtcagctgtggcgccacatatgcagcaccagaaacaatttcctagcaaccacaatagcaatcaaattcaacatattgggggacacaataattctgggatacattcaagcttgctggacaactcatctgcctatggtttatcagatggccacatgaatggtggcataggagtgcatgggtcaaatatgcagctaacaaacaggactactgccccagaagcatatatgaacatatcctcttatggcaattcgcccaaacctatgcagcagcaattcaatcagcaccctcagcagagaataccgattgatatggctggttccggcagcttttatgctattggctctacccctttaaccacagcaaatagtcagagcatgaatgttgcaaatttacaatctagatcaagcatgaatcagatgttggtttccaatcagctaaacattcagtccgtccagcaacagtcccagataaaaaatgggcctttggatcaaacagagaaggtgaattttcagtcaacacagctgactcatgatcaactactacaccagcacccaatgtcgcagcatcaggtgcaacctaattcccagtttattcaaaatcagtatcatataaatcagcagcagccaaattcacagcatcagcaggctatgttaaggaacaattcccttaaacagtctcaaatggcttccaaccattcaatgcaactgccagaacaggggactctgccacacactgaactagtttcttcacaagctagtgatcctgctgaccttccaaacttccagggtcaataccagcaaagaaatgctcttgacaatgttaaaggagggcagatgcttggtcatctatctagctctcaaaattttcttccttctgcctcacatggttctcagcaattgttgccctctaatccgcagcttgataacggttcaaatgctgtaagttatgtgctgaaaggatcacagacagagcaaatgctgctttctcaatggcagccacaaacaatggaaaaggctcctgtcgctactaattcatcactcgaaaaacaagtacaagaagattgttgtcaaagaataatgtcacaagatggagtacagcaaccattttcatcagattggtgtctttctaatggcactctcgcttctgttgatcctgcagtgccaaaacccacagctggagggtttgggcaggtcaagagaaatattcattacctccgtcagataaagtggttgctgttgctgtttcatgcaaaaacatgcacataccctgttggaagttgtaagttcaatggttgtgttcaggtgcaggagcttttgaaccattttcagaattgtcaaaggaaagattgttcgtacaggagttgcactaagtcaaaagcaatgtctcaccattataaaacttgtgtcgatgagcaatgtcctgtgtgcagcgttgtaaggaagtttttgcgccaatcaactgaacaggcatctaagcaaaaaactcttgagtctagaaaacttgctcaacaaaatgtgcctcagagaatcatgaacgggatagaaggtgatagaatggatgttgatccaatgtcagctgaagcgttcgaggatcaaccatctgttccaaaacgtttaaagatgcatcttccatcactcagtggcccagaaaatgatatctctgtagtctccaatcatcatgtaaacccaggctttctattgcaggaagcacagcctgagcagcttgagcacaataataggacaacatatctgaaacgagaggtagatgcaaaggctgacattcgggctcctcaaaagcccataaaaataagttatgacattgatgaaaatgtgactacatcaaggcataatgtgattcctggtgttcccagtgagatggactctcatatcaagcaagaaaacttgtcagttaacaaagagacaagtgaaactgcccttgaggttaaaaatgaaacaaatgatctaactgatgcgactgtgactaaatcaggaaaaccaaaaataaaaggtgtttctatgattgaattgttctatccagatgaagtagatgtacatattgacagtctaaagctgtgggttggtcagagtaaggctaaagctgaaaagaatcaagctattggtcattctgagaatgagaactcttgccagctctgtagagtagagaaacttacttttgaacctccaccaatgtattgttctccttgtggagctcggataaagcgaaacgcaccatactacgctgtaggtactggtgatacacgccactatttatgtatcccttgctacaacgagtctcgtggtgagactattgaggttgaaggtcaaacatttccgaaggcaaagttagagaaaaaaagaaatgaggaggaaacggaagaatggtgggttcaatgtgacaaatgtcaatgctggcaacatcaaatttgtgctctatttaatggaagaaggaacggtggaggacaagctgaatatacttgcccccattgctacgttgaggaggtcaaatgtgggctgcgcaaacctttaccacagagtgctgttcttggggcaaaagatttgccaagaactgttcttagtgatcatatagaagatcggttatttaaacgacttaagcaggagaaacaggaccgtgcagctgctgctggcaaaagtattgatgagattcctggagcggaaggacttgtggtcagagttgtttcatcagtggataaaaagctggaggttaaaccacgttttttggaaatttttcaagaagacaactaccctacagagttcccttacaagtccaaggctgttctcttgttccagagaatagaaggtgtggaagtatgtctatttggcatgtatgttcaagaatttggtgcagaatgctcttccccgaaccagcgccgtgtttatttgtcatacttggattctgttaagtactttagacctgagattaaaacagtatccggagaggccttgcgtacatatgtataccatgaaattctgataggatatcttgaatactgtaagctgcgggggttcacaagttgttacatatgggcttgcccacctttgaagggtgaagattacatcttatattgccatcctgagattcaaaagactccgaaatctgacaaactgcgtgagtggtacttatcgatgcttcggaaagcttctaaggaggaaattgttgttgagctgacaaatctatatgaccatttcttcatcactatggggggatgcaaggctaaggtgactgcttctcgcttgccatactttgatggagattattggccaggagctgcagaagatatgatcaatcaactccgacaagaagaagatgaccgtaaacttcagaaaaagagtaagacaaagaagattattacaaaaagagctcttaaagctgctggccacaccgatctcagcgggaatgcttccaaggatgctatgttgatgcaaaagcttggtgaaaccatatatcctatgaaggaagatttcattatggtccatttgcagtattcatgtagtcactgctgtacccttatggtgtctggaagacgttgggtttgtcatcaatgcagaagtttttacatctgtgacaagtgttatgacgcagaacagcaacttgaagacagggagaggcacccgtgtaatagtagagacacgcatatgctccatccggttgatattgttggggtgcccaaagataccaaagatagagatgacatcttagaaagcgagttctttgacaccaggcaggcattccttagcctttgccaaggaaatcattatcagtacgacacgcttcgccgcgcaaagcattcgtcaattatggtgctataccacctgcacaatccaactgcgccagcatttgtcactacgtgcaatgcctgctgccatgatatcgaaactggtcaaagctggcggtgtgagatctgtccagattttgacgtgtgcaacgcttgtttccaaaaaggagcggttactcatcctcacaagttaacgaaccatccatcagctgctgaccgtgacgctcagaacgcagaagctcggcaaatgcgtgttcagcagctaagaaagatgctcgatctcctggtacatgcgtcgatgtgccgctccggcagttgccagtatccccactgccgaaaagtaaagggactattccgtcacgggatgcagtgcaaaacccgtgcttcgggaggatgcgtcctctgcaagaagatgtggtacatgctccaactccacgcccgggcttgcaaagattcagagtgcaaagtgccacggtgcagggatctgaaggagcatctcagaaggttgcagcagcagtctgattcccggaggagggctgctgtgaatgagatgatgaggcagagagcggcggaagtggccgcaaactgagtagctgcctctgtacaggggtatatatctttgtggaaagaggataggaagtacgcagggcaacaagaaagattggggcggttgaatttgaagggggggattggttggtgaagacgaagcgcttcaacgtggatttcttatcctctgccccgtcgtcctccaaagagctcaagaaggcacaccattactgatgttaggcagtgctaaccagccacaccctgctcacgttgtctcctcaacccttgggggtgtggtgaattctttgatttgacctggtggtgctagctgggctgaagtgagctgatctcctcgtcgccgggtgtctctggacagtgccagccgtgtagttctgctgagacatttggttagccgctgatcttccccctcaccactctcctctcgtctcggtccaggatagataggagggtataggttaataaaagaaaaaaaagggtaaatagggacgggcgtttatttgtttatttctgcccccttctcccatccattttgtaggactcaaccttgataaaagtgtaaagcaaagtaatctctccatgtcttctcttgttccagtgctgctccatagatcgttgttgaaagtgcaggtggcccaggagggacagatttctgtgtggtatctcggaagcatgaatcatgtggactatctataggattcatgcttccaggtagtgtgatgctttgtgcccacattcctggcaaaggagatttttttt

SEQ ID NO: 46302 - DNA, 6443 bp, Zea Mays
cgccattccccgggccccatccgcagcgacccgccgcgcccgaacccgcgattggtcgacgccggttcctccttcaccgcgtcgctcgcagcaggcccccgccccgacaaattcccccattcccaaatcgcccgcgaactccccgccgcccgccccgcatcatcgacctggtcccgccgccgccgccgccgctcgccgccgtacggaatctcaggtaccccgtcgccgcgcccgcgcccgccaccctcctggcgtggtcctgccgggcttctagggtttcgggcgggccgaccctagggggtctgcaattcgcgggccgggctccacgccccgcggctcccccccgcgcctcggtcgccgatcgccgccatctgcccccgcgcggccctgggcggagcttccacacgctggcctgcctactacatgcggcagctgccacactgctgctcctgctcgatcgggactcgccccgcctcggattccgcgcaggatagaccgtttcctactaccgcgctgccgcacgtgggatgacctgaccctccgcctgcccccaagatgaatgtgggacatgctgcccacctgtccgggcagacagcgcacatgaatcaagttcctggctccggtgttggcattggtgttggcggctcagacgggctaccgcagcaccagccaatgcaggagatggcggcgctctcaggaatggaccagcagtttgtcatgcttcggaccgctatgcgcgacaagatatctgactatataggaagaaaacagtcaccgggtgattggcggaaacggttgcctgaactggcaaaacggcttgaggagatcttgtacagaaaattcccaaacaagcatgagtactacaatatgatgaagggaccagttgagccacaattgcaatttgctatcaagaccttgagtgctcagaaccaacacaatcaacaaaacccacaaatgacaaggcaaatatcatcgtcctctagctatggtgctatgattcctacccctggtatgacgcaaggcaccagtgcaggttctaggactccttatgtcacggagaccaatgctctttcatcgtctggtgcatgcatggttcctcagaatgctaacatgggtacctcaatgcaaggtccaatgtctaacgggtaccagcatttaaataccaacatttcacaaaattctaccacaaataatgtcgaatctacaatgggttcagttggcgttcagcgacaactatctcatatgatcccaactccaggattcagtaatcaacagaatgtaccttcaaatcctgactattcaaatggaactggatacttcaacggtgagtcagctgtggcgccacatatgcagcaccagaaacaatttcctagcaaccacaatagcaatcaaattcaacatattgggggacacaataattctgggatacattcaagcttgctggacaactcatctgcctatggtttatcagatggccacatgaatggtggcataggagtgcatgggtcaaatatgcagctaacaaacaggactactgccccagaagcatatatgaacatatcctcttatggcaattcgcccaaacctatgcagcagcaattcaatcagcaccctcagcagagaataccgattgatatggctggttccggcagcttttatgctattggctctacccctttaaccacagcaaatagtcagagcatgaatgttgcaaatttacaatctagatcaagcatgaatcagatgttggtttccaatcagctaaacattcagtccgtccagcaacagtcccagataaaaaatgggcctttggatcaaacagagaaggtgaattttcagtcaacacagctgactcatgatcaactactacaccagcacccaatgtcgcagcatcaggtgcaacctaattcccagtttattcaaaatcagtatcatataaatcagcagcagccaaattcacagcatcagcaggctatgttaaggaacaattcccttaaacagtctcaaatggcttccaaccattcaatgcaactgccagaacaggggactctgccacacactgaactagtttcttcacaagctagtgatcctgctgaccttccaaacttccagggtcaataccagcaaagaaatgctcttgacaatgttaaaggagggcagatgcttggtcatctatctagctctcaaaattttcttccttctgcctcacatggttctcagcaattgttgccctctaatccgcagcttgataacggttcaaatgctgtaagttatgtgctgaaaggatcacagacagagcaaatgctgctttctcaatggcagccacaaacaatggaaaaggctcctgtcgctactaattcatcactcgaaaaacaagtacaagaagattgttgtcaaagaataatgtcacaagatggagtacagcaaccattttcatcagattggtgtctttctaatggcactctcgcttctgttgatcctgcagtgccaaaacccacagctggagggtttgggcaggtcaagagaaatattcattacctccgtcagataaagtggttgctgttgctgtttcatgcaaaaacatgcacataccctgttggaagttgtaagttcaatggttgtgttcaggtgcaggagcttttgaaccattttcagaattgtcaaaggaaagattgttcgtacaggagttgcactaagtcaaaagcaatgtctcaccattataaaacttgtgtcgatgagcaatgtcctgtgtgcagcgttgtaaggaagtttttgcgccaatcaactgaacaggcatctaagcaaaaaactcttgagtctagaaaacttgctcaacaaaatgtgcctcagagaatcatgaacgggatagaaggtgatagaatggatgttgatccaatgtcagctgaagcgttcgaggatcaaccatctgttccaaaacgtttaaagatgcatcttccatcactcagtggcccagaaaatgatatctctgtagtctccaatcatcatgtaaacccaggctttctattgcaggaagcacagcctgagcagcttgagcacaataataggacaacatatctgaaacgagaggtagatgcaaaggctgacattcgggctcctcaaaagcccataaaaataagttatgacattgatgaaaatgtgactacatcaaggcataatgtgattcctggtgttcccagtgagatggactctcatatcaagcaagaaaacttgtcagttaacaaagagacaagtgaaactgcccttgaggttaaaaatgaaacaaatgatctaactgatgcgactgtgactaaatcaggaaaaccaaaaataaaaggtgtttctatgattgaattgttctatccagatgaagtagatgtacatattgacagtctaaagctgtgggttggtcagagtaaggctaaagctgaaaagaatcaagctattggtcattctgagaatgagaactcttgccagctctgtagagtagagaaacttacttttgaacctccaccaatgtattgttctccttgtggagctcggataaagcgaaacgcaccatactacgctgtaggtactggtgatacacgccactatttatgtatcccttgctacaacgagtctcgtggtgagactattgaggttgaaggtcaaacatttccgaaggcaaagttagagaaaaaaagaaatgaggaggaaacggaagaatggtgggttcaatgtgacaaatgtcaatgctggcaacatcaaatttgtgctctatttaatggaagaaggaacggtggaggacaagctgaatatacttgcccccattgctacgttgaggaggtcaaatgtgggctgcgcaaacctttaccacagagtgctgttcttggggcaaaagatttgccaagaactgttcttagtgatcatatagaagatcggttatttaaacgacttaagcaggagaaacaggaccgtgcagctgctgctggcaaaagtattgatgagattcctggagcggaaggacttgtggtcagagttgtttcatcagtggataaaaagctggaggttaaaccacgttttttggaaatttttcaagaagacaactaccctacagagttcccttacaagtccaaggctgttctcttgttccagagaatagaaggtgtggaagtatgtctatttggcatgtatgttcaagaatttggtgcagaatgctcttccccgaaccagcgccgtgtttatttgtcatacttggattctgttaagtactttagacctgagattaaaacagtatccggagaggccttgcgtacatatgtataccatgaaattctgataggatatcttgaatactgtaagctgcgggggttcacaagttgttacatatgggcttgcccacctttgaagggtgaagattacatcttatattgccatcctgagattcaaaagactccgaaatctgacaaactgcgtgagtggtacttatcgatgcttcggaaagcttctaaggaggaaattgttgttgagctgacaaatctatatgaccatttcttcatcactatggggggatgcaaggctaaggtgactgcttctcgcttgccatactttgatggagattattggccaggagctgcagaagatatgatcaatcaactccgacaagaagaagatgaccgtaaacttcagaaaaagagtaagacaaagaagattattacaaaaagagctcttaaagctgctggccacaccgatctcagcgggaatgcttccaaggatgctatgttgatgcaaaagcttggtgaaaccatatatcctatgaaggaagatttcattatggtccatttgcagtattcatgtagtcactgctgtacccttatggtgtctggaagacgttgggtttgtcatcaatgcagaagtttttacatctgtgacaagtgttatgacgcagaacagcaacttgaagacagggagaggcacccgtgtaatagtagagacacgcatatgctccatccggttgatattgttggggtgcccaaagataccaaagatagagatgacatcttagaaagcgagttctttgacaccaggcaggcattccttagcctttgccaaggaaatcattatcagtacgacacgcttcgccgcgcaaagcattcgtcaattatggtgctataccacctgcacaatccaactgcgccagcatttgtcactacgtgcaatgcctgctgccatgatatcgaaactggtcaaagctggcggtgtgagatctgtccagattttgacgtgtgcaacgcttgtttccaaaaaggagcggttactcatcctcacaagttaacgaaccatccatcagctgctgaccgtgacgctcagaacgcagaagctcggcaaatgcgtgttcagcagctaagaaagatgctcgatctcctggtacatgcgtcgatgtgccgctccggcagttgccagtatccccactgccgaaaagtaaagggactattccgtcacgggatgcagtgcaaaacccgtgcttcgggaggatgcgtcctctgcaagaagatgtggtacatgctccaactccacgcccgggcttgcaaagattcagagtgcaaagtgccacggtgcagggatctgaaggagcatctcagaaggttgcagcagcagtctgattcccggaggagggctgctgtgaatgagatgatgaggcagagagcggcggaagtggccgcaaactgagtagctgcctctgtacaggggtatatatctttgtggaaagaggataggaagtacgcagggcaacaagaaagattggggcggttgaatttgaagggggggattggttggtgaagacgaagcgcttcaacgtggatttcttatcctctgccccgtcgtcctccaaagagctcaagaaggcacaccattactgatgttaggcagtgctaaccagccacaccctgctcacgttgtctcctcaacccttgggggtgtggtgaattctttgatttgacctggtggtgctagctgggctgaagtgagctgatctcctcgtcgccgggtgtctctggacagtgccagccgtgtagttctgctgagacatttggttagccgctgatcttccccctcaccactctcctctcgtctcggtccaggatagataggagggtataggttaataaaagaaaaaaaagggtaaatagggacgggcgtttatttgtttatttctgcccccttctcccatccattttgtaggactcaaccttgataaaagtgtaaagcaaagtaatctctccatgtcttctcttgttccagtgctgctccatagatcgttgttgaaagtgcaggtggcccaggagggacagatttctgtgtggtatctcggaagcatgaatcatgtggactatctataggattcatgcttccaggtagtgtgatgctttgtgcccacattcctggcaaaggagatttttttt

SEQ ID NO: 46303 - DNA, 6436 bp, Zea Mays
cgccattccccgggccccatccgcagcgacccgccgcgcccgaacccgcgattggtcgacgccggttcctccttcaccgcgtcgctcgcagcaggcccccgccccgacaaattcccccattcccaaatcgcccgcgaactccccgccgcccgccccgcatcatcgacctggtcccgccgccgccgccgccgctcgccgccgtacggaatctcaggtaccccgtcgccgcgcccgcgcccgccaccctcctggcgtggtcctgccgggcttctagggtttcgggcgggccgaccctagggggtctgcaattcgcgggccgggctccacgccccgcggctcccccccgcgcctcggtcgccgatcgccgccatctgcccccgcgcggccctgggcggagcttccacacgctggcctgcctactacatgcggcagctgccacactgctgctcctgctcgatcgggactcgccccgcctcggattccgcgcaggatagaccgtttcctactaccgcgctgccgcacgtgggatgacctgaccctccgcctgcccccaagatgaatgtgggacatgctgcccacctgtccgggcagacagcgcacatgaatcaagttcctggctccggtgttggcattggtgttggcggctcagacgggctaccgcagcaccagccaatgcaggagatggcggcgctctcaggaatggaccagcagtttgtcatgcttcggaccgctatgcgcgacaagatatctgactatataggaagaaaacagtcaccgggtgattggcggaaacggttgcctgaactggcaaaacggcttgaggagatcttgtacagaaaattcccaaacaagcatgagtactacaatatgatgaagggaccagttgagccacaattgcaatttgctatcaagaccttgagtgctcagaaccaacacaatcaacaaaacccacaaatgacaaggcaaatatcatcgtcctctagctatggtgctatgattcctacccctggtatgacgcaaggcaccagtgcaggttctaggactccttatgtcacggagaccaatgctctttcatcgtctggtgcatgcatggttcctcagaatgctaacatgggtacctcaatgcaaggtccaatgtctaacgggtaccagcatttaaataccaacatttcacaaaattctaccacaaataatgtcgaatctacaatgggttcagttggcgttcagcgacaactatctcatatgatcccaactccaggattcagtaatcaacagaatgtaccttcaaatcctgactattcaaatggaactggatacttcaacggtgagtcagctgtggcgccacatatgcagcaccagaaacaatttcctagcaaccacaatagcaatcaaattcaacatattgggggacacaataattctgggatacattcaagcttgctggacaactcatctgcctatggtttatcagatggccacatgaatggtggcataggagtgcatgggtcaaatatgcagctaacaaacaggactactgccccagaagcatatatgaacatatcctcttatggcaattcgcccaaacctatgcagcagcaattcaatcagcaccctcagcagagaataccgattgatatggctggttccggcagcttttatgctattggctctacccctttaaccacagcaaatagtcagagcatgaatgttgcaaatttacaatctagatcaagcatgaatcagatgttggtttccaatcagctaaacattcagtccgtccagcaacagtcccagataaaaaatgggcctttggatcaaacagagaaggtgaattttcagtcaacacagctgactcatgatcaactactacaccagcacccaatgtcgcagcatcaggtgcaacctaattcccagtttattcaaaatcagtatcatataaatcagcagcagccaaattcacagcatcagcaggctatgttaaggaacaattcccttaaacagtctcaaatggcttccaaccattcaatgcaactgccagaacaggggactctgccacacactgaactagtttcttcacaagctagtgatcctgctgaccttccaaacttccagggtcaataccagcaaagaaatgctcttgacaatgttaaaggagggcagatgcttggtcatctatctagctctcaaaattttcttccttctgcctcacatggttctcagcaattgttgccctctaatccgcagcttgataacggttcaaatgctgtaagttatgtgctgaaaggatcacagacagagcaaatgctgctttctcaatggcagccacaaacaatggaaaaggctcctgtcgctactaattcatcactcgaaaaacaagtacaagaagattgttgtcaaagaataatgtcacaagatggagtacagcaaccattttcatcagattggtgtctttctaatggcactctcgcttctgttgatcctgcagtgccaaaacccacagctggagggtttgggcaggtcaagagaaatattcattacctccgtcagataaagtggttgctgttgctgtttcatgcaaaaacatgcacataccctgttggaagttgtaagttcaatggttgtgttcaggtgcaggagcttttgaaccattttcagaattgtcaaaggaaagattgttcgtacaggagttgcactaagtcaaaagcaatgtctcaccattataaaacttgtgtcgatgagcaatgtcctgtgtgcagcgttgtaaggaagtttttgcgccaatcaactgaacaggcatctaagcaaaaaactcttgagtctagaaaacttgctcaacaaaatgtgcctcagagaatcatgaacgggatagaaggtgatagaatggatgttgatccaatgtcagctgaagcgttcgaggatcaaccatctgttccaaaacgtttaaagatgcatcttccatcactcagtggcccagaaaatgatatctctgtagtctccaatcatcatgtaaacccaggctttctattgcaggaagcacagcctgagcagcttgagcacaataataggacaacatatctgaaacgagaggtagatgcaaaggctgacattcgggctcctcaaaagcccataaaaataagttatgacattgatgaaaatgtgactacatcaaggcataatgtgattcctggtgttcccagtgagatggactctcatatcaagcaagaaaacttgtcagttaacaaagagacaagtgaaactgcccttgaggttaaaaatgaaacaaatgatctaactgatgcgactgtgactaaatcaggaaaaccaaaaataaaaggtgtttctatgattgaattgttctatccagatgaagtagatgtacatattgacagtctaaagctgtgggttggtcagagtaaggctaaagctgaaaagaatcaagctattggtcattctgagaatgagaactcttgccagctctgtagagtagagaaacttacttttgaacctccaccaatgtattgttctccttgtggagctcggataaagcgaaacgcaccatactacgctgtaggtactggtgatacacgccactatttatgtatcccttgctacaacgagtctcgtggtgagactattgaggttgaaggtcaaacatttccgaaggcaaagttagagaaaaaaagaaatgaggaggaaacggaagaatggtgggttcaatgtgacaaatgtcaatgctggcaacatcaaatttgtgctctatttaatggaagaaggaacggtggaggacaagctgaatatacttgcccccattgctacgttgaggaggtcaaatgtgggctgcgcaaacctttaccacagagtgctgttcttggggcaaaagatttgccaagaactgttcttagtgatcatatagaagatcggttatttaaacgacttaagcaggagaaacaggaccgtgcagctgctgctggcaaaagtattgatgagattcctggagcggaaggacttgtggtcagagttgtttcatcagtggataaaaagctggaggttaaaccacgttttttggaaatttttcaagaagacaactaccctacagagttcccttacaagtccaaggctgttctcttgttccagagaatagaaggtgtggaagtatgtctatttggcatgtatgttcaagaatttggtgcagaatgctcttccccgaaccagcgccgtgtttatttgtcatacttggattctgttaagtactttagacctgagattaaaacagtatccggagaggccttgcgtacatatgtataccatgaaattctgataggatatcttgaatactgtaagctgcgggggttcacaagttgttacatatgggcttgcccacctttgaagggtgaagattacatcttatattgccatcctgagattcaaaagactccgaaatctgacaaactgcgtacttatcgatgcttcggaaagcttctaaggaggaaattgttgttgagctgacaaatctatatgaccatttcttcatcactatggggggatgcaaggctaaggtgactgcttctcgcttgccatactttgatggagattattggccaggagctgcagaagatatgatcaatcaactccgacaagaagaagatgaccgtaaacttcagaaaaagagtaagacaaagaagattattacaaaaagagctcttaaagctgctggccacaccgatctcagcgggaatgcttccaaggatgctatgttgatgcaaaagcttggtgaaaccatatatcctatgaaggaagatttcattatggtccatttgcagtattcatgtagtcactgctgtacccttatggtgtctggaagacgttgggtttgtcatcaatgcagaagtttttacatctgtgacaagtgttatgacgcagaacagcaacttgaagacagggagaggcacccgtgtaatagtagagacacgcatatgctccatccggttgatattgttggggtgcccaaagataccaaagatagagatgacatcttagaaagcgagttctttgacaccaggcaggcattccttagcctttgccaaggaaatcattatcagtacgacacgcttcgccgcgcaaagcattcgtcaattatggtgctataccacctgcacaatccaactgcgccagcatttgtcactacgtgcaatgcctgctgccatgatatcgaaactggtcaaagctggcggtgtgagatctgtccagattttgacgtgtgcaacgcttgtttccaaaaaggagcggttactcatcctcacaagttaacgaaccatccatcagctgctgaccgtgacgctcagaacgcagaagctcggcaaatgcgtgttcagcagctaagaaagatgctcgatctcctggtacatgcgtcgatgtgccgctccggcagttgccagtatccccactgccgaaaagtaaagggactattccgtcacgggatgcagtgcaaaacccgtgcttcgggaggatgcgtcctctgcaagaagatgtggtacatgctccaactccacgcccgggcttgcaaagattcagagtgcaaagtgccacggtgcagggatctgaaggagcatctcagaaggttgcagcagcagtctgattcccggaggagggctgctgtgaatgagatgatgaggcagagagcggcggaagtggccgcaaactgagtagctgcctctgtacaggggtatatatctttgtggaaagaggataggaagtacgcagggcaacaagaaagattggggcggttgaatttgaagggggggattggttggtgaagacgaagcgcttcaacgtggatttcttatcctctgccccgtcgtcctccaaagagctcaagaaggcacaccattactgatgttaggcagtgctaaccagccacaccctgctcacgttgtctcctcaacccttgggggtgtggtgaattctttgatttgacctggtggtgctagctgggctgaagtgagctgatctcctcgtcgccgggtgtctctggacagtgccagccgtgtagttctgctgagacatttggttagccgctgatcttccccctcaccactctcctctcgtctcggtccaggatagataggagggtataggttaataaaagaaaaaaaagggtaaatagggacgggcgtttatttgtttatttctgcccccttctcccatccattttgtaggactcaaccttgataaaagtgtaaagcaaagtaatctctccatgtcttctcttgttccagtgctgctccatagatcgttgttgaaagtgcaggtggcccaggagggacagatttctgtgtggtatctcggaagcatgaatcatgtggactatctataggattcatgcttccaggtagtgtgatgctttgtgcccacattcctggcaaaggagatttttttt

SEQ ID NO: 46304 - DNA, 6481 bp, Zea Mays
cccgcgtcgcatccgcgcctagagaggagagccgccattccccgggccccatccgcagcgacccgccgcgcccgaacccgcgattggtcgacgccggttcctccttcaccgcgtcgctcgcagcaggcccccgccccgacaaattcccccattcccaaatcgcccgcgaactccccgccgcccgccccgcatcatcgacctggtcccgccgccgccgccgccgctcgccgccgtacggaatctcaggtaccccgtcgccgcgcccgcgcccgccaccctcctggcgtggtcctgccgggcttctagggtttcgggcgggccgaccctagggggtctgcaattcgcgggccgggctccacgccccgcggctcccccccgcgcctcggtcgccgatcgccgccatctgcccccgcgcggccctgggcggagcttccacacgctggcctgcctactacatgcggcagctgccacactgctgctcctgctcgatcgggactcgccccgcctcggattccgcgcaggatagaccgtttcctactaccgcgctgccgcacgtgggatgacctgaccctccgcctgcccccaagatgaatgtgggacatgctgcccacctgtccgggcagacagcgcacatgaatcaagttcctggctccggtgttggcattggtgttggcggctcagacgggctaccgcagcaccagccaatgcaggagatggcggcgctctcaggaatggaccagcagtttgtcatgcttcggaccgctatgcgcgacaagatatctgactatataggaagaaaacagtcaccgggtgattggcggaaacggttgcctgaactggcaaaacggcttgaggagatcttgtacagaaaattcccaaacaagcatgagtactacaatatgatgaagggaccagttgagccacaattgcaatttgctatcaagaccttgagtgctcagaaccaacacaatcaacaaaacccacaaatgacaaggcaaatatcatcgtcctctagctatggtgctatgattcctacccctggtatgacgcaaggcaccagtgcaggttctaggactccttatgtcacggagaccaatgctctttcatcgtctggtgcatgcatggttcctcagaatgctaacatgggtacctcaatgcaaggtccaatgtctaacgggtaccagcatttaaataccaacatttcacaaaattctaccacaaataatgtcgaatctacaatgggttcagttggcgttcagcgacaactatctcatatgatcccaactccaggattcagtaatcaacagaatgtaccttcaaatcctgactattcaaatggaactggatacttcaacggtgagtcagctgtggcgccacatatgcagcaccagaaacaatttcctagcaaccacaatagcaatcaaattcaacatattgggggacacaataattctgggatacattcaagcttgctggacaactcatctgcctatggtttatcagatggccacatgaatggtggcataggagtgcatgggtcaaatatgcagctaacaaacaggactactgccccagaagcatatatgaacatatcctcttatggcaattcgcccaaacctatgcagcagcaattcaatcagcaccctcagcagagaataccgacatcagttgatatggctggttccggcagcttttatgctattggctctacccctttaaccacagcaaatagtcagagcatgaatgttgcaaatttacaatctagatcaagcatgaatcagatgttggtttccaatcagctaaacattcagtccgtccagcaacagtcccagataaaaaatgggcctttggatcaaacagagaaggtgaattttcagtcaacacagctgactcatgatcaactactacaccagcacccaatgtcgcagcatcaggtgcaacctaattcccagtttattcaaaatcagtatcatataaatcagcagcagccaaattcacagcatcagcaggctatgttaaggaacaattcccttaaacagtctcaaatggcttccaaccattcaatgcaactgccagaacaggggactctgccacacactgaactagtttcttcacaagctagtgatcctgctgaccttccaaacttccagggtcaataccagcaaagaaatgctcttgacaatgttaaaggagggcagatgcttggtcatctatctagctctcaaaattttcttccttctgcctcacatggttctcagcaattgttgccctctaatccgcagcttgataacggttcaaatgctgtaagttatgtgctgaaaggatcacagacagagcaaatgctgctttctcaatggcagccacaaacaatggaaaaggctcctgtcgctactaattcatcactcgaaaaacaagtacaagaagattgttgtcaaagaataatgtcacaagatggagtacagcaaccattttcatcagattggtgtctttctaatggcactctcgcttctgttgatcctgcagtgccaaaacccacagctggagggtttgggcaggtcaagagaaatattcattacctccgtcagataaagtggttgctgttgctgtttcatgcaaaaacatgcacataccctgttggaagttgtaagttcaatggttgtgttcaggtgcaggagcttttgaaccattttcagaattgtcaaaggaaagattgttcgtacaggagttgcactaagtcaaaagcaatgtctcaccattataaaacttgtgtcgatgagcaatgtcctgtgtgcagcgttgtaaggaagtttttgcgccaatcaactgaacaggcatctaagcaaaaaactcttgagtctagaaaacttgctcaacaaaatgtgcctcagagaatcatgaacgggatagaaggtgatagaatggatgttgatccaatgtcagctgaagcgttcgaggatcaaccatctgttccaaaacgtttaaagatgcatcttccatcactcagtggcccagaaaatgatatctctgtagtctccaatcatcatgtaaacccaggctttctattgcaggaagcacagcctgagcagcttgagcacaataataggacaacatatctgaaacgagaggtagatgcaaaggctgacattcgggctcctcaaaagcccataaaaataagttatgacattgatgaaaatgtgactacatcaaggcataatgtgattcctggtgttcccagtgagatggactctcatatcaagcaagaaaacttgtcagttaacaaagagacaagtgaaactgcccttgaggttaaaaatgaaacaaatgatctaactgatgcgactgtgactaaatcaggaaaaccaaaaataaaaggtgtttctatgattgaattgttctatccagatgaagtagatgtacatattgacagtctaaagctgtgggttggtcagagtaaggctaaagctgaaaagaatcaagctattggtcattctgagaatgagaactcttgccagctctgtagagtagagaaacttacttttgaacctccaccaatgtattgttctccttgtggagctcggataaagcgaaacgcaccatactacgctgtaggtactggtgatacacgccactatttatgtatcccttgctacaacgagtctcgtggtgagactattgaggttgaaggtcaaacatttccgaaggcaaagttagagaaaaaaagaaatgaggaggaaacggaagaatggtgggttcaatgtgacaaatgtcaatgctggcaacatcaaatttgtgctctatttaatggaagaaggaacggtggaggacaagctgaatatacttgcccccattgctacgttgaggaggtcaaatgtgggctgcgcaaacctttaccacagagtgctgttcttggggcaaaagatttgccaagaactgttcttagtgatcatatagaagatcggttatttaaacgacttaagcaggagaaacaggaccgtgcagctgctgctggcaaaagtattgatgagattcctggagcggaaggacttgtggtcagagttgtttcatcagtggataaaaagctggaggttaaaccacgttttttggaaatttttcaagaagacaactaccctacagagttcccttacaagtccaaggctgttctcttgttccagagaatagaaggtgtggaagtatgtctatttggcatgtatgttcaagaatttggtgcagaatgctcttccccgaaccagcgccgtgtttatttgtcatacttggattctgttaagtactttagacctgagattaaaacagtatccggagaggccttgcgtacatatgtataccatgaaattctgataggatatcttgaatactgtaagctgcgggggttcacaagttgttacatatgggcttgcccacctttgaagggtgaagattacatcttatattgccatcctgagattcaaaagactccgaaatctgacaaactgcgtgagtggtacttatcgatgcttcggaaagcttctaaggaggaaattgttgttgagctgacaaatctatatgaccatttcttcatcactatggggggatgcaaggctaaggtgactgcttctcgcttgccatactttgatggagattattggccaggagctgcagaagatatgatcaatcaactccgacaagaagaagatgaccgtaaacttcagaaaaagagtaagacaaagaagattattacaaaaagagctcttaaagctgctggccacaccgatctcagcgggaatgcttccaaggatgctatgttgatgcaaaagcttggtgaaaccatatatcctatgaaggaagatttcattatggtccatttgcagtattcatgtagtcactgctgtacccttatggtgtctggaagacgttgggtttgtcatcaatgcagaagtttttacatctgtgacaagtgttatgacgcagaacagcaacttgaagacagggagaggcacccgtgtaatagtagagacacgcatatgctccatccggttgatattgttggggtgcccaaagataccaaagatagagatgacatcttagaaagcgagttctttgacaccaggcaggcattccttagcctttgccaaggaaatcattatcagtacgacacgcttcgccgcgcaaagcattcgtcaattatggtgctataccacctgcacaatccaactgcgccagcatttgtcactacgtgcaatgcctgctgccatgatatcgaaactggtcaaagctggcggtgtgagatctgtccagattttgacgtgtgcaacgcttgtttccaaaaaggagcggttactcatcctcacaagttaacgaaccatccatcagctgctgaccgtgacgctcagaacgcagaagctcggcaaatgcgtgttcagcagctaagaaagatgctcgatctcctggtacatgcgtcgatgtgccgctccggcagttgccagtatccccactgccgaaaagtaaagggactattccgtcacgggatgcagtgcaaaacccgtgcttcgggaggatgcgtcctctgcaagaagatgtggtacatgctccaactccacgcccgggcttgcaaagattcagagtgcaaagtgccacggtgcagggatctgaaggagcatctcagaaggttgcagcagcagtctgattcccggaggagggctgctgtgaatgagatgatgaggcagagagcggcggaagtggccgcaaactgagtagctgcctctgtacaggggtatatatctttgtggaaagaggataggaagtacgcagggcaacaagaaagattggggcggttgaatttgaagggggggattggttggtgaagacgaagcgcttcaacgtggatttcttatcctctgccccgtcgtcctccaaagagctcaagaaggcacaccattactgatgttaggcagtgctaaccagccacaccctgctcacgttgtctcctcaacccttgggggtgtggtgaattctttgatttgacctggtggtgctagctgggctgaagtgagctgatctcctcgtcgccgggtgtctctggacagtgccagccgtgtagttctgctgagacatttggttagccgctgatcttccccctcaccactctcctctcgtctcggtccaggatagataggagggtataggttaataaaagaaaaaaaagggtaaatagggacgggcgtttatttgtttatttctgcccccttctcccatccattttgtaggactcaaccttgataaaagtgtaaagcaaagtaatctctccatgtcttctcttgttccagtgctgctccatagatcgttgttgaaagtgcaggtggcccaggagggacagatttctgtgtggtatctcggaagcatgaatcatgtggactatctataggattcatgcttccaggtagtgtgatgctttgtgcccacattcctggcaaaggagatttttttt

SEQ ID NO: 46305 - DNA, 3487 bp, Zea Mays
agatgaatgtgggacatgctgcccacctgtccgggcagacagcgcacatgaatcaagttcctggctccggtgttggcattggtgttggcggctcagacgggctaccgcagcaccagccaatgcaggagatggcggcgctctcaggaatggaccagcagtttgtcatgcttcggaccgctatgcgcgacaagatatctgactatataggaagaaaacagtcaccgggtgattggcggaaacggttgcctgaactggcaaaacggcttgaggagatcttgtacagaaaattcccaaacaagcatgagtactacaatatgatgaagggaccagttgagccacaattgcaatttgctatcaagaccttgagtgctcagaaccaacacaatcaacaaaacccacaaatgacaaggcaaatatcatcgtcctctagctatggtgctatgattcctacccctggtatgacgcaaggcaccagtgcaggttctaggactccttatgtcacggagaccaatgctctttcatcgtctggtgcatgcatggttcctcagaatgctaacatgggtacctcaatgcaaggtccaatgtctaacgggtaccagcatttaaataccaacatttcacaaaattctaccacaaataatgtcgaatctacaatgggttcagttggcgttcagcgacaactatctcatatgatcccaactccaggattcagtaatcaacagaatgtaccttcaaatcctgactattcaaatggaactggatacttcaacggtgagtcagctgtggcgccacatatgcagcaccagaaacaatttcctagcaaccacaatagcaatcaaattcaacatattgggggacacaataattctgggatacattcaagcttgctggacaactcatctgcctatggtttatcagatggccacatgaatggtggcataggagtgcatgggtcaaatatgcagctaacaaacaggactactgccccagaagcatatatgaacatatcctcttatggcaattcgcccaaacctatgcagcagcaattcaatcagcaccctcagcagagaataccgacatcagttgatatggctggttccggcagcttttatgctattggctctacccctttaaccacagcaaatagtcagagcatgaatgttgcaaatttacaatctagatcaagcatgaatcagatgttggtttccaatcagctaaacattcagtccgtccagcaacagtcccagataaaaaatgggcctttggatcaaacagagaaggtgaattttcagtcaacacagctgactcatgatcaactactacaccagcacccaatgtcgcagcatcaggtgcaacctaattcccagtttattcaaaatcagtatcatataaatcagcagcagccaaattcacagcatcagcaggctatgttaaggaacaattcccttaaacagtctcaaatggcttccaaccattcaatgcaactgccagaacaggggactctgccacacactgaactagtttcttcacaagctagtgatcctgctgaccttccaaacttccagggtcaataccagcaaagaaatgctcttgacaatgttaaaggagggcagatgcttggtcatctatctagctctcaaaattttcttccttctgcctcacatggttctcagcaattgttgccctctaatccgcagcttgataacggttcaaatgctgtaagttatgtgctgaaaggatcacagacagagcaaatgctgctttctcaatggcagccacaaacaatggaaaaggctcctgtcgctactaattcatcactcgaaaaacaagtacaagaagattgttgtcaaagaataatgtcacaagatggagtacagcaaccattttcatcagattggtgtctttctaatggcactctcgcttctgttgatcctgcagtgccaaaacccacagctggagggtttgggcaggtcaagagaaatattcattacctccgtcagataaagtggttgctgttgctgtttcatgcaaaaacatgcacataccctgttggaagttgtaagttcaatggttgtgttcaggtgcaggagcttttgaaccattttcagaattgtcaaaggaaagattgttcgtacaggagttgcactaagtcaaaagcaatgtctcaccattataaaacttgtgtcgatgagcaatgtcctgtgtgcagcgttgtaaggaagtttttgcgccaatcaactgaacaggcatctaagcaaaaaactcttgagtctagaaaacttgctcaacaaaatgtgcctcagagaatcatgaacgggatagaaggtgatagaatggatgttgatccaatgtcagctgaagcgttcgaggatcaaccatctgttccaaaacgtttaaagatgcatcttccatcactcagtggcccagaaaatgatatctctgtagtctccaatcatcatgtaaacccaggctttctattgcaggaagcacagcctgagcagcttgagcacaataataggacaacatatctgaaacgagaggtagatgcaaaggctgacattcgggctcctcaaaagcccataaaaataagttatgacattgatgaaaatgtgactacatcaaggcataatgtgattcctggtgttcccagtgagatggactctcatatcaagcaagaaaacttgtcagttaacaaagagacaagtgaaactgcccttgaggttaaaaatgaaacaaatgatctaactgatgcgactgtgactaaatcaggaaaaccaaaaataaaaggtgtttctatgattgaattgttctatccagatgaagtagatgtacatattgacagtctaaagctgtgggttggtcagagtaaggctaaagctgaaaagaatcaagctattggtcattctgagaatgagaactcttgccagctctgtagagtagagaaacttacttttgaacctccaccaatgtattgttctccttgtggagctcggataaagcgaaacgcaccatactacgctgtaggtactggtgatacacgccactatttatgtatcccttgctacaacgagtctcgtggtgagactattgaggttgaaggtcaaacatttccgaaggcaaagttagagaaaaaaagaaatgaggaggaaacggaagaatggtgggttcaatgtgacaaatgtcaatgctggcaacatcaaatttgtgctctatttaatggaagaaggaacggtggaggacaagctgaatatacttgcccccattgctacgttgaggaggtcaaatgtgggctgcgcaaacctttaccacagagtgctgttcttggggcaaaagatttgccaagaactgttcttagtgatcatatagaagatcggttatttaaacgacttaagcaggagaaacaggaccgtgcagctgctgctggcaaaagtattgatgagtttggatactcaagcacaatgagctttgtttatttacctgattttga

SEQ ID NO: 46306 - DNA, 1453 bp, Zea Mays
cttgggtttttgggttttgtgcccgccacctgatcgcgggagccgtcgccttccttcctcctccccgccgcctcagccctcatggtcatggagaccggagaccccgggaagctgttgcgcgggcattccctctctcgtgttcctcccgcttcccctttccctcggctcaggcctcagggagatttggttagggcaggggacgaacgagcgcgggcgtcaggtatgccgggagaggaggacgtccgcaaggtctcgcgcgaggacatacagcttgtccagaacctcatcgagcgttgccttcagctatatatgaaccagaaagaagtggtggacaccctatctttccaggcaaaaatagaacctagtttcactgagatcgtctggcagagactcgaggaagagaaccgtgatttttttaaggcatactatgcgaggctgatgcttatgaatcaaatagtgtccttcaataagcttcttgagcagcagcatcagattatgaataaagatcatcattatgggatgcctgctatgccttctactgctcctaatggctcaaacactaacatgttgaaccaagccatgccatttctgccagacactatccccagtactgcaatgcaagataacttgttgagtaatggaggttctagtagtatagtaaatggtgctccatccaatgaccagtgtagctattctggtaaagttgctcatggccttcctggtgtcatggatgcttcatcaagccttctagcagcacacaaatcgacagttgggcagtttaatggacacaatggaacaacgacaaagacagagtctgactactcaagcaactcagattttggattaggcaatgagaccgtgttcctggagcagtcatttggagatatatcaggtggatcgtttagcagctctgagttgaatggacaaccagtaggttcatcttcgtatggtttcttgagccagattccttgtaatttcagcctttcggattggacagattgtttcagccaaagctcagaaatttttgagaattacggtgggtcccctttcatcccttacgatgcaaataacatcccagagtctagcgctcgagaaaatacaggttgagcagtgttccatttgtacatactattttgggcagaaacaaaaatatctacagtcgtgatcgtggaactagctgacttggtggcaaccgtttctttttctgttataggttttgatgcttcttagagtagaagcatggatggcttcttttgaagggtaggaccaaataatctgtcattgaatggtgtcaacaaaatcatcttctgagggtaatgtggtggtaaactgtattcgttgtactccttccgtttctttttagttgtcgctggatagttcaattttgcactgtccagcgacaactaaaacgaaacggagggagggagtagctttctagtgtggaagctcttcg

SEQ ID NO: 46307 - DNA, 1953 bp, Zea Mays
cgcccgaccgttttcactcttagcccacactacgttcttaataggagtatagatttcaacactttcacttcacataacggctgtgtcctgtagctgctctcttttatggttgatggttacgacctgaacagatcgatcgtccttcctgtcgtttcgtttcctcgccggcagggcactgggtacgccgccgccgcctcaacgccaccacgctgccgccgcgccagttcgtcatcgcgagacacaagacacgtgcctcgcttccccccgggccggttggccgtcgctgttctgttcctatttcttggcaactccgcccgtttcacctccggaggaccgacagcgacggcgccagtagatagatgcactactgacgccactggccacctcgagctcgagtgccaagggacgccacgagaccaaccgtgaggacaggacagcggtcgcctttgcccgcggatccgcggatttcgtcttcttgggtgccatggatccagtcgccggcacggcggagcatcggggcccgttggaagtgcgcgcccgcgcgcccggcaagatcatcctcgcgggcgagcacgccgtcgtccacggctccgccgccgtcgccgctgccatcgatctctacaccaactcctccctcctcctccgccccacaggagagggtggcggcgctggctccggcgcggtggagctggacctcagggactcgggcctcaccttctcgtggccgtgctcgcgcctccgcggggcgctgggggaggagatcagcgccaaccccggggctccggcgccgtgctcccctgaccagctggccgccattgccaggctcttgcaggaccaggagatccctgaggccaagatctggctctccgccggcctctccgccttcctttttctctacgcctccattttgggatgcaggcctggcaaggcagtggtgtcctcggacctgcccatgggcgcagggctcggctcatcagcggcattttgtgtttccatgtcgggggcgctattgactgctgctggtgcagtaagtgttggagcacgcaggggtgctgagggttgggaggtgttggagaagggtgctcttgagctggtcaaccaatgggcgttccaaggggaaaagattattcatggcaagccttctggcattgacaattccgtcagcacttttgggaaaatgatcaaattcaagaagggggaactgacaaaccttgagtcctggaacccagtcaaaatgcttattactgatacaagagttggtaggaacacaaaggcattggttgctggtgtgtctgaaagggcgtctaggcatccagatgctatggcttctgtcttccatgcagtgaactctattagtgaagagctttcaagcattgttgagttagcagccgaggatgagatagccatcacctctaaggaggataagctagcagagcttatggagatgaaccaagctaactggagctggtggtggaggctgtgtgttgactctaataccgacgttatcggccaatactgttctggagaaagtcaccacagagctcgaatctcacggttatcgctgcttcaaagttgaggttggtgggcgaggtctccaagtattccgtggatagcactcatcctatttcaaggagatgttgtaccaaacttagatggcttacctgcattgaagctgtttagattctcttcttgagttattccaagatcatgataggatattcttctcctaagcctagcaggttcttgtatccagtactttgctccaggattaggacattcttatgctatccctagcgatcttgtatcaaataagctcatagatgcatgatcattgctggtgtgattgttgtattaagtaaacagacttttaattgctccaaatgtcgtatcgacttcatgatgccagcagctacccatatgtgcgagtgcgacctctccacaggcggcttcaac

SEQ ID NO: 46308 - DNA, 1924 bp, Zea Mays
cgcccgaccgttttcactcttagcccacactacgttcttaataggagtatagatttcaacactttcacttcacataacggctgtgtcctgtagctgctctcttttatggttgatggttacgacctgaacagatcgatcgtccttcctgtcgtttcgtttcctcgccggcagggcactgggtacgccgccgccgcctcaacgccaccacgctgccgccgcgccagttcgtcatcgcgagacacaagacacgtgcctcgcttccccccgggccggttggccgtcgctgttctgttcctatttcttggcaactccgcccgtttcacctccggaggaccgacagcgacggcgccagtagatagatgcactactgacgccactggccacctcgagctcgagtgccaagggacgccacgagaccaaccgtgaggacaggacagcggtcgcctttgcccgcggatccgcggatttcgtcttcttgggtgccatggatccagtcgccggcacggcggagcatcggggcccgttggaagtgcgcgcccgcgcgcccggcaagatcatcctcgcgggcgagcacgccgtcgtccacggctccgccgccgtcgccgctgccatcgatctctacaccaactcctccctcctcctccgccccacaggcccaggagagggtggcggcgctggctccggcgcggtggagctggacctcagggactcgggcctcaccttctcgtggccgtgctcgcgcctccgcggggcgctgggggaggagatcagcgccaaccccggggctccggcgccgtgctcccctgaccagctggccgccattgccaggctcttgcaggaccaggagatccctgaggccaagatctggctctccgccggcctctccgccttcctttttctctacgcctccattttgggatgcaggcctggcaaggcagtggtgtcctcggacctgcccatgggcgcagggctcggctcatcagcggcattttgtgtttccatgtcgggggcgctattgactgctgctggtgcagtaagtgttggagaagggtgctcttgagctggtcaaccaatgggcgttccaaggggaaaagattattcatggcaagccttctggcattgacaattccgtcagcacttttgggaaaatgatcaaattcaagaagggggaactgacaaaccttgagtcctggaacccagtcaaaatgcttattactgatacaagagttggtaggaacacaaaggcattggttgctggtgtgtctgaaagggcgtctaggcatccagatgctatggcttctgtcttccatgcagtgaactctattagtgaagagctttcaagcattgttgagttagcagccgaggatgagatagccatcacctctaaggaggataagctagcagagcttatggagatgaaccaagctaactggagctggtggtggaggctgtgtgttgactctaataccgacgttatcggccaatactgttctggagaaagtcaccacagagctcgaatctcacggttatcgctgcttcaaagttgaggttggtgggcgaggtctccaagtattccgtggatagcactcatcctatttcaaggagatgttgtaccaaacttagatggcttacctgcattgaagctgtttagattctcttcttgagttattccaagatcatgataggatattcttctcctaagcctagcaggttcttgtatccagtactttgctccaggattaggacattcttatgctatccctagcgatcttgtatcaaataagctcatagatgcatgatcattgctggtgtgattgttgtattaagtaaacagacttttaattgctccaaatgtcgtatcgacttcatgatgccagcagctacccatatgtgcgagtgcgacctctccacaggcggcttcaac

SEQ ID NO: 46309 - DNA, 2572 bp, Zea Mays
gttttcaccgcgaactttgcaccgcgcccgaccgttttcactcttagcccacactacgttcttaataggagtatagatttcaacactttcacttcacataacggctgtgtcctgtagctgctctcttttatggttgatggttacgacctgaacagatcgatcgtccttcctgtcgtttcgtttcctcgccggcagggcactgggtacgccgccgccgcctcaacgccaccacgctgccgccgcgccagttcgtcatcgcgagacacaagacacgtgcctcgcttccccccgggccggttggccgtcgctgttctgttcctatttcttggcaactccgcccgtttcacctccggaggaccgacagcgacggcgccagtagatagatgcactactgacgccactggccacctcgagctcgagtgccaagggacgccacgagaccaaccgtgaggacaggacagcggtcgcctttgcccgcggatccgcggatttcgtcttcttgggtgccatggatccagtcgccggcacggcggagcatcggggcccgttggaagtgcgcgcccgcgcgcccggcaagatcatcctcgcgggcgagcacgccgtcgtccacggctccgccgccgtcgccgctgccatcgatctctacaccaactcctccctcctcctccgccccacaggagagggtggcggcgctggctccggcgcggtggagctggacctcagggactcgggcctcaccttctcgtggccgtgctcgcgcctccgcggggcgctgggggaggagatcagcgccaaccccggggctccggcgccgtgctcccctgaccagctggccgccattgccaggctcttgcaggaccaggagatccctgaggccaagatctggctctccgccggcctctccgccttcctttttctctacgcctccattttgggatgcaggcctggcaaggcagtggtgtcctcggacctgcccatgggcgcagggctcggctcatcagcggcattttgtgtttccatgtcgggggcgctattgactgctgctggtgcagtaagtgttggagcacgcaggggtgctgagggttgggaggtgttggagaagggtgctcttgagctggtcaaccaatgggcgttccaaggggaaaagattattcatggcaagccttctggcattgacaattccgtcagcacttttgggaaaatgatcaaattcaagaagggggaactgacaaaccttgagtcctggaacccagtcaaaatgcttattactgatacaagagttggtaggaacacaaaggcattggttgctggtgtgtctgaaagggcgtctaggcatccagatgctatggcttctgtcttccatgcagtgaactctattagtgaagagctttcaagcattgttgagttagcagccgaggatgagatagccatcacctctaaggaggataagctagcagagcttatggagatgaaccaaggtttgcttcagtgtatgggagtcagccattcttctatagaaactgtgttgcggaccactctgaaatatagcttggtctcaaagctaactggagctggtggtggaggctgtgtgttgactctaataccgacgtgtatccttttttatatatcccctggctgcatcttttcctttatggttttatacaaaataaacaccatacaacttatgtgtgatttctgttaatctttaacatttcaactcaaagcttttcagaaatctgggtcttgatatttgcattaataatgaacctgacagtttgggaacttgagaactacagtggcctgtcttatgctctctctgtttgaaatcgtagttcattttggctttgtcctaagtcgattttttttttaactttgaatgaagtgcttgttacttaacactatatagtcatgtagaataattctaggttccatcccatctaatatatatgaggtttttaaataaatatatcaatgtggaaggacaggatctgtagcagtttaaattcctaaacatccatagatctcatcgtatctgagtttctgttctgtacctacttagagaagtttttcatctgactgtcattttcaataatgtcaaatgcttccttgacatgattatcagtatcggccaatactgttctggagaaagtcaccacagagctcgaatctcacggttatcgctgcttcaaagttgaggttggtgggcgaggtctccaagtattccgtggatagcactcatcctatttcaaggagatgttgtaccaaacttagatggcttacctgcattgaagctgtttagattctcttcttgagttattccaagatcatgataggatattcttctcctaagcctagcaggttcttgtatccagtactttgctccaggattaggacattcttatgctatccctagcgatcttgtatcaaataagctcatagatgcatgatcattgctggtgtgattgttgtattaagtaaacagacttttaattgctccaaatgtcgtatcgacttcatgatgccagcagctacccatatgtgcgagtgcgacctctccacaggcggcttcaac

SEQ ID NO: 46310 - DNA, 1416 bp, Zea Mays
ctttttcgaaaggatcctaggtgcatatgtgtcaggttgtgccgatggaaaatatgaatggtcgcaaacgtgtcgaagaaggggagctttgtgataggagaaatggaagaggagttgatctcaacagaaattggagtgttgactggggaaagaaagaaaaagactacgacccatacgaggagaatcctggtattgctccttttagcgaacctgaggcccagatcatgagggaattatcaaggtcgtttaaacctcatatttgggtgaacgtgcattctggaatggagaataccacaccaaatggagcatctgcacattcgatgcggtcagtcttagagaatttgaaccgtcgccatttccaagatagctgcctagttgggtcaggtggtggatctgttggatatcttgcacatggtacaacaactgattacatgtatgacattgcaaaggtgccaatgccgttcacctttgagatatatggagatgagaaagcatcttccgatgactgcttcaaaatgttcaatcctgttgacaagaaaacattcgacagagttgttaacaagtggtgcatggcatttctcattctcttcgaggaaggcctgcgaaacctgcgagacgcgcagatagtgtcgcaaggcacgctggaaaactgggtcccaattggaggagacatcgtcgagataaatgtggagcggaagagcagcatccgtgagaggaggaagctggaaggcctcgaccttggaatgcaggagctaaggacatatttccggctattcttgctgtcaacattcctgttgatgttcatgttctgcgcgcggatatcaaagaacagaaaccgagactcaggtaacttgtttgacccttgaatgaagtaccaaagagagcatcggtgggggggggcctcctccgagctgaacttcgggtgcaaagagcgatcccctcagatcagacgaacaaagcgatctgaaacattcagagctggaatacagctctgccttcgcaccctggtattcggagctggacgtcccgtatactttggacacgaaggatggtggcaggcagtgtctgtttaggttacagcagagacgccagacgatgtggctaactgtttaacaaaattgtagctgtaaaaatcgcccatgtcagtttttttttggtgatgcataggttttactactacattttgatggaaggttgttagtgcacccaacacttggtacggtgccatcagttgatgtaacatctcactgatcgagcggtttatgtggaattgtgttggctcgaatttcttctgggttctcaaattcatttcgtaactttcaaagtttaaatatttatatgtatacatatatttaaggtcgtgtatgtatataggaccttgtatgagtgtggagggatggaccgtccgctccgcta

SEQ ID NO: 46311 - DNA, 1443 bp, Zea Mays
ctttttcgaaaggatcctaggtgcatatgtgtcaggttgtgccgatggaaaatatgaatggtcgcaaacgtgtcgaagaaggggagctttgtgataggagaaatggaagaggagttgatctcaacagaaattggagtgttgactggggaaagaaagaaaaagactacgacccatacgaggagaatcctggtattgctccttttagcgaacctgaggcccagatcatgagggaattatcaaggtcgtttaaacctcatatttgggtgaacgtgcattctggaatggaggccttatttatgccatatgatcacaagaataccacaccaaatggagcatctgcacattcgatgcggtcagtcttagagaatttgaaccgtcgccatttccaagatagctgcctagttgggtcaggtggtggatctgttggatatcttgcacatggtacaacaactgattacatgtatgacattgcaaaggtgccaatgccgttcacctttgagatatatggagatgagaaagcatcttccgatgactgcttcaaaatgttcaatcctgttgacaagaaaacattcgacagagttgttaacaagtggtgcatggcatttctcattctcttcgaggaaggcctgcgaaacctgcgagacgcgcagatagtgtcgcaaggcacgctggaaaactgggtcccaattggaggagacatcgtcgagataaatgtggagcggaagagcagcatccgtgagaggaggaagctggaaggcctcgaccttggaatgcaggagctaaggacatatttccggctattcttgctgtcaacattcctgttgatgttcatgttctgcgcgcggatatcaaagaacagaaaccgagactcaggtaacttgtttgacccttgaatgaagtaccaaagagagcatcggtgggggggggcctcctccgagctgaacttcgggtgcaaagagcgatcccctcagatcagacgaacaaagcgatctgaaacattcagagctggaatacagctctgccttcgcaccctggtattcggagctggacgtcccgtatactttggacacgaaggatggtggcaggcagtgtctgtttaggttacagcagagacgccagacgatgtggctaactgtttaacaaaattgtagctgtaaaaatcgcccatgtcagtttttttttggtgatgcataggttttactactacattttgatggaaggttgttagtgcacccaacacttggtacggtgccatcagttgatgtaacatctcactgatcgagcggtttatgtggaattgtgttggctcgaatttcttctgggttctcaaattcatttcgtaactttcaaagtttaaatatttatatgtatacatatatttaaggtcgtgtatgtatataggaccttgtatgagtgtggagggatggaccgtccgctccgcta

SEQ ID NO: 46312 - DNA, 1806 bp, Zea Mays
atcctgctagactcgccgacggattcccgccccggtcccgacggcggtgcggcctgcgcctgccctggccacatgcctccccctctaccagtgactctcttctgcgtgaaatcaaggctttggttgctcggcattccagcaaattgagtatggacactatcaaaacaagcaacaaaggctattctgcagagctgtttgtagttacatttaatcatgtgaaggagcgcatggataatggctcaaaagttcatatccttctgagctttgggcagcatggcagagaacttatcacctccgaagttgcattacgtcttctctatgttttaacggagaagcccaagatcgctggtgtggatatttcatcctttgagaaactgctggagaaccttgtgatcaaagttgtgccgatggaaaatatgaatggtcgcaaacgtgtcgaagaaggggagctttgtgataggagaaatggaagaggagttgatctcaacagaaattggagtgttgactggggaaagaaagaaaaagactacgacccatacgaggagaatcctggtattgctccttttagcgaacctgaggcccagatcatgagggaattatcaaggtcgtttaaacctcatatttgggtgaacgtgcattctggaatggaggccttatttatgccatatgatcacaagaataccacaccaaatggagcatctgcacattcgatgcggtcagtcttagagaatttgaaccgtcgccatttccaagatagctgcctagttgggtcaggtggtggatctgttggatatcttgcacatggtacaacaactgattacatgtatgacattgcaaaggtgccaatgccgttcacctttgagatatatggagatgagaaagcatcttccgatgactgcttcaaaatgttcaatcctgttgacaagaaaacattcgacagagttgttaacaagtggtgcatggcatttctcattctcttcgaggaaggcctgcgaaacctgcgagacgcgcagatagtgtcgcaaggcacgctggaaaactgggtcccaattggaggagacatcgtcgagataaatgtggagcggaagagcagcatccgtgagaggaggaagctggaaggcctcgaccttggaatgcaggagctaaggacatatttccggctattcttgctgtcaacattcctgttgatgttcatgttctgcgcgcggatatcaaagaacagaaaccgagactcaggtaacttgtttgacccttgaatgaagtaccaaagagagcatcggtgggggggggcctcctccgagctgaacttcgggtgcaaagagcgatcccctcagatcagacgaacaaagcgatctgaaacattcagagctggaatacagctctgccttcgcaccctggtattcggagctggacgtcccgtatactttggacacgaaggatggtggcaggcagtgtctgtttaggttacagcagagacgccagacgatgtggctaactgtttaacaaaattgtagctgtaaaaatcgcccatgtcagtttttttttggtgatgcataggttttactactacattttgatggaaggttgttagtgcacccaacacttggtacggtgccatcagttgatgtaacatctcactgatcgagcggtttatgtggaattgtgttggctcgaatttcttctgggttctcaaattcatttcgtaactttcaaagtttaaatatttatatgtatacatatatttaaggtcgtgtatgtatataggaccttgtatgagtgtggagggatggaccgtccgctccgcta

SEQ ID NO: 46313 - DNA, 2039 bp, Zea Mays
gccagttcccactatccggtcgacatttgagtatttgacgcgttttgtttgctgtttagaatttgacaaaatccatccactcttgcctctgtcttctcaacgtaaagacaggcagggcgggcacgaagcgaagggaccagccagcgagcggctcgccggcgacgaccctctccccgccccaccccgcccacggaagcacggagaagatgtccgccgcataccctcgtctcctcctctgtctcctgaccctagccctggctctcgcaggggtcgccgcgggcaagatctcggccccccgcaccccgatctcgcgcgacatctaccactccagtgactctcttctgcgtgaaatcaaggctttggttgctcggcattccagcaaattgagtatggacactatcaaaacaagcaacaaaggctattctgcagagctgtttgtagttacatttaatcatgtgaaggagcgcatggataatggctcaaaagttcatatccttctgaaaggttcattgtcttccagagctttgggcagcatggcagagaacttatcacctccgaagttgcattacgtcttctctatgttttaacggagaagcccaagatcgctggtgtggatatttcatcctttgagaaactgctggagaaccttgtgatcaaagttgtgccgatggaaaatatgaatggtcgcaaacgtgtcgaagaaggggagctttgtgataggagaaatggaagaggagttgatctcaacagaaattggagtgttgactggggaaagaaagaaaaagactacgacccatacgaggagaatcctggtattgctccttttagcgaacctgaggcccagatcatgagggaattatcaaggtcgtttaaacctcatatttgggtgaacgtgcattctggaatggagaataccacaccaaatggagcatctgcacattcgatgcggtcagtcttagagaatttgaaccgtcgccatttccaagatagctgcctagttgggtcaggtggtggatctgttggatatcttgcacatggtacaacaactgattacatgtatgacattgcaaaggtgccaatgccgttcacctttgagatatatggagatgagaaagcatcttccgatgactgcttcaaaatgttcaatcctgttgacaagaaaacattcgacagagttgttaacaagtggtgcatggcatttctcattctcttcgaggaaggcctgcgaaacctgcgagacgcgcagatagtgtcgcaaggcacgctggaaaactgggtcccaattggaggagacatcgtcgagataaatgtggagcggaagagcagcatccgtgagaggaggaagctggaaggcctcgaccttggaatgcaggagctaaggacatatttccggctattcttgctgtcaacattcctgttgatgttcatgttctgcgcgcggatatcaaagaacagaaaccgagactcaggtaacttgtttgacccttgaatgaagtaccaaagagagcatcggtgggggggggcctcctccgagctgaacttcgggtgcaaagagcgatcccctcagatcagacgaacaaagcgatctgaaacattcagagctggaatacagctctgccttcgcaccctggtattcggagctggacgtcccgtatactttggacacgaaggatggtggcaggcagtgtctgtttaggttacagcagagacgccagacgatgtggctaactgtttaacaaaattgtagctgtaaaaatcgcccatgtcagtttttttttggtgatgcataggttttactactacattttgatggaaggttgttagtgcacccaacacttggtacggtgccatcagttgatgtaacatctcactgatcgagcggtttatgtggaattgtgttggctcgaatttcttctgggttctcaaattcatttcgtaactttcaaagtttaaatatttatatgtatacatatatttaaggtcgtgtatgtatataggaccttgtatgagtgtggagggatggaccgtccgctccgcta

SEQ ID NO: 46314 - DNA, 2073 bp, Zea Mays
aattctctgggtgaatctagtcctaaatataaaatatagggtaccggcgtacggcgtaccgccaccggagtgtctggttggagacaagcccgaaccactcgggcggccagttcccactatccggtcgacatttgagtatttgacgcgttttgtttgctgtttagaatttgacaaaatccatccactcttgcctctgtcttctcaacgtaaagacaggcagggcgggcacgaagcgaagggaccagccagcgagcggctcgccggcgacgaccctctccccgccccaccccgcccacggaagcacggagaagatgtccgccgcataccctcgtctcctcctctgtctcctgaccctagccctggctctcgcaggggtcgccgcgggcaagatctcggccccccgcaccccgatctcgcgcgacatctaccactccagagctgtttgtagttacatttaatcatgtgaaggagcgcatggataatggctcaaaagttcatatccttctgaaaggttcattgtcttccagagctttgggcagcatggcagagaacttatcacctccgaagttgcattacgtcttctctatgttttaacggagaagcccaagatcgctggtgtggatatttcatcctttgagaaactgctggagaaccttgtgatcaaagttgtgccgatggaaaatatgaatggtcgcaaacgtgtcgaagaaggggagctttgtgataggagaaatggaagaggagttgatctcaacagaaattggagtgttgactggggaaagaaagaaaaagactacgacccatacgaggagaatcctggtattgctccttttagcgaacctgaggcccagatcatgagggaattatcaaggtcgtttaaacctcatatttgggtgaacgtgcattctggaatggaggccttatttatgccatatgatcacaagaataccacaccaaatggagcatctgcacattcgatgcggtcagtcttagagaatttgaaccgtcgccatttccaagatagctgcctagttgggtcaggtggtggatctgttggatatcttgcacatggtacaacaactgattacatgtatgacattgcaaaggtgccaatgccgttcacctttgagatatatggagatgagaaagcatcttccgatgactgcttcaaaatgttcaatcctgttgacaagaaaacattcgacagagttgttaacaagtggtgcatggcatttctcattctcttcgaggaaggcctgcgaaacctgcgagacgcgcagatagtgtcgcaaggcacgctggaaaactgggtcccaattggaggagacatcgtcgagataaatgtggagcggaagagcagcatccgtgagaggaggaagctggaaggcctcgaccttggaatgcaggagctaaggacatatttccggctattcttgctgtcaacattcctgttgatgttcatgttctgcgcgcggatatcaaagaacagaaaccgagactcaggtaacttgtttgacccttgaatgaagtaccaaagagagcatcggtgggggggggcctcctccgagctgaacttcgggtgcaaagagcgatcccctcagatcagacgaacaaagcgatctgaaacattcagagctggaatacagctctgccttcgcaccctggtattcggagctggacgtcccgtatactttggacacgaaggatggtggcaggcagtgtctgtttaggttacagcagagacgccagacgatgtggctaactgtttaacaaaattgtagctgtaaaaatcgcccatgtcagtttttttttggtgatgcataggttttactactacattttgatggaaggttgttagtgcacccaacacttggtacggtgccatcagttgatgtaacatctcactgatcgagcggtttatgtggaattgtgttggctcgaatttcttctgggttctcaaattcatttcgtaactttcaaagtttaaatatttatatgtatacatatatttaaggtcgtgtatgtatataggaccttgtatgagtgtggagggatggaccgtccgctccgcta

SEQ ID NO: 46315 - DNA, 2241 bp, Zea Mays
atgaaatccaacttcgaattctttttgcaaccaaacaactatattcttggtcagccaaataccagttctcaattctctgggtgaatctagtcctaaatataaaatatagggtaccggcgtacggcgtaccgccaccggagtgtctggttggagacaagcccgaaccactcgggcggccagttcccactatccggtcgacatttgagtatttgacgcgttttgtttgctgtttagaatttgacaaaatccatccactcttgcctctgtcttctcaacgtaaagacaggcagggcgggcacgaagcgaagggaccagccagcgagcggctcgccggcgacgaccctctccccgccccaccccgcccacggaagcacggagaagatgtccgccgcataccctcgtctcctcctctgtctcctgaccctagccctggctctcgcaggggtcgccgcgggcaagatctcggccccccgcaccccgatctcgcgcgacatctaccactccagtgactctcttctgcgtgaaatcaaggctttggttgctcggcattccagcaaattgagtatggacactatcaaaacaagcaacaaaggctattctgcagagctgtttgtagttacatttaatcatgtgaaggagcgcatggataatggctcaaaagttcatatccttctgaaaggttcattgtcttccagagctttgggcagcatggcagagaacttatcacctccgaagttgcattacgtcttctctatgttttaacggagaagcccaagatcgctggtgtggatatttcatcctttgagaaactgctggagaaccttgtgatcaaagttgtgccgatggaaaatatgaatggtcgcaaacgtgtcgaagaaggggagctttgtgataggagaaatggaagaggagttgatctcaacagaaattggagtgttgactggggaaagaaagaaaaagactacgacccatacgaggagaatcctggtattgctccttttagcgaacctgaggcccagatcatgagggaattatcaaggtcgtttaaacctcatatttgggtgaacgtgcattctggaatggaggccttatttatgccatatgatcacaagaataccacaccaaatggagcatctgcacattcgatgcggtcagtcttagagaatttgaaccgtcgccatttccaagatagctgcctagttgggtcaggtggtggatctgttggatatcttgcacatggtacaacaactgattacatgtatgacattgcaaaggtgccaatgccgttcacctttgagatatatggagatgagaaagcatcttccgatgactgcttcaaaatgttcaatcctgttgacaagaaaacattcgacagagttgttaacaagtggtgcatggcatttctcattctcttcgaggaaggcctgcgaaacctgcgagacgcgcagatagtgtcgcaaggcacgctggaaaactgggtcccaattggaggagacatcgtcgagataaatgtggagcggaagagcagcatccgtgagaggaggaagctggaaggcctcgaccttggaatgcaggagctaaggacatatttccggctattcttgctgtcaacattcctgttgatgttcatgttctgcgcgcggatatcaaagaacagaaaccgagactcaggtaacttgtttgacccttgaatgaagtaccaaagagagcatcggtgggggggggcctcctccgagctgaacttcgggtgcaaagagcgatcccctcagatcagacgaacaaagcgatctgaaacattcagagctggaatacagctctgccttcgcaccctggtattcggagctggacgtcccgtatactttggacacgaaggatggtggcaggcagtgtctgtttaggttacagcagagacgccagacgatgtggctaactgtttaacaaaattgtagctgtaaaaatcgcccatgtcagtttttttttggtgatgcataggttttactactacattttgatggaaggttgttagtgcacccaacacttggtacggtgccatcagttgatgtaacatctcactgatcgagcggtttatgtggaattgtgttggctcgaatttcttctgggttctcaaattcatttcgtaactttcaaagtttaaatatttatatgtatacatatatttaaggtcgtgtatgtatataggaccttgtatgagtgtggagggatggaccgtccgctccgcta

SEQ ID NO: 46316 - DNA, 1724 bp, Zea Mays
caactgctgcagcgaaggcacacagccgccaccgtttcttcatctcccagcatcttcttcctcgcagactcgcagtgccggcgctccatcttccgctccctcccttacacgtgctcggcacgcaggcgacggcggctacgttcgggctcgggctctcagcaaccgcgtcagcagctgcccctcccgcttctcgccagtcgcaccgtgccctcgcctccggtcctcagcacaccagccgtgaccctgcgtcataacagcggtacaagggtgaacaaagaacatcgagaggaagacaatatgccgaagaaggggactaaatctaagaaggagaaggtggacgatgtgcccaatgaacaagaaaataagcttccagactacctggagctccagcgcacacgtgtcgtctgcaatgctgatgcccccattcatactcaaggtttccaatactcgggtgcatttgctgctatgggaattgataatagcgtgtcagtggataaattttgcaagaatttcaaaattgaaataaatcgtctcactgaagattatatggagttcgatatgattggtattgatgcatcaatagccaatgctttccggagaatcctcatttcagaggttccaactatggcaattgagaaagtcttcatggctgacaacaactcagttatagcagatgaggttctttcacatagactaggacttattccacttgatgcagatccaagactctttgaatatatctcagaaaacgatgtcccaaatgaaaggaatactattgtttataaactgcacgtttcttgtccaaagaattctcaacgaattacagtgaaatctagtgaactagagtggttaccagaaggtagccaattaagcatgtcagcccctgcacagtctggagacaaacagaagactttcacttccttcagtcaaagccaaaaggagatcttagaaaagcctcttggtgtgaagtataaagatattactattgccaggcttgggccaggacaggctatcgagctcgaggcacatgctgttaagggaactgggaacgttcacgccaagtggtctccagttgctacagcctgaagttgaaggccctcaggcagaggagctggtgaataagtgccgggttaatgtttttgacatcgaagacctggctaacggtggaaagagggctgttgttgcgaggccaagggcatgcacgctctgcagagaatgtgtgatgggaccaaatgagaaacaagtggagctacggcgtgtcagagaccatttcatattcaccatcgagtccaccggaagcatgcccccggaggtgctgttcacagaagccgtgaagattttggaagagaagtgcgcgagggtcatatctgagctatcctgagaggccggcggcactgtgcagcactggagttagagtaaaccagctcaggctgcagtatctgctgtttttgatggagactagtgtgcgccattaaacattttttttgtggtgttggatatttgggtcagcaaatgtaagctgtttatatcatgtaacgcagtgtaatgttagattaaactgtggcaggtgatcgaaatggcagctgtatcaaaggtagacgtcggctgttagtccgcaagcactgtatttttgcgtttaggtaggtgactcggcccaggttacatggaaaatgaattatttttttcttgagaaaaatgaaaattgcttgaaaaaacggggttgt

SEQ ID NO: 46317 - DNA, 1573 bp, Zea Mays
caactgctgcagcgaaggcacacagccgccaccgtttcttcatctcccagcatcttcttcctcgcagactcgcagtgccggcgctccatcttccgctccctcccttacacgtgctcggcacgcaggcgacggcggctacgttcgggctcgggctctcagcaaccgcgtcagcagctgcccctcccgcttctcgccagtcgcaccgtgccctcgcctccggtcctcagcacaccagccgtgaccctgcgtcataacagcggtacaagggtgaacaaagaacatcgagaggaagacaatatgccgaagaaggggactaaatctaagaaggagaaggtggacgatgtgcccaatgaacaagaaaataagcttccagactacctggagctccagcgcacacgtgtcgtctgcaatgctgatgcccccattcatgttccaactatggcaattgagaaagtcttcatggctgacaacaactcagttatagcagatgaggttctttcacatagactaggacttattccacttgatgcagatccaagactctttgaatatatctcagaaaacgatgtcccaaatgaaaggaatactattgtttataaactgcacgtttcttgtccaaagaattctcaacgaattacagtgaaatctagtgaactagagtggttaccagaaggtagccaattaagcatgtcagcccctgcacagtctggagacaaacagaagactttcacttccttcagtcaaagccaaaaggagatcttagaaaagcctcttggtgtgaagtataaagatattactattgccaggcttgggccaggacaggctatcgagctcgaggcacatgctgttaagggaactgggaacgttcacgccaagtggtctccagttgctacagcctggtacagaatgctccctgaggttgttattcttaaagaagttgaaggccctcaggcagaggagctggtgaataagtgccgggttaatgtttttgacatcgaagacctggctaacggtggaaagagggctgttgttgcgaggccaagggcatgcacgctctgcagagaatgtgtgatgggaccaaatgagaaacaagtggagctacggcgtgtcagagaccatttcatattcaccatcgagtccaccggaagcatgcccccggaggtgctgttcacagaagccgtgaagattttggaagagaagtgcgcgagggtcatatctgagctatcctgagaggccggcggcactgtgcagcactggagttagagtaaaccagctcaggctgcagtatctgctgtttttgatggagactagtgtgcgccattaaacattttttttgtggtgttggatatttgggtcagcaaatgtaagctgtttatatcatgtaacgcagtgtaatgttagattaaactgtggcaggtgatcgaaatggcagctgtatcaaaggtagacgtcggctgttagtccgcaagcactgtatttttgcgtttaggtaggtgactcggcccaggttacatggaaaatgaattatttttttcttgagaaaaatgaaaattgcttgaaaaaacggggttgt

SEQ ID NO: 46318 - DNA, 1701 bp, Zea Mays
caactgctgcagcgaaggcacacagccgccaccgtttcttcatctcccagcatcttcttcctcgcagactcgcagtgccggcgctccatcttccgctccctcccttacacgtgctcggcacgcaggcgacggcggctacgttcgggctcgggctctcagcaaccgcgtcagcagctgcccctcccgcttctcgccagtcgcaccgtgccctcgcctccggtcctcagcacaccagccgtgaccctgcgtcataacagcggtacaagggtgaacaaagaacatcgagaggaagacaatatgccgaagaaggggactaaatctaagaaggagaaggtggacgatgtgcccaatgaacaagaaaataagcttccagactacctggagctccagcgcacacgtgtcgtctgcaatgctgatgcccccattcatactcaaggtttccaatactcgggtgcatttgctgctatgggaattgataatagcgtgtcagtggataaattttgcaagaatttcaaaattgaaataaatcgtctcactgaagattatatggagttcgatatgattggtattgatgcatcaatagccaatgctttccggagaatcctcatttcagagatgaggttctttcacatagactaggacttattccacttgatgcagatccaagactctttgaatatatctcagaaaacgatgtcccaaatgaaaggaatactattgtttataaactgcacgtttcttgtccaaagaattctcaacgaattacagtgaaatctagtgaactagagtggttaccagaaggtagccaattaagcatgtcagcccctgcacagtctggagacaaacagaagactttcacttccttcagtcaaagccaaaaggagatcttagaaaagcctcttggtgtgaagtataaagatattactattgccaggcttgggccaggacaggctatcgagctcgaggcacatgctgttaagggaactgggaacgttcacgccaagtggtctccagttgctacagcctggtacagaatgctccctgaggttgttattcttaaagaagttgaaggccctcaggcagaggagctggtgaataagtgccgggttaatgtttttgacatcgaagacctggctaacggtggaaagagggctgttgttgcgaggccaagggcatgcacgctctgcagagaatgtgtgatgggaccaaatgagaaacaagtggagctacggcgtgtcagagaccatttcatattcaccatcgagtccaccggaagcatgcccccggaggtgctgttcacagaagccgtgaagattttggaagagaagtgcgcgagggtcatatctgagctatcctgagaggccggcggcactgtgcagcactggagttagagtaaaccagctcaggctgcagtatctgctgtttttgatggagactagtgtgcgccattaaacattttttttgtggtgttggatatttgggtcagcaaatgtaagctgtttatatcatgtaacgcagtgtaatgttagattaaactgtggcaggtgatcgaaatggcagctgtatcaaaggtagacgtcggctgttagtccgcaagcactgtatttttgcgtttaggtaggtgactcggcccaggttacatggaaaatgaattatttttttcttgagaaaaatgaaaattgcttgaaaaaacggggttgt

SEQ ID NO: 46319 - DNA, 1834 bp, Zea Mays
caactgctgcagcgaaggcacacagccgccaccgtttcttcatctcccagcatcttcttcctcgcagactcgcagtgccggcgctccatcttccgctccctcccttacacgtgctcggcacgcaggcgacggcggctacgttcgggctcgggctctcagcaaccgcgtcagcagctgcccctcccgcttctcgccagtcgcaccgtgccctcgcctccggtcctcagcacaccagccgtgaccctgcgtcataacagcggtacaagggtgaacaaagaacatcgagaggaagacaatatgccgaagaaggggactaaatctaagaaggagaaggtggacgatgtgcccaatgaacaagaaaataagcttccagactacctggagctccagcgcacacgtgtcgtctgcaatgctgatgcccccattcatactcaaggtttccaatactcgggtgcatttgctgctatgggaattgataatagcgtgtcagtggataaattttgcaagaatttcaaaattgaaataaatcgtctcactgaagattatatggagttcgatatgattggtattgatgcatcaatagccaatgctttccggagaatcctcatttcagaggttccaactatggcaattgagaaagtcttcatggctgacaacaactcagttatagcagatgaggttctttcacatagactaggacttattccacttgatgcagatccaagactctttgaatatatctcagaaaacgatgtcccaaatgaaaggaatactattgtttataaactgcacgtttcttgtccaaagaattctcaacgaattacagtgaaatctagtgaactagagtggttaccagaaggtagccaattaagcatgtcagcccctgcacagtctggagacaaacagaagactttcacttccttcagtcaaagccaaaaggagatcttagaaaagcctcttggtgtgaagtataaagatattactattgccaggcttgggccaggacaggtagctgtttaacttaaatacactactttggtgaattcattgtgtgacgttgtgtgaatgccagatataaactttgctatcgagctcgaggcacatgctgttaagggaactgggaacgttcacgccaagtggtctccagttgctacagcctggtacagaatgctccctgaggttgttattcttaaagaagttgaaggccctcaggcagaggagctggtgaataagtgccgggttaatgtttttgacatcgaagacctggctaacggtggaaagagggctgttgttgcgaggccaagggcatgcacgctctgcagagaatgtgtgatgggaccaaatgagaaacaagtggagctacggcgtgtcagagaccatttcatattcaccatcgagtccaccggaagcatgcccccggaggtgctgttcacagaagccgtgaagattttggaagagaagtgcgcgagggtcatatctgagctatcctgagaggccggcggcactgtgcagcactggagttagagtaaaccagctcaggctgcagtatctgctgtttttgatggagactagtgtgcgccattaaacattttttttgtggtgttggatatttgggtcagcaaatgtaagctgtttatatcatgtaacgcagtgtaatgttagattaaactgtggcaggtgatcgaaatggcagctgtatcaaaggtagacgtcggctgttagtccgcaagcactgtatttttgcgtttaggtaggtgactcggcccaggttacatggaaaatgaattatttttttcttgagaaaaatgaaaattgcttgaaaaaacggggttgt

SEQ ID NO: 46320 - DNA, 2259 bp, Zea Mays
ctttaacctaacctttcaactgctgcagcgaaggcacacagccgccaccgtttcttcatctcccagcatcttcttcctcgcagactcgcagtgccggcgctccatcttccgctccctcccttacacgtgctcggcacgcaggcgacggcggctacgttcgggctcgggctctcagcaaccgcgtcagcagctgcccctcccgcttctcgccagtcgcaccgtgccctcgcctccggtcctcagcacaccagccgtgaccctgcgtcataacagcggtacaagggtgaacaaagaacatcgagaggaagacaatatgccgaagaaggggactaaatctaagaaggagaaggtggacgatgtgcccaatgaacaagaaaataagcttccagactacctggagctccagcgcacacgtgtcgtctgcaatgctgatgcccccattcatgtagacacatttactactcttctttcgtgtatttgctgatcaccttcaatattcactgattttcgcatgaaattagtcttgcatacggacttaatttctcatagatgcacatatattttacgttatgcatctaattgattacttcacaggatatggaaagtggttttttacaattaattttgtgtgcaattttttcttctgataaaggactgaacatgttactctttaccaataccttttttgccatcttgttaagtgcactgttgaattttctgctattcatacaaattttctgtgaaaaataatcattttggttcttactgtttttttagtttgattttttttgtgtactcgtgtaaattgtttatattgttttgttttattattttttggaagaattttctctttgttgatattgaatttcattcatttctattattggcctcatatatcatattttatgtttctcttgtatctttaaaagactcaaggtttccaatactcgggtgcatttgctgctatgggaattgataatagcgtgtcagtggataaattttgcaagaatttcaaaattgaaataaatcgtctcactgaagattatatggagttcgatatgattggtattgatgcatcaatagccaatgctttccggagaatcctcatttcagaggttccaactatggcaattgagaaagtcttcatggctgacaacaactcagttatagcagatgaggttctttcacatagactaggacttattccacttgatgcagatccaagactctttgaatatatctcagaaaacgatgtcccaaatgaaaggaatactattgtttataaactgcacgtttcttgtccaaagaattctcaacgaattacagtgaaatctagtgaactagagtggttaccagaaggtagccaattaagcatgtcagcccctgcacagtctggagacaaacagaagactttcacttccttcagtcaaagccaaaaggagatcttagaaaagcctcttggtgtgaagtataaagatattactattgccaggcttgggccaggacaggctatcgagctcgaggcacatgctgttaagggaactgggaacgttcacgccaagtggtctccagttgctacagcctggtacagaatgctccctgaggttgttattcttaaagaagttgaaggccctcaggcagaggagctggtgaataagtgccgggttaatgtttttgacatcgaagacctggctaacggtggaaagagggctgttgttgcgaggccaagggcatgcacgctctgcagagaatgtgtgatgggaccaaatgagaaacaagtggagctacggcgtgtcagagaccatttcatattcaccatcgagtccaccggaagcatgcccccggaggtgctgttcacagaagccgtgaagattttggaagagaagtgcgcgagggtcatatctgagctatcctgagaggccggcggcactgtgcagcactggagttagagtaaaccagctcaggctgcagtatctgctgtttttgatggagactagtgtgcgccattaaacattttttttgtggtgttggatatttgggtcagcaaatgtaagctgtttatatcatgtaacgcagtgtaatgttagattaaactgtggcaggtgatcgaaatggcagctgtatcaaaggtagacgtcggctgttagtccgcaagcactgtatttttgcgtttaggtaggtgactcggcccaggttacatggaaaatgaattatttttttcttgagaaaaatgaaaattgcttgaaaaaacggggttgt

SEQ ID NO: 46321 - DNA, 3854 bp, Zea Mays
tatcaaaccattttgtaccatattagatggctcgcacacacatcgataatttgccaacttctgcataagttcgtagcagcctctgtaacattttggccaaaatgaggatagcttttctcgtgctgttggttctctccctgtttctcctccctaatgggatcggcaaaagcttagccgcaaggccttcggtcgtgaatattgggtcgattcttcggttgaactccaccactggaggtgtttcagatgttgccatccgtgcagcagtggaggatatcaactcagaccccacagttctaaatggaacaacgttacatgttcaaacgagggatacaaactgcgacgacggttttcttggcatggttcaagctttgcagttcatggagactgatgttattgcgatcattgggccacaatgctctcctattgcacatatcatttcgtatgtcgcaaatgagctccaagttcctttgatgtcctttgcatcggatgcaactctgtcatcaatccagttcccgttcttcgtgcggactatgcccagcgatctctaccaaatggcagctgtggcggcagttattgattactaccaatggaagatagtcactgccatatacgttgatgatgattatggccgaaacggcattgctgctttggatgatgaacttactgcaagacgctgcaaaatttcattcaagattgggttccgttccaatgctaaaaaaagtgatcttctgaatctgttggttactgttagtaatatggagtctcgtgttattattctccatactggttcggaacctggactcaagcttctgtcacttgctaatggactaaacatgatgggcaacggctatgtatggattgctactgattggctttctgcttatcttgatgctaattcatcggtatctgctgaaactataaatggcatgcaaggtgttctgactgtacgtccacacacccctaaatcaaaggtgaagagtaatctggtgtccaagtggagcagcttaagcaagaaatacaaccacagcgatctccgcaccagtgcttacggtttttatgtttatgatagtgtgtggactgtagctcgggccctggatgccttctttgatgatggtgggaggatttcctttacaaatgactcaaggctgcgtgacgaaaccgggggaactcttcaccttgaagccatgagtgtttttgacatgggaaacaaattactgaataagattagaaatgtgaacttcactggggtgtctggccaagtgcaatttaatgctcagtttgaactcattcatcctgcctatgatatcataagcataattggcaacggcatgcggaccattggtttttggtcaaactatacaagattgctatcgaccgtccttcctgaagacctatattcgaagcctcctaatacttcgcttgccaaccaacaactctatgatgtcatttggcctggtgagactgcacagaggcctcgaggttgggcttttccttccaatgccaaggagttgaaaattggtgtccctaacagatttagctttaaagactttgttagcaaagataatgctactgggtcaatgaagggctattgcatcgatgtcttcactcaagcattggcattgcttccttatccagttacatacaggtttataccttttggcaatggtactgaaaaccctcattatagccaacttgtgcagatggttgctgacaatgtaagtgtggacatgcattttttccctccacatttcatcatgtatagtagtgataagagtaaacttattctgcaggattttgatgcagcaataggggatatcgtaattacaatgagccgaactaaagctgttgatttcacccagcccttcattgagtcaggcctggttatcttgtctccaataaaaaagcatataacaaattcttgggcattcttgcagccatttacattggggatgtggtgtgttacagggttgtcttttcttgttgtgggtgtggttatttggattcttgagcatcgaataaataatgatttccgcggctcgccgcgacaacaaataataactattgtttggttcagtttttcgactctgttttttgcacatagagaaaacacaatgagtaccttaggacgtggtgttttgctcatatggctatttgttgtattgatcattcaatcaagctacactgcaagtcttacttccatcctaaccgtgcaacagcttgatacatctataagaggacttgatgacctgaaaaatagtgattatcctattggtttccaagttggttcttttgtcgaagaatacatgattaaggaactgaacatctcacagtcgaggctaaaagctcttggttctcctgaagagtatgctgaaaatctcaagctaggtcccaagaaaggaggtgttatggctattgttgatgagcgcccctatgttgagctgtttttgtcaacttactgcaagattgctgttgctggctcagatttcaccagcggtggatggggctttgcatttccaagggactcccctctgcaaatagacctgtccaccgcaatcctgacactgtcggagaacggggagctgcagcggatccatgacaagtggctcaagacaggcgactgctcaacggacaatgctgagttcgtggactcgaaccagctccgcctcgagagcttcatgggcctgttcctcatctgcggcgcggcatgcgtcctcgccctgctcatctacctcggcatcacgatacgccagtacctgagacacgaacagccggaaaaagaaagagaggggtggaaatgggatattccattcctggtacccttccaggcttccacctgtgctttctttatggataacgatgatgatgactatgaggcggccgttgtgggcgcgccattccggaccctacactccagctccactctcccatggcttcctccgccctgccttccagaaccttgcaccgccgcgcgctcccctcgtctacgccgtgccaccctgcgacggagaccttcgcccccggcgccgtctcccggcggcgagcagccgtgcggctcctctccgccgggttcctgaccgccgtcgcgccgccgccgtcgctcgccgcgaggaggggacgcgttgtcgtgccaccggaggactacgccactgcacgtacgtaggcgtgcctgcttcctggcgctgctggtttctgcatccgcgctcgttttttttcttcttttcggctaaagttggcacctttttttgcgagcgactgactgaatttcagctaatcacaacctttttcctggttaagaccaggatccttttcttttactgcaaataatgctggtgcttctaactcgtatgcgtctgcaacgccataccctacctgagtattccctgtgttaactgaccgattgaaattccatttcgagttcccgcgaatgatctgacgtgatgacgttctgaaagcagccgatggtctcaagtactacgatcttgtcgaagggaagggaccaactgctgagaagggctcaaccgtgctggtccacttcgactgcatttaccgtggcatcaccgcggtgtcgagccgtgagtcgaagctcctggcggggaaccggagcatcgcccagtagccttacgagttcatcgttgggtcgctgcctgggaaagaacgcaagcgggatttcgcggacaacgccaacgggctgtactcggcgcaggcggctccgaagcctccggccgccatgtacaccataaccgaggggatgaaggtggggggaaagaggagagtgattgtccctccagagctggggtatgggaagaggggaatgagtgagataccgcctgacgctcctttgaactggacctcga

SEQ ID NO: 46322 - DNA, 3591 bp, Zea Mays
cttccttctggaaataggagaagtggatgtcatgattggtgtctatcaaaccattttgtaccatattagatggctcgcacacacatcgataatttgccaacttctgcataagttcgtagcagcctctgtaacattttggccaaaatgaggatagcttttctcgtgctgttggttctctccctgtttctcctccctaatgggatcggcaaaagcttagccgcaaggccttcggtcgtgaatattgggtcgattcttcggttgaactccaccactggaggtgtttcagatgttgccatccgtgcagcagtggaggatatcaactcagaccccacagttctaaatggaacaacgttacatgttcaaacgagggatacaaactgcgacgacggttttcttggcatggttcaagctttgcagttcatggagactgatgttattgcgatcattgggccacaatgctctcctattgcacatatcatttcgtatgtcgcaaatgagctccaagttcctttgatgtcctttgcatcggatgcaactctgtcatcaatccagttcccgttcttcgtgcggactatgcccagcgatctctaccaaatggcagctgtggcggcagttattgattactaccaatggaagatagtcactgccatatacgttgatgatgattatggccgaaacggcattgctgctttggatgatgaacttactgcaagacgctgcaaaatttcattcaagattgggttccgttccaatgctaaaaaaagtgatcttctgaatctgttggttactgttagtaatatggagtctcgtgttattattctccatactggttcggaacctggactcaagcttctgtcacttgctaatggactaaacatgatgggcaacggctatgtatggattgctactgattggctttctgcttatcttgatgctaattcatcggtatctgctgaaactataaatggcatgcaaggtgttctgactgtacgtccacacacccctaaatcaaaggtgaagagtaatctggtgtccaagtggagcagcttaagcaagaaatacaaccacagcgatctccgcaccagtgcttacggtttttatgtttatgatagtgtgtggactgtagctcgggccctggatgccttctttgatgatggtgggaggatttcctttacaaatgactcaaggctgcgtgacgaaaccgggggaactcttcaccttgaagccatgagtgtttttgacatgggaaacaaattactgaataagattagaaatgtgaacttcactggggtgtctggccaagtgcaatttaatgctcagtttgaactcattcatcctgcctatgatatcataagcataattggcaacggcatgcggaccattggtttttggtcaaactatacaagattgctatcgaccgtccttcctgaagacctatattcgaagcctcctaatacttcgcttgccaaccaacaactctatgatgtcatttggcctggtgagactgcacagaggcctcgaggttgggcttttccttccaatgccaaggagttgaaaattggtgtccctaacagatttagctttaaagactttgttagcaaagataatgctactgggtcaatgaagggctattgcatcgatgtcttcactcaagcattggcattgcttccttatccagttacatacaggtttataccttttggcaatggtactgaaaaccctcattatagccaacttgtgcagatggttgctgacaatgtaagtgtggacatgcattttttccctccacatttcatcatgtatagtagtgataagagtaaacttattctgcaggattttgatgcagcaataggggatatcgtaattacaatgagccgaactaaagctgttgatttcacccagcccttcattgagtcaggcctggttatcttgtctccaataaaaaagcatataacaaattcttgggcattcttgcagccatttacattggggatgtggtgtgttacagggttgtcttttcttgttgtgggtgtggttatttggattcttgagcatcgaataaataatgatttccgcggctcgccgcgacaacaaataataactattgtttggttcagtttttcgactctgttttttgcacatagagaaaacacaatgagtaccttaggacgtggtgttttgctcatatggctatttgttgtattgatcattcaatcaagctacactgcaagtcttacttccatcctaaccgtgcaacagcttgatacatctataagaggacttgatgacctgaaaaatagtgattatcctattggtttccaagttggttcttttgtcgaagaatacatgattaaggaactgaacatctcacagtcgaggctaaaagctcttggttctcctgaagagtatgctgaaaatctcaagctaggtcccaagaaaggaggtgttatggctattgttgatgagcgcccctatgttgagctgtttttgtcaacttactgcaagattgctgttgctggctcagatttcaccagcggtggatggggctttgcatttccaagggactcccctctgcaaatagacctgtccaccgcaatcctgacactgtcggagaacggggagctgcagcggatccatgacaagtggctcaagacaggcgactgctcaacggacaatgctgagttcgtggactcgaaccagctccgcctcgagagcttcatgggcctgttcctcatctgcggcgcggcatgcgtcctcgccctgctcatctacctcggcatcacgatacgccagtacctgagacacgaacagccggaaaaagaaagagaggggtggaaatgggatattccattcctggtacccttccaggcttccacctgtgctttctttatggataacgatgatgatgactatgaggcggccgttgtgggcgcgccattccggaccctacactccagctccactctcccatggcttcctccgccctgccttccagaaccttgcaccgccgcgcgctcccctcgtctacgccgtgccaccctgcgacggagaccttcgcccccggcgccgtctcccggcggcgagcagccgtgcggctcctctccgccgggttcctgaccgccgtcgcgccgccgccgtcgctcgccgcgaggaggggacgcgttgtcgtgccaccggaggactacgccactgcacccgatggtctcaagtactacgatcttgtcgaagggaagggaccaactgctgagaagggctcaaccgtgctggtccacttcgactgcatttaccgtggcatcaccgcggtgtcgagccgtgagtcgaagctcctggcggggaaccggagcatcgcccagccttacgagttcatcgttgggtcgctgcctgggaaagaacgcaagcgggatttcgcggacaacgccaacgggctgtactcggcgcaggcggctccgaagcctccggccgccatgtacaccataaccgaggggatgaaggtggggggaaagaggagagtgattgtccctccagagctggggtatgggaagaggggaatgagtgagataccgcctgacgctcctttgaactggacctcga

SEQ ID NO: 46323 - DNA, 3743 bp, Zea Mays
gcaaatccccgcgtccccagctgccaatggccgcagcgattcggagcaaaaagtcaaagtcgccctcttggactacctactagctagttcctgcgctgcgcatccctgttcatcctctgcctcccggcaggcggcagctgctgcttccccgtctcctagtcctggcggtaccaacatttgccagcacccagcgacggatttcgccagaagatctgcgattcagggctcgcacacacatcgataatttgccaacttctgcataagttcgtagcagcctctgtaacattttggccaaaatgaggatagcttttctcgtgctgttggttctctccctgtttctcctccctaatgggatcggcaaaagcttagccgcaaggccttcggtcgtgaatattgggtcgattcttcggttgaactccaccactggaggtgtttcagatgttgccatccgtgcagcagtggaggatatcaactcagaccccacagttctaaatggaacaacgttacatgttcaaacgagggatacaaactgcgacgacggttttcttggcatggttcaagctttgcagttcatggagactgatgttattgcgatcattgggccacaatgctctcctattgcacatatcatttcgtatgtcgcaaatgagctccaagttcctttgatgtcctttgcatcggatgcaactctgtcatcaatccagttcccgttcttcgtgcggactatgcccagcgatctctaccaaatggcagctgtggcggcagttattgattactaccaatggaagatagtcactgccatatacgttgatgatgattatggccgaaacggcattgctgctttggatgatgaacttactgcaagacgctgcaaaatttcattcaagattgggttccgttccaatgctaaaaaaagtgatcttctgaatctgttggttactgttagtaatatggagtctcgtgttattattctccatactggttcggaacctggactcaagcttctgtcacttgctaatggactaaacatgatgggcaacggctatgtatggattgctactgattggctttctgcttatcttgatgctaattcatcggtatctgctgaaactataaatggcatgcaaggtgttctgactgtacgtccacacacccctaaatcaaaggtgaagagtaatctggtgtccaagtggagcagcttaagcaagaaatacaaccacagcgatctccgcaccagtgcttacggtttttatgtttatgatagtgtgtggactgtagctcgggccctggatgccttctttgatgatggtgggaggatttcctttacaaatgactcaaggctgcgtgacgaaaccgggggaactcttcaccttgaagccatgagtgtttttgacatgggaaacaaattactgaataagattagaaatgtgaacttcactggggtgtctggccaagtgcaatttaatgctcagtttgaactcattcatcctgcctatgatatcataagcataattggcaacggcatgcggaccattggtttttggtcaaactatacaagattgctatcgaccgtccttcctgaagacctatattcgaagcctcctaatacttcgcttgccaaccaacaactctatgatgtcatttggcctggtgagactgcacagaggcctcgaggttgggcttttccttccaatgccaaggagttgaaaattggtgtccctaacagatttagctttaaagactttgttagcaaagataatgctactgggtcaatgaagggctattgcatcgatgtcttcactcaagcattggcattgcttccttatccagttacatacaggtttataccttttggcaatggtactgaaaaccctcattatagccaacttgtgcagatggttgctgacaatgtaagtgtggacatgcattttttccctccacatttcatcatgtatagtagtgataagagtaaacttattctgcaggattttgatgcagcaataggggatatcgtaattacaatgagccgaactaaagctgttgatttcacccagcccttcattgagtcaggcctggttatcttgtctccaataaaaaagcatataacaaattcttgggcattcttgcagccatttacattggggatgtggtgtgttacagggttgtcttttcttgttgtgggtgtggttatttggattcttgagcatcgaataaataatgatttccgcggctcgccgcgacaacaaataataactattgtttggttcagtttttcgactctgttttttgcacatagagaaaacacaatgagtaccttaggacgtggtgttttgctcatatggctatttgttgtattgatcattcaatcaagctacactgcaagtcttacttccatcctaaccgtgcaacagcttgatacatctataagaggacttgatgacctgaaaaatagtgattatcctattggtttccaagttggttcttttgtcgaagaatacatgattaaggaactgaacatctcacagtcgaggctaaaagctcttggttctcctgaagagtatgctgaaaatctcaagctaggtcccaagaaaggaggtgttatggctattgttgatgagcgcccctatgttgagctgtttttgtcaacttactgcaagattgctgttgctggctcagatttcaccagcggtggatggggctttgcatttccaagggactcccctctgcaaatagacctgtccaccgcaatcctgacactgtcggagaacggggagctgcagcggatccatgacaagtggctcaagacaggcgactgctcaacggacaatgctgagttcgtggactcgaaccagctccgcctcgagagcttcatgggcctgttcctcatctgcggcgcggcatgcgtcctcgccctgctcatctacctcggcatcacgatacgccagtacctgagacacgaacagccggaaaaagaaagagaggggtggaaatgggatattccattcctggtacccttccaggcttccacctgtgctttctttatggataacgatgatgatgactatgaggcggccgttgtgggcgcgccattccggaccctacactccagctccactctcccatggcttcctccgccctgccttccagaaccttgcaccgccgcgcgctcccctcgtctacgccgtgccaccctgcgacggagaccttcgcccccggcgccgtctcccggcggcgagcagccgtgcggctcctctccgccgggttcctgaccgccgtcgcgccgccgccgtcgctcgccgcgaggaggggacgcgttgtcgtgccaccggaggactacgccactgcacccgatggtctcaagtactacgatcttgtcgaagggaagggaccaactgctgagaagggctcaaccgtgctggtccacttcgactgcatttaccgtggcatcaccgcggtgtcgagccgtgagtcgaagctcctggcggggaaccggagcatcgcccagccttacgagttcatcgttgggtcgctgcctgggaaagaacgcaagcgggatttcgcggacaacgccaacgggctgtactcggcgcaggcggctccgaagcctccggccgccatgtacaccataaccgaggggatgaaggtggggggaaagaggagagtgattgtccctccagagctggggtatgggaagaggggaatgagtgagataccgcctgacgctcctttgaactggacctcga

SEQ ID NO: 46324 - DNA, 4330 bp, Zea Mays
tcctctgtcttttccaacaataatagtataatacaggcagctcacctccaagataaaatggcctgacgaaatgagcttcagggaaggccgccgccgcctactcctcgtcctcctcttcctggggtgtcgacaagccgcggcacgctcccacggtcggagacgaccaagatttcctcttttccgaggggagcacgagcacgagcaccaacgccgaccccgacctgacggctcgcacacacatcgataatttgccaacttctgcataagttcgtagcagcctctgtaacattttggccaaaatgaggatagcttttctcgtgctgttggttctctccctgtttctcctccctaatgggatcggcaaaagcttagccgcaaggccttcggtcgtgaatattgggtcgattcttcggttgaactccaccactggaggtgtttcagatgttgccatccgtgcagcagtggaggatatcaactcagaccccacagttctaaatggaacaacgttacatgttcaaacgagggatacaaactgcgacgacggttttcttggcatggttcaagctttgcagttcatggagactgatgttattgcgatcattgggccacaatgctctcctattgcacatatcatttcgtatgtcgcaaatgagctccaagttcctttgatgtcctttgcatcggatgcaactctgtcatcaatccagttcccgttcttcgtgcggactatgcccagcgatctctaccaaatggcagctgtggcggcagttattgattactaccaatggaagatagtcactgccatatacgttgatgatgattatggccgaaacggcattgctgctttggatgatgaacttactgcaagacgctgcaaaatttcattcaagattgggttccgttccaatgctaaaaaaagtgatcttctgaatctgttggttactgttagtaatatggagtctcgtgttattattctccatactggttcggaacctggactcaagcttctgtcacttgctaatggactaaacatgatgggcaacggctatgtatggattgctactgattggctttctgcttatcttgatgctaattcatcggtatctgctgaaactataaatggcatgcaaggtgttctgactgtacgtccacacacccctaaatcaaaggtgaagagtaatctggtgtccaagtggagcagcttaagcaagaaatacaaccacagcgatctccgcaccagtgcttacggtttttatgtttatgatagtgtgtggactgtagctcgggccctggatgccttctttgatgatggtgggaggatttcctttacaaatgactcaaggctgcgtgacgaaaccgggggaactcttcaccttgaagccatgagtgtttttgacatgggaaacaaattactgaataagattagaaatgtgaacttcactggggtgtctggccaagtgcaatttaatgctcagtttgaactcattcatcctgcctatgatatcataagcataattggcaacggcatgcggaccattggtttttggtcaaactatacaagattgctatcgaccgtccttcctgaagacctatattcgaagcctcctaatacttcgcttgccaaccaacaactctatgatgtcatttggcctggtgagactgcacagaggcctcgaggttgggcttttccttccaatgccaaggagttgaaaattggtgtccctaacagatttagctttaaagactttgttagcaaagataatgctactgggtcaatgaagggctattgcatcgatgtcttcactcaagcattggcattgcttccttatccagttacatacaggtttataccttttggcaatggtactgaaaaccctcattatagccaacttgtgcagatggttgctgacaatcaataggggatatcgtaattacaatgagccgaactaaagctgttgatttcacccagcccttcattgagtcaggcctggttatcttgtctccaataaaaaagcatataacaaattcttgggcattcttgcagccatttacattggggatgtggtgtgttacagggttgtcttttcttgttgtgggtgtggttatttggattcttgagcatcgaataaataatgatttccgcggctcgccgcgacaacaaataataactattgtttggttcagtttttcgactctgttttttgcacatagagaaaacacaatgagtaccttaggacgtggtgttttgctcatatggctatttgttgtattgatcattcaatcaagctacactgcaagtcttacttccatcctaaccgtgcaacagcttgatacatctataagaggacttgatgacctgaaaaatagtgattatcctattggtttccaagttggttcttttgtcgaagaatacatgattaaggaactgaacatctcacagtcgaggctaaaagctcttggttctcctgaagagtatgctgaaaatctcaagctaggtcccaagaaaggaggtgttatggctattgttgatgagcgcccctatgttgagctgtttttgtcaacttactgcaagattgctgttgctggctcagatttcaccagcggtggatggggctttgcatttccaagggactcccctctgcaaatagacctgtccaccgcaatcctgacactgtcggagaacggggagctgcagcggatccatgacaagtggctcaagacaggcgactgctcaacggacaatgctgagttcgtggactcgaaccagctccgcctcgagagcttcatgggcctgttcctcatctgcggcgcggcatgcgtcctcgccctgctcatctacctcggcatcacgatacgccagtacctgagacacgaacagccgggaccagcgatctccgtggacgcagggtcgtcgacgtcgaagcgcagtctccgaaaattcatctctttcgccgatgacaagcagccgccaccgaagaaaaagcgggccatgagcctctcgagaagttcaatgccaacgatgccgatgagtaaccgtcctggggctgatattgatgtagaaagctagtgcttgtgtatacgttttttacctgggatacatcatctttgggccaatctatgcgtccttcatatatattatgtataggaaattagagccaaaggctgtgtagtggattgtatttgttggtttttagcaccccaaccgcccacggttaacaagtcgtccgagtttggcagaactgtcaaattgtatagagtgagtcaagtagtcaacccttgttcacgaaccattgtgaatggaatatatgtttgtttcagttgatttgttctttcagatttctctcgtcattggattatatgtttgtatggagacaacactcagaatatgacagatgaccagttaccaattctctaaacaccaggcattgtaattttgggggcaactccagctatccagcacgccctggaaaatgaagaaacgaaaactcagaattgatggaatatggaaaatagtatagacaaaaaaaatatttgacggcaatagttggtttcagaaaaagaaagagaggggtggaaatgggatattccattcctggtacccttccaggcttccacctgtgctttctttatggataacgatgatgatgactatgaggcggccgttgtgggcgcgccattccggaccctacactccagctccactctcccatggcttcctccgccctgccttccagaaccttgcaccgccgcgcgctcccctcgtctacgccgtgccaccctgcgacggagaccttcgcccccggcgccgtctcccggcggcgagcagccgtgcggctcctctccgccgggttcctgaccgccgtcgcgccgccgccgtcgctcgccgcgaggaggggacgcgttgtcgtgccaccggaggactacgccactgcacccgatggtctcaagtactacgatcttgtcgaagggaagggaccaactgctgagaagggctcaaccgtgctggtccacttcgactgcatttaccgtggcatcaccgcggtgtcgagccgtgagtcgaagctcctggcggggaaccggagcatcgcccagccttacgagttcatcgttgggtcgctgcctgggaaagaacgcaagcgggatttcgcggacaacgccaacgggctgtactcggcgcaggcggctccgaagcctccggccgccatgtacaccataaccgaggggatgaaggtggggggaaagaggagagtgattgtccctccagagctggggtatgggaagaggggaatgagtgagataccgcctgacgctcctttgaactggacctcga

SEQ ID NO: 46325 - DNA, 3957 bp, Zea Mays
tcctctgtcttttccaacaataatagtataatacaggcagctcacctccaagataaaatggcctgacgaaatgagcttcagggaaggccgccgccgcctactcctcgtcctcctcttcctggggtgtcgacaagccgcggcacgctcccacggtcggagacgaccaagatttcctcttttccgaggggagcacgagcacgagcaccaacgccgaccccgacctgacggctcgcacacacatcgataatttgccaacttctgcataagttcgtagcagcctctgtaacattttggccaaaatgaggatagcttttctcgtgctgttggttctctccctgtttctcctccctaatgggatcggcaaaagcttagccgcaaggccttcggtcgtgaatattgggtcgattcttcggttgaactccaccactggaggtgtttcagatgttgccatccgtgcagcagtggaggatatcaactcagaccccacagttctaaatggaacaacgttacatgttcaaacgagggatacaaactgcgacgacggttttcttggcatggttcaagctttgcagttcatggagactgatgttattgcgatcattgggccacaatgctctcctattgcacatatcatttcgtatgtcgcaaatgagctccaagttcctttgatgtcctttgcatcggatgcaactctgtcatcaatccagttcccgttcttcgtgcggactatgcccagcgatctctaccaaatggcagctgtggcggcagttattgattactaccaatggaagatagtcactgccatatacgttgatgatgattatggccgaaacggcattgctgctttggatgatgaacttactgcaagacgctgcaaaatttcattcaagattgggttccgttccaatgctaaaaaaagtgatcttctgaatctgttggttactgttagtaatatggagtctcgtgttattattctccatactggttcggaacctggactcaagcttctgtcacttgctaatggactaaacatgatgggcaacggctatgtatggattgctactgattggctttctgcttatcttgatgctaattcatcggtatctgctgaaactataaatggcatgcaaggtgttctgactgtacgtccacacacccctaaatcaaaggtgaagagtaatctggtgtccaagtggagcagcttaagcaagaaatacaaccacagcgatctccgcaccagtgcttacggtttttatgtttatgatagtgtgtggactgtagctcgggccctggatgccttctttgatgatggtgggaggatttcctttacaaatgactcaaggctgcgtgacgaaaccgggggaactcttcaccttgaagccatgagtgtttttgacatgggaaacaaattactgaataagattagaaatgtgaacttcactggggtgtctggccaagtgcaatttaatgctcagtttgaactcattcatcctgcctatgatatcataagcataattggcaacggcatgcggaccattggtttttggtcaaactatacaagattgctatcgaccgtccttcctgaagacctatattcgaagcctcctaatacttcgcttgccaaccaacaactctatgatgtcatttggcctggtgagactgcacagaggcctcgaggttgggcttttccttccaatgccaaggagttgaaaattggtgtccctaacagatttagctttaaagactttgttagcaaagataatgctactgggtcaatgaagggctattgcatcgatgtcttcactcaagcattggcattgcttccttatccagttacatacagcaataggggatatcgtaattacaatgagccgaactaaagctgttgatttcacccagcccttcattgagtcaggcctggttatcttgtctccaataaaaaagcatataacaaattcttgggcattcttgcagccatttacattggggatgtggtgtgttacagggttgtcttttcttgttgtgggtgtggttatttggattcttgagcatcgaataaataatgatttccgcggctcgccgcgacaacaaataataactattgtttggtaaggatctgaatcgcatcttttgcactcactatacacacatcttattttcactttcaaatgttattgtttccatgcaacatgttacactttattggtagccttaaactgtgtttttcaacattgacattttgtccaaatggaacatctagcaatgaacaaggaacttaaatcttgtaatttagattggttgaagaaaatatgtctgcactatcataatgtatttcatgtgatattatggtatattaacttctatttgtttagttttgcctgtcaatgtacttcttcacacatattcttaaatgcttgtctgattgcttgattctttcctctgaaagtaattcttaagatgtgatttattttctgcaggttcagtttttcgactctgttttttgcacatagagaaaacacaatgagtaccttaggacgtggtgttttgctcatatggctatttgttgtattgatcattcaatcaagctacactgcaagtcttacttccatcctaaccgtgcaacagcttgatacatctataagaggacttgatgacctgaaaaatagtgattatcctattggtttccaagttggttcttttgtcgaagaatacatgattaaggaactgaacatctcacagtcgaggctaaaagctcttggttctcctgaagagtatgctgaaaatctcaagctaggtcccaagaaaggaggtgttatggctattgttgatgagcgcccctatgttgagctgtttttgtcaacttactgcaagattgctgttgctggctcagatttcaccagcggtggatggggctttgcatttccaagggactcccctctgcaaatagacctgtccaccgcaatcctgacactgtcggagaacggggagctgcagcggatccatgacaagtggctcaagacaggcgactgctcaacggacaatgctgagttcgtggactcgaaccagctccgcctcgagagcttcatgggcctgttcctcatctgcggcgcggcatgcgtcctcgccctgctcatctacctcggcatcacgatacgccagtacctgagacacgaacagccggaaaaagaaagagaggggtggaaatgggatattccattcctggtacccttccaggcttccacctgtgctttctttatggataacgatgatgatgactatgaggcggccgttgtgggcgcgccattccggaccctacactccagctccactctcccatggcttcctccgccctgccttccagaaccttgcaccgccgcgcgctcccctcgtctacgccgtgccaccctgcgacggagaccttcgcccccggcgccgtctcccggcggcgagcagccgtgcggctcctctccgccgggttcctgaccgccgtcgcgccgccgccgtcgctcgccgcgaggaggggacgcgttgtcgtgccaccggaggactacgccactgcacccgatggtctcaagtactacgatcttgtcgaagggaagggaccaactgctgagaagggctcaaccgtgctggtccacttcgactgcatttaccgtggcatcaccgcggtgtcgagccgtgagtcgaagctcctggcggggaaccggagcatcgcccagccttacgagttcatcgttgggtcgctgcctgggaaagaacgcaagcgggatttcgcggacaacgccaacgggctgtactcggcgcaggcggctccgaagcctccggccgccatgtacaccataaccgaggggatgaaggtggggggaaagaggagagtgattgtccctccagagctggggtatgggaagaggggaatgagtgagataccgcctgacgctcctttgaactggacctcga

SEQ ID NO: 46326 - DNA, 1573 bp, Zea Mays
tcctctgtcttttccaacaataatagtataatacaggcagctcacctccaagataaaatggcctgacgaaatgagcttcagggaaggccgccgccgcctactcctcgtcctcctcttcctggggtgtcgacaagccgcggcacgctcccacggtcggagacgaccaagatttcctcttttccgaggggagcacgagcacgagcaccaacgccgaccccgacctgacgcatttccaagggactcccctctgcaaatagacctgtccaccgcaatcctgacactgtcggagaacggggagctgcagcggatccatgacaagtggctcaagacaggcgactgctcaacggacaatgctgagttcgtggactcgaaccagctccgcctcgagagcttcatgggcctgttcctcatctgcggcgcggcatgcgtcctcgccctgctcatctacctcggcatcacgatacgccagtacctgagacacgaacagccggaaaaagaaagagaggggtggaaatgggatattccattcctggtacccttccaggcttccacctgtgctttctttatggataacgatgatgatgactatgaggcggccgttgtgggcgcgccattccggaccctacactccagctccactctcccatggcttcctccgccctgccttccagaaccttgcaccgccgcgcgctcccctcgtctacgccgtgccaccctgcgacggagaccttcgcccccggcgccgtctcccggcggcgagcagccgtgcggctcctctccgccgggttcctgaccgccgtcgcgccgccgccgtcgctcgccgcgaggaggggacgcgttgtcgtgccaccggaggactacgccactgcacgtacgtaggcgtgcctgcttcctggcgctgctggtttctgcatccgcgctcgttttttttcttcttttcggctaaagttggcacctttttttgcgagcgactgactgaatttcagctaatcacaacctttttcctggttaagaccaggatccttttcttttactgcaaataatgctggtgcttctaactcgtatgcgtctgcaacgccataccctacctgagtattccctgtgttaactgaccgattgaaattccatttcgagttcccgcgaatgatctgacgtgatgacgttctgaaagcagccgatggtctcaagtactacgatcttgtcgaagggaagggaccaactgctgagaagggctcaaccgtgctggtccacttcgactgcatttaccgtggcatcaccgcggtgtcgagccgtgagtcgaagctcctggcggggaaccggagcatcgcccagtagccttacgagttcatcgttgggtcgctgcctgggaaagaacgcaagcgggatttcgcggacaacgccaacgggctgtactcggcgcaggcggctccgaagcctccggccgccatgtacaccataaccgaggggatgaaggtggggggaaagaggagagtgattgtccctccagagctggggtatgggaagaggggaatgagtgagataccgcctgacgctcctttgaactggacctcga

SEQ ID NO: 46327 - DNA, 1274 bp, Zea Mays
tcctctgtcttttccaacaataatagtataatacaggcagctcacctccaagataaaatggcctgacgaaatgagcttcagggaaggccgccgccgcctactcctcgtcctcctcttcctggggtgtcgacaagccgcggcacgctcccacggtcggagacgaccaagatttcctcttttccgaggggagcacgagcacgagcaccaacgccgaccccgacctgacgcatttccaagggactcccctctgcaaatagacctgtccaccgcaatcctgacactgtcggagaacggggagctgcagcggatccatgacaagtggctcaagacaggcgactgctcaacggacaatgctgagttcgtggactcgaaccagctccgcctcgagagcttcatgggcctgttcctcatctgcggcgcggcatgcgtcctcgccctgctcatctacctcggcatcacgatacgccagtacctgagacacgaacagccggaaaaagaaagagaggggtggaaatgggatattccattcctggtacccttccaggcttccacctgtgctttctttatggataacgatgatgatgactatgaggcggccgttgtgggcgcgccattccggaccctacactccagctccactctcccatggcttcctccgccctgccttccagaaccttgcaccgccgcgcgctcccctcgtctacgccgtgccaccctgcgacggagaccttcgcccccggcgccgtctcccggcggcgagcagccgtgcggctcctctccgccgggttcctgaccgccgtcgcgccgccgccgtcgctcgccgcgaggaggggacgcgttgtcgtgccaccggaggactacgccactgcacccgatggtctcaagtactacgatcttgtcgaagggaagggaccaactgctgagaagggctcaaccgtgctggtccacttcgactgcatttaccgtggcatcaccgcggtgtcgagccgtgagtcgaagctcctggcggggaaccggagcatcgcccagtagccttacgagttcatcgttgggtcgctgcctgggaaagaacgcaagcgggatttcgcggacaacgccaacgggctgtactcggcgcaggcggctccgaagcctccggccgccatgtacaccataaccgaggggatgaaggtggggggaaaggtagaggagagtgattgtccctccagagctggggtatgggaagaggggaatgagtgagataccgcctgacgctcctttgaactggacctcga

SEQ ID NO: 46328 - DNA, 1271 bp, Zea Mays
tcctctgtcttttccaacaataatagtataatacaggcagctcacctccaagataaaatggcctgacgaaatgagcttcagggaaggccgccgccgcctactcctcgtcctcctcttcctggggtgtcgacaagccgcggcacgctcccacggtcggagacgaccaagatttcctcttttccgaggggagcacgagcacgagcaccaacgccgaccccgacctgacgcatttccaagggactcccctctgcaaatagacctgtccaccgcaatcctgacactgtcggagaacggggagctgcagcggatccatgacaagtggctcaagacaggcgactgctcaacggacaatgctgagttcgtggactcgaaccagctccgcctcgagagcttcatgggcctgttcctcatctgcggcgcggcatgcgtcctcgccctgctcatctacctcggcatcacgatacgccagtacctgagacacgaacagccggaaaaagaaagagaggggtggaaatgggatattccattcctggtacccttccaggcttccacctgtgctttctttatggataacgatgatgatgactatgaggcggccgttgtgggcgcgccattccggaccctacactccagctccactctcccatggcttcctccgccctgccttccagaaccttgcaccgccgcgcgctcccctcgtctacgccgtgccaccctgcgacggagaccttcgcccccggcgccgtctcccggcggcgagcagccgtgcggctcctctccgccgggttcctgaccgccgtcgcgccgccgccgtcgctcgccgcgaggaggggacgcgttgtcgtgccaccggaggactacgccactgcacccgatggtctcaagtactacgatcttgtcgaagggaagggaccaactgctgagaagggctcaaccgtgctggtccacttcgactgcatttaccgtggcatcaccgcggtgtcgagccgtgagtcgaagctcctggcggggaaccggagcatcgcccagccttacgagttcatcgttgggtcgctgcctgggaaagaacgcaagcgggatttcgcggacaacgccaacgggctgtactcggcgcaggcggctccgaagcctccggccgccatgtacaccataaccgaggggatgaaggtggggggaaaggtagaggagagtgattgtccctccagagctggggtatgggaagaggggaatgagtgagataccgcctgacgctcctttgaactggacctcga

SEQ ID NO: 46329 - DNA, 1255 bp, Zea Mays
tcctctgtcttttccaacaataatagtataatacaggcagctcacctccaagataaaatggcctgacgaaatgagcttcagggaaggccgccgccgcctactcctcgtcctcctcttcctggggtgtcgacaagccgcggcacgctcccacggtcggagacgaccaagatttcctcttttccgaggggagcacgagcacgagcaccaacgccgaccccgacctgacgcatttccaagggactcccctctgcaaatagacctgtccaccgcaatcctgacactgtcggagaacggggagctgcagcggatccatgacaagtggctcaagacaggcgactgctcaacggacaatgctgagttcgtggactcgaaccagctccgcctcgagagcttcatgggcctgttcctcatctgcggcgcggcatgcgtcctcgccctgctcatctacctcggcatcacgatacgccagtacctgagacacgaacagccggaaaaagaaagagaggggtggaaatgggatattccattcctggtacccttccaggcttccacctgtgctttctttatggataacgatgatgatgactatgaggcggccgttgtgggcgcgccattccggaccctacactccagctccactctcccatggcttcctccgccctgccttccagaaccttgcaccgccgcgcgctcccctcgtctacgccgtgccaccctgcgacggagaccttcgcccccggcgccgtctcccggcggcgagcagccgtgcggctcctctccgccgggttcctgaccgccgtcgcgccgccgccgtcgctcgccgcgaggaggggacgcgttgtcgtgccaccggaggactacgccactgcacccgatggtctcaagtactacgatcttgtcgaagggaagggaccaactgctgagaagggctcaaccgtgctggtccacttcgactgcatttaccgtggcatcaccgcggtgtcgagccgtgagtcgaagctcctggcggggaaccggagcatcgcccagccttacgagttcatcgttgggtcgctgcctgggaaagaacgcaagcgggatttcgcggacaacgccaacgggctgtactcggcgcaggcggctccgaagcctccggccgccatgtacaccataaccgaggggatgaagaggagagtgattgtccctccagagctggggtatgggaagaggggaatgagtgagataccgcctgacgctcctttgaactggacctcga

SEQ ID NO: 46330 - DNA, 1570 bp, Zea Mays
tcctctgtcttttccaacaataatagtataatacaggcagctcacctccaagataaaatggcctgacgaaatgagcttcagggaaggccgccgccgcctactcctcgtcctcctcttcctggggtgtcgacaagccgcggcacgctcccacggtcggagacgaccaagatttcctcttttccgaggggagcacgagcacgagcaccaacgccgaccccgacctgacgcatttccaagggactcccctctgcaaatagacctgtccaccgcaatcctgacactgtcggagaacggggagctgcagcggatccatgacaagtggctcaagacaggcgactgctcaacggacaatgctgagttcgtggactcgaaccagctccgcctcgagagcttcatgggcctgttcctcatctgcggcgcggcatgcgtcctcgccctgctcatctacctcggcatcacgatacgccagtacctgagacacgaacagccggaaaaagaaagagaggggtggaaatgggatattccattcctggtacccttccaggcttccacctgtgctttctttatggataacgatgatgatgactatgaggcggccgttgtgggcgcgccattccggaccctacactccagctccactctcccatggcttcctccgccctgccttccagaaccttgcaccgccgcgcgctcccctcgtctacgccgtgccaccctgcgacggagaccttcgcccccggcgccgtctcccggcggcgagcagccgtgcggctcctctccgccgggttcctgaccgccgtcgcgccgccgccgtcgctcgccgcgaggaggggacgcgttgtcgtgccaccggaggactacgccactgcacgtacgtaggcgtgcctgcttcctggcgctgctggtttctgcatccgcgctcgttttttttcttcttttcggctaaagttggcacctttttttgcgagcgactgactgaatttcagctaatcacaacctttttcctggttaagaccaggatccttttcttttactgcaaataatgctggtgcttctaactcgtatgcgtctgcaacgccataccctacctgagtattccctgtgttaactgaccgattgaaattccatttcgagttcccgcgaatgatctgacgtgatgacgttctgaaagcagccgatggtctcaagtactacgatcttgtcgaagggaagggaccaactgctgagaagggctcaaccgtgctggtccacttcgactgcatttaccgtggcatcaccgcggtgtcgagccgtgagtcgaagctcctggcggggaaccggagcatcgcccagccttacgagttcatcgttgggtcgctgcctgggaaagaacgcaagcgggatttcgcggacaacgccaacgggctgtactcggcgcaggcggctccgaagcctccggccgccatgtacaccataaccgaggggatgaaggtggggggaaagaggagagtgattgtccctccagagctggggtatgggaagaggggaatgagtgagataccgcctgacgctcctttgaactggacctcga

SEQ ID NO: 46331 - DNA, 1342 bp, Zea Mays
acggccatcgttaatcgtgtggggcccagctgcctccatgtatacagtccccccccatccatctcatctccctcctctgtcttttccaacaataatagtataatacaggcagctcacctccaagataaaatggcctgacgaaatgagcttcagggaaggccgccgccgcctactcctcgtcctcctcttcctggggtgtcgacaagccgcggcacgctcccacggtcggagacgaccaagatttcctcttttccgaggggagcacgagcacgagcaccaacgccgaccccgacctgacgcatttccaagggactcccctctgcaaatagacctgtccaccgcaatcctgacactgtcggagaacggggagctgcagcggatccatgacaagtggctcaagacaggcgactgctcaacggacaatgctgagttcgtggactcgaaccagctccgcctcgagagcttcatgggcctgttcctcatctgcggcgcggcatgcgtcctcgccctgctcatctacctcggcatcacgatacgccagtacctgagacacgaacagccggaaaaagaaagagaggggtggaaatgggatattccattcctggtacccttccaggcttccacctgtgctttctttatggataacgatgatgatgactatgaggcggccgttgtgggcgcgccattccggaccctacactccagctccactctcccatggcttcctccgccctgccttccagaaccttgcaccgccgcgcgctcccctcgtctacgccgtgccaccctgcgacggagaccttcgcccccggcgccgtctcccggcggcgagcagccgtgcggctcctctccgccgggttcctgaccgccgtcgcgccgccgccgtcgctcgccgcgaggaggggacgcgttgtcgtgccaccggaggactacgccactgcacccgatggtctcaagtactacgatcttgtcgaagggaagggaccaactgctgagaagggctcaaccgtgctggtccacttcgactgcatttaccgtggcatcaccgcggtgtcgagccgtgagtcgaagctcctggcggggaaccggagcatcgcccagtagccttacgagttcatcgttgggtcgctgcctgggaaagaacgcaagcgggatttcgcggacaacgccaacgggctgtactcggcgcaggcggctccgaagcctccggccgccatgtacaccataaccgaggggatgaaggtggggggaaagaggagagtgattgtccctccagagctggggtatgggaagaggggaatgagtgagataccgcctgacgctcctttgaactggacctcga

SEQ ID NO: 46332 - DNA, 1448 bp, Zea Mays
gttctttggccttacagtactgccgaacaaaacactcagcttctggattgtgggcatcttgctagtcttcttccagattgcttcctaataatgatgacacatgaatgggctgccaatttggctcttgctggtctgagcttggcgccgcttgtggttaatgtaaacccaaatgtgaatgtggtactgacagcatgccttactgtctatgtgggttgctaccgttctgttaaaccaactccaccctctgagaccatgtccaaggagcatgcgatgcggttccccttagttggaagtgctatgcttttatcactgtttcttctattcaagtttctctcaaaagacttggtcaacgctgtgctcactgcctactttttcattctaggcattgttgctctctctgcaacactgcttccttctataaaacgttttcttccaaaagagtggaatgataatctcattgtctggcgtgctccacttttccactcactctcggtggagttcacaaagtcccagattgttgcttcaatacctggatttttcttctgcttgtggtatgcgtcaaagaagcattggcttgcaaataatgttctgggattggctttctgtattcaggggattgagatgctgtcattgggatcatttaaaaccggagccattctcttgggtggactttttgtgtatgacattttctgggtgttcttcactccagttatggtcagtgtggctaaatcttttgatgctcctataaagcttctgtttcctactgcggatgatgcacggccattctccatgcttggccttggtgacattgtaatacctggcatttttgttgcacttgccttgcgctttgatgtctcaagaggtatcaagaagcgttacttcaacagcgcattttcgggatacgccgtgggtatggcggtgaccatcattgtaatgaactggtttcaagctgcacagccggctctactgtatctcgttccaggtgtgatcggattcgtcgccgtacactgtctctggtacggagaagtgaaacagctgctggagttcgacgagtcaaaagctgaggcggaggaaggcggtgcagaaggagagcaagatggtgatggttccaaagccagcaaaaaggtggactagcatgatttagttccgggaggtaaaaaagaggacagggagacatttttcgtgtaaggtcgtcttgcagctagctagctaaacgggcttgttgccctctctaatacttacttgataacttagaaaatggttcaacatgatactagttttttgtttgtttgttttcctttgcggatcatttatttggctcgttaaggaattctctcaccagtcgccagaaccctgactgggcccgccgcgacgcattcatgccatgcttactttgcttctttgcaggcaagaatttcattatggactatatttttaccgccgtgctt

SEQ ID NO: 46333 - DNA, 1427 bp, Zea Mays
gagaaccgtgacaacttgctgctgcattactggcatcttgctagtcttcttccagattgcttcctaataatgatgacacatgaatgggctgccaatttggctcttgctggtctgagcttggcgccgcttgtggttaatgtaaacccaaatgtgaatgtggtactgacagcatgccttactgtctatgtgggttgctaccgttctgttaaaccaactccaccctctgagaccatgtccaaggagcatgcgatgcggttccccttagttggaagtgctatgcttttatcactgtttcttctattcaagtttctctcaaaagacttggtcaacgctgtgctcactgcctactttttcattctaggcattgttgctctctctgcaacactgcttccttctataaaacgttttcttccaaaagagtggaatgataatctcattgtctggcgtgctccacttttccactcactctcggtggagttcacaaagtcccagattgttgcttcaatacctggatttttcttctgcttgtggtatgcgtcaaagaagcattggcttgcaaataatgttctgggattggctttctgtattcaggggattgagatgctgtcattgggatcatttaaaaccggagccattctcttgggtggactttttgtgtatgacattttctgggtgttcttcactccagttatggtcagtgtggctaaatcttttgatgctcctataaagcttctgtttcctactgcggatgatgcacggccattctccatgcttggccttggtgacattgtaatacctggcatttttgttgcacttgccttgcgctttgatgtctcaagaggtatcaagaagcgttacttcaacagcgcattttcgggatacgccgtgggtatggcggtgaccatcattgtaatgaactggtttcaagctgcacagccggctctactgtatctcgttccaggtgtgatcggattcgtcgccgtacactgtctctggtacggagaagtgaaacagctgctggagttcgacgagtcaaaagctgaggcggaggaaggcggtgcagaaggagagcaagatggtgatggttccaaagccagcaaaaaggtggactagcatgatttagttccgggaggtaaaaaagaggacagggagacatttttcgtgtaaggtcgtcttgcagctagctagctaaacgggcttgttgccctctctaatacttacttgataacttagaaaatggttcaacatgatactagttttttgtttgtttgttttcctttgcggatcatttatttggctcgttaaggaattctctcaccagtcgccagaaccctgactgggcccgccgcgacgcattcatgccatgcttactttgcttctttgcaggcaagaatttcattatggactatatttttaccgccgtgctt

SEQ ID NO: 46334 - DNA, 1569 bp, Zea Mays
ggaaaacgcagacagacgcagccccagatttcttttccatcaaaacaccccccgttcccctgctcccattccgccccggatttcgatttcgtcctcccttcgccgcccgcgccaatactttcctctgccggggctgcaccggcagcgcggggtcgacaacagctcgagatccgggcatcttgctagtcttcttccagattgcttcctaataatgatgacacatgaatgggctgccaatttggctcttgctggtctgagcttggcgccgcttgtggttaatgtaaacccaaatgtgaatgtggtactgacagcatgccttactgtctatgtgggttgctaccgttctgttaaaccaactccaccctctgagaccatgtccaaggagcatgcgatgcggttccccttagttggaagtgctatgcttttatcactgtttcttctattcaagtttctctcaaaagacttggtcaacgctgtgctcactgcctactttttcattctaggcattgttgctctctctgcaacactgcttccttctataaaacgttttcttccaaaagagtggaatgataatctcattgtctggcgtgctccacttttccactcactctcggtggagttcacaaagtcccagattgttgcttcaatacctggatttttcttctgcttgtggtatgcgtcaaagaagcattggcttgcaaataatgttctgggattggctttctgtattcaggggattgagatgctgtcattgggatcatttaaaaccggagccattctcttgggtggactttttgtgtatgacattttctgggtgttcttcactccagttatggtcagtgtggctaaatcttttgatgctcctataaagcttctgtttcctactgcggatgatgcacggccattctccatgcttggccttggtgacattgtaatacctggcatttttgttgcacttgccttgcgctttgatgtctcaagaggtatcaagaagcgttacttcaacagcgcattttcgggatacgccgtgggtatggcggtgaccatcattgtaatgaactggtttcaagctgcacagccggctctactgtatctcgttccaggtgtgatcggattcgtcgccgtacactgtctctggtacggagaagtgaaacagctgctggagttcgacgagtcaaaagctgaggcggaggaaggcggtgcagaaggagagcaagatggtgatggttccaaagccagcaaaaaggtggactagcatgatttagttccgggaggtaaaaaagaggacagggagacatttttcgtgtaaggtcgtcttgcagctagctagctaaacgggcttgttgccctctctaatacttacttgataacttagaaaatggttcaacatgatactagttttttgtttgtttgttttcctttgcggatcatttatttggctcgttaaggaattctctcaccagtcgccagaaccctgactgggcccgccgcgacgcattcatgccatgcttactttgcttctttgcaggcaagaatttcattatggactatatttttaccgccgtgctt

SEQ ID NO: 46335 - DNA, 1264 bp, Zea Mays
aatattgggtaattgacccgtataaccatgattttcactggtggcgccaaataaaaagggagaagccgagaaatcacttggacttgcgcaaccgcttaaattctaaaggccagagggaggggaaggtcattgattataggtaaaaaaacagcatgatcacatacttatttttagtgacaaaagcgatgcatattgggaaaatatttagtggaacaattcatgatttaacattccacatggagaccctttgatcttgacacacatcgtttggcctcacatacttatagcaatttatcgacatattttgttgcttacttttgtcatgttatgtactttgttctgtatacatggtgcagggtcagtgagcttcgggttgtggaacttctggatggcctatgcgataagatgcaagattataccttaaagaaggcagggattaaagatttataattgttttataatttgcacttgacactatcttattggtgctgcatcccttttctatgtatcaagtgttataaacatgccataaatatgaactgttttttcactttttagcgcactttgaatacgctaaacatttagctacctaacatgttttttgtatgcagttggaatcaggcgaaaagggatgggttaaagtaacagactggaatagctttcaaactgaaaataaggcagcagcaagagctcactccaaaaaattgtccaccttctgtggaaggctactggaggaaacggaggatgagctctctgagtggatcaaaacaacctccacagaatcagaatatgtaagcaaggccctttgtgaagatattagcaaacactgccgatctacaagtgctaccatccagattgatgatgagctatgacatgccgggggcaggtcgttgtttcgcaaaaagcaaaacaggcgacaggttggaaaatgttaaagaacacagctctagtagtccctgacaccatttagagagacatgcagctgccaattctgattgtttgtgttgcactcatatttcctgtaaacaaaagcttagactgatctgtagagaaagcaactggacatcaatttttgcataccgatgaactacagtttaaaacggccggttgaattatcatgtcaggggctataggaaatttgaatgcttctattctaaggtcttgttgttgagtactgagtatagtttgatgactgcatgttggtcaatgacagcatcaaagattacatgcatttttttgggaaaagatgatgtgcattttagat

SEQ ID NO: 46336 - DNA, 1682 bp, Zea Mays
cgacggtgaaggataaacttgtgtcatgcgtgtttgacctagctacctcattatgctagaaaatgaaaaaagagcgtgctatacctggctatcttactgggtgggaaagagaaaaataatcacgctagtatgaagaaattgacgtcaactgcatttacggagttcctaccgagttgctaaatgtggagagtaaatagagttgaatagcaactaagtaaatttagcaagtctatttagagaaccattggagaagcatttttctgttcatttcttaaatttaagatttagagagttgtttagagaactattgaagttgctcttagaggcccttgttgtcttgttgaagagttgaagacaccgcagttccggaaacttctgtagcagctgaaatagtacggacgtgtttgaacatgtacaggatctcgaggccacatctgtaaaacgaccacccctcacgcggaagcggagactggaaatcgggagggagaccggagacgagaccgccggagatggagccgagatctgcaatctacagatccggcgccttccttctcctcgccgccatccttgcggaggtcgtcatccctgcatccgccatcggagacaagtgcgccgcctgcaaggccgttgctgcggagctagagattggaatttcgagtgagaagccgagaaatcacttggacttgcgcaaccgcttaaattctaaaggccagagggaggggaaggtcattgattataggtaaaaaaacagcatgatcacatacttatttttagtgacaaaagcgatgcatattgggaaaatatttagtggaacaattcatgatttaacattccacatggagaccctttgatcttgacacacatcgtttggcctcacatacttatagcaatttatcgacatattttgttgcttacttttgtcatgttatgtactttgttctgtatacatggtgcagggtcagtgagcttcgggttgtggaacttctggatggcctatgcgataagatgcaagattataccttaaagaagttggaatcaggcgaaaagggatgggttaaagtaacagactggaatagctttcaaactgaaaataaggcagcagcaagagctcactccaaaaaattgtccaccttctgtggaaggctactggaggaaacggaggatgagctctctgagtggatcaaaacaacctccacagaatcagaatatgtaagcaaggccctttgtgaagatattagcaaacactgccgatctacaagtgctaccatccagattgatgatgagctatgacatgccgggggcaggtcgttgtttcgcaaaaagcaaaacaggcgacaggttggaaaatgttaaagaacacagctctagtagtccctgacaccatttagagagacatgcagctgccaattctgattgtttgtgttgcactcatatttcctgtaaacaaaagcttagactgatctgtagagaaagcaactggacatcaatttttgcataccgatgaactacagtttaaaacggccggttgaattatcatgtcaggggctataggaaatttgaatgcttctattctaaggtcttgttgttgagtactgagtatagtttgatgactgcatgttggtcaatgacagcatcaaagattacatgcatttttttgggaaaagatgatgtgcattttagat

SEQ ID NO: 46337 - DNA, 2095 bp, Zea Mays
aactcacctcatcatcatcactcccccgtccttgatctcctctctctctctctctgtcgccaagagggcgccgccgccaccaacgcaacgcgcgccgccgcagatctccgccaccgacgcgccggccatggagtacgagcgcattgagaagccgttccccgtccagggcggcgggttctcgcccaagcggctgcgcgcgatgctgctgggggtggacaagcgccgcaaggggcaggacggcgccgccgaggaggacgaggacggcggcggcgactacggcgccctgccgaaggcccacgccagatccggcgccggcgacgttaatttcaaccgccatgatgcatccaccacgcttcagagcgcagcaacatgcatacctcctccaacaacggtccggtcagtgtcgatgagggacatgggcacagagatgacgcccatcgcaagccaagagccgtcccggaccgggacgccggtgagggcgacgagcccaaactgctcccagccaacgactccacggaggacgctcggtggccccagcgcagtcggctccttcatcagccacggaggagaatgcagcagctcggagctgagcgagcaggagctgcagaccaaaaccaggagggagatcatgctccttggcacgcagctaggcaagaccagcatcgcggcatgggcgagcaagaaggaggaggagaaggacgcctcgctctcgctgaaaccggtgcccatggaccagtcgacgcagaacataaccgcgatccgtgcggctgcgtgggaggaggcggagaaggccaagtatttagcgagattcaagcgagaagagatcaagatccaggcttgggaggaccatcagaaagcccagatagaagctgagatgaggaaaatcgaggttcgcagactgtttcctgtcaattttcctgttaataacgatgggcgatagatccctgatggattctccacgttaccgagacacacatgcattttcacctcttgagttttaacttgtgaaagtttaaaacacagaggcgaaaagttagcggcctagatcccacacctgctgcggctactatccgtctgaactcaatggcattgccctctctaggctatcatttcatttggacactcccgatgaagatgcaatgcattctcaaatttagcatgagatataacttacagccaggacactagttttcgactgcacctgcacatagcggttggcgtcagtatccatttggatttgacagtagcaagtagtccaagtgttgtttgttcttaatacaggacggcaagtgtttctaggctactgtactcaaatgaggcagcctcgttgtgctgtgccaccactctgtgattcagttcttctgttcagtttgccatagatgttcaggttcagaagaacatacaaacccaaagggtgcagcgctgagctgtgtttgtggatactgcattgttggtatcgatagttttaaccatggcccgtgctttgcgttcctttcctcaaggtcgaggtggagcggatgcgtgcccgcgcgcaagacaagctgatgaccaagctcgcgtcggcgaggcacagcgcagacgagaagcgtgccacggcggagctgaaacggaaccgcgcagccgcgaggaccgctgagcaggcagagcacatcaggaggaccggccgggtgccgccgtcgtttggctgctggaactggtgctcatgaagtgcccatggaagatgagtcgcccgttgagaatgagtcgcttgtaagctgttgtaactatatatatatatatatacacacgtatgtaaggtgtgagatccatgcgtcctgtgctgtggtggttactgtgtaagtgtcacagatgtaccgaattcaaggccgagcttggattcctagtgcacatatgtgataaacttcacaccaagagacctccatgctagttgtgactgaatttgatttgtgctctacttgatgcttatactaacagtccgcactgtgatagagctagatatagcaatggtaattaagtttacatgttaattaacttgattaaccaacaaggttccactaatccatagaacaccaacctgagtaccggcaagaaaaag

SEQ ID NO: 46338 - DNA, 2766 bp, Zea Mays
gcagaatagtcatcctggggctccggcccgtcaaaggccggtcaaaagtacactcactctcgagctacacatttaactcacctcatcatcatcactcccccgtccttgatctcctctctctctctctctgtcgccaagagggcgccgccgccaccaacgcaacgcgcgccgccgcagatctccgccaccgacgcgccggccatggagtacgagcgcattgagaagccgttccccgtccagggcggcgggttctcgcccaagcggctgcgcgcgatgctgctgggggtggacaagcgccgcaaggggcaggacggcgccgccgaggaggacgaggacggcggcggcgactacggcgccctgccgaaggcccacgccagatccggcgccggcgacggtggtggcggtggaggcgccacgtgcgaagaatacaaggacgtggacgtggtgagcaccacctcagagttctcgtcctcgctggagacagcgggtgggcaccggccccgggacgctcaccccgtcgccacgggttctaggaccagggtgccgcccgaggaggactcgtgcgactcggagagcgtggcatccaacttcgagttccacaaggagcggcgggcagcggcgtcggcggcggcgtcggtcgtccctccattctcaaagcccgccccgtcaaagtgggacgatgcacagaagtggatcgccagcccgacggcgaactgccctggcaggggtggcgcggctcctgcgccgaagaagacagagaaacctggctccggcatcgggaggctgccgctgccggcgaccaaggtcgtggtagaggccactgaggagatagataccaagaggatggatccgagccaggagaagcgagagattgggtggcagaaagcggcgaggtgggccccgcccgacccctgtccggaggcggagccctgcccaacaaagaccacactactcgctgtagaaactacagtggctgctgcttcagcagctgttaatttcaaccgccatgatgcatccaccacgcttcagagcgcagcaacatgcatacctcctccaacaacggtccggtcagtgtcgatgagggacatgggcacagagatgacgcccatcgcaagccaagagccgtcccggaccgggacgccggtgagggcgacgagcccaaactgctcccagccaacgactccacggaggacgctcggtggccccagcgcagtcggctccttcatcagccacggaggagaatgcagcagctcggagctgagcgagcaggagctgcagaccaaaaccaggagggagatcatgctccttggcacgcagctaggcaagaccagcatcgcggcatgggcgagcaagaaggaggaggagaaggacgcctcgctctcgctgaaaccggtgcccatggaccagtcgacgcagaacataaccgcgatccgtgcggctgcgtgggaggaggcggagaaggccaagtatttagcgagattcaagcgagaagagatcaagatccaggcttgggaggaccatcagaaagcccagatagaagctgagatgaggaaaatcgaggttcgcagactgtttcctgtcaattttcctgttaataacgatgggcgatagatccctgatggattctccacgttaccgagacacacatgcattttcacctcttgagttttaacttgtgaaagtttaaaacacagaggcgaaaagttagcggcctagatcccacacctgctgcggctactatccgtctgaactcaatggcattgccctctctaggctatcatttcatttggacactcccgatgaagatgcaatgcattctcaaatttagcatgagatataacttacagccaggacactagttttcgactgcacctgcacatagcggttggcgtcagtatccatttggatttgacagtagcaagtagtccaagtgttgtttgttcttaatacaggacggcaagtgtttctaggctactgtactcaaatgaggcagcctcgttgtgctgtgccaccactctgtgattcagttcttctgttcagtttgccatagatgttcaggttcagaagaacatacaaacccaaagggtgcagcgctgagctgtgtttgtggatactgcattgttggtatcgatagttttaaccatggcccgtgctttgcgttcctttcctcaaggtcgaggtggagcggatgcgtgcccgcgcgcaagacaagctgatgaccaagctcgcgtcggcgaggcacagcgcagacgagaagcgtgccacggcggagctgaaacggaaccgcgcagccgcgaggaccgctgagcaggcagagcacatcaggaggaccggccgggtgccgccgtcgtttggctgctggaactggtgctcatgaagtgcccatggaagatgagtcgcccgttgagaatgagtcgcttgtaagctgttgtaactatatatatatatatatacacacgtatgtaaggtgtgagatccatgcgtcctgtgctgtggtggttactgtgtaagtgtcacagatgtaccgaattcaaggccgagcttggattcctagtgcacatatgtgataaacttcacaccaagagacctccatgctagttgtgactgaatttgatttgtgctctacttgatgcttatactaacagtccgcactgtgatagagctagatatagcaatggtaattaagtttacatgttaattaacttgattaaccaacaaggttccactaatccatagaacaccaacctgagtaccggcaagaaaaag

SEQ ID NO: 46339 - DNA, 902 bp, Zea Mays
ttttttttttgcaaaggacacatttgccagctagagggttaagatccacatattaattacatgcatcacccttcaatagaacaaagcaagttgatgacgactgctggaagcaactgttacagcataaacatgacgcgagttgcgaaacttgattcctcctctccagggacctactaactgatactctgatctgccgcccaatgcatgaaacggcatggcgattggcgagtcaacaccccaaggcagctagctgcccctaagcattaggcggccagagctttgggtcttgagttgtgtccacgatggtcggaggcagccactgccacattgccatcccagggaaaggtgcagggattggagcacttttgttgcctgcagcttgctgtggcggcacaaatggagcaaatgcagccgggtggtatgaagctggatgagggagatggggaacatatcctgtaggagctacactcatggctttgacttgctgctccagcctatctttctctaccttcagcctcactttctcttcgcggagctcattcttctcctcctgaaacaataatagaacatttccttaattcgaacaaacaaatttggtcggacagtaggcttcttatagatgcgtgggaggttacactgtcctgtccatgcctaaacttgcatgtttaaaaatggccaatctagtctagtctagaaactaaattggaccaaacaatggctgcagacatggttatgagttcagtaggtttgcctacttggagccttggactctggtgcataagcagaagacaaaaaaatatcatgcattttaaagaaacaacaaaaccttagaaggcattgagaagcatgtggagggcatctaagaatctgaaatcctagacaaagatttgtaagtcaggtag

SEQ ID NO: 46340 - DNA, 1109 bp, Zea Mays
aatctggagagttccagtgagactacgaatcgtccgccgtcttctgaaaaggtcactcaaaggcccgccgtctgcagcgctggcgaccgcagagccggcgaccaccgtgcgtcctgtctcctcgtctgctccgtccatctccacagcttgtgcaggtcgctgaaacacttggatcaaaacagagcttgagatgaagcactacaccctgaaggatcagggtgtttatgctcttccatctactgcaaaatccaattggaaggatatctactgcatctacttccaaaacagcatgatgcaatacttgacgacaaaggaaaaggtccaaccgttacaattgaatctccacccaaaaggttcaaaatggacctctacgtattaaagaaaggtcggacacaagatcttccaacaactgaagattttctcagattatcagcagcttttagatacacaccgataggtatgtcattattcaggcagcattttgttcactggtgtggcagctttattgattggagtacgcaatgggaggttgtgtgggaaaggtacgtcgtgatgatgaagaaaagcttgattttaaaggtggaaatgttcatattataacaagcaaagagggctgggaccagaagattgcaggagcaaatagagataagaaaactaaggggaggcggagcactctatcacctaacaagctgtcgatccgaggacaccgaagacgcgatgtgtttgcttgcccgtggtttgagcttggatccaggcacggacgattgaaggagtttgcagatgccgatcttgggccgaaggaaaggtgttgttggtcgtcggtggtcgttgatgctcgcgacagtcgacaacgctgcctgctgcctgctttgtggagggaaactgccagatgtgagggagaaggaggggagggggcgggcatgaacctcccgttcatcgcgtcagggtggggcggggagcagagcgcagggatggttgccagcatcggggtggggacgagaagggacgataggggagtcgggcgcgagggagaaggggaggagggggaggggaacgagcgggttgagattcgagggccgaggaaggggagagggaacagtgggctgtag

SEQ ID NO: 46341 - DNA, 1149 bp, Zea Mays
cttcccgtcgctgaagggagcggcggctagggtttcgacgcagtttcgccgtcctccagcgagagctcttctgctcgtctgcggttcccagcaatatgggtgatagtgccgattggaatgaagataacactgctctagtgtgtgaattgttcgccgaacaagtgaaggcgcacaaccggtctggtacccacttaaaaaaaacagggtacaaaaatgtgatggacaaattcaaagaaaagactgggttgtcctacaccaaaatgcagttcaagaacaaatgggacaagatgaggattgaatacaccaattggaaaagactatcgaaggaaactggtttgggatgggacacagcgaaaaaaacctggagtgcgacaaatgaaaggtggaagaacttgaataagcaatacaaaggaattgccaagtttaaagatgggcctctgttgcatgaggaagaaaaagccatcatgtatgaagatattaggaacacaggagatgatcattgggctccgtcaagtggtactacaccacaaattctagagggtgaaaccactgagaacactgatgacaaggatggagactatgaggccaatgatgacaaggatgaagactatgaagaatgtgaagaggtttcccctacaactgctaaaggaaagcggcatgtttctgttggtcgaaaggacaagggtaaaaagcccaggtcattgggaggacattgggtgcaagatcaattgagcaaacttgtgacagcaagtgagaagagcacagcatccgttgagtctttagcaagaaaggaggacaatgggtgctccattagagatgtcatggcattggtgaaggagtgtggtgcagttccaggaacaaaagaacacttcatagcatctcaagtttttgtcaagagggcagagagggagatgtttatgactttggacacaccagaagaacgcttcaactggcttacaatgaaacatgattggctcactaggatgagtcactaggttctgtaattttttgtagcactatgtcgcattttcagtgctaatatgtatctgtttaaacctttttactccgatttgaacatgttgtgacattattgtggatggattgtagcaattttgttgctgccctattttttgttatctattttgttgc

SEQ ID NO: 46342 - DNA, 2973 bp, Zea Mays
cccggctccctcgcgctcctaccccggcccccaattccaatctcgccgccgccgggttgccgtcctgtgctccgcttcgcaccgccgcaccgctaggaacagcccgtgctggagctgggggaacgaacatctcaacctccgtcacccccataccgtacaagtattcctatggagacgatctcatcttgtcccatctgcaacatacaagttcttacggctgagctggaatggcatgccaatagccactttgatgatgatcaactccaaatggacatggaattagcacatcagatgtcagttgctgaatcaagtacagatgccatgaacgacccaaaacattatagtggatcattcactagtgactctaacgctctaggggctctatcgagtcatagtggatactcgcaccattacagtgagctactggatgaacaaatctcttgcttggtccgagcacaaattcgaagcaaagttcaagaggtggaaggcggtattttgagcttgttgaggagctgcttggagtcagaagcgggttcctcgacaagtatgatatcgtgctatattgaccatcatcagagcctttcatcagaagataagggatggggatgtggatggaggaacattcagatgctgagctctcatctattgaagcaaagaccagaagctagagaagtattatttggtggttctggatttgttcctgacatcccttcactccagaggtggcttgagattgcttgggacaaaaaatttgatacaattggctccagccactttcataacaaaatttatggtgccaagaagtggatagggaccacagagtgcgctgccctcttccgctcctttggtctccgtgcaaggattgtagattttgatagcacagaatcatctgacctccatagtaacaacggaagccgtgcagcgagccaagtacgaggacctatggacaagttcttgataaagaataagcctccaaaatcatcatctgaactttgtcgagaggatgctgaaagtacgagaggccaacaggcccttgttgactgggtttggaactactttgcaagtgagcgctctgacagattagccacacagcgtgtcactgttagcaataaaacactaactaaagaggtgccattcatagaccattgtatttccaacatcaaggtcattcaaggacaatagttgggattcaaaagaaaccggatcgtcgtggatctcaagaacaatacagccttttgattttagatccgggccatagaactgcagatctagaaaggtgtctaagaagcaaaaaaggatggcagcgtctggtgaagagaggcgtccacacgctcaggaagccacagtatcagctgtgttatgtggatcctggaattgctagttcagaagaggtggagcgactgaagactattgatggcacactagtcaggttttaggttcctggtaagtacggaaactaaacctgacttcctttatctaattattgggtttcattccaccgtcttgttgacgccttcatcagttactttgacctaacaagacatgcttggttgactcgtcgagatgctaagtgaagcttgctgcttttcaacaatatttgaaaatctgcgtggtggtattctggagggataggtcaaactgccttgaatagatcttgacatgcccacttgggcacttgtcctaaactgaaatttacaccgcgttttcgtttttttaccaggttgtagtctgcgggatcttgatggtggttgtggcagtcggcaattttgccaacactatgtatacactggtggtactgaagctgaggtttaaagcaaagatgaagagagcaaagggcagacaggatcccccacatcaaaactgacaggcatgatcgttcctggaacacaaggatgcagcagctgctggcaccatctcttctgtaaatcctttgacctgtgtcaacattttttggtgctgccgtgctagtagtaggagtatcttgcaagcttttgttttggatggtgtggtggtccagaaaacactctgtctgctaaattaccagaaacatccgcagttgtatattgcggcaaaatcccaagtgtatattaaagtcctccaaaaactgccgctgctttcgaccacaaccaaccacctgaatgtatcttttctttacatggtcaatatcaagtcctctttcctctgcaatgcacgatccatttttcacaatcctaaattctcgatggaggaaataaaaatcatgtgagctctagcagcttgctgagctggatatggtggccgcaacccgccttggcgatggacctcgccgccttctccgcgatggcggcgcgcacctgcgccatcgacggccgcagcccgggctgcgccgccacgcactccacggcgagcctggccacgccggcggcctcctcctcgtcgtgcccgccgtccccgagcctgccgtcgacgagccccgccaccccgcgcgccctgacgcgtggcaggatccgcgccgtcaggttctcggcctcggacgccgccggcaggcccgtgacggcctccagcagcagcacgccgaagccgtacacgtcggacctgctggacacgatgcccgtgcgcaggaagaaagggtcggcgtagcccggcgacgccacggcggcgcgcgccggcgccacggccgccgagaagccctcgcaggcggagcccaggtcgcagagccgcacgccgccgtcggagaggagcacgttggacgccgacacgtcgccgtgcaccacggaggccccgccgccgccgccgccgtgcaggtgctccagcgcgcacgccacgtcgtggaggacgcgcatgcgctgcgcccacggcagcggggccgccgccgtgccgtggagcgcgtccgccagcgtgccgccgccgagtaagttagtatatacacgagcggcagcgcacgcaccgtggtcgtcggagtaggcgaggagcgcgacgatgtgcgggtgtcgg

SEQ ID NO: 46343 - DNA, 2336 bp, Zea Mays
cccggctccctcgcgctcctaccccggcccccaattccaatctcgccgccgccgggttgccgtcctgtgctccgcttcgcaccgccgcaccgctaggaacagcccgtgctggagctgggggaacgaacatctcaacctccgtcacccccataccgtacaagtattcctatggagacgatctcatcttgtcccatctgcaacatacaagttcttacggctgagctggaatggcatgccaatagccactttgatgatgatcaactccaaatggacatggaattagcacatcagatgtcagttgctgaatcaagtacagatgccatgaacgacccaaaacattatagtggatcattcactagtgactctaacgctctaggggctctatcgagtcatagtggatactcgcaccattacagtgagctactggatgaacaaatctcttgcttggtccgagcacaaattcgaagcaaagttcaagaggtggaaggcggtattttgagcttgttgaggagctgcttggagtcagaagcgggttcctcgacaagtatgatatcgtgctatattgaccatcatcagagcctttcatcagaagataagggatggggatgtggatggaggaacattcagatgctgagctctcatctattgaagcaaagaccagaagctagagaagtattatttggtggttctggatttgttcctgacatcccttcactccagaggtggcttgagattgcttgggacaaaaaatttgatacaattggctccagccactttcataacaaaatttatggtgccaagaagtggatagggaccacagagtgcgctgccctcttccgctcctttggtctccgtgcaaggattgtagattttgatagcacagaatcatctgacctccatagtaacaacggaagccgtgcagcgagccaagtacgaggacctatggacaagttcttgataaagaataagcctccaaaatcatcatctgaactttgtcgagaggatgctgaaagtacgagaggccaacaggcccttgttgactgggtttggaactactttgcaagtgagcgctctgacagattagccacacagcgtgtcactgttagcaataaaacaccattgtatttccaacatcaaggtcattcaaggacaatagttgggattcaaaagaaaccggatcgtcgtggatctcaagaacaatacagccttttgattttagatccgggccatagaactgcagatctagaaaggtgtctaagaagcaaaaaaggatggcagcgtctggtgaagagaggcgtccacacgctcaggaagccacagtatcagctgtgttatgtggatcctggaattgctagttcagaagaggtggagcgactgaagactattgatggcacactagtcaggttttaggttcctggttgtagtctgcgggatcttgatggtggttgtggcagtcggcaattttgccaacactatgtatacactggtggtactgaagctgaggtttaaagcaaagatgaagagagcaaagggcagacaggatcccccacatcaaaactgacaggcatgatcgttcctggaacacaaggatgcagcagctgctggcaccatctcttctcttgctgagctggatatggtggccgcaacccgccttggcgatggacctcgccgccttctccgcgatggcggcgcgcacctgcgccatcgacggccgcagcccgggctgcgccgccacgcactccacggcgagcctggccacgccggcggcctcctcctcgtcgtgcccgccgtccccgagcctgccgtcgacgagccccgccaccccgcgcgccctgacgcgtggcaggatccgcgccgtcaggttctcggcctcggacgccgccggcaggcccgtgacggcctccagcagcagcacgccgaagccgtacacgtcggacctgctggacacgatgcccgtgcgcaggaagaaagggtcggcgtagcccggcgacgccacggcggcgcgcgccggcgccacggccgccgagaagccctcgcaggcggagcccaggtcgcagagccgcacgccgccgtcggagaggagcacgttggacgccgacacgtcgccgtgcaccacggaggccccgccgccgccgccgccgtgcaggtgctccagcgcgcacgccacgtcgtggaggacgcgcatgcgctgcgcccacggcagcggggccgccgccgtgccgtggagcgcgtccgccagcgtgccgccgccgagtaagttagtatatacacgagcggcagcgcacgcaccgtggtcgtcggagtaggcgaggagcgcgacgatgtgcgggtgtcgg

SEQ ID NO: 46344 - DNA, 2446 bp, Zea Mays
cccggctccctcgcgctcctaccccggcccccaattccaatctcgccgccgccgggttgccgtcctgtgctccgcttcgcaccgccgcaccgctaggaacagcccgtgctggagctgggggaacgaacatctcaacctccgtcacccccataccgtacaagtattcctatggagacgatctcatcttgtcccatctgcaacatacaagttcttacggctgagctggaatggcatgccaatagccactttgatgatgatcaactccaaatggacatggaattagcacatcagatgtcagttgctgaatcaagtacagatgccatgaacgacccaaaacattatagtggatcattcactagtgactctaacgctctaggggctctatcgagtcatagtggatactcgcaccattacagtgagctactggatgaacaaatctcttgcttggtccgagcacaaattcgaagcaaagttcaagaggtggaaggcggtattttgagcttgttgaggagctgcttggagtcagaagcgggttcctcgacaagtatgatatcgtgctatattgaccatcatcagagcctttcatcagaagataagggatggggatgtggatggaggaacattcagatgctgagctctcatctattgaagcaaagaccagaagctagagaagtattatttggtggttctggatttgttcctgacatcccttcactccagaggtggcttgagattgcttgggacaaaaaatttgatacaattggctccagccactttcataacaaaatttatggtgccaagaagtggatagggaccacagagtgcgctgccctcttccgctcctttggtctccgtgcaaggattgtagattttgatagcacagaatcatctgacctccatagtaacaacggaagccgtgcagcgagccaagtacgaggacctatggacaagttcttgataaagaataagcctccaaaatcatcatctgaactttgtcgagaggatgctgaaagtacgagaggccaacaggcccttgttgactgggtttggaactactttgcaagtgagcgctctgacagattagccacacagcgtgtcactgttagcaataaaacaccattgtatttccaacatcaaggtcattcaaggacaatagttgggattcaaaagaaaccggatcgtcgtggatctcaagaacaatacagccttttgattttagatccgggccatagaactgcagatctagaaaggtgtctaagaagcaaaaaaggatggcagcgtctggtgaagagaggcgtccacacgctcaggaagccacagtatcagctgtgttatgtggatcctggaattgctagttcagaagaggtggagcgactgaagactattgatggcacactagtcaggttttaggttcctgttactttgacctaacaagacatgcttggttgactcgtcgagatgctaagtgaagcttgctgcttttcaacaatatttgaaaatctgcgtggtggtattctggagggataggttgtagtctgcgggatcttgatggtggttgtggcagtcggcaattttgccaacactatgtatacactggtggtactgaagctgaggtttaaagcaaagatgaagagagcaaagggcagacaggatcccccacatcaaaactgacaggcatgatcgttcctggaacacaaggatgcagcagctgctggcaccatctcttctcttgctgagctggatatggtggccgcaacccgccttggcgatggacctcgccgccttctccgcgatggcggcgcgcacctgcgccatcgacggccgcagcccgggctgcgccgccacgcactccacggcgagcctggccacgccggcggcctcctcctcgtcgtgcccgccgtccccgagcctgccgtcgacgagccccgccaccccgcgcgccctgacgcgtggcaggatccgcgccgtcaggttctcggcctcggacgccgccggcaggcccgtgacggcctccagcagcagcacgccgaagccgtacacgtcggacctgctggacacgatgcccgtgcgcaggaagaaagggtcggcgtagcccggcgacgccacggcggcgcgcgccggcgccacggccgccgagaagccctcgcaggcggagcccaggtcgcagagccgcacgccgccgtcggagaggagcacgttggacgccgacacgtcgccgtgcaccacggaggccccgccgccgccgccgccgtgcaggtgctccagcgcgcacgccacgtcgtggaggacgcgcatgcgctgcgcccacggcagcggggccgccgccgtgccgtggagcgcgtccgccagcgtgccgccgccgagtaagttagtatatacacgagcggcagcgcacgcaccgtggtcgtcggagtaggcgaggagcgcgacgatgtgcgggtgtcgg

SEQ ID NO: 46345 - DNA, 2682 bp, Zea Mays
cccggctccctcgcgctcctaccccggcccccaattccaatctcgccgccgccgggttgccgtcctgtgctccgcttcgcaccgccgcaccgctaggaacagcccgtgctggagctgggggaacgaacatctcaacctccgtcacccccataccgtacaagtattcctatggagacgatctcatcttgtcccatctgcaacatacaagttcttacggctgagctggaatggcatgccaatagccactttgatgatgatcaactccaaatggacatggaattagcacatcagatgtcagttgctgaatcaagtacagatgccatgaacgacccaaaacattatagtggatcattcactagtgactctaacgctctaggggctctatcgagtcatagtggatactcgcaccattacagtgagctactggatgaacaaatctcttgcttggtccgagcacaaattcgaagcaaagttcaagaggtggaaggcggtattttgagcttgttgaggagctgcttggagtcagaagcgggttcctcgacaagtatgatatcgtgctatattgaccatcatcagagcctttcatcagaagataagggatggggatgtggatggaggaacattcagatgctgagctctcatctattgaagcaaagaccagaagctagagaagtattatttggtggttctggatttgttcctgacatcccttcactccagaggtggcttgagattgcttgggacaaaaaatttgatacaattggctccagccactttcataacaaaatttatggtgccaagaagtggatagggaccacagagtgcgctgccctcttccgctcctttggtctccgtgcaaggattgtagattttgatagcacagaatcatctgacctccatagtaacaacggaagccgtgcagcgagccaagtacgaggacctatggacaagttcttgataaagaataagcctccaaaatcatcatctgaactttgtcgagaggatgctgaaagtacgagaggccaacaggcccttgttgactgggtttggaactactttgcaagtgagcgctctgacagattagccacacagcgtgtcactgttagcaataaaacgtcattcaaggacaatagttgggattcaaaagaaaccggatcgtcgtggatctcaagaacaatacagccttttgattttagatccgggccattacggccatccaaatgtttccccttaatgccgcagagaactgcagatctagaaaggtgtctaagaagcaaaaaaggatggcagcgtctggtgaagagaggcgtccacacgctcaggaagccacagtatcagctgtgttatgtggatcctggaattgctagttcagaagaggtggagcgactgaagactattgatggcacactagtcaggttttaggttcctggttgtagtctgcgggatcttgatggtggttgtggcagtcggcaattttgccaacactatgtatacactggtggtactgaagctgaggtttaaagcaaagatgaagagagcaaagggcagacaggatcccccacatcaaaactgacaggcatgatcgttcctggaacacaaggatgcagcagctgctggcaccatctcttctgtaaatcctttgacctgtgtcaacattttttggtgctgccgtgctagtagtaggagtatcttgcaagcttttgttttggatggtgtggtggtccagaaaacactctgtctgctaaattaccagaaacatccgcagttgtatattgcggcaaaatcccaagtgtatattaaagtcctccaaaaactgccgctgctttcgaccacaaccaaccacctgaatgtatcttttctttacatggtcaatatcaagtcctctttcctctgcaatgcacgatccatttttcacaatcctaaattctcgatggaggaaataaaaatcatgtgagctctagcagcttgctgagctggatatggtggccgcaacccgccttggcgatggacctcgccgccttctccgcgatggcggcgcgcacctgcgccatcgacggccgcagcccgggctgcgccgccacgcactccacggcgagcctggccacgccggcggcctcctcctcgtcgtgcccgccgtccccgagcctgccgtcgacgagccccgccaccccgcgcgccctgacgcgtggcaggatccgcgccgtcaggttctcggcctcggacgccgccggcaggcccgtgacggcctccagcagcagcacgccgaagccgtacacgtcggacctgctggacacgatgcccgtgcgcaggaagaaagggtcggcgtagcccggcgacgccacggcggcgcgcgccggcgccacggccgccgagaagccctcgcaggcggagcccaggtcgcagagccgcacgccgccgtcggagaggagcacgttggacgccgacacgtcgccgtgcaccacggaggccccgccgccgccgccgccgtgcaggtgctccagcgcgcacgccacgtcgtggaggacgcgcatgcgctgcgcccacggcagcggggccgccgccgtgccgtggagcgcgtccgccagcgtgccgccgccgagtaagttagtatatacacgagcggcagcgcacgcaccgtggtcgtcggagtaggcgaggagcgcgacgatgtgcgggtgtcgg

SEQ ID NO: 46346 - DNA, 2739 bp, Zea Mays
cccggctccctcgcgctcctaccccggcccccaattccaatctcgccgccgccgggttgccgtcctgtgctccgcttcgcaccgccgcaccgctaggaacagcccgtgctggagctgggggaacgaacatctcaacctccgtcacccccataccgtacaagtattcctatggagacgatctcatcttgtcccatctgcaacatacaagttcttacggctgagctggaatggcatgccaatagccactttgatgatgatcaactccaaatggacatggaattagcacatcagatgtcagttgctgaatcaagtacagatgccatgaacgacccaaaacattatagtggatcattcactagtgactctaacgctctaggggctctatcgagtcatagtggatactcgcaccattacagtgagctactggatgaacaaatctcttgcttggtccgagcacaaattcgaagcaaagttcaagaggtggaaggcggtattttgagcttgttgaggagctgcttggagtcagaagcgggttcctcgacaagtatgatatcgtgctatattgaccatcatcagagcctttcatcagaagataagggatggggatgtggatggaggaacattcagatgctgagctctcatctattgaagcaaagaccagaagctagagaagtattatttggtggttctggatttgttcctgacatcccttcactccagaggtggcttgagattgcttgggacaaaaaatttgatacaattggctccagccactttcataacaaaatttatggtgccaagaagtggatagggaccacagagtgcgctgccctcttccgctcctttggtctccgtgcaaggattgtagattttgatagcacagaatcatctgacctccatagtaacaacggaagccgtgcagcgagccaagtacgaggacctatggacaagttcttgataaagaataagcctccaaaatcatcatctgaactttgtcgagaggatgctgaaagtacgagaggccaacaggcccttgttgactgggtttggaactactttgcaagtgagcgctctgacagattagccacacagcgtgtcactgttagcaataaaacaccattgtatttccaacatcaaggtcattcaaggacaatagttgggattcaaaagaaaccggatcgtcgtggatctcaagaacaatacagccttttgattttagatccgggccatagaactgcagatctagaaaggtgtctaagaagcaaaaaaggatggcagcgtctggtgaagagaggcgtccacacgctcaggaagccacagtatcagctgtgttatgtggatcctggaattgctagttcagaagaggtggagcgactgaagactattgatggcacactagtcaggttttaggttcctgatgctaagtgaagcttgctgcttttcaacaatatttgaaaatctgcgtggtggtattctggagggataggttgtagtctgcgggatcttgatggtggttgtggcagtcggcaattttgccaacactatgtatacactggtggtactgaagctgaggtttaaagcaaagatgaagagagcaaagggcagacaggatcccccacatcaaaactgacaggcatgatcgttcctggaacacaaggatgcagcagctgctggcaccatctcttctgtaaatcctttgacctgtgtcaacattttttggtgctgccgtgctagtagtaggagtatcttgcaagcttttgttttggatggtgtggtggtccagaaaacactctgtctgctaaattaccagaaacatccgcagttgtatattgcggcaaaatcccaagtgtatattaaagtcctccaaaaactgccgctgctttcgaccacaaccaaccacctgaatgtatcttttctttacatggtcaatatcaagtcctctttcctctgcaatgcacgatccatttttcacaatcctaaattctcgatggaggaaataaaaatcatgtgagctctagcagcttgctgagctggatatggtggccgcaacccgccttggcgatggacctcgccgccttctccgcgatggcggcgcgcacctgcgccatcgacggccgcagcccgggctgcgccgccacgcactccacggcgagcctggccacgccggcggcctcctcctcgtcgtgcccgccgtccccgagcctgccgtcgacgagccccgccaccccgcgcgccctgacgcgtggcaggatccgcgccgtcaggttctcggcctcggacgccgccggcaggcccgtgacggcctccagcagcagcacgccgaagccgtacacgtcggacctgctggacacgatgcccgtgcgcaggaagaaagggtcggcgtagcccggcgacgccacggcggcgcgcgccggcgccacggccgccgagaagccctcgcaggcggagcccaggtcgcagagccgcacgccgccgtcggagaggagcacgttggacgccgacacgtcgccgtgcaccacggaggccccgccgccgccgccgccgtgcaggtgctccagcgcgcacgccacgtcgtggaggacgcgcatgcgctgcgcccacggcagcggggccgccgccgtgccgtggagcgcgtccgccagcgtgccgccgccgagtaagttagtatatacacgagcggcagcgcacgcaccgtggtcgtcggagtaggcgaggagcgcgacgatgtgcgggtgtcgg

SEQ ID NO: 46347 - DNA, 2937 bp, Zea Mays
cccggctccctcgcgctcctaccccggcccccaattccaatctcgccgccgccgggttgccgtcctgtgctccgcttcgcaccgccgcaccgctaggaacagcccgtgctggagctgggggaacgaacatctcaacctccgtcacccccataccgtacaagtattcctatggagacgatctcatcttgtcccatctgcaacatacaagttcttacggctgagctggaatggcatgccaatagccactttgatgatgatcaactccaaatggacatggaattagcacatcagatgtcagttgctgaatcaagtacagatgccatgaacgacccaaaacattatagtggatcattcactagtgactctaacgctctaggggctctatcgagtcatagtggatactcgcaccattacagtgagctactggatgaacaaatctcttgcttggtccgagcacaaattcgaagcaaagttcaagaggtggaaggcggtattttgagcttgttgaggagctgcttggagtcagaagcgggttcctcgacaagtatgatatcgtgctatattgaccatcatcagagcctttcatcagaagataagggatggggatgtggatggaggaacattcagatgctgagctctcatctattgaagcaaagaccagaagctagagaagtattatttggtggttctggatttgttcctgacatcccttcactccagaggtggcttgagattgcttgggacaaaaaatttgatacaattggctccagccactttcataacaaaatttatggtgccaagaagtggatagggaccacagagtgcgctgccctcttccgctcctttggtctccgtgcaaggattgtagattttgatagcacagaatcatctgacctccatagtaacaacggaagccgtgcagcgagccaagtacgaggacctatggacaagttcttgataaagaataagcctccaaaatcatcatctgaactttgtcgagaggatgctgaaagtacgagaggccaacaggcccttgttgactgggtttggaactactttgcaagtgagcgctctgacagattagccacacagcgtgtcactgttagcaataaaacaccattgtatttccaacatcaaggtcattcaaggacaatagttgggattcaaaagaaaccggatcgtcgtggatctcaagaacaatacagccttttgattttagatccgggccatatctagaaaggtgtctaagaagcaaaaaaggatggcagcgtctggtgaagagaggcgtccacacgctcaggaagccacagtatcagctgtgttatgtggatcctggaattgctagttcagaagaggtggagcgactgaagactattgatggcacactagtcaggttttaggttcctggtaagtacggaaactaaacctgacttcctttatctaattattgggtttcattccaccgtcttgttgacgccttcatcagttactttgacctaacaagacatgcttggttgactcgtcgagatgctaagtgaagcttgctgcttttcaacaatatttgaaaatctgcgtggtggtattctggagggataggtcaaactgccttgaatagatcttgacatgcccacttgggcacttgtcctaaactgaaatttacaccgcgttttcgtttttttaccaggttgtagtctgcgggatcttgatggtggttgtggcagtcggcaattttgccaacactatgtatacactggtggtactgaagctgaggtttaaagcaaagatgaagagagcaaagggcagacaggatcccccacatcaaaactgacaggcatgatcgttcctggaacacaaggatgcagcagctgctggcaccatctcttctgtaaatcctttgacctgtgtcaacattttttggtgctgccgtgctagtagtaggagtatcttgcaagcttttgttttggatggtgtggtggtccagaaaacactctgtctgctaaattaccagaaacatccgcagttgtatattgcggcaaaatcccaagtgtatattaaagtcctccaaaaactgccgctgctttcgaccacaaccaaccacctgaatgtatcttttctttacatggtcaatatcaagtcctctttcctctgcaatgcacgatccatttttcacaatcctaaattctcgatggaggaaataaaaatcatgtgagctctagcagcttgctgagctggatatggtggccgcaacccgccttggcgatggacctcgccgccttctccgcgatggcggcgcgcacctgcgccatcgacggccgcagcccgggctgcgccgccacgcactccacggcgagcctggccacgccggcggcctcctcctcgtcgtgcccgccgtccccgagcctgccgtcgacgagccccgccaccccgcgcgccctgacgcgtggcaggatccgcgccgtcaggttctcggcctcggacgccgccggcaggcccgtgacggcctccagcagcagcacgccgaagccgtacacgtcggacctgctggacacgatgcccgtgcgcaggaagaaagggtcggcgtagcccggcgacgccacggcggcgcgcgccggcgccacggccgccgagaagccctcgcaggcggagcccaggtcgcagagccgcacgccgccgtcggagaggagcacgttggacgccgacacgtcgccgtgcaccacggaggccccgccgccgccgccgccgtgcaggtgctccagcgcgcacgccacgtcgtggaggacgcgcatgcgctgcgcccacggcagcggggccgccgccgtgccgtggagcgcgtccgccagcgtgccgccgccgagtaagttagtatatacacgagcggcagcgcacgcaccgtggtcgtcggagtaggcgaggagcgcgacgatgtgcgggtgtcgg

SEQ ID NO: 46348 - DNA, 2924 bp, Zea Mays
cccggctccctcgcgctcctaccccggcccccaattccaatctcgccgccgccgggttgccgtcctgtgctccgcttcgcaccgccgcaccgctaggaacagcccgtgctggagctgggggaacgaacatctcaacctccgtcacccccataccgtacaagtattcctatggagacgatctcatcttgtcccatctgcaacatacaagttcttacggctgagctggaatggcatgccaatagccactttgatgatgatcaactccaaatggacatggaattagcacatcagatgtcagttgctgaatcaagtacagatgccatgaacgacccaaaacattatagtggatcattcactagtgactctaacgctctaggggctctatcgagtcatagtggatactcgcaccattacagtgagctactggatgaacaaatctcttgcttggtccgagcacaaattcgaagcaaagttcaagaggtggaaggcggtattttgagcttgttgaggagctgcttggagtcagaagcgggttcctcgacaagtatgatatcgtgctatattgaccatcatcagagcctttcatcagaagataagggatggggatgtggatggaggaacattcagatgctgagctctcatctattgaagcaaagaccagaagctagagaagtattatttggtggttctggatttgttcctgacatcccttcactccagaggtggcttgagattgcttgggacaaaaaatttgatacaattggctccagccactttcataacaaaatttatggtgccaagaagtggatagggaccacagagtgcgctgccctcttccgctcctttggtctccgtgcaaggattgtagattttgatagcacagaatcatctgacctccatagtaacaacggaagccgtgcagcgagccaagtacgaggacctatggacaagttcttgataaagaataagcctccaaaatcatcatctgaactttgtcgagaggatgctgaaagtacgagaggccaacaggcccttgttgactgggtttggaactactttgcaagtgagcgctctgacagattagccacacagcgtgtcactgttagcaataaaacgtcattcaaggacaatagttgggattcaaaagaaaccggatcgtcgtggatctcaagaacaatacagccttttgattttagatccgggccatagaactgcagatctagaaaggtgtctaagaagcaaaaaaggatggcagcgtctggtgaagagaggcgtccacacgctcaggaagccacagtatcagctgtgttatgtggatcctggaattgctagttcagaagaggtggagcgactgaagactattgatggcacactagtcaggttttaggttcctggtaagtacggaaactaaacctgacttcctttatctaattattgggtttcattccaccgtcttgttgacgccttcatcagttactttgacctaacaagacatgcttggttgactcgtcgagatgctaagtgaagcttgctgcttttcaacaatatttgaaaatctgcgtggtggtattctggagggataggtcaaactgccttgaatagatcttgacatgcccacttgggcacttgtcctaaactgaaatttacaccgcgttttcgtttttttaccaggttgtagtctgcgggatcttgatggtggttgtggcagtcggcaattttgccaacactatgtatacactggtggtactgaagctgaggtttaaagcaaagatgaagagagcaaagggcagacaggatcccccacatcaaaactgacaggcatgatcgttcctggaacacaaggatgcagcagctgctggcaccatctcttctgtaaatcctttgacctgtgtcaacattttttggtgctgccgtgctagtagtaggagtatcttgcaagcttttgttttggatggtgtggtggtccagaaaacactctgtctgctaaattaccagaaacatccgcagttgtatattgcggcaaaatcccaagtgtatattaaagtcctccaaaaactgccgctgctttcgaccacaaccaaccacctgaatgtatcttttctttacatggtcaatatcaagtcctctttcctctgcaatgcacgatccatttttcacaatcctaaattctcgatggaggaaataaaaatcatgtgagctctagcagcttgctgagctggatatggtggccgcaacccgccttggcgatggacctcgccgccttctccgcgatggcggcgcgcacctgcgccatcgacggccgcagcccgggctgcgccgccacgcactccacggcgagcctggccacgccggcggcctcctcctcgtcgtgcccgccgtccccgagcctgccgtcgacgagccccgccaccccgcgcgccctgacgcgtggcaggatccgcgccgtcaggttctcggcctcggacgccgccggcaggcccgtgacggcctccagcagcagcacgccgaagccgtacacgtcggacctgctggacacgatgcccgtgcgcaggaagaaagggtcggcgtagcccggcgacgccacggcggcgcgcgccggcgccacggccgccgagaagccctcgcaggcggagcccaggtcgcagagccgcacgccgccgtcggagaggagcacgttggacgccgacacgtcgccgtgcaccacggaggccccgccgccgccgccgccgtgcaggtgctccagcgcgcacgccacgtcgtggaggacgcgcatgcgctgcgcccacggcagcggggccgccgccgtgccgtggagcgcgtccgccagcgtgccgccgccgagtaagttagtatatacacgagcggcagcgcacgcaccgtggtcgtcggagtaggcgaggagcgcgacgatgtgcgggtgtcgg

SEQ ID NO: 46349 - DNA, 2747 bp, Zea Mays
tcatctcgtcggccggcccggctccctcgcgctcctaccccggcccccaattccaatctcgccgccgccgggttgccgtcctgtgctccgcttcgcaccgccgcaccgctaggaacagcccgtgctggagctgggggaacgaacatctcaacctccgtcacccccataccgtacaagtattcctatggagacgatctcatcttgtcccatctgcaacatacaagttcttacggctgagctggaatggcatgccaatagccactttgatgatgatcaactccaaatggacatggaattagcacatcagatgtcagttgctgaatcaagtacagatgccatgaacgacccaaaacattatagtggatcattcactagtgactctaacgctctaggggctctatcgagtcatagtggatactcgcaccattacagtgagctactggatgaacaaatctcttgcttggtccgagcacaaattcgaagcaaagttcaagaggtggaaggcggtattttgagcttgttgaggagctgcttggagtcagaagcgggttcctcgacaagtatgatatcgtgctatattgaccatcatcagagcctttcatcagaagataagggatggggatgtggatggaggaacattcagatgctgagctctcatctattgaagcaaagaccagaagctagagaagtattatttggtggttctggatttgttcctgacatcccttcactccagaggtggcttgagattgcttgggacaaaaaatttgatacaattggctccagccactttcataacaaaatttatggtgccaagaagtggatagggaccacagagtgcgctgccctcttccgctcctttggtctccgtgcaaggattgtagattttgatagcacagaatcatctgacctccatagtaacaacggaagccgtgcagcgagccaagtacgaggacctatggacaagttcttgataaagaataagcctccaaaatcatcatctgaactttgtcgagaggatgctgaaagtacgagaggccaacaggcccttgttgactgggtttggaactactttgcaagtgagcgctctgacagattagccacacagcgtgtcactgttagcaataaaacaccattgtatttccaacatcaaggtcattcaaggacaatagttgggattcaaaagaaaccggatcgtcgtggatctcaagaacaatacagccttttgattttagatccgggccatagaactgcagatctagaaaggtgtctaagaagcaaaaaaggatggcagcgtctggtgaagagaggcgtccacacgctcaggaagccacagtatcagctgtgttatgtggatcctggaattgctagttcagaagaggtggagcgactgaagactattgatggcacactagtcaggttttaggttcctgtgaagcttgctgcttttcaacaatatttgaaaatctgcgtggtggtattctggagggataggttgtagtctgcgggatcttgatggtggttgtggcagtcggcaattttgccaacactatgtatacactggtggtactgaagctgaggtttaaagcaaagatgaagagagcaaagggcagacaggatcccccacatcaaaactgacaggcatgatcgttcctggaacacaaggatgcagcagctgctggcaccatctcttctgtaaatcctttgacctgtgtcaacattttttggtgctgccgtgctagtagtaggagtatcttgcaagcttttgttttggatggtgtggtggtccagaaaacactctgtctgctaaattaccagaaacatccgcagttgtatattgcggcaaaatcccaagtgtatattaaagtcctccaaaaactgccgctgctttcgaccacaaccaaccacctgaatgtatcttttctttacatggtcaatatcaagtcctctttcctctgcaatgcacgatccatttttcacaatcctaaattctcgatggaggaaataaaaatcatgtgagctctagcagcttgctgagctggatatggtggccgcaacccgccttggcgatggacctcgccgccttctccgcgatggcggcgcgcacctgcgccatcgacggccgcagcccgggctgcgccgccacgcactccacggcgagcctggccacgccggcggcctcctcctcgtcgtgcccgccgtccccgagcctgccgtcgacgagccccgccaccccgcgcgccctgacgcgtggcaggatccgcgccgtcaggttctcggcctcggacgccgccggcaggcccgtgacggcctccagcagcagcacgccgaagccgtacacgtcggacctgctggacacgatgcccgtgcgcaggaagaaagggtcggcgtagcccggcgacgccacggcggcgcgcgccggcgccacggccgccgagaagccctcgcaggcggagcccaggtcgcagagccgcacgccgccgtcggagaggagcacgttggacgccgacacgtcgccgtgcaccacggaggccccgccgccgccgccgccgtgcaggtgctccagcgcgcacgccacgtcgtggaggacgcgcatgcgctgcgcccacggcagcggggccgccgccgtgccgtggagcgcgtccgccagcgtgccgccgccgagtaagttagtatatacacgagcggcagcgcacgcaccgtggtcgtcggagtaggcgaggagcgcgacgatgtgcgggtgtcgg

SEQ ID NO: 46350 - DNA, 2703 bp, Zea Mays
caacaaccccgttgctctcatctcgtcggccggcccggctccctcgcgctcctaccccggcccccaattccaatctcgccgccgccgggttgccgtcctgtgctccgcttcgcaccgccgcaccgctaggaacagcccgtgctggagctgggggaacgaacatctcaacctccgtcacccccataccgtacaagtattcctatggagacgatctcatcttgtcccatctgcaacatacaagttcttacggctgagctggaatggcatgccaatagccactttgatgatgatcaactccaaatggacatggaattagcacatcagatgtcagttgctgaatcaagtacagatgccatgaacgacccaaaacattatagtggatcattcactagtgactctaacgctctaggggctctatcgagtcatagtggatactcgcaccattacagtgagctactggatgaacaaatctcttgcttggtccgagcacaaattcgaagcaaagttcaagaggtggaaggcggtattttgagcttgttgaggagctgcttggagtcagaagcgggttcctcgacaagtatgatatcgtgctatattgaccatcatcagagcctttcatcagaagataagggatggggatgtggatggaggaacattcagatgctgagctctcatctattgaagcaaagaccagaagctagagaagtattatttggtggttctggatttgttcctgacatcccttcactccagaggtggcttgagattgcttgggacaaaaaatttgatacaattggctccagccactttcataacaaaatttatggtgccaagaagtggatagggaccacagagtgcgctgccctcttccgctcctttggtctccgtgcaaggattgtagattttgatagcacagaatcatctgacctccatagtaacaacggaagccgtgcagcgagccaagtacgaggacctatggacaagttcttgataaagaataagcctccaaaatcatcatctgaactttgtcgagaggatgctgaaagtacgagaggccaacaggcccttgttgactgggtttggaactactttgcaagtgagcgctctgacagattagccacacagcgtgtcactgttagcaataaaacaccattgtatttccaacatcaaggtcattcaaggacaatagttgggattcaaaagaaaccggatcgtcgtggatctcaagaacaatacagccttttgattttagatccgggccatagaactgcagatctagaaaggtgtctaagaagcaaaaaaggatggcagcgtctggtgaagagaggcgtccacacgctcaggaagccacagtatcagctgtgttatgtggatcctggaattgctagttcagaagaggtggagcgactgaagactattgatggcacactagtcaggttttaggttcctggttgtagtctgcgggatcttgatggtggttgtggcagtcggcaattttgccaacactatgtatacactggtggtactgaagctgaggtttaaagcaaagatgaagagagcaaagggcagacaggatcccccacatcaaaactgacaggcatgatcgttcctggaacacaaggatgcagcagctgctggcaccatctcttctgtaaatcctttgacctgtgtcaacattttttggtgctgccgtgctagtagtaggagtatcttgcaagcttttgttttggatggtgtggtggtccagaaaacactctgtctgctaaattaccagaaacatccgcagttgtatattgcggcaaaatcccaagtgtatattaaagtcctccaaaaactgccgctgctttcgaccacaaccaaccacctgaatgtatcttttctttacatggtcaatatcaagtcctctttcctctgcaatgcacgatccatttttcacaatcctaaattctcgatggaggaaataaaaatcatgtgagctctagcagcttgctgagctggatatggtggccgcaacccgccttggcgatggacctcgccgccttctccgcgatggcggcgcgcacctgcgccatcgacggccgcagcccgggctgcgccgccacgcactccacggcgagcctggccacgccggcggcctcctcctcgtcgtgcccgccgtccccgagcctgccgtcgacgagccccgccaccccgcgcgccctgacgcgtggcaggatccgcgccgtcaggttctcggcctcggacgccgccggcaggcccgtgacggcctccagcagcagcacgccgaagccgtacacgtcggacctgctggacacgatgcccgtgcgcaggaagaaagggtcggcgtagcccggcgacgccacggcggcgcgcgccggcgccacggccgccgagaagccctcgcaggcggagcccaggtcgcagagccgcacgccgccgtcggagaggagcacgttggacgccgacacgtcgccgtgcaccacggaggccccgccgccgccgccgccgtgcaggtgctccagcgcgcacgccacgtcgtggaggacgcgcatgcgctgcgcccacggcagcggggccgccgccgtgccgtggagcgcgtccgccagcgtgccgccgccgagtaagttagtatatacacgagcggcagcgcacgcaccgtggtcgtcggagtaggcgaggagcgcgacgatgtgcgggtgtcgg

SEQ ID NO: 46351 - DNA, 2816 bp, Zea Mays
catcaacaaccccgttgctctcatctcgtcggccggcccggctccctcgcgctcctaccccggcccccaattccaatctcgccgccgccgggttgccgtcctgtgctccgcttcgcaccgccgcaccgctaggaacagcccgtgctggagctgggggaacgaacatctcaacctccgtcacccccataccgtacaagtattcctatggagacgatctcatcttgtcccatctgcaacatacaagttcttacggctgagctggaatggcatgccaatagccactttgatgatgatcaactccaaatggacatggaattagcacatcagatgtcagttgctgaatcaagtacagatgccatgaacgacccaaaacattatagtggatcattcactagtgactctaacgctctaggggctctatcgagtcatagtggatactcgcaccattacagtgagctactggatgaacaaatctcttgcttggtccgagcacaaattcgaagcaaagttcaagaggtggaaggcggtattttgagcttgttgaggagctgcttggagtcagaagcgggttcctcgacaagtatgatatcgtgctatattgaccatcatcagagcctttcatcagaagataagggatggggatgtggatggaggaacattcagatgctgagctctcatctattgaagcaaagaccagaagctagagaagtattatttggtggttctggatttgttcctgacatcccttcactccagaggtggcttgagattgcttgggacaaaaaatttgatacaattggctccagccactttcataacaaaatttatggtgccaagaagtggatagggaccacagagtgcgctgccctcttccgctcctttggtctccgtgcaaggattgtagattttgatagcacagaatcatctgacctccatagtaacaacggaagccgtgcagcgagccaagtacgaggacctatggacaagttcttgataaagaataagcctccaaaatcatcatctgaactttgtcgagaggatgctgaaagtacgagaggccaacaggcccttgttgactgggtttggaactactttgcaagtgagcgctctgacagattagccacacagcgtgtcactgttagcaataaaacaccattgtatttccaacatcaaggtcattcaaggacaatagttgggattcaaaagaaaccggatcgtcgtggatctcaagaacaatacagccttttgattttagatccgggccatagaactgcagatctagaaaggtgtctaagaagcaaaaaaggatggcagcgtctggtgaagagaggcgtccacacgctcaggaagccacagtatcagctgtgttatgtggatcctggaattgctagttcagaagaggtggagcgactgaagactattgatggcacactagtcaggttttaggttcctgttactttgacctaacaagacatgcttggttgactcgtcgagatgctaagtgaagcttgctgcttttcaacaatatttgaaaatctgcgtggtggtattctggagggataggttgtagtctgcgggatcttgatggtggttgtggcagtcggcaattttgccaacactatgtatacactggtggtactgaagctgaggtttaaagcaaagatgaagagagcaaagggcagacaggatcccccacatcaaaactgacaggcatgatcgttcctggaacacaaggatgcagcagctgctggcaccatctcttctgtaaatcctttgacctgtgtcaacattttttggtgctgccgtgctagtagtaggagtatcttgcaagcttttgttttggatggtgtggtggtccagaaaacactctgtctgctaaattaccagaaacatccgcagttgtatattgcggcaaaatcccaagtgtatattaaagtcctccaaaaactgccgctgctttcgaccacaaccaaccacctgaatgtatcttttctttacatggtcaatatcaagtcctctttcctctgcaatgcacgatccatttttcacaatcctaaattctcgatggaggaaataaaaatcatgtgagctctagcagcttgctgagctggatatggtggccgcaacccgccttggcgatggacctcgccgccttctccgcgatggcggcgcgcacctgcgccatcgacggccgcagcccgggctgcgccgccacgcactccacggcgagcctggccacgccggcggcctcctcctcgtcgtgcccgccgtccccgagcctgccgtcgacgagccccgccaccccgcgcgccctgacgcgtggcaggatccgcgccgtcaggttctcggcctcggacgccgccggcaggcccgtgacggcctccagcagcagcacgccgaagccgtacacgtcggacctgctggacacgatgcccgtgcgcaggaagaaagggtcggcgtagcccggcgacgccacggcggcgcgcgccggcgccacggccgccgagaagccctcgcaggcggagcccaggtcgcagagccgcacgccgccgtcggagaggagcacgttggacgccgacacgtcgccgtgcaccacggaggccccgccgccgccgccgccgtgcaggtgctccagcgcgcacgccacgtcgtggaggacgcgcatgcgctgcgcccacggcagcggggccgccgccgtgccgtggagcgcgtccgccagcgtgccgccgccgagtaagttagtatatacacgagcggcagcgcacgcaccgtggtcgtcggagtaggcgaggagcgcgacgatgtgcgggtgtcgg

SEQ ID NO: 46352 - DNA, 2743 bp, Zea Mays
ctcatcaacaaccccgttgctctcatctcgtcggccggcccggctccctcgcgctcctaccccggcccccaattccaatctcgccgccgccgggttgccgtcctgtgctccgcttcgcaccgccgcaccgctaggaacagcccgtgctggagctgggggaacgaacatctcaacctccgtcacccccataccgtacaagtattcctatggagacgatctcatcttgtcccatctgcaacatacaagttcttacggctgagctggaatggcatgccaatagccactttgatgatgatcaactccaaatggacatggaattagcacatcagatgtcagttgctgaatcaagtacagatgccatgaacgacccaaaacattatagtggatcattcactagtgactctaacgctctaggggctctatcgagtcatagtggatactcgcaccattacagtgagctactggatgaacaaatctcttgcttggtccgagcacaaattcgaagcaaagttcaagaggtggaaggcggtattttgagcttgttgaggagctgcttggagtcagaagcgggttcctcgacaagtatgatatcgtgctatattgaccatcatcagagcctttcatcagaagataagggatggggatgtggatggaggaacattcagatgctgagctctcatctattgaagcaaagaccagaagctagagaagtattatttggtggttctggatttgttcctgacatcccttcactccagaggtggcttgagattgcttgggacaaaaaatttgatacaattggctccagccactttcataacaaaatttatggtgccaagaagtggatagggaccacagagtgcgctgccctcttccgctcctttggtctccgtgcaaggattgtagattttgatagcacagaatcatctgacctccatagtaacaacggaagccgtgcagcgagccaagtacgaggacctatggacaagttcttgataaagaataagcctccaaaatcatcatctgaactttgtcgagaggatgctgaaagtacgagaggccaacaggcccttgttgactgggtttggaactactttgcaagtgagcgctctgacagattagccacacagcgtgtcactgttagcaataaaacaccattgtatttccaacatcaaggtcattcaaggacaatagttgggattcaaaagaaaccggatcgtcgtggatctcaagaacaatacagccttttgattttagatccgggccattacggccatccaaatgtttccccttaatgccgcagagaactgcagatctagaaaggtgtctaagaagcaaaaaaggatggcagcgtctggtgaagagaggcgtccacacgctcaggaagccacagtatcagctgtgttatgtggatcctggaattgctagttcagaagaggtggagcgactgaagactattgatggcacactagtcaggttttaggttcctggttgtagtctgcgggatcttgatggtggttgtggcagtcggcaattttgccaacactatgtatacactggtggtactgaagctgaggtttaaagcaaagatgaagagagcaaagggcagacaggatcccccacatcaaaactgacaggcatgatcgttcctggaacacaaggatgcagcagctgctggcaccatctcttctgtaaatcctttgacctgtgtcaacattttttggtgctgccgtgctagtagtaggagtatcttgcaagcttttgttttggatggtgtggtggtccagaaaacactctgtctgctaaattaccagaaacatccgcagttgtatattgcggcaaaatcccaagtgtatattaaagtcctccaaaaactgccgctgctttcgaccacaaccaaccacctgaatgtatcttttctttacatggtcaatatcaagtcctctttcctctgcaatgcacgatccatttttcacaatcctaaattctcgatggaggaaataaaaatcatgtgagctctagcagcttgctgagctggatatggtggccgcaacccgccttggcgatggacctcgccgccttctccgcgatggcggcgcgcacctgcgccatcgacggccgcagcccgggctgcgccgccacgcactccacggcgagcctggccacgccggcggcctcctcctcgtcgtgcccgccgtccccgagcctgccgtcgacgagccccgccaccccgcgcgccctgacgcgtggcaggatccgcgccgtcaggttctcggcctcggacgccgccggcaggcccgtgacggcctccagcagcagcacgccgaagccgtacacgtcggacctgctggacacgatgcccgtgcgcaggaagaaagggtcggcgtagcccggcgacgccacggcggcgcgcgccggcgccacggccgccgagaagccctcgcaggcggagcccaggtcgcagagccgcacgccgccgtcggagaggagcacgttggacgccgacacgtcgccgtgcaccacggaggccccgccgccgccgccgccgtgcaggtgctccagcgcgcacgccacgtcgtggaggacgcgcatgcgctgcgcccacggcagcggggccgccgccgtgccgtggagcgcgtccgccagcgtgccgccgccgagtaagttagtatatacacgagcggcagcgcacgcaccgtggtcgtcggagtaggcgaggagcgcgacgatgtgcgggtgtcgg

SEQ ID NO: 46353 - DNA, 5521 bp, Zea Mays
agaccacgggtggcgcgatgcgacgtcggctgtcgtgctcgtgaccgcagccgcgccttcccgcctccacctcctcctgcgattccgatccgccgccctgtccggccggccggtaagccccgcctccgccctgttccctcggcacccatttttcatttcaactgagaggcggaggaaccaacccaggcacccaaccaaccctagatccaccgcttctgccacacgagagggagagatagacctctccgatctaattccgcatggcctcctcctcctccttcgcccccgacgaccagaccgacgccgacttcttcgacaagctcgtcgacgacgacgaccccgccaccagcctccccgacgacccacccatcccagagccgcaggcgcctcccgagggttcaggcaagggcggcgccggcgtccacactgcggtcaagcaggtgcagtgggcttccttcggaggtggcgcggacgacggtcctgacccatttgctcatctctcgggaggcgccggcgacgacgacggcttcctcgtgaccacggccgggacccagacggcctcggatcacgccttctttggcgggacccagagcttggccgccgaggtgacggaccaggacttcttcgccgggagcaactcctccaatcagcataatgtcagtggtcagcacgaccagggcggcggcagcactgcagtggattcagcagatcccatgtctttggaggccatgtaccctgggtggaagtatgatgaggcctcccagcaatggtaccagcttgacgacagtgtaaattcaactgggaatgcagctcaggtgctggacaacagcactcggtatgcacagcagcagcagcagctccacgcctcttatctgcacaattcagtgcattcagggcttgagacaattgctgaggagggcactaccgcaaccggtgctgtctcaagttggggccaaggggctgcctcagagtacccacccaacatgctcttctatgcagagtaccctggttggtacttcgacaccaacacccagcagtggcactccctcgagttataccagcaggccgccatgcaggctggaacagctagcatgggccagactgttattgcaaacgacggtgttgctgcaacttcctctctgacaggctataatgccgcacaaaatgaggaccttgctgcccatgatcaggtcacccaacacaactcattctcgaatagtttcgctcatcagaaccaatggcagattaccgatgcatttggtaacaatgtacgatctgaatgtgctacagagaacagcctggctagtagttcctatggttttcaacaacacaggaatgctgattctaccagttcatctacgaaccaacgggctggttttaatgcagctgaaactgttactgatcactatggtggacgcaagggcgttgaatcgccaagtattcagagcggttatagcacttctgacattcaacaatccagtcacaaggcattcgaaccttacacgggttatcaggaccattacaaagcatttgaacctgccacaggtcaccatgccagtaacaacatgttcaaacagtccacaggtaaccagggaggttacaaggcgtttgaacctgccatggataaccagagtggctacaaggcatatgaaccttctatgggtcaccatagtgcttcctgggaacccgtgccttccacgggtcaccagactgatttcaaggggtccggagcttcaactgttcatcaggccggatacaaagaatttgaaacttctacaggttacaatacaagtttaaaggcatttgaaccttcttcatctcaacatgctggttacatgggttcccaatctaactacatgggatttgacacttctacaaaccaccatggttatggcgatgcaaatgttgttgcgagcactcaaggctttgtcccaatgcaaaccacataccagggacagacacaagcaattgcaaactcacaagtgcacctgtcaaatagctatttgggtattgacaactccatgaactttaatcagcagcaatttctgggtgcaaatgcctcaaacttgcaattcagtcactccccacatgatggtagagctggacgaccaccacatgctctcgtttcttttgggtttggagggaagctcatagttatgaaagaagctagctccatgcccgcaagctttaacaatggaattcagggtaactctagtggcacagtttcagttcttaatctgtcagaggtggtcatggataaaattgattcttcaagcatcactaatggtagtgcacttagttatttccatgctctgtgccgccaaccagttcctggtcctctggttggtggaagtgctgcatcaaaggatgtaaataagtggattgatgaaatgattgcatggtacgattcttctagtgaactccagagaagtgatactcgcaagttgcttatttcattgctgaagatactgtctcagcactatggaaaactccgttcaccttttgcgtctgacccatcacaagaggagacagatggtccagaaatggcagtaactaagctattttcatcgtttaaaagtactgttaatatgggagattatggatccattgtttcttgcatgaaaaatattccttcagaaagtcagatgcaggctgttgcacaggaggtccaaaatcttctagtttctgggagaagaaaagaggcccttcagtgtgcccagggaggtcaactttggggacctgcaatcatactggcattgcagctcggtgatatgttttatgtggatacagtgaagaaaatggctcacttccattttgtatcggggtcccctctgcgaacgctatgccttctgattgctggacaacctgcagatgtttttaatgtagataacaatgtcaacattgactatgcctggtcctaatggtatgttggatgattgggaggagaatttagctattattactgcaaacagaacgaaaggtgacgatctagtaatcacccatcttggtgactgtctctggaaagaaaaaaatgagattgcagctgctcattcgtgctatttagttgccgaactaaatattgattcatactcggaaagcgcaaggttgtgcctcattggtgcagatcacttgaagtgtcctcgaacatttgccagccctgaagccattcagaggacagaggtttatgaatacgcgaaggtgcttggtaattctcagtatatcctactaccctttcagccatataagctgatatatgcatacatgcttgttgaagtggggaaggtttctgattctttgaggtattgccaagcgtctatgaaggtattgaaagcctctggccgtgcccctgaattggaggtgtggaagcaattaatttcttcactggaggagaggatacgcactcaccagcagggtggatatggcacaaatcttgccccagcaaaactagttgggaagatttttacctcgcttgataaatctatatcccgcatgatgggtacaccatctgcaccacttccaccattgccacatggatctgttagcgatagagagagccactctatgcctgaagcagcaaaatttataaatagccaatcagtaatggccatgtcatcgctaatgccatctgcttcaatgcagtcaatgactgagatagcagagaatagtgatggcactggcaggaaaatggcacacaacagaagtgtttctgagccagacttcggtagaacatcaaaacagggtggtggatcagatggcacacagagcagtgcagcaggatctggcagttctcgatttggttggctagtgcagaagactatgggattagtgtcaaaatctcaccgccaggcaaaattaggggatcagaacaaattttactatgatgaaaagttgaagcggtgggtggaagaaggtgctgtggttcctgccgaggagcctcctcttcctccccctccaacaaaatcatctttccagaatggtatgccagaccataagttgaatggccacatgagcgtaggccatgctcccagtggagtcacagaatggaaatcctcaaattattcagagcaaggtctgggtatgccgccaattccacctagccaaaaccagttttcttctcgtgggcggatgggtgtccgatccagatatgttgacacattcaataaatcaggtgcatctggagcggtgccatcatataacaaaccagctgctccatccgtgacaccaccagctggtgccaagttcttcataccgactgcagcacctgttgctgcagatcagatgatgccacaccaagcagcagagatacacagtgaaaccatgcaacaggatgagagggcagcctcaccgcctgctggaacatcattctcttcaaccccaccacccacacaattttcatcgcccccaccacacacgcaattctcgtcaccaatgcaatcaacaatccatcggcaatctagtatggcgaacatctccaccccttaccagagttccggggtatcatcattaagcagcgacacctcattctcaaaatcacgagctgcatcctggagtggaacatactctgagcagttcagtgcttttgcgggcacaagatcacccgatggacagacggtgcgctcaccactcatgcctggcaaaccatcacacagtcgttccaacagcaactcatcagtgcagctcaatggattgacagaggatcttcatgaggtcgagctctaattggcggctgctcagcatgactgtcgtcttttatccaccacaaaaggcagccataacaacccctgataaaccccttcccaagcgggtgacagaaaaaaaaggtgcccacgaaatgctgatcacgggggacgctgcagttggaatgggcatgtgggacttttgcacgagattctggggtgcgctctaaaccaccaaggtatgtcagacatgtactaacagaaatagaaatgcggggggttttggacattttgtagctatatatatatatatgtgtgtgtgttttgttttatgttttagagagaagggaaagagttgggctggcctcgtttacaggtgagaaaaatggagcaggagccgcatgcagatgcccttgtacagataatctgcgcctacccagttttttttttttttaaaaaaaaaacgcgaacaagttcacacccgcactccattttgatgttcgtttctgggcgaaggatagaagagaaggtgcgttctagtgtgacaagtatggctctgtagagtactgttgttttggtgtactgcactagccgcagtatattgtctctgttttattctttgggtacgaatcgattctttcatcttgaaacaattgtgttacgccttgttgtgtattcttgtgccctggccgatgtggcggatgcaattgtacgtgttcttcaggtcttggttgtgctgtcgctatatccttgagcacacgtgtgtgctgagctgttttgttgacaatgcgcatcgtaatactggatctttttttaataaactacacgatttgcagttagttgtt

SEQ ID NO: 46354 - DNA, 5389 bp, Zea Mays
agaccacgggtggcgcgatgcgacgtcggctgtcgtgctcgtgaccgcagccgcgccttcccgcctccacctcctcctgcgattccgatccgccgccctgtccggccggccggtaagccccgcctccgccctgttccctcggcacccatttttcatttcaactgagaggcggaggaaccaacccaggcacccaaccaaccctagatccaccgcttctgccacacgagagggagagatagacctctccgatctaattccgcatggcctcctcctcctccttcgcccccgacgaccagaccgacgccgacttcttcgacaagctcgtcgacgacgacgaccccgccaccagcctccccgacgacccacccatcccagagccgcaggcgcctcccgagggttcaggcaagggcggcgccggcgtccacactgcggtcaagcaggtgcagtgggcttccttcggaggtggcgcggacgacggtcctgacccatttgctcatctctcgggaggcgccggcgacgacgacggcttcctcgtgaccacggccgggacccagacggcctcggatcacgccttctttggcgggacccagagcttggccgccgaggtgacggaccaggacttcttcgccgggagcaactcctccaatcagcataatgtcagtggtcagcacgaccagggcggcggcagcactgcagtggattcagcagatcccatgtctttggaggccatgtaccctgggtggaagtatgatgaggcctcccagcaatggtaccagcttgacgacagtgtaaattcaactgggaatgcagctcaggtgctggacaacagcactcggtatgcacagcagcagcagcagctccacgcctcttatctgcacaattcagtgcattcagggcttgagacaattgctgaggagggcactaccgcaaccggtgctgtctcaagttggggccaaggggctgcctcagagtacccacccaacatgctcttctatgcagagtaccctggttggtacttcgacaccaacacccagcagtggcactccctcgagttataccagcaggccgccatgcaggctggaacagctagcatgggccagactgttattgcaaacgacggtgttgctgcaacttcctctctgacaggctataatgccgcacaaaatgaggaccttgctgcccatgatcaggtcacccaacacaactcattctcgaatagtttcgctcatcagaaccaatggcagattaccgatgcatttggtaacaatgtacgatctgaatgtgctacagagaacagcctggctagtagttcctatggttttcaacaacacaggaatgctgattctaccagttcatctacgaaccaacgggctggttttaatgcagctgaaactgttactgatcactatggtggacgcaagggcgttgaatcgccaagtattcagagcggttatagcacttctgacattcaacaatccagtcacaaggcattcgaaccttacacgggttatcaggaccattacaaagcatttgaacctgccacaggtcaccatgccagtaacaacatgttcaaacagtccacaggtaaccagggaggttacaaggcgtttgaacctgccatggataaccagagtggctacaaggcatatgaaccttctatgggtcaccatagtgcttcctgggaacccgtgccttccacgggtcaccagactgatttcaaggggtccggagcttcaactgttcatcaggccggatacaaagaatttgaaacttctacaggttacaatacaagtttaaaggcatttgaaccttcttcatctcaacatgctggttacatgggttcccaatctaactacatgggatttgacacttctacaaaccaccatggttatggcgatgcaaatgttgttgcgagcactcaaggctttgtcccaatgcaaaccacataccagggacagacacaagcaattgcaaactcacaagtgcacctgtcaaatagctatttgggtattgacaactccatgaactttaatcagcagcaatttctgggtgcaaatgcctcaaacttgcaattcagtcactccccacatgatggtagagctggacgaccaccacatgctctcgtttcttttgggtttggagggaagctcatagttatgaaagaagctagctccatgcccgcaagctttaacaatggaattcagggtaactctagtggcacagtttcagttcttaatctgtcagaggtggtcatggataaaattgattcttcaagcatcactaatggtagtgcacttagttatttccatgctctgtgccgccaaccagttcctggtcctctggttggtggaagtgctgcatcaaaggatgtaaataagtggattgatgaaatgattgcatggtacgattcttctagtgaactccagagaagtgatactcgcaagttgcttatttcattgctgaagatactgtctcagcactatggaaaactccgttcaccttttgcgtctgacccatcacaagaggagacagatggtccagaaatggcagtaactaagctattttcatcgtttaaaagtactgttaatatgggagattatggatccattgtttcttgcatgaaaaatattccttcagaaagtcagatgcaggaggtccaaaatcttctagtttctgggagaagaaaagaggcccttcagtgtgcccagggaggtcaactttggggacctgcaatcatactggcattgcagctcggtgatatgttttatgtggatacagtgaagaaaatggctcacttccattttgtatcggggtcccctctgcgaacgctatgccttctgattgctggacaacctgcagatgtttttaatgtagataacaatgtcaacattgactatggtacatcccatcaacctatggagcctggtcctaatggtatgttggatgattgggaggagaatttagctattattactgcaaacagaacgaaaggtgacgatctagtaatcacccatcttggtgactgtctctggaaagaaaaaaatgagattgcagctgctcattcgtgctatttagttgccgaactaaatattgattcatactcggaaagcgcaaggttgtgcctcattggtgcagatcacttgaagtgtcctcgaacatttgccagccctgaagccattcagaggacagaggtttatgaatacgcgaaggtgcttggtaattctcagtatatcctactaccctttcagccatataagctgatatatgcatacatgcttgttgaagtggggaaggtttctgattctttgaggtattgccaagcgtctatgaaggtattgaaagcctctggccgtgcccctgaattggaggtgtggaagcaattaatttcttcactggaggagaggatacgcactcaccagcagggtggatatggcacaaatcttgccccagcaaaactagttgggaagatttttacctcgcttgataaatctatatcccgcatgatggtcaatgactgagatagcagagaatagtgatggcactggcaggaaaatggcacacaacagaagtgtttctgagccagacttcggtagaacatcaaaacagggtggtggatcagatggcacacagagcagtgcagcaggatctggcagttctcgatttggttggctagtgcagaagactatgggattagtgtcaaaatctcaccgccaggcaaaattaggggatcagaacaaattttactatgatgaaaagttgaagcggtgggtggaagaaggtgctgtggttcctgccgaggagcctcctcttcctccccctccaacaaaatcatctttccagaatggtatgccagaccataagttgaatggccacatgagcgtaggccatgctcccagtggagtcacagaatggaaatcctcaaattattcagagcaaggtctgggtatgccgccaattccacctagccaaaaccagttttcttctcgtgggcggatgggtgtccgatccagatatgttgacacattcaataaatcaggtgcatctggagcggtgccatcatataacaaaccagctgctccatccgtgacaccaccagctggtgccaagttcttcataccgactgcagcacctgttgctgcagatcagatgatgccacaccaagcagcagagatacacagtgaaaccatgcaacaggatgagagggcagcctcaccgcctgctggaacatcattctcttcaaccccaccacccacacaattttcatcgcccccaccacacacgcaattctcgtcaccaatgcaatcaacaatccatcggcaatctagtatggcgaacatctccaccccttaccagagttccggggtatcatcattaagcagcgacacctcattctcaaaatcacgagctgcatcctggagtggaacatactctgagcagttcagtgcttttgcgggcacaagatcacccgatggacagacggtgcgctcaccactcatgcctggcaaaccatcacacagtcgttccaacagcaactcatcagtgcagctcaatggattgacagaggatcttcatgaggtcgagctctaattggcggctgctcagcatgactgtcgtcttttatccaccacaaaaggcagccataacaacccctgataaaccccttcccaagcgggtgacagaaaaaaaaggtgcccacgaaatgctgatcacgggggacgctgcagttggaatgggcatgtgggacttttgcacgagattctggggtgcgctctaaaccaccaaggtatgtcagacatgtactaacagaaatagaaatgcggggggttttggacattttgtagctatatatatatatatgtgtgtgtgttttgttttatgttttagagagaagggaaagagttgggctggcctcgtttacaggtgagaaaaatggagcaggagccgcatgcagatgcccttgtacagataatctgcgcctacccagttttttttttttttaaaaaaaaaacgcgaacaagttcacacccgcactccattttgatgttcgtttctgggcgaaggatagaagagaaggtgcgttctagtgtgacaagtatggctctgtagagtactgttgttttggtgtactgcactagccgcagtatattgtctctgttttattctttgggtacgaatcgattctttcatcttgaaacaattgtgttacgccttgttgtgtattcttgtgccctggccgatgtggcggatgcaattgtacgtgttcttcaggtcttggttgtgctgtcgctatatccttgagcacacgtgtgtgctgagctgttttgttgacaatgcgcatcgtaatactggatctttttttaataaactacacgatttgcagttagttgtt

SEQ ID NO: 46355 - DNA, 5528 bp, Zea Mays
agaccacgggtggcgcgatgcgacgtcggctgtcgtgctcgtgaccgcagccgcgccttcccgcctccacctcctcctgcgattccgatccgccgccctgtccggccggccggtaagccccgcctccgccctgttccctcggcacccatttttcatttcaactgagaggcggaggaaccaacccaggcacccaaccaaccctagatccaccgcttctgccacacgagagggagagatagacctctccgatctaattccgcatggcctcctcctcctccttcgcccccgacgaccagaccgacgccgacttcttcgacaagctcgtcgacgacgacgaccccgccaccagcctccccgacgacccacccatcccagagccgcaggcgcctcccgagggttcaggcaagggcggcgccggcgtccacactgcggtcaagcaggtgcagtgggcttccttcggaggtggcgcggacgacggtcctgacccatttgctcatctctcgggaggcgccggcgacgacgacggcttcctcgtgaccacggccgggacccagacggcctcggatcacgccttctttggcgggacccagagcttggccgccgaggtgacggaccaggacttcttcgccgggagcaactcctccaatcagcataatgtcagtggtcagcacgaccagggcggcggcagcactgcagtggattcagcagatcccatgtctttggaggccatgtaccctgggtggaagtatgatgaggcctcccagcaatggtaccagcttgacgacagtgtaaattcaactgggaatgcagctcaggtgctggacaacagcactcggtatgcacagcagcagcagcagctccacgcctcttatctgcacaattcagtgcattcagggcttgagacaattgctgaggagggcactaccgcaaccggtgctgtctcaagttggggccaaggggctgcctcagagtacccacccaacatgctcttctatgcagagtaccctggttggtacttcgacaccaacacccagcagtggcactccctcgagttataccagcaggccgccatgcaggctggaacagctagcatgggccagactgttattgcaaacgacggtgttgctgcaacttcctctctgacaggctataatgccgcacaaaatgaggaccttgctgcccatgatcaggtcacccaacacaactcattctcgaatagtttcgctcatcagaaccaatggcagattaccgatgcatttggtaacaatgtacgatctgaatgtgctacagagaacagcctggctagtagttcctatggttttcaacaacacaggaatgctgattctaccagttcatctacgaaccaacgggctggttttaatgcagctgaaactgttactgatcactatggtggacgcaagggcgttgaatcgccaagtattcagagcggttatagcacttctgacattcaacaatccagtcacaaggcattcgaaccttacacgggttatcaggaccattacaaagcatttgaacctgccacaggtcaccatgccagtaacaacatgttcaaacagtccacaggtaaccagggaggttacaaggcgtttgaacctgccatggataaccagagtggctacaaggcatatgaaccttctatgggtcaccatagtgcttcctgggaacccgtgccttccacgggtcaccagactgatttcaaggggtccggagcttcaactgttcatcaggccggatacaaagaatttgaaacttctacaggttacaatacaagtttaaaggcatttgaaccttcttcatctcaacatgctggttacatgggttcccaatctaactacatgggatttgacacttctacaaaccaccatggttatggcgatgcaaatgttgttgcgagcactcaaggctttgtcccaatgcaaaccacataccagggacagacacaagcaattgcaaactcacaagtgcacctgtcaaatagctatttgggtattgacaactccatgaactttaatcagcagcaatttctgggtgcaaatgcctcaaacttgcaattcagtcactccccacatgatggtagagctggacgaccaccacatgctctcgtttcttttgggtttggagggaagctcatagttatgaaagaagctagctccatgcccgcaagctttaacaatggaattcagggtaactctagtggcacagtttcagttcttaatctgtcagaggtggtcatggataaaattgattcttcaagcatcactaatggtagtgcacttagttatttccatgctctgtgccgccaaccagttcctggtcctctggttggtggaagtgctgcatcaaaggatgtaaataagtggattgatgaaatgattgcatggtacgattcttctagtgaactccagagaagtgatactcgcaagttgcttatttcattgctgaagatactgtctcagcactatggaaaactccgttcaccttttgcgtctgacccatcacaagaggagacagatggtccagaaatggcagtaactaagctattttcatcgtttaaaagtactgttaatatgggagattatggatccattgtttcttgcatgaaaaatattccttcagaaagtcagatgcaggctgttgcacaggaggtccaaaatcttctagtttctgggagaagaaaagaggcccttcagtgtgcccagggaggtcaactttggggacctgcaatcatactggcattgcagctcggtgatatgtgaagaaaatggctcacttccattttgtatcggggtcccctctgcgaacgctatgccttctgattgctggacaacctgcagatgtttttaatgtagataacaatgtcaacattgactatggtacatcccatcaacctatggagcctggtcctaatggtatgttggatgattgggaggagaatttagctattattactgcaaacagaacgaaaggtgacgatctagtaatcacccatcttggtgactgtctctggaaagaaaaaaatgagattgcagctgctcattcgtgctatttagttgccgaactaaatattgattcatactcggaaagcgcaaggttgtgcctcattggtgcagatcacttgaagtgtcctcgaacatttgccagccctgaagccattcagaggacagaggtttatgaatacgcgaaggtgcttggtaattctcagtatatcctactaccctttcagccatataagctgatatatgcatacatgcttgttgaagtggggaaggtttctgattctttgaggtattgccaagcgtctatgaaggtattgaaagcctctggccgtgcccctgaattggaggtgtggaagcaattaatttcttcactggaggagaggatacgcactcaccagcagggtggatatggcacaaatcttgccccagcaaaactagttgggaagatttttacctcgcttgataaatctatatcccgcatgatgggtacaccatctgcaccacttccaccattgccacatggatctgttagcgatagagagagccactctatgcctgaagcagcaaaatttataaatagccaatcagtaatggccatgtcatcgctaatgccatctgcttcaatgcagtcaatgactgagatagcagagaatagtgatggcactggcaggaaaatggcacacaacagaagtgtttctgagccagacttcggtagaacatcaaaacagggtggtggatcagatggcacacagagcagtgcagcaggatctggcagttctcgatttggttggctagtgcagaagactatgggattagtgtcaaaatctcaccgccaggcaaaattaggggatcagaacaaattttactatgatgaaaagttgaagcggtgggtggaagaaggtgctgtggttcctgccgaggagcctcctcttcctccccctccaacaaaatcatctttccagaatggtatgccagaccataagttgaatggccacatgagcgtaggccatgctcccagtggagtcacagaatggaaatcctcaaattattcagagcaaggtctgggtatgccgccaattccacctagccaaaaccagttttcttctcgtgggcggatgggtgtccgatccagatatgttgacacattcaataaatcaggtgcatctggagcggtgccatcatataacaaaccagctgctccatccgtgacaccaccagctggtgccaagttcttcataccgactgcagcacctgttgctgcagatcagatgatgccacaccaagcagcagagatacacagtgaaaccatgcaacaggatgagagggcagcctcaccgcctgctggaacatcattctcttcaaccccaccacccacacaattttcatcgcccccaccacacacgcaattctcgtcaccaatgcaatcaacaatccatcggcaatctagtatggcgaacatctccaccccttaccagagttccggggtatcatcattaagcagcgacacctcattctcaaaatcacgagctgcatcctggagtggaacatactctgagcagttcagtgcttttgcgggcacaagatcacccgatggacagacggtgcgctcaccactcatgcctggcaaaccatcacacagtcgttccaacagcaactcatcagtgcagctcaatggattgacagaggatcttcatgaggtcgagctctaattggcggctgctcagcatgactgtcgtcttttatccaccacaaaaggcagccataacaacccctgataaaccccttcccaagcgggtgacagaaaaaaaaggtgcccacgaaatgctgatcacgggggacgctgcagttggaatgggcatgtgggacttttgcacgagattctggggtgcgctctaaaccaccaaggtatgtcagacatgtactaacagaaatagaaatgcggggggttttggacattttgtagctatatatatatatatgtgtgtgtgttttgttttatgttttagagagaagggaaagagttgggctggcctcgtttacaggtgagaaaaatggagcaggagccgcatgcagatgcccttgtacagataatctgcgcctacccagttttttttttttttaaaaaaaaaacgcgaacaagttcacacccgcactccattttgatgttcgtttctgggcgaaggatagaagagaaggtgcgttctagtgtgacaagtatggctctgtagagtactgttgttttggtgtactgcactagccgcagtatattgtctctgttttattctttgggtacgaatcgattctttcatcttgaaacaattgtgttacgccttgttgtgtattcttgtgccctggccgatgtggcggatgcaattgtacgtgttcttcaggtcttggttgtgctgtcgctatatccttgagcacacgtgtgtgctgagctgttttgttgacaatgcgcatcgtaatactggatctttttttaataaactacacgatttgcagttagttgtt

SEQ ID NO: 46356 - DNA, 5017 bp, Zea Mays
agaccacgggtggcgcgatgcgacgtcggctgtcgtgctcgtgaccgcagccgcgccttcccgcctccacctcctcctgcgattccgatccgccgccctgtccggccggccggtaagccccgcctccgccctgttccctcggcacccatttttcatttcaactgagaggcggaggaaccaacccaggcacccaaccaaccctagatccaccgcttctgccacacgagagggagagatagacctctccgatctaattccgcatggcctcctcctcctccttcgcccccgacgaccagaccgacgccgacttcttcgacaagctcgtcgacgacgacgaccccgccaccagcctccccgacgacccacccatcccagagccgcaggcgcctcccgagggttcaggcaagggcggcgccggcgtccacactgcggtcaagcaggtgcagtgggcttccttcggaggtggcgcggacgacggtcctgacccatttgctcatctctcgggaggcgccggcgacgacgacggcttcctcgtgaccacggccgggacccagacggcctcggatcacgccttctttggcgggacccagagcttggccgccgaggtgacggaccaggacttcttcgccgggagcaactcctccaatcagcataatgtcagtggtcagcacgaccagggcggcggcagcactgcagtggattcagcagatcccatgtctttggaggccatgtaccctgggtggaagtatgatgaggcctcccagcaatggtaccagcttgacgacagtgtaaattcaactgggaatgcagctcaggtgctggacaacagcactcggtatgcacagcagcagcagcagctccacgcctcttatctgcacaattcagtgcattcagggcttgagacaattgctgaggagggcactaccgcaaccggtgctgtctcaagttggggccaaggggctgcctcagagtacccacccaacatgctcttctatgcagagtaccctggttggtacttcgacaccaacacccagcagtggcactccctcgagttataccagcaggccgccatgcaggctggaacagctagcatgggccagactgttattgcaaacgacggtgttgctgcaacttcctctctgacaggctataatgccgcacaaaatgaggaccttgctgcccatgatcaggtcacccaacacaactcattctcgaatagtttcgctcatcagaaccaatggcagattaccgatgcatttggtaacaatgtacgatctgaatgtgctacagagaacagcctggctagtagttcctatggttttcaacaacacaggaatgctgattctaccagttcatctacgaaccaacgggctggttttaatgcagctgaaactgttactgatcactatggtggacgcaagggcgttgaatcgccaagtattcagagcggttatagcacttctgacattcaacaatccagtcacaaggcattcgaaccttacacgggttatcaggaccattacaaagcatttgaacctgccacaggtcaccatgccagtaacaacatgttcaaacagtccacaggtaaccagggaggttacaaggcgtttgaacctgccatggataaccagagtggctacaaggcatatgaaccttctatgggtcaccatagtgcttcctgggaacccgtgccttccacgggtcaccagactgatttcaaggggtccggagcttcaactgttcatcaggccggatacaaagaatttgaaacttctacaggttacaatacaagtttaaaggcatttgaaccttcttcatctcaacatgctggttacatgggttcccaatctaactacatgggatttgacacttctacaaaccaccatggttatggcgatgcaaatgttgttgcgagcactcaaggctttgtcccaatgcaaaccacataccagggacagacacaagcaattgcaaactcacaagtgcacctgtcaaatagctatttgggtattgacaactccatgaactttaatcagcagcaatttctgggtgcaaatgcctcaaacttgcaattcagtcactccccacatgatggtagagctggacgaccaccacatgctctcgtttcttttgggtttggagggaagctcatagttatgaaagaagctagctccatgcccgcaagctttaacaatggaattcagggtaactctagtggcacagtttcagttcttaatctgtcagaggtggtcatggataaaattgattcttcaagcatcactaatgtgaactccagagaagtgatactcgcaagttgcttatttcattgctgaagatactgtctcagcactatggaaaactccgttcaccttttgcgtctgacccatcacaagaggagacagatggtccagaaatggcagtaactaagctattttcatcgtttaaaagtactgttaatatgggagattatggatccattgtttcttgcatgaaaaatattccttcagaaagtcagatgcaggctgttgcacaggaggtccaaaatcttctagtttctgggagaagaaaagaggcccttcagtgtgcccagggaggtcaactttggggacctgcaatcatactggcattgcagctcggtgatatgttttatgtggatacagtgaagaaaatggctcacttccattttgtatcggggtcccctctgcgaacgctatgccttctgattgctggacaacctgcagatgtttttaatgtagataacaatgtcaacattgactatggtacatcccatcaacctatggagcctggtcctaatggtatgttggatgattgggaggagaatttagctattattactgcaaacagaacgaaaggtgacgatctagtaatcacccatcttggtgactgtctctggaaagaaaaaaatgagattgcagctgctcattcgtgctatttagttgccgaactaaatattgattcatactcggaaagcgcaaggttgtgcctcattggtgcagatcacttgaagtgtcctcgaacatttgccagccctgaagccattcagaggacagaggtttatgaatacgcgaaggtgcttggtaattctcagtatatcctactaccctttcagccatataagctgatatatgcatacatgcttgttgaagtggggaaggtttctgattctttgaggtattgccaagcgtctatgaaggtattgaaagcctctggccgtgcccctgaattggaggtgtggaagcaattaatttcttcactggaggagaggatacgcactcaccagcagggtggatatggcacaaatcttgccccagcaaaactagttgggaagatttttacctcgcttgataaatctatatcccgcatgatgggtacaccatctgcaccacttccaccattgccacatggatctgttagcgatagagagagccactctatgcctgaagcagcaaaatttataaatagccaatcagtaatggccatgtcatcgctaatgccatctgcttcaatgcagtcaatgactgagatagcagagaatagtgatggcactggcaggaaaatggcacacaacagaagtgtttctgagccagacttcggtagaacatcaaaacagggtggtggatcagatggcacacagagcagtgcagcaggatctggcagttctcgatttggttggctagtgcagaagactatgggattagtgtcaaaatctcaccgccagatatgttgacacattcaataaatcaggtgcatctggagcggtgccatcatataacaaaccagctgctccatccgtgacaccaccagctggtgccaagttcttcataccgactgcagcacctgttgctgcagatcagatgatgccacaccaagcagcagagatacacagtgaaaccatgcaacaggatgagagggcagcctcaccgcctgctggaacatcattctcttcaaccccaccacccacacaattttcatcgcccccaccacacacgcaattctcgtcaccaatgcaatcaacaatccatcggcaatctagtatggcgaacatctccaccccttaccagagttccggggtatcatcattaagcagcgacacctcattctcaaaatcacgagctgcatcctggagtggaacatactctgagcagttcagtgcttttgcgggcacaagatcacccgatggacagacggtgcgctcaccactcatgcctggcaaaccatcacacagtcgttccaacagcaactcatcagtgcagctcaatggattgacagaggatcttcatgaggtcgagctctaattggcggctgctcagcatgactgtcgtcttttatccaccacaaaaggcagccataacaacccctgataaaccccttcccaagcgggtgacagaaaaaaaaggtgcccacgaaatgctgatcacgggggacgctgcagttggaatgggcatgtgggacttttgcacgagattctggggtgcgctctaaaccaccaagagagaagggaaagagttgggctggcctcgtttacaggtgagaaaaatggagcaggagccgcatgcagatgcccttgtacagataatctgcgcctacccagttttttttttttttaaaaaaaaaacgcgaacaagttcacacccgcactccattttgatgttcgtttctgggcgaaggatagaagagaaggtgcgttctagtgtgacaagtatggctctgtagagtactgttgttttggtgtactgcactagccgcagtatattgtctctgttttattctttgggtacgaatcgattctttcatcttgaaacaattgtgttacgccttgttgtgtattcttgtgccctggccgatgtggcggatgcaattgtacgtgttcttcaggtcttggttgtgctgtcgctatatccttgagcacacgtgtgtgctgagctgttttgttgacaatgcgcatcgtaatactggatctttttttaataaactacacgatttgcagttagttgtt

SEQ ID NO: 46357 - DNA, 5520 bp, Zea Mays
agagaccacgggtggcgcgatgcgacgtcggctgtcgtgctcgtgaccgcagccgcgccttcccgcctccacctcctcctgcgattccgatccgccgccctgtccggccggccggtaagccccgcctccgccctgttccctcggcacccatttttcatttcaactgagaggcggaggaaccaacccaggcacccaaccaaccctagatccaccgcttctgccacacgagagggagagatagacctctccgatctaattccgcatggcctcctcctcctccttcgcccccgacgaccagaccgacgccgacttcttcgacaagctcgtcgacgacgacgaccccgccaccagcctccccgacgacccacccatcccagagccgcaggcgcctcccgagggttcaggcaagggcggcgccggcgtccacactgcggtcaagcaggtgcagtgggcttccttcggaggtggcgcggacgacggtcctgacccatttgctcatctctcgggaggcgccggcgacgacgacggcttcctcgtgaccacggccgggacccagacggcctcggatcacgccttctttggcgggacccagagcttggccgccgaggtgacggaccaggacttcttcgccgggagcaactcctccaatcagcataatgtcagtggtcagcacgaccagggcggcggcagcactgcagtggattcagcagatcccatgtctttggaggccatgtaccctgggtggaagtatgatgaggcctcccagcaatggtaccagcttgacgacagtgtaaattcaactgggaatgcagctcaggtgctggacaacagcactcggtatgcacagcagcagcagcagctccacgcctcttatctgcacaattcagtgcattcagggcttgagacaattgctgaggagggcactaccgcaaccggtgctgtctcaagttggggccaaggggctgcctcagagtacccacccaacatgctcttctatgcagagtaccctggttggtacttcgacaccaacacccagcagtggcactccctcgagttataccagcaggccgccatgcaggctggaacagctagcatgggccagactgttattgcaaacgacggtgttgctgcaacttcctctctgacaggctataatgccgcacaaaatgaggaccttgctgcccatgatcaggtcacccaacacaactcattctcgaatagtttcgctcatcagaaccaatggcagattaccgatgcatttggtaacaatgtacgatctgaatgtgctacagagaacagcctggctagtagttcctatggttttcaacaacacaggaatgctgattctaccagttcatctacgaaccaacgggctggttttaatgcagctgaaactgttactgatcactatggtggacgcaagggcgttgaatcgccaagtattcagagcggttatagcacttctgacattcaacaatccagtcacaaggcattcgaaccttacacgggttatcaggaccattacaaagcatttgaacctgccacaggtcaccatgccagtaacaacatgttcaaacagtccacaggtaaccagggaggttacaaggcgtttgaacctgccatggataaccagagtggctacaaggcatatgaaccttctatgggtcaccatagtgcttcctgggaacccgtgccttccacgggtcaccagactgatttcaaggggtccggagcttcaactgttcatcaggccggatacaaagaatttgaaacttctacaggttacaatacaagtttaaaggcatttgaaccttcttcatctcaacatgctggttacatgggttcccaatctaactacatgggatttgacacttctacaaaccaccatggttatggcgatgcaaatgttgttgcgagcactcaaggctttgtcccaatgcaaaccacataccagggacagacacaagcaattgcaaactcacaagtgcacctgtcaaatagctatttgggtattgacaactccatgaactttaatcagcagcaatttctgggtgcaaatgcctcaaacttgcaattcagtcactccccacatgatggtagagctggacgaccaccacatgctctcgtttcttttgggtttggagggaagctcatagttatgaaagaagctagctccatgcccgcaagctttaacaatggaattcagggtaactctagtggcacagtttcagttcttaatctgtcagaggtggtcatggataaaattgattcttcaagcatcactaatggtagtgcacttagttatttccatgctctgtgccgccaaccagttcctggtcctctggttggtggaagtgctgcatcaaaggatgtaaataagtggattgatgaaatgattgcatggtacgattcttctagtgaactccagagaagtgatactcgcaagttgcttatttcattgctgaagatactgtctcagcactatggaaaactccgttcaccttttgcgtctgacccatcacaagaggagacagatggtccagaaatggcagtaactaagctattttcatcgtttaaaagtactgttaatatgggagattatggatccattgtttcttgcatgaaaaatattccttcagaaagtcagatgcaggctgttgcacaggaggtccaaaatcttctagtttctgggagaagaaaagaggcccttcagtgtgcccagggaggtcaactttggggacctgcaatcatactggcattgcagctcggtgatatgttttatgtggatacagtgaagaaaatggctcacttccattttgtatcggggtcccctctgcgaacgctatgccttctgattgctggacaacctgcagatgtttttaatgtagataacaatgtcaacattgactatggtacatcccatcaacctatggagcctggtcctaatggtatgttggatgattgggaggagaatttagctattattactgcaaacagaacgaaaggtgacgatctagtaatcacccatcttggtgactgtctctggaaagaaaaaaatgagattgcagctgctcattcgtgctatttagttgccgaactaaatattgattcatactcggaaagcgcaaggttgtgcctcattggtgcagatcacttgaagtgtcctcgaacatttgccagccctgaagccattcagaggacagaggtttatgaatacgcgaaggtgcttggtaattctcagtatatcctactaccctttcagccatataagctgatatatgcatacatgcttgttgaagtggggaaggtttctgattctttgaggtattgccaagcgtctatgaaggtattgaaagcctctggccgtgcccctgaattggaggtgtggaagcaattaatttcttcactggaggagaggatacgcactcaccagcagggtggatatggcacaaatcttgccccagcaaaactagttgggaagatttttacctcgcttgataaatctatatcccgcatgatgggtacaccatctgcaccacttccaccattgccacatggatctgttagcgatagagagagccactctatgcctgaagcagcaaaatttataaatagccaatcagtaatggccatgtcatcgctaatgccatctgcttcaatgcagtcaatgactgagatagcagagaatagtgatggcactggcaggaaaatggcacacaacagaagtgtttctgagccagacttcggtagaacatcaaaacagggtggtggatcagatggcacacagagcagtgcagcaggatctggcagttctcgatttggttggctagtgcagaagactatgggattagtgtcaaaatctcaccgccaggcaaaattaggggatcagaacaaattttactatgatgaaaagttgaagcggtgggtggaagaaggtgctgtggttcctgccgaggagcctcctcttcctccccctccaacaaaatcatctttccagaatggtatgccagaccataagttgaatggccacatgagcgtaggccatgctcccagtggagtcacagaatggaaatcctcaaattattcagagcaaggtctgggtatgccgccaattccacctagccaaaaccagttttcttctcgtgggcggatgggtgtccgatccaggtgcatctggagcggtgccatcatataacaaaccagctgctccatccgtgacaccaccagctggtgccaagttcttcataccgactgcagcacctgttgctgcagatcagatgatgccacaccaagcagcagagatacacagtgaaaccatgcaacaggatgagagggcagcctcaccgcctgctggaacatcattctcttcaaccccaccacccacacaattttcatcgcccccaccacacacgcaattctcgtcaccaatgcaatcaacaatccatcggcaatctagtatggcgaacatctccaccccttaccagagttccggggtatcatcattaagcagcgacacctcattctcaaaatcacgagctgcatcctggagtggaacatactctgagcagttcagtgcttttgcgggcacaagatcacccgatggacagacggtgcgctcaccactcatgcctggcaaaccatcacacagtcgttccaacagcaactcatcagtgcagctcaatggattgacagaggatcttcatgaggtcgagctctaattggcggctgctcagcatgactgtcgtcttttatccaccacaaaaggcagccataacaacccctgataaaccccttcccaagcgggtgacagaaaaaaaaggtgcccacgaaatgctgatcacgggggacgctgcagttggaatgggcatgtgggacttttgcacgagattctggggtgcgctctaaaccaccaaggtatgtcagacatgtactaacagaaatagaaatgcggggggttttggacattttgtagctatatatatatatatgtgtgtgtgttttgttttatgttttagagagaagggaaagagttgggctggcctcgtttacaggtgagaaaaatggagcaggagccgcatgcagatgcccttgtacagataatctgcgcctacccagttttttttttttttaaaaaaaaaacgcgaacaagttcacacccgcactccattttgatgttcgtttctgggcgaaggatagaagagaaggtgcgttctagtgtgacaagtatggctctgtagagtactgttgttttggtgtactgcactagccgcagtatattgtctctgttttattctttgggtacgaatcgattctttcatcttgaaacaattgtgttacgccttgttgtgtattcttgtgccctggccgatgtggcggatgcaattgtacgtgttcttcaggtcttggttgtgctgtcgctatatccttgagcacacgtgtgtgctgagctgttttgttgacaatgcgcatcgtaatactggatctttttttaataaactacacgatttgcagttagttgtt

SEQ ID NO: 46358 - DNA, 5316 bp, Zea Mays
cagagaccacgggtggcgcgatgcgacgtcggctgtcgtgctcgtgaccgcagccgcgccttcccgcctccacctcctcctgcgattccgatccgccgccctgtccggccggccggtaagccccgcctccgccctgttccctcggcacccatttttcatttcaactgagaggcggaggaaccaacccaggcacccaaccaaccctagatccaccgcttctgccacacgagagggagagatagacctctccgatctaattccgcatggcctcctcctcctccttcgcccccgacgaccagaccgacgccgacttcttcgacaagctcgtcgacgacgacgaccccgccaccagcctccccgacgacccacccatcccagagccgcaggcgcctcccgagggttcaggcaagggcggcgccggcgtccacactgcggtcaagcaggtgcagtgggcttccttcggaggtggcgcggacgacggtcctgacccatttgctcatctctcgggaggcgccggcgacgacgacggcttcctcgtgaccacggccgggacccagacggcctcggatcacgccttctttggcgggacccagagcttggccgccgaggtgacggaccaggacttcttcgccgggagcaactcctccaatcagcataatgtcagtggtcagcacgaccagggcggcggcagcactgcagtggattcagcagatcccatgtctttggaggccatgtaccctgggtggaagtatgatgaggcctcccagcaatggtaccagcttgacgacagtgtaaattcaactgggaatgcagctcaggtgctggacaacagcactcggtatgcacagcagcagcagcagctccacgcctcttatctgcacaattcagtgcattcagggcttgagacaattgctgaggagggcactaccgcaaccggtgctgtctcaagttggggccaaggggctgcctcagagtacccacccaacatgctcttctatgcagagtaccctggttggtacttcgacaccaacacccagcagtggcactccctcgagttataccagcaggccgccatgcaggctggaacagctagcatgggccagactgttattgcaaacgacggtgttgctgcaacttcctctctgacaggctataatgccgcacaaaatgaggaccttgctgcccatgatcaggtcacccaacacaactcattctcgaatagtttcgctcatcagaaccaatggcagattaccgatgcatttggtaacaatgtacgatctgaatgtgctacagagaacagcctggctagtagttcctatggttttcaacaacacaggaatgctgattctaccagttcatctacgaaccaacgggctggttttaatgcagctgaaactgttactgatcactatggtggacgcaagggcgttgaatcgccaagtattcagagcggttatagcacttctgacattcaacaatccagtcacaaggcattcgaaccttacacgggttatcaggaccattacaaagcatttgaacctgccacaggtcaccatgccagtaacaacatgttcaaacagtccacaggtaaccagggaggttacaaggcgtttgaacctgccatggataaccagagtggctacaaggcatatgaaccttctatgggtcaccatagtgcttcctgggaacccgtgccttccacgggtcaccagactgatttcaaggggtccggagcttcaactgttcatcaggccggatacaaagaatttgaaacttctacaggttacaatacaagtttaaaggcatttgaaccttcttcatctcaacatgctggttacatgggttcccaatctaactacatgggatttgacacttctacaaaccaccatggttatggcgatgcaaatgttgttgcgagcactcaaggctttgtcccaatgcaaaccacataccagggacagacacaagcaattgcaaactcacaagtgcacctgtcaaatagctatttgggtattgacaactccatgaactttaatcagcagcaatttctgggtgcaaatgcctcaaacttgcaattcagtcactccccacatgatggtagagctggacgaccaccacatgctctcgtttcttttgggtttggagggaagctcatagttatgaaagaagctagctccatgcccgcaagctttaacaatggaattcagggtaactctagtggcacagtttcagttcttaatctgtcagaggtggtcatggataaaattgattcttcaagcatcactaatgtgaactccagagaagtgatactcgcaagttgcttatttcattgctgaagatactgtctcagcactatggaaaactccgttcaccttttgcgtctgacccatcacaagaggagacagatggtccagaaatggcagtaactaagctattttcatcgtttaaaagtactgttaatatgggagattatggatccattgtttcttgcatgaaaaatattccttcagaaagtcagatgcaggctgttgcacaggaggtccaaaatcttctagtttctgggagaagaaaagaggcccttcagtgtgcccagggaggtcaactttggggacctgcaatcatactggcattgcagctcggtgatatgttttatgtggatacagtgaagaaaatggctcacttccattttgtatcggggtcccctctgcgaacgctatgccttctgattgctggacaacctgcagatgtttttaatgtagataacaatgtcaacattgactatggtacatcccatcaacctatggagcctggtcctaatggtatgttggatgattgggaggagaatttagctattattactgcaaacagaacgaaaggtgacgatctagtaatcacccatcttggtgactgtctctggaaagaaaaaaatgagattgcagctgctcattcgtgctatttagttgccgaactaaatattgattcatactcggaaagcgcaaggttgtgcctcattggtgcagatcacttgaagtgtcctcgaacatttgccagccctgaagccattcagaggacagaggtttatgaatacgcgaaggtgcttggtaattctcagtatatcctactaccctttcagccatataagctgatatatgcatacatgcttgttgaagtggggaaggtttctgattctttgaggtattgccaagcgtctatgaaggtattgaaagcctctggccgtgcccctgaattggaggtgtggaagcaattaatttcttcactggaggagaggatacgcactcaccagcagggtggatatggcacaaatcttgccccagcaaaactagttgggaagatttttacctcgcttgataaatctatatcccgcatgatgggtacaccatctgcaccacttccaccattgccacatggatctgttagcgatagagagagccactctatgcctgaagcagcaaaatttataaatagccaatcagtaatggccatgtcatcgctaatgccatctgcttcaatgcagtcaatgactgagatagcagagaatagtgatggcactggcaggaaaatggcacacaacagaagtgtttctgagccagacttcggtagaacatcaaaacagggtggtggatcagatggcacacagagcagtgcagcaggatctggcagttctcgatttggttggctagtgcagaagactatgggattagtgtcaaaatctcaccgccaggcaaaattaggggatcagaacaaattttactatgatgaaaagttgaagcggtgggtggaagaaggtgctgtggttcctgccgaggagcctcctcttcctccccctccaacaaaatcatctttccagaatggtatgccagaccataagttgaatggccacatgagcgtaggccatgctcccagtggagtcacagaatggaaatcctcaaattattcagagcaaggtctgggtatgccgccaattccacctagccaaaaccagttttcttctcgtgggcggatgggtgtccgatccagatatgttgacacattcaataaatcaggtgcatctggagcggtgccatcatataacaaaccagctgctccatccgtgacaccaccagctggtgccaagttcttcataccgactgcagcacctgttgctgcagatcagatgatgccacaccaagcagcagagatacacagtgaaaccatgcaacaggatgagagggcagcctcaccgcctgctggaacatcattctcttcaaccccaccacccacacaattttcatcgcccccaccacacacgcaattctcgtcaccaatgcaatcaacaatccatcggcaatctagtatggcgaacatctccaccccttaccagagttccggggtatcatcattaagcagcgacacctcattctcaaaatcacgagctgcatcctggagtggaacatactctgagcagttcagtgcttttgcgggcacaagatcacccgatggacagacggtgcgctcaccactcatgcctggcaaaccatcacacagtcgttccaacagcaactcatcagtgcagctcaatggattgacagaggatcttcatgaggtcgagctctaattggcggctgctcagcatgactgtcgtcttttatccaccacaaaaggcagccataacaacccctgataaaccccttcccaagcgggtgacagaaaaaaaaggtgcccacgaaatgctgatcacgggggacgctgcagttggaatgggcatgtgggacttttgcacgagattctggggtgcgctctaaaccaccaagagagaagggaaagagttgggctggcctcgtttacaggtgagaaaaatggagcaggagccgcatgcagatgcccttgtacagataatctgcgcctacccagttttttttttttttaaaaaaaaaacgcgaacaagttcacacccgcactccattttgatgttcgtttctgggcgaaggatagaagagaaggtgcgttctagtgtgacaagtatggctctgtagagtactgttgttttggtgtactgcactagccgcagtatattgtctctgttttattctttgggtacgaatcgattctttcatcttgaaacaattgtgttacgccttgttgtgtattcttgtgccctggccgatgtggcggatgcaattgtacgtgttcttcaggtcttggttgtgctgtcgctatatccttgagcacacgtgtgtgctgagctgttttgttgacaatgcgcatcgtaatactggatctttttttaataaactacacgatttgcagttagttgtt

SEQ ID NO: 46359 - DNA, 1021 bp, Zea Mays
ccgccaccgccaccgccgtcccgctccacgcgtccgcaccctctgcgcggcgccggtcgagaactcgtgatgccccgcgaccgcgacgagccagccgccgtgcgcgtctacaccgtctgcgacgagtccaggtgcacgcccatggatgcagaggactctgagccctacactgacgtcttcttcgtcaagttctcacaggtcaacaacgccaggtttgcaaagaggaagcttgacgagtctgtgtttcttggcaaccgcctgcaggtgacctatgcccctcaatttgagagccctcaagataccaaggagaaactggaagttaggagaaaagaagtccttggccgaataaaatcatctgctggcagacctgaaggatcatctccagctcagggatcatctagtgggaatcaccaccaaatgaactctaataagagggaatatatgaagacaattcatgcttctcctattgaagatcctcgtttcagtcatgtgtcctcagacaaggattattttccatccgagtcgatgaatgctactgtaaagctagtcagagggaagcttgataagatacaatctggtggtgataattccagtacctcagcagcatccaggaaaccaggggttgataagcgcaggcgaatttgattgcagataatgccgagcacgcgttcaatgttttggtgtaatgttgatattagcataacataccaggattttaatggacttttttctatcaattttctcactcacattctaggccattaagttgtttatgtttcagggtggcggtgctatactatatggttagctagaattgctggaatatcgataaccgagttaagttaaaaatgcctcgcgtttagttttcccagctgtaatgttatgttactcttgcaatcaattgcatcggaattctcatattttatattgacgcgcctccgatgcatgtgtacggtgagacatgatccataagaaagacatgcctggcgttgggcatcgttttgaaaccactttattccat

SEQ ID NO: 46360 - DNA, 1096 bp, Zea Mays
ccgccaccgccaccgccgtcccgctccacgcgtccgcaccctctgcgcggcgccggtcgagaactcgtgatgccccgcgaccgcgacgagccagccgccgtgcgcgtctacaccgtctgcgacgagtccaggtacctgatcgtgcgcaacgtgccgtcactcggatgcggtgacgacctcgccagtctcttcgggacgtacggccccgtggaggagtgcacgcccatggatgcagaggactctgagccctacactgacgtcttcttcgtcaagttctcacaggtcaacaacgccagctcgagcttacccgctgcacaagtattgccatcttttctcgcggtgacctatgcccctcaatttgagagccctcaagataccaaggagaaactggaagttaggagaaaagaagtccttggccgaataaaatcatctgctggcagacctgaaggatcatctccagctcagggatcatctagtgggaatcaccaccaaatgaactctaataagagggaatatatgaagacaattcatgcttctcctattgaagatcctcgtttcagtcatgtgtcctcagacaaggattattttccatccgagtcgatgaatgctactgtaaagctagtcagagggaagcttgataagatacaatctggtggtgataattccagtacctcagcagcatccaggaaaccaggggttgataagcgcaggcgaatttgattgcagataatgccgagcacgcgttcaatgttttggtgtaatgttgatattagcataacataccaggattttaatggacttttttctatcaattttctcactcacattctaggccattaagttgtttatgtttcagggtggcggtgctatactatatggttagctagaattgctggaatatcgataaccgagttaagttaaaaatgcctcgcgtttagttttcccagctgtaatgttatgttactcttgcaatcaattgcatcggaattctcatattttatattgacgcgcctccgatgcatgtgtacggtgagacatgatccataagaaagacatgcctggcgttgggcatcgttttgaaaccactttattccat

SEQ ID NO: 46361 - DNA, 1152 bp, Zea Mays
caaaggcccagccgaggcccaccgccaccgccaccgccgtcccgctccacgcgtccgcaccctctgcgcggcgccggtcgagaactcgtgatgccccgcgaccgcgacgagccagccgccgtgcgcgtctacaccgtctgcgacgagtccaggtacctgatcgtgcgcaacgtgccgtcactcggatgcggtgacgacctcgccagtctcttcgggacgtacggccccgtggaggagtcagtctcacctcttctccacctgtattctgtatccgtatttgcttagttgatcgattacccaccctggggggtgtcaggtgcacgcccatggatgcagaggactctgagccctacactgacgtcttcttcgtcaagttctcacaggtcaacaacgccaggtgacctatgcccctcaatttgagagccctcaagataccaaggagaaactggaagttaggagaaaagaagtccttggccgaataaaatcatctgctggcagacctgaaggatcatctccagctcagggatcatctagtgggaatcaccaccaaatgaactctaataagggaatatatgaagacaattcatgcttctcctattgaagatcctcgtttcagtcatgtgtcctcagacaaggattattttccatccgagtcgatgaatgctactgtaaagctagtcagagggaagcttgataagatacaatctggtggtgataattccagtacctcagcagcatccaggaaaccaggggttgataagcgcaggcgaatttgattgcagataatgccgagcacgcgttcaatgttttggtgtaatgttgatattagcataacataccaggattttaatggacttttttctatcaattttctcactcacattctaggccattaagttgtttatgtttcagggtggcggtgctatactatatggttagctagaattgctggaatatcgataaccgagttaagttaaaaatgcctcgcgtttagttttcccagctgtaatgttatgttactcttgcaatcaattgcatcggaattctcatattttatattgacgcgcctccgatgcatgtgtacggtgagacatgatccataagaaagacatgcctggcgttgggcatcgttttgaaaccactttattccat

SEQ ID NO: 46362 - DNA, 1199 bp, Zea Mays
ctttccgcaaaggcccagccgaggcccaccgccaccgccaccgccgtcccgctccacgcgtccgcaccctctgcgcggcgccggtcgagaactcgtgatgccccgcgaccgcgacgagccagccgccgtgcgcgtctacaccgtctgcgacgagtccaggtacctgatcgtgcgcaacgtgccgtcactcggatgcggtgacgacctcgccagtctcttcgggacgtacggccccgtggaggagtcagtctcacctcttctccacctgtattctgtatccgtatttgcttagttgatcgattacccaccctggggggtgtcaggtgcacgcccatggatgcagaggactctgagccctacactgacgtcttcttcgtcaagttctcacaggtttgcaaagaggaagcttgacgagtctgtgtttcttggcaaccgcctgcaggtgacctatgcccctcaatttgagagccctcaagataccaaggagaaactggaagttaggagaaaagaagtccttggccgaataaaatcatctgctggcagacctgaaggatcatctccagctcagggatcatctagtgggaatcaccaccaaatgaactctaataagagggaatatatgaagacaattcatgcttctcctattgaagatcctcgtttcagtcatgtgtcctcagacaaggattattttccatccgagtcgatgaatgctactgtaaagctagtcagagggaagcttgataagatacaatctggtggtgataattccagtacctcagcagcatccaggaaaccaggggttgataagcgcaggcgaatttgattgcagataatgccgagcacgcgttcaatgttttggtgtaatgttgatattagcataacataccaggattttaatggacttttttctatcaattttctcactcacattctaggccattaagttgtttatgtttcagggtggcggtgctatactatatggttagctagaattgctggaatatcgataaccgagttaagttaaaaatgcctcgcgtttagttttcccagctgtaatgttatgttactcttgcaatcaattgcatcggaattctcatattttatattgacgcgcctccgatgcatgtgtacggtgagacatgatccataagaaagacatgcctggcgttgggcatcgttttgaaaccactttattccat

SEQ ID NO: 46363 - DNA, 1076 bp, Zea Mays
ctcctttccgcaaaggcccagccgaggcccaccgccaccgccaccgccgtcccgctccacgcgtccgcaccctctgcgcggcgccggtcgagaactcgtgatgccccgcgaccgcgacgagccagccgccgtgcgcgtctacaccgtctgcgacgagtccaggtacctgatcgtgcgcaacgtgccgtcactcggatgcggtgacgacctcgccagtctcttcgggacgtacggccccgtggaggagtcagtctcacctcttctccacctgtattctgtatccgtatttgcttagttgatcgattacccaccctggggggtgtcaggtgcacgcccatggatgcagaggactctgagccctacactgacgtcttcttcgtcaagttctcacaggtcaacaacgccagcatctgctggcagacctgaaggatcatctccagctcagggatcatctagtgggaatcaccaccaaatgaactctaataagagggaatatatgaagacaattcatgcttctcctattgaagatcctcgtttcagtcatgtgtcctcagacaaggattattttccatccgagtcgatgaatgctactgtaaagctagtcagagggaagcttgataagatacaatctggtggtgataattccagtacctcagcagcatccaggaaaccaggggttgataagcgcaggcgaatttgattgcagataatgccgagcacgcgttcaatgttttggtgtaatgttgatattagcataacataccaggattttaatggacttttttctatcaattttctcactcacattctaggccattaagttgtttatgtttcagggtggcggtgctatactatatggttagctagaattgctggaatatcgataaccgagttaagttaaaaatgcctcgcgtttagttttcccagctgtaatgttatgttactcttgcaatcaattgcatcggaattctcatattttatattgacgcgcctccgatgcatgtgtacggtgagacatgatccataagaaagacatgcctggcgttgggcatcgttttgaaaccactttattccat

SEQ ID NO: 46364 - DNA, 1180 bp, Zea Mays
cctcctttccgcaaaggcccagccgaggcccaccgccaccgccaccgccgtcccgctccacgcgtccgcaccctctgcgcggcgccggtcgagaactcgtgatgccccgcgaccgcgacgagccagccgccgtgcgcgtctacaccgtctgcgacgagtccaggtacctgatcgtgcgcaacgtgccgtcactcggatgcggtgacgacctcgccagtctcttcgggacgtacggccccgtggaggagtgcacgcccatggatgcagaggactctgagccctacactgacgtcttcttcgtcaagttctcacaggtcaacaacgccaggtgacctatgcccctcaatttgagagccctcaagataccaaggagaaactggaagttaggagaaaagaagtccttggccgaataaaatcatctgctggcagacctgaaggatcatctccagctcagggatcatctagtgggaatcaccaccaaatgaactctaataagagctaggctcaagctcttcaatttaactgttctcttgagcaaaatgtagaagtgtcagcctgatttttctcctaaggttcattttacacacattcagggaatatatgaagacaattcatgcttctcctattgaagatcctcgtttcagtcatgtgtcctcagacaaggattattttccatccgagtcgatgaatgctactgtaaagctagtcagagggaagcttgataagatacaatctggtggtgataattccagtacctcagcagcatccaggaaaccaggggttgataagcgcaggcgaatttgattgcagataatgccgagcacgcgttcaatgttttggtgtaatgttgatattagcataacataccaggattttaatggacttttttctatcaattttctcactcacattctaggccattaagttgtttatgtttcagggtggcggtgctatactatatggttagctagaattgctggaatatcgataaccgagttaagttaaaaatgcctcgcgtttagttttcccagctgtaatgttatgttactcttgcaatcaattgcatcggaattctcatattttatattgacgcgcctccgatgcatgtgtacggtgagacatgatccataagaaagacatgcctggcgttgggcatcgttttgaaaccactttattccat

SEQ ID NO: 46365 - DNA, 1050 bp, Zea Mays
acctcctttccgcaaaggcccagccgaggcccaccgccaccgccaccgccgtcccgctccacgcgtccgcaccctctgcgcggcgccggtcgagaactcgtgatgccccgcgaccgcgacgagccagccgccgtgcgcgtctacaccgtctgcgacgagtccaggtacctgatcgtgcgcaacgtgccgtcactcggatgcggtgacgacctcgccagtctcttcgggacgtacggccccgtggaggagtgcacgcccatggatgcagaggactctgagccctacactgacgtcttcttcgtcaagttctcacaggtcaacaacgccaggtttgcaaagaggaagcttgacgagtctgtgtttcttggcaaccgcctgcagcatctgctggcagacctgaaggatcatctccagctcagggatcatctagtgggaatcaccaccaaatgaactctaataagagggaatatatgaagacaattcatgcttctcctattgaagatcctcgtttcagtcatgtgtcctcagacaaggattattttccatccgagtcgatgaatgctactgtaaagctagtcagagggaagcttgataagatacaatctggtggtgataattccagtacctcagcagcatccaggaaaccaggggttgataagcgcaggcgaatttgattgcagataatgccgagcacgcgttcaatgttttggtgtaatgttgatattagcataacataccaggattttaatggacttttttctatcaattttctcactcacattctaggccattaagttgtttatgtttcagggtggcggtgctatactatatggttagctagaattgctggaatatcgataaccgagttaagttaaaaatgcctcgcgtttagttttcccagctgtaatgttatgttactcttgcaatcaattgcatcggaattctcatattttatattgacgcgcctccgatgcatgtgtacggtgagacatgatccataagaaagacatgcctggcgttgggcatcgttttgaaaccactttattccat

SEQ ID NO: 46366 - DNA, 1110 bp, Zea Mays
ctttcgtcgtgtccgctggacgacacctcctttccgcaaaggcccagccgaggcccaccgccaccgccaccgccgtcccgctccacgcgtccgcaccctctgcgcggcgccggtcgagaactcgtgatgccccgcgaccgcgacgagccagccgccgtgcgcgtctacaccgtctgcgacgagtccaggtacctgatcgtgcgcaacgtgccgtcactcggatgcggtgacgacctcgccagtctcttcgggacgtacggccccgtggaggagtgcacgcccatggatgcagaggactctgagccctacactgacgtcttcttcgtcaagttctcacaggtcaacaacgccaggtgacctatgcccctcaatttgagagccctcaagataccaaggagaaactggaagttaggagaaaagaagtccttggccgaataaaatcatctgctggcagacctgaaggatcatctccagctcagggatcatctagtgggaatcaccaccaaatgaactctaataagagggaatatatgaagacaattcatgcttctcctattgaagatcctcgtttcagtcatgtgtcctcagacaaggattattttccatccgagtcgatgaatgctactgtaaagctagtcagagggaagcttgataagatacaatctggtggtgataattccagtacctcagcagcatccaggaaaccaggggttgataagcgcaggcgaatttgattgcagataatgccgagcacgcgttcaatgttttggtgtaatgttgatattagcataacataccaggattttaatggacttttttctatcaattttctcactcacattctaggccattaagttgtttatgtttcagggtggcggtgctatactatatggttagctagaattgctggaatatcgataaccgagttaagttaaaaatgcctcgcgtttagttttcccagctgtaatgttatgttactcttgcaatcaattgcatcggaattctcatattttatattgacgcgcctccgatgcatgtgtacggtgagacatgatccataagaaagacatgcctggcgttgggcatcgttttgaaaccactttattccat

SEQ ID NO: 46367 - DNA, 1684 bp, Zea Mays
ccattggattcctccgacgcactgacccgcagtcccgcacaaccaccaccaccaccaccaccatggccgccgcgccaacaagctccggcgactcgccgccgcctgcgcagccggagtacggttccatctcctccatggtagcctcgtctgcctcctccgctgcagccgcggtcgcggacttcacccgctgggccgagaccttcggcaccgagaaggccgacgccgccaaggctgccctaacctccgccaccaccttggccacctcatctgcctccgaggcggcttctgcttcctccaaggccgcgtcctccgcatatgcggccgcctccgacctcaccctcgtcgccaaggaggagctggaatggttcaagacggagtactctgctcacgagcagattgtgttcggcaagatcaaagagggtgtcgtcatggcgataatgcatccaggcattgctgcaggctctgcaacccttgcagggattatccttttcaaaagtaacatgttttccttggaacatcattgctctgtggtgctatattgaatttcagctcttttcattatactttcattggttgcttttgctgatgcacaatgtaatttggtaattgcatgaggaattctatccatacatgcacttaaagaacatagggttcattatgactacatgctaaaccacattgttttatttaactcgattgtacttttcatactctagaattgatcctttattgtgttcttacaaatgattgaaatgttttgaaaccttggtcttcttagaatatgatgcacgtcaggccgtcagcacgtatcttattctggtcggattaaaagaactttgaaaaaatagtcagtgatttgagaattgatgaaatttattaaagctgctacgaagttttgttcaaattatctattctctacttagctgcctagtatttgatggtacatatcccgagggccaaggagctaccttattcaacgagtacggcacatgtttgttagcaaggagaccctactttctggagtacaggctgaagtgaatcacatgcggcagactgtgaatcttgtatccaatgaacgccaaaagctgttggatagagcagcaactgcagagaaaagattccaaaaaggatggaatacactcagggaagaagggcgttccattcaacacgagttgcgtgagattagtgatattgaaaaccaagcagtaggtctgaagggaattcttgatcagcttcccagagcacatgcatctgaatttcggtcgaagatgtctggcctagcttctcaggttaagaaggagaagcgagtgctcaacgccgccctcacgaagattgtgaactacggtgtccccatctgactgccactccagccagttgttctgagggtccattgtattgtatcagatttttgtgaaggaagacatgttcgatgtgtagggtgaacgctatactgcccacttggtttcgagaaaaggaaaagagaataagttgtgacccgtgcagatttctaatgtcgcaaaagcaacatctttgaaacctgagtaacagatgacattttgctatggtttttttttgttggcttattgacatgttcaccgccgtcagctgccgtatgcctgggaatcgtaaaagtggaatgaaatttttggttgaaatcatgcgagatgctgaccttgcattttat

SEQ ID NO: 46368 - DNA, 3381 bp, Zea Mays
cagaaacctcgcatccaccgtccgtcccttccgttgcgccggcccggataaggtaaggagaggataccttcactgctctgcggctgctccgccacgccgccgtccatcgtccatcgtccatggcgtcaccgcaccttcctttcctctccttccccaaaacattaccgccgctacctcccccactcaagacccacgcccaccgcacctccctagccgccgctcctgctccgccgcccgccccgcctgacggcgcggggcccgccgcgcccacgcgtggggaccgcttcctcggccgccagctggccaccgaggccgccgcgcgcgtgctcgcgcccgaggacgccgacaggcggcgccgacgcaaggagaagcgccgggccttggcacggaagccctccggcctcgcatcctgctacggctgcggcgccccgctgcagacggcggaggaggccgcgccgggatacgtcgacccggacacgtaccaactgaagaagaggcatcaccaacttagaaccgttctatgtgggaggtgcaagctgctgtctcatggccacatggttactgctgttggtggccacggcggttatccagggggcaagaagtttgtttctgcggaacagctcagggagaagctgtcatacctccgtcacgagaaagcgctcatagtcaaattggttgacatcgttgacttcaatggaagtttcctggcacgtgtacgcgattttgctggtgctaatcctattatacttgtgataacaaaggttgatctccttcccagagatactgatttgaattgtataggcgactgggttgtcgagtcagttgtcaagaagaagcttaacgtccttagtgtccatttgacaagctcaaagtcattggtcggtatcacaggggttatatcagagattcatcaggaaaggaagggccgagatgtatatatactgggttccgcaaatgttggaaaatctgcatttatcagtgcaatgctaagaacaatggcgtacaaggacccggtagcagcggcagctcaaaaatacaagccaatacagtctgctgttcctggaacaacccttggccctattcaaattgaagcatttttaggcggagggaaattgtatgatacacctggagtccaccttcaccataggcaggcagcagttatccatgctgatgatctgccttctcttgcaccacaaagtcgtttgaaagggcgatgttttccggctaatgatacagatgttgaattgagcgggaattcattgttctgggctgggctagtccgcattgatgttatcaaggctcttccacgttcacggctgacattctatgggcccaagaagctaaagattaatatggtcccgacaacagaagctgatcaattttacgagactgaagttggggtcacattgactccgccaactggtaaggagagagctgaaggatggacagggcttcaaggggttcgcgagttgaagataaaatatgaggaacgtgacaggcctgcctgtgacatcgcgatctctgggcttgggtggatttctgtggagccatcaggtgtgccttcaaacagcgctgaggaagtttatgatggcggtgagctgcatctggtggtacatgtgcccaaaccggttgaggtcttcatgcgtcctccattacctgtcggcaaagcagcgtcgcaatggtaccggtatcaagagctgacagaggaagaagaggagctgaggcctaaatggcattactgatgctgctctgtttctctagggctggctctagcagtagtacagatttctgtaatccaaatatttagcagagtgttaggacctggtgatgaaatggattcagaaaacaagttttgaataaatctgtctctggtggtgtctatttagcactttgctttggcatgaggaaagaggaatcctcccatgtcctgcacatgtactcggaatgaaggaccttccagacaaggtattgaagagatttaccaatttaatttcggcaacaaaactgctctggtctggtctgcctttagccatatgtaagcacaaaattttcgttttcacgtcgtgtcttgatgctcctatttaggagtacgtatacatagccaggaagcgtattttttttgccatccattctccttattcctcgttgaattcggcccattggattcctccgacgcactgacccgcagtcccgcacaaccaccaccaccaccaccaccatggccgccgcgccaacaagctccggcgactcgccgccgcctgcgcagccggagtacggttccatctcctccatggtagcctcgtctgcctcctccgctgcagccgcggtcgcggacttcacccgctgggccgagaccttcggcaccgagaaggccgacgccgccaaggctgccctaacctccgccaccaccttggccacctcatctgcctccgaggcggcttctgcttcctccaaggccgcgtcctccgcatatgcggccgcctccgacctcaccctcgtcgccaaggaggagctggaatggttcaagacggagtactctgctcacgagcagattgtgttcggcaagatcaaagagggtgtcgtcatggcgataatgcatccaggcattgctgcaggctctgcaacccttgcagggattatccttttcaaaaggccaaggagctaccttattcaacgagtacggcacatgtttgttagcaaggagaccctactttctggagtacaggctgaagtgaatcacatgcggcagactgtgaatcttgtatccaatgaacgccaaaagctgttggatagagcagcaactgcagagaaaagattccaaaaaggatggaatacactcagggaagaagggcgttccattcaacacgagttgcgtgagattagtgatattgaaaaccaagcagtaggtctgaagggaattcttgatcagcttcccagagcacatgcatctgaatttcggtcgaagatgtctggcctagcttctcaggttaagaaggagaagcgagtgctcaacgccgccctcacgaagattgtgaactacggtgtccccatctgactgccactccagccagttgttctgagggtccattgtattgtatcagatttttgtgaaggaagacatgttcgatgtgtagggtgaacgctatactgcccacttggtttcgagaaaaggaaaagagaataagttgtgacccgtgcagatttctaatgtcgcaaaagcaacatctttgaaacctgagtaacagatgacattttgctatggtttttttttgttggcttattgacatgttcaccgccgtcagctgccgtatgcctgggaatcgtaaaagtggaatgaaatttttggttgaaatcatgcgagatgctgaccttgcattttat

SEQ ID NO: 46369 - DNA, 2051 bp, Zea Mays
tccaccgtccgtcccttccgttgcgccggcccggataaggtaaggagaggataccttcactgctctgcggctgctccgccacgccgccgtccatcgtccatcgtccatggcgtcaccgcaccttcctttcctctccttccccaaaacattaccgccgctacctcccccactcaagacccacgcccaccgcacctccctagccgccgctcctgctccgccgcccgccccgcctgacggcgcggggcccgccgcgcccacgcgtggggaccgcttcctcggccgccagctggccaccgaggccgccgcgcgcgtgctcgcgcccgaggacgccgacaggcggcgccgacgcaaggagaagcgccgggccttggcacggaagccctccggcctcgcatcctgctacggctgcggcgccccgctgcagacggcggaggaggccgcgccgggatacgtcgacccggacacgtaccaactgaagaagaggcatcaccaacttagaaccgttctatgtgggaggtgcaagctgctgtctcatggccacatggttactgctgttggtggccacggcggttatccagggggcaagaagtttgtttctgcggaacagctcagggagaagctgtcatacctccgtcacgagaaagcgctcatagtcaaattggttgacatcgttgacttcaatggaagtttcctggcacgtgtacgcgattttgctggtgctaatcctattatacttgtgataacaaaggttgatctccttcccagagatactgatttgaattgtataggcgactgggttgtcgagtcagttgtcaagaagaagcttaacgtccttagtgtccacttcatggccatgctcgaatcgtatcatctcaagttctatagatcttcacttcccctgcttgttctacaatcctgactgatatttctttttatcatattagggccgagatgtatatatactgggttccgcaaatgttggaaaatctgcatttatcagtgcaatgctaagaacaatggcgtacaaggacccggtagcagcggcagctcaaaaatacaagccaatacagtctgctgttcctggaacaacccttggccctattcaaattgaagcatttttaggcggagggaaattgtatgatacacctggagtccaccttcaccataggcaggcagcagttatccatgctgatgatctgccttctcttgcaccacaaagtcgtttgaaagggcgatgttttccggctaatgatacagatgttgaattgagcgggaattcattgttctgggctgggctagtccgcattgatgttatcaaggctcttccacgttcacggctgacattctatgggcccaagaagctaaagattaatatggtcccgacaacagaagctgatcaattttacgagactgaagttggggtcacattgactccgccaactggtaaggagagagctgaaggatggacagggcttcaaggggttcgcgagttgaagataaaatatgaggaacgtgacaggcctgcctgtgacatcgcgatctctgggcttgggtggatttctgtggagccatcaggtgtgccttcaaacagcgctgaggaagtttatgatggcggtgagctgcatctggtggtacatgtgcccaaaccggttgaggtcttcatgcgtcctccattacctgtcggcaaagcagcgtcgcaatggtaccggtatcaagagctgacagaggaagaagaggagctgaggcctaaatggcattactgatgctgctctgtttctctagggctggctctagcagtagtacagatttctgtaatccaaatatttagcagagtgttaggacctggtgatgaaatggattcagaaaacaagttttgaataaatctgtctctggtggtgtctatttagcactttgctttggcatgaggaaagaggaatcctcccatgtcctgcacatgtactcggaatgaaggaccttccagacaaggtattgaagagatttaccaatttaatttcggcaacaaaactgctctggtctggtctgcctttagc

SEQ ID NO: 46370 - DNA, 2017 bp, Zea Mays
cagaaacctcgcatccaccgtccgtcccttccgttgcgccggcccggataaggtaaggagaggataccttcactgctctgcggctgctccgccacgccgccgtccatcgtccatcgtccatggcgtcaccgcaccttcctttcctctccttccccaaaacattaccgccgctacctcccccactcaagacccacgcccaccgcacctccctagccgccgctcctgctccgccgcccgccccgcctgacggcgcggggcccgccgcgcccacgcgtggggaccgcttcctcggccgccagctggccaccgaggccgccgcgcgcgtgctcgcgcccgaggacgccgacaggcggcgccgacgcaaggagaagcgccgggccttggcacggaagccctccggcctcgcatcctgctacggctgcggcgccccgctgcagacggcggaggaggccgcgccgggatacgtcgacccggacacgtaccaactgaagaagaggcatcaccaacttagaaccgttctatgtgggaggtgcaagctgctgtctcatggccacatggttactgctgttggtggccacggcggttatccagggggcaagaagtttgtttctgcggaacagctcagggagaagctgtcatacctccgtcacgagaaagcgctcatagtcaaattggttgacatcgttgacttcaatggaagtttcctggcacgtgtacgcgattttgctggtgctaatcctattatacttgtgataacaaaggttgatctccttcccagagatactgatttgaattgtataggcgactgggttgtcgagtcagttgtcaagaagaagcttaacgtccttagtgtccatttgacaagctcaaagtcattggtcggtatcacaggggttatatcagagattcatcaggaaaggaagggccgagatgtatatatactgggttccgcaaatgttggaaaatctgcatttatcagtgcaatgctaagaacaatggcgtacaaggacccggtagcagcggcagctcaaaaatacaagccaatacagtctgctgttcctggaacaacccttggccctattcaaattgaagcatttttaggcggagggaaattgtatgatacacctggagtccaccttcaccataggcaggcagcagttatccatgctgatgatctgccttctcttgcaccacaaagtcgtttgaaagggcgatgttttccgatgttgaattgagcgggaattcattgttctgggctgggctagtccgcattgatgttatcaaggctcttccacgttcacggctgacattctatgggcccaagaagctaaagattaatatggtcccgacaacagaagctgatcaattttacgagactgaagttggggtcacattgactccgccaactggtaaggagagagctgaaggatggacagggcttcaaggggttcgcgagttgaagataaaatatgaggaacgtgacaggcctgcctgtgacatcgcgatctctgggcttgggtggatttctgtggagccatcaggtgtgccttcaaacagcgctgaggaagtttatgatggcggtgagctgcatctggtggtacatgtgcccaaaccggttgaggtcttcatgcgtcctccattacctgtcggcaaagcagcgtcgcaatggtaccggtatcaagagctgacagaggaagaagaggagctgaggcctaaatggcattactgatgctgctctgtttctctagggctggctctagcagtagtacagatttctgtaatccaaatatttagcagagtgttaggacctggtgatgaaatggattcagaaaacaagttttgaataaatctgtctctggtggtgtctatttagcactttgctttggcatgaggaaagaggaatcctcccatgtcctgcacatgtactcggaatgaaggaccttccagacaaggtattgaagagatttaccaatttaatttcggcaacaaaactgctctggtctggtctgcctttagc

SEQ ID NO: 46371 - DNA, 2172 bp, Zea Mays
gcattattatatatggatcggattgcttgctctcagcagccacacagtattgctcatggctgcttgtgttccgacggtggatgcggaggaagcatgcgccctcctcagctcttccacacaccactatctggatgtcaggatgtgggaggattttgacaagggccatgtcgccggtgctcggaatgttccctactacctctccgtcactccgcatgggaaggagaagaatccccagtttgtggaacaggtttccgcgctctacgccaaggaccaaaacttgattgtgggttgccgctctggcatccggtccaaactcgccactgcagacctcgtcaacgcgggcttcaccaacgtgaggaacctacaaggcggatacctttccttgctccgaagcgcaaactagctagcttcctgcttatttgttcgcatgcttgtaataagtgatttatgccatttcccattggctccgtacatgggcggtgctacgattgttggtgcaggtggtcaaggacttttatttccaggcctatgggtggcgacctagtcatcggattgattgccactagagtgtctgtatttctttaattttaggctgtgtgattcttgatgagcagaggcaggaagaattttcataaacttgtattaatttgatacaatgcgtttgaaattaataaagtcttcctattccaaaaaaatatggatataactgattacagtctattcttccatcctatatcacacataagttgggcaattggatgtcctttgggaatattttttttatatcaatcaggacaatagcagacttatttttcccctcttccaaagttttggtaatagtatgggttcattcacaatctaatctagtttagtttggtatagcatcagcatgcaatgcatcatcaatcaagagaaataaaaagggagagggtttgattacctccttgaggtctcccttgcgagcagcaacatggagcgggttccagccacggttgtcagcgtcgtggcggctccggaggcggctcatgcactcctccatccctacttatacatccaaccaaacacatcctacatgaccacgggtgagagctagcccatgggctcagtcgagtaaagtggcaactggaggcctatgaaaggccatggatgggcttgcctcctatccctgcatccggacaaccttgtgcatagagatatcaatgagtacccgaaatccgtaaacccgacagattttatttgatatagagtctagcgtggaagcaatctcttacccacggatacgcaattaggcggaaacctctacccatcgggtaaagcaggtacggattcgggtgtgcagtacccatacccgcgtaccccgtcgggtgtgcagtacccatacccgcgtaccccgtcgggtgtgcagtacccatacccgcgtaccccgtgggtaagtgtcacaacaatatgccatgagccccacggtagtagctgcttctgcttgtgccggtcctaacgctcttgttggccagcagtatcccactaaatcacaaaaatgtgcagaaacatcagtgttaaagcttctaactgttaaaaaatgtaacattgactacagttgattgcttacaatctgcagctttattgtcttcacaccttgctcaacagtgcggattttctagcattgagggaggaaaaaacgtcatacatgagtaacaactagcaaggcatgcaagcaacggctgacactacagaaagaatcagctttgctttatctcatcgataaactaacgtacgaaatcaactccaatagtactgatctagctctctccagatatgaatcatcctgtaaagtaaatgataagaaagatctccacaaaaaaaaacggatgagcataacagcacctatcatgagggatgaagcccagcagaaaaatcaggaacacagctttttctaaataccattctttatcagatcaatcagcagccggacgcgtcaacgggcgacgaggaaaccctggccgtcgcggcagagcgccgccgccgggcagcctcctgggtcggcgaaggggaggcagtaccatgccgctcgcgaagtcgcggctgtctccggcgaaggggaggttcagacctgttccgctgcggcggcagcagttccttccccctttggattgtttggaattaggctcattagca

SEQ ID NO: 46372 - DNA, 2595 bp, Zea Mays
tgacatttggcaattggcccagcggcgttcattattagaattcggttcgttgctgccgagtgattttttcgacacttggcaaagaaaatctttaccgagtgccaaacagagtgttttttagaaatagacaaaaaaaaaattgaattttttgcgactctgagtttgatgagtgtttttagaaaaagcagagacaaattctggtagtggtcgagtctagtcgctttctatccatccatgatggtccgcacgctcatcttcatcttcttcgtaccacgtggagtagcccaataatctgccttgcatacaaccttttatttgctattttttttttcttcttctcccatttgtatataccaccacctaaaaatgaaacatacaattatgtatcagttcatggttgcacgaattataattatctgtccgttggtcaagggaggaacagaaaagggataaactagctatagctagtgtgtagtgtaggcaggcatcggatgtgtcgccgcatcagcagcgtggctatccattccatccacacccacaatattattccatcccatccacatctacctcctgcattattatatatggatcggattgcttgctctcagcagccacacagtattgctcatggctgcttgtgttccgacggtggatgcggaggaagcatgcgccctcctcagctcttccacacaccactatctggatgtcaggatgtgggaggattttgacaagggccatgtcgccggtgctcggaatgttccctactacctctccgtcactccgcatgggaaggagaagaatccccagtttgtggaacaggtttccgcgctctacgccaaggaccaaaacttgattggttgccgctctggcatccggtccaaactcgccactgcagacctcgtcaacgcgggcttcaccaacgtgaggaacctacaaggcggatacctttccttgctccgaagcgcaaactagctagcttcctgcttatttgttcgcatgcttgtaataagcaataagtgagtcagaggaagctagcgtcaactcacagccgcaagcccctttggttcgacgctccagtagttcatccatgattttaacatgcccaccctgagcagccagatggagtggggtagggtagcaacaagagaaacaaaaagagaacattaaaggttaatatatatcctaggacatatcattctaaaggcccagtatgaatatcattctggaatctggagcaataatggtgtgtttggtttagctgtatatggtgtttatttgtgtagaatatacagtatatttattagttgaagcacgtgaaaccaaggggtaagataaaggaaaatagtcgtatataaccagtgacaaaagtacttgatgaggaactagaattgagaatcagataattcagaatgaattaagatagtaaaatttccaaggcagacatatgggcttaatatgagcacatatttttaaagagtgaagacagtcataccagcttaagatgggcagtatattttgatataaaatcgcacccagaccaagtagtagttcatcttggcccgagtgcaattttattgtatttggtgtttatttgtgtgtgatgcacgcgcacaattcatgtgaaccaacacgtgatgcaatgtgtatgttgtagtctgcccatacatgcgtgggcgaaatatcctagagggagtcgccatactgcacgaaaccattcatgagttgcataggaaaaggctaagtggggttattcttaaaatttattttgagaaggcatacaacaaggtcaaatggccattcttattccaaactcttcggatgaaaggatttgcgcccaagtggatttcttgggttagatccttcattatgggaggtagtgttgcggttaatgtcaacgacgacgtgggaaaattcttccaaacaaagaagggattacgccaagtcgatcccctgcctcccatcctgttcaacatcgtagcagatatgctagcgatcttgattaacagggctaaagaacatgggcaagtcagtggggtagtgcctcacttaattgatggaggcttatctattctgcaatatgcagatgatacgatcattttcatggaaaacgacttagagaaggctcgtaatatgaagttgttgttaggcgcttttgaacaaatctcaggtctcaaaataaatttccataagagtgaagtattatgctttggagatgcccaagattctttagagagttatttggaattgtttggctgcaaacatggggattttcctctaaaatatctagggctacctatacacttcaaaaagcttagaaactcagattggaagataatagaggaacgtgtggaaaaaagactagccagttggaaagggaaacacctttcaattggaggtagactgacattgattaactcggtgttcaacagccttccgttatacatgatgtcttttttcgctattcctaaaggtgttcttagaaaacttgactattttcgctctcggttcttttggcaaggagataagagcaagaagaaataccgccttgctagatggactatcttatgtcagcccaaagaccaaggtggccttggg

SEQ ID NO: 46373 - DNA, 543 bp, Zea Mays
aggacaatcgcccgtttaaggtctcggatacaatatttgaaggaaggggatgcaaatacaagttttttccatatgcaggcttgctttagaaaaaagagaaactttatttctcatttggaggatgagggcgggactgtgactaatcatgaccagatgcaggagctgttggataatttcttttcagatcttttggggactgaaatccagagacctttcactcttaatttgctaaattgccacagggatccagttgacctaagcgatttagaatctcctttctccgaaagggaggttcaggatacgattgcaagccttcccaatgataaagcacctggtcctgatggtttccctgggaggttttacaaatctgcttggcacatcattaagacagatattatggctgtgctggactttcttcgttttggaaatgctcacagtttggggctgctgaattcagcatatcttgtgcttatccccaaaaaacggatgccttgtcagccagggattttcggcctattagcctaattcacagcttcgctaaat

SEQ ID NO: 46374 - DNA, 369 bp, Zea Mays
ggttgagtcattaaatagcagaaatccgtcaatttctacatcttgagtcatatggacacatttatctttctacacacgtaatcttaatgatactcagattctctacgctagattctctcagaaaagcaggtaaaaaaagctgaaccaaacagtataatatgtgtcacgtcatgcggtgccggctatcatgaagctaatccacggaccggacggcctttcatcagaagttgaacaagcgcatctgatctcccggttgccacgctggacgatgatctgcctctttcttcctgtatgtaatgtaatcaccaccccaactcagcaagcgactccaaccttttcagtatacatacatgcatacgtaccctttcg

SEQ ID NO: 46375 - DNA, 375 bp, Zea Mays
acatcaattgagatgtccaaaaaaatagctcagaatgccctgagtttaagaaggtcatcagtaaccccaatatcacctgaatcagtgtctgtcaggaaatatttatctttgaaagactttgcatggtcactaactacgaaatgaaggctggtgttcagagcttctgaagcgattgttgttgagtatgtaaccccaaggttggaactattcgattcatctactgaactattttctgctgccacatcacccccacgccagtgttgacggacgtgatggcatggcagaatcattacctttatcctgaggtggcacctgacgagccattgtgttggagcctggaggattccaaacatataagtgacaccacagcatgaa

SEQ ID NO: 46376 - DNA, 755 bp, Zea Mays
gaagccgtgagacagacagaagcccagaacttaaacctggaagcctggaggatggaacgggtactagcttgctagggttcgtgtccggcggcggcgactgcagctggaacgccggcggcgcagctcagtggatgctcccatcgaccattcccaggttgtagtcttgtgatcttgtccttggaggtacacacaaagactggtagacacagacgacctctgccgatggctggtgccccaaaagctcgacttgtatataattgcaagttatagattatattgcatacaggtggtcgtgtacttgatccattttgtactcgccttgaccctaccatggtagaagcactggtctgcaccaaagattggatagctggagcaagaaaaggttatatagtagtaccttatatttatttacaatttaattagtcattagttgtgatcaatttgtaatattgtgaacttgtgatctttgtgatcaacctgttatattgtgaacttgtgatctttgtgttcaacttgttatactgtgaattgtgaatttgtggtctttgtgatatttgtaaactttgttgtattgtgaacttgttatattgagatattttcatatttatatggttaccgattgtaattaaggttccgaccggtaccgatgtatttttcgtaccgaactttcgattccgatgtttccgaaataccgatatcgtttccatttccgaagttaccgtttccgatttcgtttccgataaaaaatatgaaaa

SEQ ID NO: 46377 - DNA, 2454 bp, Zea Mays
gcctgcccactgctcagtccactgcccagcacggatctcatctcaccagctgcccgcgcatccaattcctctcgctggacggctgcagcacatcatcaggtgagaccgtgagagggaatgggatcaacaacaatgtcccctccatcttttcccgtcgtcctcctgctcctcctcctcgccaccatagccgcagccgccggaagcaacatggatgaggaggtggtggacgacctccagtatcttattgacaactccgacgacatccccaccaacgatcccgacgggtggcctgagggagactacgacgacgacgaccttctcttccaagatcaggaccaggacctcacaggccaccagccggagatcgacgagacccacgtcgtggtcctcgccgccgcaaacttttcctccttcctcgcctccagccaccatgttatggttgagttctacgcaccttggtgtggccactgccaggagctcgccccggattacgccgccgccgccgcgcatctcgccgctcaccaccaccaggcccacctcgcccttgccaaggtcgacgccaccgaggaaaccgacctcgcccagaagtacgacgtccagggcttccccaccatcctcttcttcatcgatggcgtccccagaggctataacggagccaggaccaaggaagccatcgtcgactggatcaacaagaagctcggcccagccgtgcaaaatgtcaccagcgtcgacgaggcccagagcatactcaccggagatgacaaagccgtccttgccttcctcgacacactatccggtgctcacagtgatgagcttgctgctgcttcgaggctggaagatagcatcaacttttatcagacttcgactcctgatgttgctaagcttttccatatcgatgcagcagcgaagcgtccatccgtagtgctgctgaagaaagaggaggagaagttgaccttctatgatggggagtttaaagcatcagccattgctggttttgtgtctgctaacaagcttcctttggtgaccacactaactcaagaaacttccccttctatttttggcaatccaatcaagaagcagattttactatttgctgttgcaagcgagtccaccaaatttctgcccatctttaaggaagcagcaaaaccatttaagggaaagttattatttgtctttgtggaacgagacagtgaggaagttggtgaaccagttgccgactactttggtattactggacaagagaccacagttcttgcttacactggtaatgaagatgctaggaaattttttcttgatggtgaggtgtcacttgaagctataaaggacttcgctgaaggtttcttggaagacaagcttacaccattctacaaatcggaaccagtgcctgaatctatatatgcaccatggtgtggtcattgtcaatcgctggaacctacttacaacaatctagccaagcatctacgtagtgttgactcccttgtggtagccaaaatggatggtactaccaatgagcatccacgtgcaaagtctgacggatacccgacgattctcttctatccagctgggaagaaaagctttgagccaatcacttttgagggggagcggacagtggtagatctgtacaagttcatcaagaaacatgctagcatccctttcaagttgaagcgccaggagtcgagaaccgagagcactcgggcggagggtgtgaagagctctggtacgaactcaaaggacgaactgtaaagagctcagggttggatgtgtgttggagtggatcagggtgaaagtttccatctcaatacaagtagatcgatcttggtggatgcgagtgcagtgttggcctgagggaggagcagcagagatgagtgcttactgcttagagagaggaatgaaatcagcaactaatcaaataaaatcaaattccattattccttttatgcgtctgttttgctgtctttactttctttcatcagtatacaatacatggagactggatgtatagctggagtgactctacgcagggctaccatgcagatgcggcacaccgcctcctcggccgcgatgtcctcttgctcttggtcttcctggtcgaccatcctaccagaggtgatgatgaagaacagaccagcgaaggtgacacgttcactacgaagaagcaacaggagggagtagctgtccagacacggccacgtcgacagaagcggaacaacgtgagagtggagtgtatatatgggcctaaatgggtcgtttaactgggccgtggagcttatatgcttccctatctctggaaggagggtatcgagaaaccagtaaacaaacactacggcagctatagccgcccccttccctatcttcttccgcacgccgatctcccctgctctcctatccctatcttccatggagcgctaacaatctggtatcagaggtcagacaagttggatcccatcagcaact

SEQ ID NO: 46378 - DNA, 2429 bp, Zea Mays
gcctgcccactgctcagtccactgcccagcacggatctcatctcaccagctgcccgcgcatccaattcctctcgctggacggctgcagcacatcatcaggtgagaccgtgagagggaatgggatcaacaacaatgtcccctccatcttttcccgtcgtcctcctgctcctcctcctcgccaccatagccgcagccgccggaagcaacatggatgaggaggtggtggacgacctccagtatcttattgacaactccgacgacatccccaccaacgatcccgacgggtggcctgagggagactacgacgacgacgaccttctcttccaagatcaggaccaggacctcacaggccaccagccggagatcgacgagacccacgtcgtggtcctcgccgccgcaaacttttcctccttcctcgcctccagccaccatgttatggttgagttctacgcaccttggtgtggccactgccaggagctcgccccggattacgccgccgccgccgcgcatctcgccgctcaccaccaccaggcccacctcgcccttgccaaggtcgacgccaccgaggaaaccgacctcgcccagaagtacgacgtccagggcttccccaccatcctcttcttcatcgatggcgtccccagaggctataacggagccaggaccaaggaagccatcgtcgactggatcaacaagaagctcggcccagccgtgcaaaatgtcaccagcgtcgacgaggcccagagcatactcaccggagatgacaaagccgtccttgccttcctcgacacactatcccagcgaagcgtccatccgtagtgctgctgaagaaagaggaggagaagttgaccttctatgatggggagtttaaagcatcagccattgctggttttgtgtctgctaacaagcttcctttggtgaccacactaactcaagaaacttccccttctatttttggcaatccaatcaagaagcagattttactatttgctgttgcaagcgagtccaccaaatttctgcccatctttaaggaagcagcaaaaccatttaagggaaagttattatttgtctttgtggaacgagacagtgaggaagttggtgaaccagttgccgactactttggtattactggacaagagaccacagttcttgcttacactggtaatgaagatgctaggaaattttttcttgatggtgaggtgtcacttgaagctataaaggacttcgctgaaggtttcttggaagacaagcttacaccattctacaaatcggaaccagtgcctgaatctaatgatggggatgtgaaaattgttgttgggaagaatctggatctaatagtttttgatgaaacaaaagatgtacttcttgagatatatgcaccatggtgtggtcattgtcaatcgctggaacctacttacaacaatctagccaagcatctacgtagtgttgactcccttgtggtagccaaaatggatggtactaccaatgagcatccacgtgcaaagtctgacggatacccgacgattctcttctatccagctgggaagaaaagctttgagccaatcacttttgagggggagcggacagtggtagatctgtacaagttcatcaagaaacatgctagcatccctttcaagttgaagcgccaggagtcgagaaccgagagcactcgggcggagggtgtgaagagctctggtacgaactcaaaggacgaactgtaaagagctcagggttggatgtgtgttggagtggatcagggtgaaagtttccatctcaatacaagtagatcgatcttggtggatgcgagtgcagtgttggcctgagggaggagcagcagagatgagtgcttactgcttagagagaggaatgaaatcagcaactaatcaaataaaatcaaattccattattccttttatgcgtctgttttgctgtctttactttctttcatcagtatacaatacatggagactggatgtatagctggagtgactctacgcagggctaccatgcagatgcggcacaccgcctcctcggccgcgatgtcctcttgctcttggtcttcctggtcgaccatcctaccagaggtgatgatgaagaacagaccagcgaaggtgacacgttcactacgaagaagcaacaggagggagtagctgtccagacacggccacgtcgacagaagcggaacaacgtgagagtggagtgtatatatgggcctaaatgggtcgtttaactgggccgtggagcttatatgcttccctatctctggaaggagggtatcgagaaaccagtaaacaaacactacggcagctatagccgcccccttccctatcttcttccgcacgccgatctcccctgctctcctatccctatcttccatggagcgctaacaatctggtatcagaggtcagacaagttggatcccatcagcaact

SEQ ID NO: 46379 - DNA, 1772 bp, Zea Mays
gactgatatactcggacgccgccggagaagatggcctgcccactgctcagtccactgcccagcacggatctcatctcaccagctgcccgcgcatccaattcctctcgctggacggctgcagcacatcatcaggtgagaccgtgagagggaatgggatcaacaacaatgtcccctccatcttttcccgtcgtcctcctgctcctcctcctcgccaccatagccgcagccgccggaagcaacatggatgaggaggtggtggacgacctccagtatcttattgacaactccgacgacatccccaccaacgatcccgacgggtggcctgagggagactacgacgacgacgaccttctcttccaagatcaggaccaggacctcacaggccaccagccggagatcgacgagacccacgtcgtggtcctcgccgccgcaaacttttcctccttcctcgcctccagccaccatgttatggttgagttctacgcaccttggtgtggccactgccaggagctcgccccggattacgccgccgccgccgcgcatctcgccgctcaccaccaccaggcccacctcgcccttgccaaggtcgacgccaccgaggaaaccgacctcgcccagaagtacgacgtccagggcttccccaccatcctcttcttcatcgatggcgtccccagaggctataacggagccaggaccaaggaagccatcgtcgactggatcaacaagaagctcggcccagccgtgcaaaatgtcaccagcgtcgacgaggcccagagcatactcaccggagatgacaaagccgtccttgccttcctcgacacactatccggtgctcacagtgatgagcttgctgctgcttcgaggctggaagatagcatcaacttttatcagacttcgactcctgatgttgctaagcttttccatatcgatgcagcagcgaagcgtccatccgtagtgctgctgaagaaagaggaggagaagttgaccttctatgatggggagtttaaagcatcagccattgctggttttgtgtctgctaacaagcttcctttggtgaccacactaactcaagaaacttccccttctatttttggcaatccaatcaagaagcagattttactatttgctgttgcaagcgagtccaccaaatttctgcccatctttaaggaagcagcaaaaccatttaagggaaagttattatttgtctttgtggaacgagacagtgaggaagttggtgaaccagttgccgactactttggtattactggacaagagaccacagttcttgcttacactggtaatgaagatgctaggaaattttttcttgatggtgaggtgtcacttgaagctataaaggacttcgctgaaggtttcttggaagacaagcttacaccattctacaaatcggaaccagtgcctgaatctaatgatggggatgtgaaaattgttgttgggaagaatctggatctaatagtttttgatgaaacaaaagatgtacttcttgagatatatgcaccatggtgtggtcattgtcaatcgctggaacctacttacaacaatctagccaagcatctacgtagtgttgactcccttgtggtagccaaaatggatggtactaccaatgagcatccacgtgcaaagttgcattgtcttatgatggacaaaagaatatggatatgttcctggtctgctgctgtatgcatgctacagtgtatttacttccaacctctgtgccgtggtagtatggtactacatgcaaatcagtacttttg

SEQ ID NO: 46380 - DNA, 738 bp, Zea Mays
tgaaagtagatcacaacagcaaaagtgggtgctcacagtgatgagcttgctgctgcttcgaggctggaagatagcatcaacttttatcagacttcgactcctgatgttgctaagcttttccatatcgatgcagcagcgaagcgtccatccgtagtgctgctgaagaaagaggaggagaagttgaccttctatgatggggagtttaaagcatcagccattgctggttttgtgtctgctaacaagcttcctttggtgaccacactaactcaagaaacttccccttctatttttggcaatccaatcaagaagcagattttactatttgctgttgcaagcgagtccaccaaatttctgcccatctttaaggaagcagcaaaaccatttaagggaaagttattatttgtctttgtggaacgagacagtgaggaagttggtgaaccagttgccgactactttggtattactggacaagagaccacagttcttgcttacactggtaatgaagatgctaggaaattttttcttgatggtgaggtgtcacttgaagctataaaggacttcgctgaaggtttcttggaagacaagcttacaccattctacaaatcggaaccagtgcctgaatctaatgatggggatgtgaaaattgttgttgggaagaatctggatctaatagtttttgatgaaacaaaagatgtacttcttgaggggcaatggtgcaaaatttcaggaacagcaggg

SEQ ID NO: 46381 - DNA, 189 bp, Zea Mays
caaaactgcttcagactgcaaaacccagtagttccatatggatttagggttaggtgatttaatcaagtatgtacgaggcgcagctgagtttggcactgaaagggaacctgatgcccgagtcttgtgttgcgccctagtaccatctccaagtatgcgatgaatccggatgctgttgccccaggtacaact

SEQ ID NO: 46382 - DNA, 819 bp, Zea Mays
atagtgggagaagatttttctgcagcagacactcactctccctgatctgcttcagtcgactgcaggcctgtctttatctccattcttctccaatttccacacaaggacagacctggcagtccacatcaaaattgttcaccatatatagggcttttactttgctatagcattccagagctaaacatgcatggatcaccagttagagtgccccaaagtggagctcgattccctaagaccatagattcagttaactgaaactgaactccctttacacagtctgacagatcgactttgagggcactttactccttattttgcacagcatcaagcccctctcttttaagcaaagttacacactaatagatgctcttcaactttgtcataagcagtatggcctaataccttaagaatcaagcaccagagagctccaaaattgagccaaacacacattttcagtgtgctaaaatgggctaagtctgaatccagatttaaaacattgaatctttggaccactgaatccaaatggttttagtggtattatccttaatcaaacttgtacaccaaagtatggacttctactttggtacagaacttataaaccagaactatgaggatcagcccttaaggagcatcccaaaactgcttcagactgcaaaacccattccatatggatttagggttaggtgatttaatcaagtatgtacgaggcgcagctgagtttggcactgaaagggaacctgatgcccgagtcttgtgttgcgccctagtaccatctccaagtatgcgatgaatccggatgctgttgccccaggtacaact

SEQ ID NO: 46383 - DNA, 5955 bp, Zea Mays
atgtcaacaccacacattgattgcttgctggatggactaaagccaatacaggttgctgctttgagaaataaccgtgaatttctggaacttcttttagcattaactatcccatttctaagtgtgtcaaattggagttttgatggaatcacaaaatacatgttgtctaaagctgctgtgggagagtcacaagtaaaagaagctacatctctgaattcagccagtttagccggaccgcaatctgctgggattttattttgcagtcacaagtaaaagaagctacatctctgaattcagccagtttagccggaccgcaatctgctggggtgtcatctagcgcaaaaggggattcgatggaagctaatttgagaggttatgatgcctataaaaatgaaaattacattggagcggtggatgcttacacacaggccattgacttggatcctagcaatgccacactctggtcaaacaagagcctttgctggttgttgcttgggatggctgaaactgccttggaggatgcaaagcaatctcgaacattgagaccagattcggggatagcttgctacagggaaggtgcggcattgcacgagctacagggatgttgttgaggagggaatgaagtcgcaagccaaacctaaccagtcttccactgcagccaggagtctcttcggtcaaatgtgatgtgatgatgatgtgacaaatgattgagtgttttgcaccagaatccaaaacaattgcaacacaatttgttttttagggaaagtgttaaactgtaatttgacaaattgtgatggttttgccacgtttgatgatgtaggtctggggcttcacgaccagtaggttaagcgcacaggacagatgcactgtttggtgctggtttagcatatctactaatagcgaaatatctctgcaccatgagctctcgaacctggccactccacgttccaaaatcaggacctttggatggatcttgggcttgatctcaaccgtcgtttcttttgccttccgcgccatcattccacaggccgcgagcgctcgcgtttttccttgagcgtcgttcttgccaatgctagctctccaattttttttatttttatatttaaattaattttgtttgtaaaaatattgtacgaattttaaaatttgtagaaatatggtcctgtcgtcctttgagaggatgattttttgtctttttttattgaacgaattgcaacggctagtagcagatacctgtgtacgttcgcaggaatgatgtgctgcacaggcaatgaggaggcctggaacagcccgaactggcggaggacccggtgcacaacgtgctcctccacgaagatgtcgaagacgagcggtttcctagtcggccaatagtccctgtcttaaaagcatagggacaaaaggccgtaaggagcacgttgttgcacgacgttgtcggcgtacagggtctagtggacctggtcatccttcaggtcgtcgagctcagcgacgaagctcaagtacgacctccgtgtctgccgatttttttagctcttttttcgaaaaaaattcatgtttagacccctggaagacttaattccgtttttggaccctttgctcggcgtcatagcctgtggcgccgaggtaacacgtctcggtgtcacaggctgtggcgccgaggtaccagccgcgctggcgagcgaggactgacgcggcgttcacgtggcacctagctacctgaggtcgcagtggagtcaagctactggtggcggaggtggtggaatcggatggcctcctatctacaaaaaaaacatagtagtctcagcaaaaatttcggcagcacctttctatacgatgaggtttctaaaacccgcagagaaatgaacatcacaatggctgtcatccacactttccaacacagaaaacagcatgatggctgacatacaaatgcgcagtaactaaatatagaaacaacaaaatagctacctacctgtatgtactaacaactatattcactaaatatattaagcaaaatgaaataaactaaagtaaactaagtaaatacttaactaaattacagctaaactaacaaatacacggccggtccacctcgtctcggtggtacaacacctggccgtacgcagaaaggtctatcgcgggctgtccaatctaaaaacctctcgtatgaccagagctgtactagtaaagggcagctagtgaagatggccaaaggatcggtctttatgcagccatcatagaggccccgatacgtcgcgcctagcacgacgttaccccagtactgggaaacctggctaagggaggcattcgcgatcgccctcgcgtagtggatcatgtccttcctcacggagttactgtgagtactagtgaacatgacccacccgaagagccacaacaggtacgcctccatatgtcgggccatcgtgtagctatcggtgtcgatcctcatgtactccgcctgagcacatgaagttagtaacaaaacatggtaatgtacagcgtgttaggttcacggaatggcaccgtgaggagtcatccaatcctgcgtccaaacctcgatagattgtttggtttgctaaagggaaccaacctgtctgccataagattacaccctcctccagtatattcacggcatccactcattcctctagaaataatcggacgaacacatgccggacgcactgatgctagacggggtgtgtactccccaaaccaaacagctcggtaaagattactgtaacggtagtcctaaatgggatgaatacttgatacctcgaactgtctttgtccgaacaaccatttttcatgactccgatcaagcacccacgtttttggcctcgggagccggtaaggtagtttttggtctcccgtgacctatagcacacatttttctagccgaacaaccatttttcaagactctagtggccgaaccatgggagctttacccttaaaaaattagaaagtttgtttgcttgggcattaagcttggtgttatcttgacttacatgttggaaaccaacaacatccttaatgccagggcgtctcccattataaagcatgctacgagcaaatttaaaattttcattttcaagctcatgctcggcaatcttagcatctaattttgctatatgatcattttggtttttaatcaaagcaagatgatcataaatagcatcaacatcaatatctctacatctagtgcaaatagtaacatgctcaacggtagatgtagagacagggcaagcattcaatttctcaatcttagcaattaaattcacattttcagatttaagacaaggaattgaatcattgcaagtttttagctcattagtcaaattcttgcatttttccttttcatgagctaaggccttttctagctaaacatatttatcatgttccttagtgagcaattcttcttgacattctaagacatcatccttttcattgatagagctcactaattcattgattttatcaatttgtttttgagaaaggtctttgaacaataaagttaaatcttcttcattatcactagaatcaccctcgtcatcggaagtagtatatttgggggtggttctaggtgttaccttcctcttggtctccttggccatgagacacttatggccgaggttggggaagagaagtcccttgttgacgacgatgttggcggcgtcctcgtcggaggagtcggtggagctctcgtcggagtcccactctcacaacatgtgcctcgccatccttcttcttgtggtagtatttcttcttctccatcttcttctttcccttcttgtcctcgtccctgtcactatcactagcaaatagacatttagcaatatagtgaccgggcttaccacatcggtagcaaaccctcttggtgcggggtttctagtccttccccttcctttgcttgaggatttgccgaaagctcttgatgataagagccatctcctcattgtcaagcttggaggcgtcaattgggatcctcttgcttggcgtgagttcctccttgtcttcggttgctttgaatgcaacgggttgtgcctcgggtgtggaggtggctccttgctccaagttcgcaatgtgtttggagtgtttggccataagttcaaagctcacaaaatgctttcgtggagtgatgttaggtgatatctcatcttttcactccaaatagaataatctacaccatcaaaatatggtggtttacctaaaggaacggaaatgagattggaacgtctagaaatacgagggtaacgaaaaggaattttgttactctttttgtgctcttggcgcttggagatcgactcggcgtcggatgtcgatggcgtggaggagtcggtctcgtaggcttcatcttctttttcttcttgccatctttcttgtgtgacttgatggagccggcggattcttctttcttttccttgtgcttgtcgccggatagcttaatctcccttgatgaaatcttggcttcatgcttctttcccgaagactcgggctttgccccggtgggtacctcgttcttggcgtgttcactcgacatcacttcgagttgttaaactctaatgaagtgccgggctcctataccaattgaaagtcgcctacagggggggtgaataggcgaagcctgaaaatactcgtcagctcgcttggctcgtggccggctctgctcggcttgtttcaattttgtaatgagctgagctagcatcccagctcggtttgttaacgagccagctcgttagctcgaacgagctagcatttgtcagcaaaataaagcctccactcatgttagatgaactaataagtgatgaactctgttaatttggtcttgaattcatgtggtatatgaaattgtgagtattattacgcattttagtgttaaattggtctataattaattaacaattgattatattgttatgtatatatgcatattatttttgttgttgtggctcgcgagctaaacgagccagctcgatctcacaaatgagccgagccgagctgattctctggctcggttccttaacgagccgagctgagccagctcgttaccttaacaagccagctcgagctcgaccgagccaaaccgagctagctcgatatccagccctagtcaaggttcatggcattctgagccaggtataggactttttccatttagcttcttcctttgccgatgctgtcaccaccatttatgaacaagcaacactgtttcgagttatgcagtttacctctttttgttttgttttttcatctatattttgtggctaattatattcatcttgtgcggatatggggacggaaagcctactgataatgcatcaagattctacaaatggttcgctgagggggaagagaaggaagtttgctaaaggatcttaaatattgcgtctttggacttgggaacacgcagtatgagcattttaataaggttgcaaagatggtgcatgagctgctacaagaacagggtgggaaacgccttgttcctgttggccttgccttggagacgatgatgagtgcatcgaggatttcaccgcatggtatgaaggctacaataatgcaatctggttgcattccttcccctggtagacattatgcaatctagcttgttgcttcaaacgccaaatccatgaatgagttctaattcttggtgtcgattggtcctttatgtggatactaaacagaggtatctttgtcctaccagccaggagtttgtttctggtccggattggggaaatgaatgtccttactaagtcattatccaacagtagatgatttgctaaatttttttttggctcagctacaaggcaggagaccttactagtagtatgttgaagtcagacaattgaagaactagtcttttgtgctatctcataggtcagatggtgatgagctcgcagatataagctagctacttgactcagctgttggaggcgcgcccttagacaccatcagggttagggaacatgc

SEQ ID NO: 46384 - DNA, 6138 bp, Zea Mays
atgtcaacaccacacattgattgcttgctggatggactaaagccaatacaggttgctgctttgagaaataaccgtgaatttctggaacttcttttagcattaactatcccatttctaagtgtgtcaaattggagttttgatggaatcacaaaatacatgttgtctaaagctgctgtgggagagtcacaagtaaaagaagctacatctctgaattcagccagtttagccggaccgcaatctgctgggtcacaagtaaaagaagctacatctctgaattcagccagtttagccggaccgcaatctgctggggtgtcatctagcgcaaaaggggattcgatggaagctaatttgagaggttatgatgcctataaaaatgaaaattacattggagcggtggatgcttacacacaggccattgacttggatcctagcaatgccacactctggtcaaacaagagcctttgctggttgttgcttgggatggctgaaactgccttggaggatgcaaagcaatctcgaacattgagaccagattcggggatagcttgctacagggaaggtgcggcattgcacgagctacagaggttttttgaagctgcaattgccttttatgaaggggctaatcttaaaccagagaaccaagaatatctcagcgccttcatgtagtatcatttcctgtccaaagaacatggcttccattagagtggacagggccatgctttgccatactttgatgctctactcattaatcctttcttttttccactatcaaacaatagggatgttgttgaggagggaatgaagtcgcaagccaaacctaaccagtcttccactgcagccaggagtctcttcggtcaaatgtgatgtgatgatgatgtgacaaatgattgagtgttttgcaccagaatccaaaacaattgcaacacaatttgttttttagggaaagtgttaaactgtaatttgacaaattgtgatggttttgccacgtttgatgatgtaggtctggggcttcacgaccagtaggttaagcgcacaggacagatgcactgtttggtgctggtttagcatatctactaatagcgaaatatctctgcaccatgagctctcgaacctggccactccacgttccaaaatcaggacctttggatggatcttgggcttgatctcaaccgtcgtttcttttgccttccgcgccatcattccacaggccgcgagcgctcgcgtttttccttgagcgtcgttcttgccaatgctagctctccaattttttttatttttatatttaaattaattttgtttgtaaaaatattgtacgaattttaaaatttgtagaaatatggtcctgtcgtcctttgagaggatgattttttgtctttttttattgaacgaattgcaacggctagtagcagatacctgtgtacgttcgcaggaatgatgtgctgcacaggcaatgaggaggcctggaacagcccgaactggcggaggacccggtgcacaacgtgctcctccacgaagatgtcgaagacgagcggtttcctagtcggccaatagtccctgtcttaaaagcatagggacaaaaggccgtaaggagcacgttgttgcacgacgttgtcggcgtacagggtctagtggacctggtcatccttcaggtcgtcgagctcagcgacgaagctcaagtacgacctccgtgtctgccgatttttttagctcttttttcgaaaaaaattcatgtttagacccctggaagacttaattccgtttttggaccctttgctcggcgtcatagcctgtggcgccgaggtaacacgtctcggtgtcacaggctgtggcgccgaggtaccagccgcgctggcgagcgaggactgacgcggcgttcacgtggcacctagctacctgaggtcgcagtggagtcaagctactggtggcggaggtggtggaatcggatggcctcctatctacaaaaaaaacatagtagtctcagcaaaaatttcggcagcacctttctatacgatgaggtttctaaaacccgcagagaaatgaacatcacaatggctgtcatccacactttccaacacagaaaacagcatgatggctgacatacaaatgcgcagtaactaaatatagaaacaacaaaatagctacctacctgtatgtactaacaactatattcactaaatatattaagcaaaatgaaataaactaaagtaaactaagtaaatacttaactaaattacagctaaactaacaaatacacggccggtccacctcgtctcggtggtacaacacctggccgtacgcagaaaggtctatcgcgggctgtccaatctaaaaacctctcgtatgaccagagctgtactagtaaagggcagctagtgaagatggccaaaggatcggtctttatgcagccatcatagaggccccgatacgtcgcgcctagcacgacgttaccccagtactgggaaacctggctaagggaggcattcgcgatcgccctcgcgtagtggatcatgtccttcctcacggagttactgtgagtactagtgaacatgacccacccgaagagccacaacaggtacgcctccatatgtcgggccatcgtgtagctatcggtgtcgatcctcatgtactccgcctgagcacatgaagttagtaacaaaacatggtaatgtacagcgtgttaggttcacggaatggcaccgtgaggagtcatccaatcctgcgtccaaacctcgatagattgtttggtttgctaaagggaaccaacctgtctgccataagattacaccctcctccagtatattcacggcatccactcattcctctagaaataatcggacgaacacatgccggacgcactgatgctagacggggtgtgtactccccaaaccaaacagctcggtaaagattactgtaacggtagtcctaaatgggatgaatacttgatacctcgaactgtctttgtccgaacaaccatttttcatgactccgatcaagcacccacgtttttggcctcgggagccggtaaggtagtttttggtctcccgtgacctatagcacacatttttctagccgaacaaccatttttcaagactctagtggccgaaccatgggagctttacccttaaaaaattagaaagtttgtttgcttgggcattaagcttggtgttatcttgacttacatgttggaaaccaacaacatccttaatgccagggcgtctcccattataaagcatgctacgagcaaatttaaaattttcattttcaagctcatgctcggcaatcttagcatctaattttgctatatgatcattttggtttttaatcaaagcaagatgatcataaatagcatcaacatcaatatctctacatctagtgcaaatagtaacatgctcaacggtagatgtagagacagggcaagcattcaatttctcaatcttagcaattaaattcacattttcagatttaagacaaggaattgaatcattgcaagtttttagctcattagtcaaattcttgcatttttccttttcatgagctaaggccttttctagctaaacatatttatcatgttccttagtgagcaattcttcttgacattctaagacatcatccttttcattgatagagctcactaattcattgattttatcaatttgtttttgagaaaggtctttgaacaataaagttaaatcttcttcattatcactagaatcaccctcgtcatcggaagtagtatatttgggggtggttctaggtgttaccttcctcttggtctccttggccatgagacacttatggccgaggttggggaagagaagtcccttgttgacgacgatgttggcggcgtcctcgtcggaggagtcggtggagctctcgtcggagtcccactctcacaacatgtgcctcgccatccttcttcttgtggtagtatttcttcttctccatcttcttctttcccttcttgtcctcgtccctgtcactatcactagcaaatagacatttagcaatatagtgaccgggcttaccacatcggtagcaaaccctcttggtgcggggtttctagtccttccccttcctttgcttgaggatttgccgaaagctcttgatgataagagccatctcctcattgtcaagcttggaggcgtcaattgggatcctcttgcttggcgtgagttcctccttgtcttcggttgctttgaatgcaacgggttgtgcctcgggtgtggaggtggctccttgctccaagttcgcaatgtgtttggagtgtttggccataagttcaaagctcacaaaatgctttcgtggagtgatgttaggtgatatctcatcttttcactccaaatagaataatctacaccatcaaaatatggtggtttacctaaaggaacggaaatgagattggaacgtctagaaatacgagggtaacgaaaaggaattttgttactctttttgtgctcttggcgcttggagatcgactcggcgtcggatgtcgatggcgtggaggagtcggtctcgtaggcttcatcttctttttcttcttgccatctttcttgtgtgacttgatggagccggcggattcttctttcttttccttgtgcttgtcgccggatagcttaatctcccttgatgaaatcttggcttcatgcttctttcccgaagactcgggctttgccccggtgggtacctcgttcttggcgtgttcactcgacatcacttcgagttgttaaactctaatgaagtgccgggctcctataccaattgaaagtcgcctacagggggggtgaataggcgaagcctgaaaatactcgtcagctcgcttggctcgtggccggctctgctcggcttgtttcaattttgtaatgagctgagctagcatcccagctcggtttgttaacgagccagctcgttagctcgaacgagctagcatttgtcagcaaaataaagcctccactcatgttagatgaactaataagtgatgaactctgttaatttggtcttgaattcatgtggtatatgaaattgtgagtattattacgcattttagtgttaaattggtctataattaattaacaattgattatattgttatgtatatatgcatattatttttgttgttgtggctcgcgagctaaacgagccagctcgatctcacaaatgagccgagccgagctgattctctggctcggttccttaacgagccgagctgagccagctcgttaccttaacaagccagctcgagctcgaccgagccaaaccgagctagctcgatatccagccctagtcaaggttcatggcattctgagccaggtataggactttttccatttagcttcttcctttgccgatgctgtcaccaccatttatgaacaagcaacactgtttcgagttatgcagtttacctctttttgttttgttttttcatctatattttgtggctaattatattcatcttgtgcggatatggggacggaaagcctactgataatgcatcaagattctacaaatggttcgctgagggggaagagaaggaagtttgctaaaggatcttaaatattgcgtctttggacttgggaacacgcagtatgagcattttaataaggttgcaaagatggtgcatgagctgctacaagaacagggtgggaaacgccttgttcctgttggccttgccttggagacgatgatgagtgcatcgaggatttcaccgcatggtatgaaggctacaataatgcaatctggttgcattccttcccctggtagacattatgcaatctagcttgttgcttcaaacgccaaatccatgaatgagttctaattcttggtgtcgattggtcctttatgtggatactaaacagaggtatctttgtcctaccagccaggagtttgtttctggtccggattggggaaatgaatgtccttactaagtcattatccaacagtagatgatttgctaaatttttttttggctcagctacaaggcaggagaccttactagtagtatgttgaagtcagacaattgaagaactagtcttttgtgctatctcataggtcagatggtgatgagctcgcagatataagctagctacttgactcagctgttggaggcgcgcccttagacaccatcagggttagggaacatgc

SEQ ID NO: 46385 - DNA, 3306 bp, Zea Mays
atgtcaacaccacacattgattgcttgctggatggactaaagccaatacaggttgctgctttgagaaataaccgtgaatttctggaacttcttttagcattaactatcccatttctaagtgtgtcaaattggagttttgatggaatcacaaaatacatgttgtctaaagctgctgtgggagagtcacaagtaaaagaagctacatctctgaattcagccagtttagccggaccgcaatctgctgggtcacaagtaaaagaagctacatctctgaattcagccagtttagccggaccgcaatctgctggggtgtcatctagcgcaaaaggggattcgatggaagctaatttgagaggttatgatgcctataaaaatgaaaattacattggagcggtggatgcttacacacaggccattgacttggatcctagcaatgccacactctggtcaaacaagagcctttgctggttgttgcttgggatggctgaaactgccttggaggatgcaaagcaatctcgaacattgagaccagattcggggatagcttgctacagggaaggtgcggcattgcacgagctacagaggttttttgaagctgcaattgccttttatgaaggggctaatcttaaaccagagaaccaagaatatctcagcgccttcatgtagtatcatttcctgtccaaagaacatggcttccattagagtggacagggccatgctttgccatactttgatgctctactcattaatcctttcttttttccactatcaaacaatagggatgttgttgaggagggaatgaagtcgcaagccaaacctaaccagtcttccactgcagccaggagtctcttcggtcaaatgtgatgtgatgatgatgtgacaaatgattgagtgttttgcaccagaatccaaaacaattgcaacacaatttgttttttagggaaagtgttaaactgtaatttgacaaattgtgatggttttgccacgtttgatgatgtaggtctggggcttcacgaccagtaggttaagcgcacaggacagatgcactgtttggtgctggtttagcatatctactaatagcgaaatatctctgcaccatgagctctcgaacctggccactccacgttccaaaatcaggacctttggatggatcttgggcttgatctcaaccgtcgtttcttttgccttccgcgccatcattccacaggccgcgagcgctcgcgtttttccttgagcgtcgttcttgccaatgctagctctccaattttttttatttttatatttaaattaattttgtttgtaaaaatattgtacgaattttaaaatttgtagaaatatggtcctgtcgtcctttgagaggatgattttttgtctttttttattgaacgaattgcaacggctagtagcagatacctgtgtacgttcgcaggaatgatgtgctgcacaggcaatgaggaggcctggaacagcccgaactggcggaggacccggtgcacaacgtgctcctccacgaagatgtcgaagacgagcggtttcctagtcggccaatagtccctgtcttaaaagcatagggacaaaaggccgtaaggagcacgttgttgcacgacgttgtcggcgtacagggtctagtggacctggtcatccttcaggtcgtcgagctcagcgacgaagctcaagtacgacctccgtgtctgccgatttttttagctcttttttcgaaaaaaattcatgtttagacccctggaagacttaattccgtttttggaccctttgctcggcgtcatagcctgtggcgccgaggtaacacgtctcggtgtcacaggctgtggcgccgaggtaccagccgcgctggcgagcgaggactgacgcggcgttcacgtggcacctagctacctgaggtcgcagtggagtcaagctactggtggcggaggtggtggaatcggatggcctcctatctacaaaaaaaacatagtagtctcagcaaaaatttcggcagcacctttctatacgatgaggtttctaaaacccgcagagaaatgaacatcacaatggctgtcatccacactttccaacacagaaaacagcatgatggctgacatacaaatgcgcagtaactaaatatagaaacaacaaaatagctacctacctgtatgtactaacaactatattcactaaatatattaagcaaaatgaaataaactaaagtaaactaagtaaatacttaactaaattacagctaaactaacaaatacacggccggtccacctcgtctcggtggtacaacacctggccgtacgcagaaaggtctatcgcgggctgtccaatctaaaaacctctcgtatgaccagagctgtactagtaaagggcagctagtgaagatggccaaaggatcggtctttatgcagccatcatagaggccccgatacgtcgcgcctagcacgacgttaccccagtactgggaaacctggctaagggaggcattcgcgatcgccctcgcgtagtggatcatgtccttcctcacggagttactgtgagtactagtgaacatgacccacccgaagagccacaacaggtacgcctccatatgtcgggccatcgtgtagctatcggtgtcgatcctcatgtactccgcctgagcacatgaagttagtaacaaaacatggtaatgtacagcgtgttaggttcacggaatggcaccgtgaggagtcatccaatcctgcgtccaaacctcgatagattgtttggtttgctaaagggaaccaacctgtctgccataagattacaccctcctccagtatattcacggcatccactcattcctctagaaataatcggacgaacacatgccggacgcactgatgctagacggggtgtgtactccccaaaccaaacagctcggtaaagattactgtaacggtagtcctaaatgggatgaatacttgatacctcgaactgtctttgtccgaacaaccatttttcatgactccgatcaagcacccacgtttttggcctcgggagccgggggaagagaaggaagtttgctaaaggatcttaaatattgcgtctttggacttgggaacacgcagtatgagcattttaataaggttgcaaagatggtgcatgagctgctacaagaacagggtgggaaacgccttgttcctgttggccttgccttggagacgatgatgagtgcatcgaggatttcaccgcatggtcagatggtgatgagctcgcagatataagctagctacttgactcagctgttggaggcgcgcccttagacaccatcagggttagggaacatgc

SEQ ID NO: 46386 - DNA, 909 bp, Zea Mays
atgtcaacaccacacattgattgcttgctggatggactaaagccaatacaggttgctgctttgagaaataaccgtgaatttctggaacttcttttagcattaactatcccatttctaagtgtgtcaaattggagttttgatggaatcacaaaatacatgttgtctaaagctgctgtgggagagtcacaagtaaaagaagctacatctctgaattcagccagtttagccggaccgcaatctgctgggtcacaagtaaaagaagctacatctctgaattcagccagtttagccggaccgcaatctgctggggtgtcatctagcgcaaaaggggattcgatggaagctaatttgagaggttatgatgcctataaaaatgaaaattacattggagcggtggatgcttacacacaggccattgacttggatcctagcaatgccacactctggtcaaacaagagcctttgctggttgttgcttgggatggctgaaactgccttggaggatgcaaagcaatctcgaacattgagaccagattcggggatagcttgctacagggaaggtgcggcattgcacgagctacagcctactgataatgcatcaagattctacaaatggttcgctgagggggaagagaaggaagtttgctaaaggatcttaaatattgcgtctttggacttgggaacacgcagtatgagcattttaataaggttgcaaagatggtgcatgagctgctacaagaacagggtgggaaacgccttgttcctgttggccttgccttggagacgatgatgagtgcatcgaggatttcaccgcatggtcagatggtgatgagctcgcagatataagctagctacttgactcagctgttggaggcgcgcccttagacaccatcagggttagggaacatgc

SEQ ID NO: 46387 - DNA, 3442 bp, Zea Mays
agctctttgtttccacaccatgtcaacaccacacattgattgcttgctggatggactaaagccaatacaggttgctgctttgagaaataaccgtgaatttctggaacttcttttagcattaactatcccatttctaagtgtgtcaaattggagttttgatggaatcacaaaatacatgttgtctaaagctgctgtgggagagtcacaagtaaaagaagctacatctctgaattcagccagtttagccggaccgcaatctgctgggtcacaagtaaaagaagctacatctctgaattcagccagtttagccggaccgcaatctgctggggtgtcatctagcgcaaaaggggattcgatggaagctaatttgagaggttatgatgcctataaaaatgaaaattacattggagcggtggatgcttacacacaggccattgacttggatcctagcaatgccacactctggtcaaacaagagcctttgctggttgttgcttgggatggctgaaactgccttggaggatgcaaagcaatctcgaacattgagaccagattcggggatagcttgctacagggaagggatgttgttgaggagggaatgaagtcgcaagccaaacctaaccagtcttccactgcagccaggagtctcttcggtcaaatgtgatgtgatgatgatgtgacaaatgattgagtgttttgcaccagaatccaaaacaattgcaacacaatttgttttttagggaaagtgttaaactgtaatttgacaaattgtgatggttttgccacgtttgatgatgtaggtctggggcttcacgaccagtaggttaagcgcacaggacagatgcactgtttggtgctggtttagcatatctactaatagcgaaatatctctgcaccatgagctctcgaacctggccactccacgttccaaaatcaggacctttggatggatcttgggcttgatctcaaccgtcgtttcttttgccttccgcgccatcattccacaggccgcgagcgctcgcgtttttccttgagcgtcgttcttgccaatgctagctctccaattttttttatttttatatttaaattaattttgtttgtaaaaatattgtacgaattttaaaatttgtagaaatatggtcctgtcgtcctttgagaggatgattttttgtctttttttattgaacgaattgcaacggctagtagcagatacctgtgtacgttcgcaggaatgatgtgctgcacaggcaatgaggaggcctggaacagcccgaactggcggaggacccggtgcacaacgtgctcctccacgaagatgtcgaagacgagcggtttcctagtcggccaatagtccctgtcttaaaagcatagggacaaaaggccgtaaggagcacgttgttgcacgacgttgtcggcgtacagggtctagtggacctggtcatccttcaggtcgtcgagctcagcgacgaagctcaagtacgacctccgtgtctgccgatttttttagctcttttttcgaaaaaaattcatgtttagacccctggaagacttaattccgtttttggaccctttgctcggcgtcatagcctgtggcgccgaggtaacacgtctcggtgtcacaggctgtggcgccgaggtaccagccgcgctggcgagcgaggactgacgcggcgttcacgtggcacctagctacctgaggtcgcagtggagtcaagctactggtggcggaggtggtggaatcggatggcctcctatctacaaaaaaaacatagtagtctcagcaaaaatttcggcagcacctttctatacgatgaggtttctaaaacccgcagagaaatgaacatcacaatggctgtcatccacactttccaacacagaaaacagcatgatggctgacatacaaatgcgcagtaactaaatatagaaacaacaaaatagctacctacctgtatgtactaacaactatattcactaaatatattaagcaaaatgaaataaactaaagtaaactaagtaaatacttaactaaattacagctaaactaacaaatacacggccggtccacctcgtctcggtggtacaacacctggccgtacgcagaaaggtctatcgcgggctgtccaatctaaaaacctctcgtatgaccagagctgtactagtaaagggcagctagtgaagatggccaaaggatcggtctttatgcagccatcatagaggccccgatacgtcgcgcctagcacgacgttaccccagtactgggaaacctggctaagggaggcattcgcgatcgccctcgcgtagtggatcatgtccttcctcacggagttactgtgagtactagtgaacatgacccacccgaagagccacaacaggtacgcctccatatgtcgggccatcgtgtagctatcggtgtcgatcctcatgtactccgcctgagcacatgaagttagtaacaaaacatggtaatgtacagcgtgttaggttcacggaatggcaccgtgaggagtcatccaatcctgcgtccaaacctcgatagattgtttggtttgctaaagggaaccaacctgtctgccataagattacaccctcctccagtatattcacggcatccactcattcctctagaaataatcggacgaacacatgccggacgcactgatgctagacggggtgtgtactccccaaaccaaacagctcggtaaagattactgtaacggtagtcctaaatgggatgaatacttgatacctcgaactgtctttgtccgaacaaccatttttcatgactccgatcaagcacccacgtttttggcctcgggagccgggggaagagaaggaagtttgctaaaggatcttaaatattgcgtctttggacttgggaacacgcagtatgagcattttaataaggttgcaaagatggtgcatgagctgctacaagaacagggtgggaaacgccttgttcctgttggccttgccttggagacgatgatgagtgcatcgaggatttcaccgcatggtatgaaggctacaataatgcaatctggttgcattccttcccctggtagacattatgcaatctagcttgttgcttcaaacgccaaatccatgaatgagttctaattcttggtgtcgattggtcctttatgtggatactaaacagaggtatctttgtcctaccagccaggagtttgtttctggtccggattggggaaatgaatgtccttactaagtcattatccaacagtagatgatttgctaaatttttttttggctcagctacaaggcaggagaccttactagtagtatgttgaagtcagacaattgaagaactagtcttttgtgctatctcataggtcagatggtgatgagctcgcagatataagctagctacttgactcagctgttggaggcgcgcccttagacaccatcagggttagggaacatgc

SEQ ID NO: 46388 - DNA, 4955 bp, Zea Mays
atgtcaacaccacacattgattgcttgctggatggactaaagccaatacaggttgctgctttgagaaataaccgtgaatttctggaacttcttttagcattaactatcccatttctaagtgtgtcaaattggagttttgatggaatcacaaaatacatgttgtctaaagctgctgtgggagagtcacaagtaaaagaagctacatctctgaattcagccagtttagccggaccgcaatctgctgggtcacaagtaaaagaagctacatctctgaattcagccagtttagccggaccgcaatctgctggggtgtcatctagcgcaaaaggggattcgatggaagctaatttgagaggttatgatgcctataaaaatgaaaattacattggagcggtggatgcttacacacaggccattgacttggatcctagcaatgccacactctggtcaaacaagagcctttgctggttgttgcttgggatggctgaaactgccttggaggatgcaaagcaatctcgaacattgagaccagattcggggatagcttgctacagggaaggtgcggcattgcacgagctacagggatgttgttgaggagggaatgaagtcgcaagccaaacctaaccagtcttccactgcagccaggagtctcttcggtcaaatgtgatgtgatgatgatgtgacaaatgattgagtgttttgcaccagaatccaaaacaattgcaacacaatttgttttttagggaaagtgttaaactgtaatttgacaaattgtgatggttttgccacgtttgatgatgtaggtctggggcttcacgaccagtaggttaagcgcacaggacagatgcactgtttggtgctggtttagcatatctactaatagcgaaatatctctgcaccatgagctctcgaacctggccactccacgttccaaaatcaggacctttggatggatcttgggcttgatctcaaccgtcgtttcttttgccttccgcgccatcattccacaggccgcgagcgctcgcgtttttccttgagcgtcgttcttgccaatgctagctctccaattttttttatttttatatttaaattaattttgtttgtaaaaatattgtacgaattttaaaatttgtagaaatatggtcctgtcgtcctttgagaggatgattttttgtctttttttattgaacgaattgcaacggctagtagcagatacctgtgtacgttcgcaggaatgatgtgctgcacaggcaatgaggaggcctggaacagcccgaactggcggaggacccggtgcacaacgtgctcctccacgaagatgtcgaagacgagcggtttcctagtcggccaatagtccctgtcttaaaagcatagggacaaaaggccgtaaggagcacgttgttgcacgacgttgtcggcgtacagggtctagtggacctggtcatccttcaggtcgtcgagctcagcgacgaagctcaagtacgacctccgtgtctgccgatttttttagctcttttttcgaaaaaaattcatgtttagacccctggaagacttaattccgtttttggaccctttgctcggcgtcatagcctgtggcgccgaggtaacacgtctcggtgtcacaggctgtggcgccgaggtaccagccgcgctggcgagcgaggactgacgcggcgttcacgtggcacctagctacctgaggtcgcagtggagtcaagctactggtggcggaggtggtggaatcggatggcctcctatctacaaaaaaaacatagtagtctcagcaaaaatttcggcagcacctttctatacgatgaggtttctaaaacccgcagagaaatgaacatcacaatggctgtcatccacactttccaacacagaaaacagcatgatggctgacatacaaatgcgcagtaactaaatatagaaacaacaaaatagctacctacctgtatgtactaacaactatattcactaaatatattaagcaaaatgaaataaactaaagtaaactaagtaaatacttaactaaattacagctaaactaacaaatacacggccggtccacctcgtctcggtggtacaacacctggccgtacgcagaaaggtctatcgcgggctgtccaatctaaaaacctctcgtatgaccagagctgtactagtaaagggcagctagtgaagatggccaaaggatcggtctttatgcagccatcatagaggccccgatacgtcgcgcctagcacgacgttaccccagtactgggaaacctggctaagggaggcattcgcgatcgccctcgcgtagtggatcatgtccttcctcacggagttactgtgagtactagtgaacatgacccacccgaagagccacaacaggtacgcctccatatgtcgggccatcgtgtagctatcggtgtcgatcctcatgtactccgcctgagcacatgaagttagtaacaaaacatggtaatgtacagcgtgttaggttcacggaatggcaccgtgaggagtcatccaatcctgcgtccaaacctcgatagattgtttggtttgctaaagggaaccaacctgtctgccataagattacaccctcctccagtatattcacggcatccactcattcctctagaaataatcggacgaacacatgccggacgcactgatgctagacggggtgtgtactccccaaaccaaacagctcggtaaagattactgtaacggtagtcctaaatgggatgaatacttgatacctcgaactgtctttgtccgaacaaccatttttcatgactccgatcaagcacccacgtttttggcctcgggagccggtaaggtagtttttggtctcccgtgacctatagcacacatttttctagccgaacaaccatttttcaagactctagtggccgaaccatgggagctttacccttaaaaaattagaaagtttgtttgcttgggcattaagcttggtgttatcttgacttacatgttggaaaccaacaacatccttaatgccagggcgtctcccattataaagcatgctacgagcaaatttaaaattttcattttcaagctcatgctcggcaatcttagcatctaattttgctatatgatcattttggtttttaatcaaagcaagatgatcataaatagcatcaacatcaatatctctacatctagtgcaaatagtaacatgctcaacggtagatgtagagacagggcaagcattcaatttctcaatcttagcaattaaattcacattttcagatttaagacaaggaattgaatcattgcaagtttttagctcattagtcaaattcttgcatttttccttttcatgagctaaggccttttctagctaaacatatttatcatgttccttagtgagcaattcttcttgacattctaagacatcatccttttcattgatagagctcactaattcattgattttatcaatttgtttttgagaaaggtctttgaacaataaagttaaatcttcttcattatcactagaatcaccctcgtcatcggaagtagtatatttgggggtggttctaggtgttaccttcctcttggtctccttggccatgagacacttatggccgaggttggggaagagaagtcccttgttgacgacgatgttggcggcgtcctcgtcggaggagtcggtggagctctcgtcggagtcccactctcacaacatgtgcctcgccatccttcttcttgtggtagtatttcttcttctccatcttcttctttcccttcttgtcctcgtccctgtcactatcactagcaaatagacatttagcaatatagtgaccgggcttaccacatcggtagcaaaccctcttggtgcggggtttctagtccttccccttcctttgcttgaggatttgccgaaagctcttgatgataagagccatctcctcattgtcaagcttggaggcgtcaattgggatcctcttgcttggcgtgagttcctccttgtcttcggttgctttgaatgcaacgggttgtgcctcgggtgtggaggtggctccttgctccaagttcgcaatgtgtttggagtgtttggccataagttcaaagctcacaaaatgctttcgtggagtgatgttaggtgatatctcatcttttcactccaaatagaataatctacaccatcaaaatatggtggtttacctaaaggaacggaaatgagattggaacgtctagaaatacgagggtaacgaaaaggaattttgttactctttttgtgctcttggcgcttggagatcgactcggcgtcggatgtcgatggcgtggaggagtcggtctcgtaggcttcatcttctttttcttcttgccatctttcttgtgtgacttgatggagccggcggattcttctttcttttccttgtgcttgtcgccggatagcttaatctcccttgatgaaatcttggcttcatgcttctttcccgaagactcgggctttgccccggtgggtacctcgttcttggcgtgttcactcgacatcacttcgagttgttaaactctaatgaagtgccgggctcctataccaattgaaagtcgcctacagggggggtgaataggcgaagcctgaaaatactcgtcagctcgcttggctcgtggccggctctgctcggcttgtttcaattttgtaatgagctgagctagcatcccagctcggtttgttaacgagccagctcgttagctcgaacgagctagcatttgtcagcaaaataaagcctccactcatgttagatgaactaataagtgatgaactctgttaatttggtcttgaattcatgtggtatatgaaattgtgagtattattacgcattttagtgttaaattggtctataattaattaacaattgattatattgttatgtatatatgcatattatttttgttgttgtggctcgcgagctaaacgagccagctcgatctcac

SEQ ID NO: 46389 - DNA, 3563 bp, Zea Mays
atgaaatgtgccgcgcagaatgttattggcttcttgttggctttattgctccattagttctatagattttctcccttttgtggggtgcaaagaatgttagattacatgattatcttttcattatggcaagaacaaggtttaggaagattaggagttttgtttcaatagaactacttgtttcgtggtgctgtgaggtgaggtgcttgatcttcttatacattcatctggtgtggatgtttcaccattaaattaaaatgaattgttgaagttggtaaaggttgtgcttagcgcatattaccccttcataaaagagtgtcgttttaagacattgatgcggatgtatggctgcatccaaattcgatgttgtgaaatcgtagtgttgattgcatctatgacttggtttgagcttcattacatgttggttcatgcttaatgtcaggtggtgtagtttccatagacatttagtccgaggtagaagttattgtgttaattaagaccaataatgacccatgttttggaatggtggtgctatatggggtaccttgaatgttttgtttggagtggccgaattcgagggtgaattctttttaaggggggtagagtgtaatatcccaaaaaaaagttgccaaaggttgatcttcggtgcgtggatgtgggaaaagggttgtgggctgttggatgctaagtcggagtcatctgtggtgtcgcttcttttctcccgaaaagaaaaccctagtggtggccttttccccctttttgcccctacttggccgccaccccttcccccctcccacacttggtcgcccctccctcctttccccttgtgctggccgtcctctcctcccatggcagcccctctccacggcttcctcctccctctagatctccccccgcgcagcaaggatcgagaagaggaggagcacgttgaattgaaggggaagagaggatcaaggagatgttcttccccatctcttcttgcagaatttcttggggaaaccctaggtatggatgagatccttgttcctccctgtaattatatgcttttggaggttgtggatcatgggaattaaaggattagaggttggatttgatgtggggttaggttttgatctcgaatttagttttctgcagaatggcagattcgatagtttctgttcatgctagttttctgtggtcttagtggcctcaaaaaaataaaaagtatatatatgagtcgtagataatttgtagatctttccgtggccgcgaagaacacctcaatcggacatcagaacagaaagttatggaagtttgattatagcagtttttcagtctcataattctgtgtagaatctgttctcttaagagttaggcaattttatcaacagaattaaactgtgagttggtaaacgaagttgtagataatttcataagctttccagattgttaaagagtgcattcatatgatttgtgaaactccagttatgtttgttttactgtggctgttcctgtttacctgacaaaaatgagtgggtctgttcactggtgggtttcatctagtaaatggccgaattggctcttccaactatggagacttttgtagagggatacaagttcttactgccagcagaatttcataatttttggttttgtagtttgggagatatcgaattttaaagttaaccatactgctgtctaaaacagattcagtcagttatcttgtcagatgtttatgaacttgtagatggcagaatttaattatctattgaatactgaagttgtagagtattttgtgtagatactcctagagtatttgtttgatatcaccgctattttaattttaaagatacaaaattaacaaacagcgttgctgttgtatggcatggggttcagggtgggagtctttccactgggtcttggtttcaagtgtaggagtgttttgttgattgatggcaaatgtttgtgaaatatttgtactaagttttatgcccactagcaggtggctacacttcagatcatgtatagtacatttcttcttcttcgatgaaggcaagtgaatgtagcggtggttgcttccgttttgacctgttatttctattgcctacactctaatattcagaagtattggattctttcataattggagactatggtgatgctttacttgcttgcattatactgatgctcaatcatatattgatgatgattatgattcgagtatgtttcatgagattaattcacacccctaaaggtaaatgaagtattatttgaggttggtattgtatctgaagataaataaagtattatttgaggtttgtattgtatctgaaggaagttaagtttactgataaatgcagcatgccatatacattgcatgactcatttgcatctgaagttttgtcgtgacctatggtccgaccgtaccggtacaatttagcatcgtacgttgcctgaggaggggtacgatgcggcttcatacccttagaggtatgaaggcagaggacatatgcattgcattcatatgcattcattgaagtgatatttgcagatgatgtggttttatacccccagaggtatgaagatagagtacctacacattgcattcctttgcatacattgaagtgatatttgcaggtattgttgacgcagggaagtgttatagaacctattgtggttgttcgaggaaatgagatggtactggttatagtgggactactgagttctatatctacaagtatttctgattttaattgtgactcttttaaaatgttgatgaattcaatttgtggtttaaatatctcgtcaaaataattcgcttgctgagatgtttcatctcactcttgcattactcaatgcaggtgcttgttgctcatcaagggaagtgggaagtagcagcacatccaccttcactcttataataacgctgcttaggtgcagtcatgatttaattagaagcttcttgtcaagggatgtttgtttctaactagttgtgcgcactggttaatttagctcatgccgttatggttgtcttcccattgctagcagactattaatgtctattatgttttcttatcatgatatctatttatactttgttgcttctccgtttatgcaattttcaaaggagatgctgtcgaaattttatatacgaatgttagatgtgtagtttagtagcattctagggtgtttgtggaccccggggtgttacatatgaagactgctggtccattacaatctctatcaataccaacatggaaatgggaggatataagtatggacttcattgtgggattgcccagaacagcaaaggggtatgactctatttgggttataattgattggcttacgaaaattgctcattttctgccagtcaagacagatcacctagttgttgtttatgcccaattgtacattgctcgtattctcagtttgcatggtgttccgaagactatagtgtcggatcgtggactgcaattcgtgtctaaattttgggaagaacttcacaaggctttgggtactaagttgctccatagttcggcctatcatcctcaaaccagtgggcaaactgagagggcaaatcaaat

SEQ ID NO: 46390 - DNA, 916 bp, Zea Mays
ctgtgacttgagattccaggtaccaggatgatcttcagatgactcgtaacctcgagctagtcgtagcaatacaaacaagcatggtataggcaaaattaacatcacaccaaacataagaatgaactgtgtaataatattatacgctgcgtaattagatcgtaggaacaagaatcattaattttggagttatagattttaagttatgaattttcaaaaagttctatgtgctaggtacaagattagttaggagattaaaattaatatggttttcatgtcaaaacagagacacaaaatgttaaacaataattttacaaaattataggaactggaatggatcaatttggacttaatatgaattttctataaattatacaagtttctagcatttattttctcattaaaaatcattttctaaattaattcctcctatttttctgagttctgggctgcgcacacaataacagagaacctggggtctaactcataaaatttcttaagactcatttttccccgcactggacgtcgggttgattttgaagaaccccgagggctcttatgcaaatgtgctcgcgaaggggtatggacagacgctggctgttggatcggagttctacggtcgcgattagatcctccattacagcgaagcggtatgctatgccggccttacgatctgcgatcaacggaccgcgttcaacataaccgagatcaacgcgccaccctcagatcacggatctacggtccagattttaaatacccgagatctactcctatccgtacatcgtccgatctacggtccggattcaaccttgaaccaatatgggctgatctaatcgcagacatccatcgcggatccaacggctggcacgccatcttccacctccagcccacaagatggcagcgccggcctttccccgcg

SEQ ID NO: 46391 - DNA, 368 bp, Zea Mays
ctcgatctctcgttgctctctcaggtggcgccaaaatctctgtttctggcagccgagatgatgagaggatgaggcggccaagggattttatactagagcaaggtccgatttctgggcgattttggcgggatgccggcggcccatgcgctcggtttgttacgcggagaagctcccaacaggaagatgcaactgccatggcggttagttgtggttcgtattctgtagaccggtatatacgactggcgctacggtacgaagcccagggacccggctgtcagtgaacgtggggtgtttatggatgaagtcatccctgacctcatggtgacgttagcctcgctgaaatgaataaacaaagtgaaaggttgtgc

SEQ ID NO: 46392 - DNA, 279 bp, Zea Mays
gtgaaagcatccgggtcggccagcgcggggagcaagtgggccgcgcggtaggaggcgaagtgggccagaagcggaaatgggcccacgcgcgagttttctttctttttgtttctctttttttttctttttccttttctatgtccaattgaattcacttttgaatccgagttttgaattttctatctcaaacaaaatacacaataagaattcagcatggtgcaatattaattttatttatatatttatttattcattcatttattattctacataagaaat

SEQ ID NO: 46393 - DNA, 215 bp, Zea Mays
ttcgttttcaggtatgtgtccactgggacaaatgtcccaagatcgcgagaacggagtggtggaagcttagaggggaaccgacacaaatgtttaaggataggatgctaggtgaggagccttgggaagaaggagaagatgcaaacatgtggctaaagatggcaacatgttttcaaaaggtggctttggaagtgtggtgtgagtagggaaggcaaaca

SEQ ID NO: 46394 - DNA, 143 bp, Zea Mays
tttaaagatcatcacatagcttttaaaactatcaataaaaaaatagtgaatcaaccaatttttgtgaccgttttcaagttaagttacgagaatccaagatatttaattcactcctaagaaagcaaaacctagtctcatcgagg

SEQ ID NO: 46395 - DNA, 695 bp, Zea Mays
ctcaaacccaagagaccttaaagggattcctgagacgggctcaaaatgagttcggcttaaggatcaagaaaataagaagcgacaacgggacggagttcaagaactctcaaattgaaggctttcttgaggaggagggcatcaagcatgagttctcttctccctacacacctcaacaaaatggtgtagtggagaggaagaatagaactcttttggacatggcgagaaccatgcttgatgaatacaagacttcggatcggttttgggcggaggcggtcaacaccgcttgctacgccatcaaccggttatatcttcatcgaatcctcaagaagacatcatatgaactcctaaccggtaaaaagcccaacatttcatactttagagtctttggtagcaaatgctttatacttgttaaaagaggtagaaaatctaaatttgctcctaagactgtagaaggctttttacttggttatgactcaaacacaagggcatatagggtctttaacaagtccactggactagttgaagtctcatgtgacgttgtgtttgatgagactaatggctctcaaatagagcaagttgatcttgatgagataggtgaagaagagactccatgcatcgcgctaaggaacatgtccattggggatgtgtgtcctaaggaatccgaagagcctccaattgcacaagatcaaccatcc

SEQ ID NO: 46396 - DNA, 1149 bp, Zea Mays
ctaatttgggcggcctcgtccgagtcgtagtacttgtcccccacctttggtacatgcgctccaaactcaacaatatcccaaatgctttcatggagtgaggttagatggtgcctcactttattactccacatacaataatcttcaccatcaaaatatgatggtttgcctaggggtacataaagtaatggagcacgctttgaaatacgaggataacataggggcatctttctatacttcttgcgctcatggtgcttagaagtaatggacaattcggagcttgatgtggagggtgacgaagagtcggtctcgtagtagaccaccttcttcatcatcttcttcttgtcacctctccgatgcgacttgatggaggaagaggattcctccttgtgtttgttgccggactcccttgagagagtcctccccaagcttgcggcctttttcgctggtcatgatctccctcttggcgtgatcttcagacatcacttcgagttggttagactcttaatgaagcactggctccgataccaattgaaaagtcgcctagaggggggttgaataggcgaaacctgaaatttataaacttaaacacacactaaggtcgggggttagcgttagaattaaattcaagtccaaaagaatatctctcttgctaggagttgctcaaggattgcggatgacgtatgggagccaactcaaattcacactagcaaggaaatgttagagagacgaaaacaaatcaaacaagaatcaaggcgagtgaacacgatgatttgttttaccgaggttcggttccaaagaacctagtccccattgaggaggtcacaaagaccgggtctatttcaaccctttccctctctcaaacggtcacttagaccgagtgagccttttccttaatctctcaggtcacttaaaccccgcaaggaccaccacacactttggtgtctcttgcttcgattacaagtcacttaagaaatagacgggaaaagaaaaatgccaaaccaagcaacaagagcaacaaagaacacatgatatcctctcacaagccctaatgcactagaattgattttggggctttgagtggattgattgctttgattgtgtcttggagtgttgggctttgctcttgcaatgaatgagagttcagaaatg

SEQ ID NO: 46397 - DNA, 136 bp, Zea Mays
gctagtagaagatggatggatcgatagatggcgccgcacacgaacacgtacgacgggcgcgcggaggagctagctcggtcgatgatgcccagtcctccagcctccatgcatcccgctccgatgccgatgccgcacg

SEQ ID NO: 46398 - DNA, 381 bp, Zea Mays
gtccaagaagcacccaatcgttcgacatcgtttcattgactgggaggggtgtgagagtatgggggatgctgacatgatgtcagctctccgtaactgcgagagaaagttgttaagaaatataatgactatggaatacccctggaacaacgaagtaattgctcagttctatgctactctctgggtaaagaaagttgatgaagaatctgatgggtatgactacccagttatgtacttctttatccagggtgtctggcatagagttagataccgttgttttgcccatatcttgggcatctctgatgaagatattcagggcgacaaccttaaagtccatgacattaggctgtcaatgtaggaagaaatataatttattcttatttc

SEQ ID NO: 46399 - DNA, 749 bp, Zea Mays
gttgactccaacaacccagttgcacgtacaaagcgggctcccgcaggggctggaggccctgcttcttccgatgagccgcctcctcagcctcctcatcatgagtcctcctctcgcgccgccgctgcttcacgtccgatggaccatagtgggagaggtagaggtcagggccagggatagggtcaaggccggggactgtttattcgtttggccaagggtattgctggtgccttctccatgtgccgcgattgggcaatcaaggagtccgtgcacaggcgccggactgaggcgctgcatgaggactttcatcgttatgccgcctccacgggtcatcctctgccttctgggtctcctccgcctccgacccccacctaccctgaaaaccttaatgagtggcaccaataggaatatggtgtgccattcattactcctaaggatgaggccgcgaagtttgatgactcctactatacctcggctcctcctcctccctattcgggtcagggacccattcccggtgaaccccggccacccggccccggtcactttccccctactccctacccaggccagggacccattcctggtgacccgaggctttctggctctggttaccaccaccatcctcctccttcaggagggtattgattcctgtgctctctctctcctcgtttttggtccttgctaccaaaaagggggagaaaatctaaaatctaaggttagccaagtcatttttttgtttctttttttgtttc

SEQ ID NO: 46400 - DNA, 286 bp, Zea Mays
ctcattattgattttagatatggaatagcattttctcttaaataaaaatttacataactaatataataattattagtccaaaaataaatactttatttataaataattttggtttgattcttacaaattttatgattatttaaatatgtatttcgaaatttgcaaagaaaaaaaaagaaaaaaaagaaaacctaatctaacctagctggccgaattggcccacttggcccattagccggccgccctgctccccctaacctaagccgtcgctcccacctcctctccc

SEQ ID NO: 46401 - DNA, 1026 bp, Zea Mays
ctttgcatagattaacacaaaagcacttgtgttggcactcaatcaccaaaatatttagaaatggcccaagggcacatttccctttcaatctcccctttttttggtgatttatgccaacacaacataaagcaactagaacaagtgcaatatcaatgcaaatgaaaactcaatatagttttgattcatatttggcatatatggatcactctttgccaccacttggtttgtttttgcaaatcaaactcaatttcctatctctaagtcaaattcacttgtagagacataaagagaggtattccaaaataaattgatcaaggatttaaaaaaaactcgccctttttcccataatcaacacttctccccacaagaggccaacttttgacaaaagagacaataaaagagttttgacaaaccaaaagctctattctactattttctctattctactattttcaaaatttctcaagtggtagctgatccaattattgctttggcctttattttctccccctttggcatcaagcaccaaaacgggatcaattttggccctttaaccccattgcctcaccaaaaatcttcaactaagagtaaaaggcaataagagtactaagatgaacttggaagaagttactcgttcatcggagtgcagtggaagtctcgcatggtccaagttcaccttttccctttcaatccaccttcgagactaaatcaggcaaactcaagcacacagttagtctcaaagggtcaagttgtagcacatctccccctaaatttgtgcatcacttgcaaaggacttgtgaggtcctggggagtgcatgtacaacttgagcaccataaataaacaacataatgcaaaaggaacatgatcaaaggcataaacacatgtatgctataaatcaatcaaagttccgcgaatctaagacattaagctcattacgcaacttgcaaaaggtctgctcatctaaaggcttggtaaagatatcggctagctggttctcggagctaacatgaaacacttcgatatct

SEQ ID NO: 46402 - DNA, 458 bp, Zea Mays
ctcctgaattataactccaaatcgagcgcataagtactcgttggaaaggtatgacaaagctctacatgattctcccactgatccccactaattgcccacgaaaaattcccagaaatccctagaactactgctgttcgtccacccactaaatttctggacagcacctctaccaaatcgcataggtaaacatgtaaccaattggatttcagcacaaatacaacaaatcgatcacgaaaatcaccttgggttcctcctttcctctttcttttcttccttcttcctccctccaaactcccatggaagactcgcacccacacgacggacaccaagcggggaggctccaccttgatgaggaagaggtgggggggctagggttgaggggtggcgctgcaatcacttagggaagaaggagagggattagggtggctgcaagagtggaagagagaggggaggggcgg

SEQ ID NO: 46403 - DNA, 227 bp, Zea Mays
ctcatatatgcgccagagaagacaacacatattataatagagtgcatagagataaatgtcataaatatcataaatgtacttattacatagcggaagtcttacaaaaataaatgataaaataaagtgaactaaataatattccctgtcgccacaaagctgactgggagacgccacctagatcaagtcgaaagcctcagtgttaggcggctcctcttcgaccacctgtt

SEQ ID NO: 46404 - DNA, 461 bp, Zea Mays
cctctctcctgccggctaaccggcgctctagccgaccaaggccatccagtggtcgccaccgccgtccttcgtcggagcaccggccccaagtccgcttctttcccacgctcctacgacgtctaacggatccccaaggtaccgcataaaaaggaagaaccgactcaccgcagatgggccatcggggtttccagacgccgcgtcgccaagccgctgcaccaggaagttccgccgccccggattccttagcggccacacgaactgaacacggatgtggtgaatacagcaatcgtggtgcttgatctctctcctctctaatcccctacttctcggtggcaatgcctactgccaaagcttggaggtgatcacgaacagagggaagagcatggcgcccggcttttaaccacgtagccgaggcaaccgagctaggcgcagagaaaatcgggggcgtcgttgtaacaacc

SEQ ID NO: 46405 - DNA, 219 bp, Zea Mays
tgttcttcaccatctattcttgaagattttcttgggaaaaaccctaggtggctacactccagatcatgcctagtacatttcttcttcttcgatgaaggtgctggttgctcatcaagggaagtgggaagtagcagcacatccaccttcactctcataataacgctgcttaggcgctgtcatgatttaattagaagcttcttgtcaaaggatgtttgtttc

SEQ ID NO: 46406 - DNA, 1484 bp, Zea Mays
aatattgagaagtattggattctttcataattggactctatggtgatgctttacttgcttgcattatactgatgctcaatcatatattgatgatgattatgattcgagtatggctctgtaacaccccgggatccacaaacaccccagaatgctactaaactacacatctaacattcgtatataaaatttcgacagcatctcctttgaaaattgcataaacagggaagcaacaaagtataaatagatatcatgataagaaaacataataggcattaatagtctgctagcaatgggaagacaaccataacggcatgagctaaattaaccagtgcgcccaactagttagaaacaaacatcctttgacaagaagcttctaattaaatcatgactgcgcctaaacagcgttattataagagtgaaggtggatgtgctgctacttcccacttcccttgatgagcaacaagcacctgcattaagtaatgcaagagtgagatgaaacatctcagcaagcgaattattttgatgagatatttaaaccacaaattgaattcatcaacattttaaaagagtcacaattaaaataagaaatacttatagatatagaactcagtagtcccactataaccaataccatctcatttcctcgaacaaccacaatatgttctataacacttccctgcgtcaacaatatacctacaaatatcacttcaatttatgcataagaatgcaatgtgtaggtactctatcttcatacctctgagggtataaaaccacatcatctgcaaatatcacttcaatgaattcatatgaatgcaatgcatatgtcctctgccttcatacctcgaagggtatgaagccgcatcgtacccctcctcgggcaacgtacgatgctaaattgtaccagtacggtcggaccataggtcacgacaaaacttcagatgcaaatgagtcatgcaatgtatatggcatgctgcatttatcaataaacttcactttcttcagatacaatacaaacctcaaataatactttatttacctttagatacaataccaacctcaaataatacttcatttacctttaggggtgtgaattaatctcataaatcatactcgaatcataatcatcatcaatatatgattgagcatcagtataattcaagcaagtaaagcatcatcatagagtccaattatgaaagaatccaatacttctgaatattagagtgtaggcaatagaaataacaggtcagaacggaagcaaccactgttacattcacttgccttcatcgaagaagaaaaatgtactaggcatgatcaagagtgtagccacctgctagcgggcataaaacttagtacaaatatttcacaaacatttgccaacaatgaacaaatcgctcctacacctgaaaccaagacctggtggaaaacctcccactctgaaccacatgtcatacagcagcaacgctgtttgttaattttgtatcttt

SEQ ID NO: 46407 - DNA, 948 bp, Zea Mays
ataagttctaaaacatctgacaagataactgactgaatctgttttagacagcagcataattaactttcaaaattcgatatctcacaaactactcaaccaaaaatcatgaaattctgctggaaataagaacttttatccctctacaaaagtctccatagctaggagagccaattcggccatttacctgatgaaacctacttgtgaacagacccgctcatttctgtcaggccaacagaaacagctacagtaaaacaaacataactggagtttcataattcatatgaatgcactctttaaaaatctggaaaggttatgaatttatctacatcttcccttacaaacccaaggtttaattctgttgataaaattgcctaaatcttaagagaacagattctgcacagaattaagagactgaaaaactgctataatcaaattgcaataactctctgatctgatgtccgattgaggtgttcttcgcggccacggaaagatctacaaattatctacgactcatatacagaatttttatttttttgaggccactaagaccacggaaaactggtatgaacagaaactgtcgaatctgccattctgcagaaaactaaattcgagatcaaaacctaaccccacatctaatccaacctctaatcctttaattcccatgatccacaacctccaaaagcacaaaattacagagaggaacaaggatctcatccatacctagggtttccccaagaaattctgcaagaagagatggggaagaacatctccttgatcctctcttccccttcaattcaacatgctcctcctcttctcgatccttcttgtgcgggggagatctagagggaggaggaagccgtggagaggggtttccatgggaggagaggaaggccagcccaaggggaaaggagggaggggcggccaagtgtgggagggggggaaggggtg

SEQ ID NO: 46408 - DNA, 1437 bp, Zea Mays
ggggaagcaacaaagtataaatagatatcatgataagaaaatataatagacattaataatctgctagcaatgggaagacaaccataacgacatgaactaaattaaccagtgtgcacaactagttagaaacaaacatcctttgataataagcttctaattaaatcatgactacgcctaagcagcgttattatgagagtgaaggtgaatgtgctgctacttcccacttcccttgatgagcaacaagcacctgcattgagtaatgcaagagtgagatgaaacatctcagcaagcgaattgttttgacgagatatttaaaccacaaattgaattaatcaacattttaaaagaattacaattaagatcagaaatacttgtagatatagaactcagtagtcccaatataaccaataccatctcatttcctcgaacaaccacaataggttgtgtaacacttccctgagtcaacaatacctgcaaatatcacttcaatgtatgcataggaatgcaatgtgtaggtactctgtcttcatacctctgagggtataaaaccacatcatccgcaaatatcacttcaatgaatgcatatgaatgcaatgcatatgtcctctgccttcatacctctaagggtatgaagccgcatcgtacccctcctcgggcaacgtacgatgctaagttgtaccagtacggtcggaccataggtcacgacccaacttcagatgcaagtgaatcatgcaatgtatatggcatgctgcatttatcaatatacttcacttccttcacatacaatacaacctcaaataatacatcatttaccttcagatacaataccaacctcaaataatacttcatttaccttcaggggtgtgaattaatctcatgagccatactcgaatcataatcatcatcaatacatgattaagcatcagtataatgcaagcaagtaaagcatcaccatagagtccaattatgaaagaatccaatacttcccaatattgcagtgtaggaaatagaaacaataggtcagaacggaagcaacgaccactacattcacttgccttcatcgaagaagaagaaatgtactaggcatgatctggagtgtagctacctgctagagagcataaaacttagtacaattatttcacaaacatttgacaacaatcaacaaatcgctcctacacttgaaaccaagacctagtggaaagcctcccaccgtgaaccacatgccatacaacaggagcgctgtttgtaaattttgtatctttaaaattataacagttgtgatatcaaacaaataatgtaggagtatctacacaaaataccctacaactttgatattcaatggataattaaattctgccatcagtaagttctaaaacatctgacaagataactgactgaatctatttcagacagcaacttagttaacttcaaaattcg

SEQ ID NO: 46409 - DNA, 688 bp, Zea Mays
aacaaacataactggagtttcataatttatatgaatgcactctttaacaatctggaaagcttatgaaattatctacaacttttcttacaaacccaaggttgaattctattgataaaattgcctaaatcttaagagaacagaatctgcatagaattttgagactaaaaaactgctataatcaaactgcaataactttctgatctgatgtccgattgaggtgttctttacggccacggaaagatctacaaattatctacgactcatatataaactttttatttttttgaggccactaagaccacggaaaactagcatgaacagaaactatcaaatctgtcattccgcagaaaactaaattcgagatcaaaacctaaccccacatcaaatccaacctctaatcctttaatccccatgatccacaacatccaaaagcacataattgcaaggaggaacaaggatttcatccatacctagggtttttcccaagaaaatcttcaagaatagatggtgaagaacacctccttgatcctctctccctcttcaattcaacgtgttcctcctcttctcgatctttgctgcgtgggggagatctagagggaggaggaatccatggagaggggcttccatgggaggagagggcggccagccaaggggaaagggggaggggcggccaagtgtgtggggggag

SEQ ID NO: 46410 - DNA, 2288 bp, Zea Mays
gtaactttatgtaattgcttccgccttttcgtatctccgatgaactataatgtctgcgtgacgggtgaaacgctcttgggaaaggtaagaaaagcagataccgaacttgtcaagtgattcaggggcacctacagggttgtctgaggtccgttggacaaggacaactgtaggtgggcctaatgacttgggaggttccgtcacacacacaagccaagacttgagctcaaaatgaagcgcaacgagttcacaactagaacggagctcaaatcactaacatagtcgatcaagtgcacagagatggagtgtggaagacttagaatgcttagagtatgcttgggtgactcctccatgcgcctaggggtcccttttatagccccaaggcagctaggagccgttggggaccaacaaggaaggctaagattgccttctgtcaagtggcgtaccggacagtccggtgcaccactggacagtcactatagacagtccggtgcggatctccttcctattttggcgcagtcgacgattgcagattcgtggcagttggcacaccagacactgtctgatgcacaccggacagtcttgtacctcctgccgaccgttggagtgggccacgcgtcgcccgcggattgcgcggccgactgttgcctagtcgaccgttggctcaccggacagtccggtgcctactttgccaaggatgactcaccggacagtccggtgaattgtagtcgtacgccgccgtcgagtcccgagagcggccagatcaccttggacttgtctagcgcaccggacaatgtccggtgcaccaccggacagtctggtgcaccgagaccgagcagcagttggctgtacacagccaactcttttccaatctattttctcatgtttctagcacttagacacaatacattagtacccaaatcaatgtactaagtctagaaacgtaccttgttacatgatttgcacttcttcaatctttggcacaaattaacacttagagaatatgtgttgggcacttaatcaccaaaatactttagaaatggcccaagggcacatttccctttcaatctcccccctttttggtgatttatgccaacacatccaaaagcaaccaaaagaagtgcaatatcaatgcaaaagagaaccaaattgttttttgactctaatttggcatatttggatcttacttcgccaccacttggtttgtttttgcgaatcaaattcattttcctatctctacaacaaactcacttgtttgggcacaaagagagataatccaagagtaaaattgattaagagccaaaaactccccctttttcccatagtcataaattctccctacaagagaccaaattttgcaataagagtgttttggacaaatcaaaaagttctaactctactctttttgaaatttcacaagtggtagctgatccatttgctttggccttaatttctccccctttggcattaagcaccaaaacgagatcattcttggccctttaaccccattgcctcaccaaaattgtcaattaagagcaaaaaggcaataagagcatgaacttggagttaataccggagtgcagtggaagtctttgcatggtccaagttcacctttccctttcaattcacttttgagactaaatcaagtaaactcaaaaaacaaatgttagtctcaaagggtcaagttgtagcatgcctcccactaaatatgtgcatcacttgcaaatggacttgtgaggttcggggatcatgtgtacaacttgagcaccacaaatgaacaaaaatagattgaaatgcataaattaacatgatcaaaggcataaaacacatgtatgctatagatcaatccaagttacgcgaatctaagacatttagctcactacacaacctgcaaaaccttttctcatctaaaggcttggtgaagatatcggctagctggttctcgatgttaatatggtacacctcgatatcccccttttgctggtggtctctcaggaagtgatgccggatgtctatgtgcttagtgcggctgtgttcaacaggattatccgccatgcagattgcactctcattgtcacataggagtgggactttgctcagattgtagccaaagtcccggagggtttgcctcatccaaagtagttgcacgaaacactgtcctgcggcaacatactcggcctcagcggtggatagggcaacggaagtttgtttctttgagctccacgacaccagggaccttcctaggaattggcacgtccctgatgtactcttcctatcaaccttgcacccgg

SEQ ID NO: 46411 - DNA, 213 bp, Zea Mays
cccacttctcttcccccttggccgccgccccctgcccatctcctcctctctcaattcttgcagccaccaaaccctagccgccccccctctcaatcccctcctcccaaggtgccaatccctgccgctcggatcatcgtcgttgtggtgcgagtcttcaatcgttctggtggagggaagaagggaggaaggaaagggggagaatccaaggtgatt

SEQ ID NO: 46412 - DNA, 246 bp, Zea Mays
ttgtaaaatacggtattggaacagttttttatagtttgagctctataatttaatttagggcactaagataagtcaatgttgaagatgctctaaaaaaacccgaggacacctgcaagggcgtttgcaactaaagctatatgttaacttaggatggaagagaagtagccaactccatcctataaccagaccaactaattccatccatgtaactgtagcctttgcataaagttcaaacctacgattttg

SEQ ID NO: 46413 - DNA, 161 bp, Zea Mays
gggcctttccctgagttgggtgtgcataatgaactgttgggctccgggcaatcctaatttgttgggcctcggccaaccccacctgggctgggtgtatcaaaaagacaacattagccttataagacttgtagctcatatgtatagtatttatggatattttt

SEQ ID NO: 46414 - DNA, 767 bp, Zea Mays
attgcatgactcatttgcatctgaagttttgtcgtgacctatggtccgaccgtaccggtacaatttagcatcgtacgttgcccgaggaggggtacgatgcggcttcatacccttagaggtatgaaggcagaggacatatgcattgcattcatatgcattcattgaagtgatatttgcagatgatgtggttttatactctcagaggtatgaagatagagtacctacacattgcattcctatgcatacattgaagtgatatttgcaggtattgttgacgcggggaagtgttatagaacctattgtggttgttcgaggaaatgacatgatattggttatattgggactactaagttctatatctacaagtatttctgatcttgattgtgattcttttaaaatgttgattaattcaatttgtggtttaaatatctcgtcagaacaattagcttgctgagatgtttcatctcactcttgcattactcaatgcagatgcttgttgctcatcaaggggagtgggaagtagcagcacatccaccttcactctcataataatgctgcccagacacagtcatgatttaattagaaacttctggtcaaaggatgtttgtttttaactagtcgtgcgcactgattaattcagttcatgttgttatggttgtcttcccattgctagcagattattaatgtcttttatgttttcttatcatgatatctatttatactttgttgcatccccgtttatgcaattttcaaaggagatgatgtcg

SEQ ID NO: 46415 - DNA, 205 bp, Zea Mays
ggcctttccctgagttgggtgtgcttaatgaactgttgggctccgagcaaccctaatttgttgggcctcggccaaccccacctgggctgggtgtatcacaaactcaaaatttagtgttattgtactttctggaaagcttagaaaattctttgtaactttcttatttacgatattggaagtaaaattgtttgtgaccctaaaattt

SEQ ID NO: 46416 - DNA, 540 bp, Zea Mays
ctctcactcccccacccctttggccgcccctcccctctctcttccactcttgcagccgccccaatccctctccttcttccccaagtgattgcaacgccacccctcaaccctagccccccccttcctcatcaaggtggagcctccctgcttggtgtccgtcgtgtgggtgcgagtcttccatgggagtttggagggaggaagaaggaagaaaagaaggaggaaaggaggaacctaaggtgattttcgtgatcattttgttgtatttgtgctgcaatccaattggttacatgtttacctatgcgatttggtagaggtgctgtccagaaatttagtgggtggacgaacagcagtagttctagggatttctgggaatttttcgtgggcaattagtggggatcagtgggagaatcatgtagagctttgtcatacctttccaacgagtacttatgcgctcgatttggagttataatttaggagatatcgttgtttgaatccggttatgttgctgtccaaaaaaacagatttttcagttgggtgaac

SEQ ID NO: 46417 - DNA, 438 bp, Zea Mays
gtgcaaccttatttttaacaataaatggggtggtttcaagtggattttatgccgtgcatgttttccttctatggcttgtttcaatagccataaaggctatgcatattttttttagttgttgcaggctagtcatgtgggcgatattgacaacccgttttattttttttattttttttatttgccaacattgtatggcagtttgatttttttatgagcagtttctctatgcatgcttgttgaatcattatttggaccgctttatctaaaacgaagtcaatgcttaactgggagttgcttatgtttgttagtcatcgatctctttaatgatggggttgttgcatcggattaagatttttcttatatgaatgatggtttgatagattatgtatgtctactactttgaatgcatcatgtgatatcacgaagtacaaattgttc

SEQ ID NO: 46418 - DNA, 899 bp, Zea Mays
agttcatgtgatgtgtaaggctgatcaacaataggggttaaagctgagcattgcttttaataagttggtcaaaattttattagcaattactaagtgtaagtaaataccaaaccataataaaagtaatagaacaaaattaataataagcccatgcaatgcaaatgacaaattaaatttaagttccataaattaatcatcagagagtcctaagctgctcatgaccgcgagcacggctagtataccagttttacactcaacagaggttgtaccctgcacccacaagtcgtgtatcccatgtcgccaggtttagctagacccttagacactactgaggtgaatggttagggatccactacgaggcctttacaaagttccactagcttttgaaaacccgctacagtttatgggaagagcacatgcaagaatcccccgtctgaccgccatctcagcaaaatcaacccgagaacctccttgcacgaaatcccctactgcccttgcccctttcgggtaaggtagtcttccactagctttcctagttagttggccaaaggcgtcccattaaacccttgtggtggcacgtgtttctcaagttaagctccatgttccaattaacattaatgatcttgacatgaacataaatagaataacaaaataactggaacatggatgtaatgaaatattatcccaaaaccatgtaaagcaatagcaaagctacccaagtgattcagggataacaaggtaaagagataaacaatctagggtgacctattgggtcccataaaaattaaacctatacatgaataagtgacattaaaaacattattgggtaaaaagtggtcaagggcacaacttgccttcaatgagctcctgctcagctacttctatctgctcgtcaccag

SEQ ID NO: 46419 - DNA, 364 bp, Zea Mays
tcgtgaggtagtcgcggccgaccacgagcagcggcggacaccgagcgccgacgtggaatttcggtgtcgccctaagcccctcctccaatccgggtcttcggacaccaccgtaaagacccgcaaaagtttttccggtcgacactgaggtcaaccacggcgaccaaggtggggattgtcgacgacggccgcggcggcaatttctctcgccgcgcgcaagctttctggtgacgacgcaaagggaagagtcgaggggaaaagtgaggagggtcctcagcccgcatttattcccgcagtccggttcaaaggaaggagggaacgagattgcgctatgattccggctacggcggcgttttcacgcattagt

SEQ ID NO: 46420 - DNA, 670 bp, Zea Mays
ctggtccatagccgccctagcctattagccccaatcaaccatcctagtttccacctccactttgacccacggtcagtcgccagcctaaggcccacctgacttgcttgaccatgttccctttccatcttcgagacctagacccaacgccagtcatcaccaccatcgccaccaggacgcaattcgcaagcggcaatctccaacttgctgaggtcaagcgtccaagcggtgtgcggccgatcagtcgtgcatggcgatgagtggtgcacgatggcgaggcggctaccgagaggcacaacagacaacatcactataacactgagctggcatggctatcgctagaagctggcacgacaacacaaggatcgggcgagcgttaatgcttaggtcgagccacatgggggcgcagggtttcgtctcgaagaccgcgtgggtgagcgcttatgccgagcgacactgactcaacccttctttgccaaggttgtccacttatcctcaatcctgtactcctcgagcccctctgctttgtgcctctatttgtatttgattagtttgagcctttgaggtttagcacttgattgtagatgtgcaatgaactgagatatatattttccttagaaaattttgaacatcagaaattgagaaataaagaaagagccttttgtcaagcgct

SEQ ID NO: 46421 - DNA, 462 bp, Zea Mays
attaaatcatgcgacatgctagagtttattgtttgtgcatttaatgaaaagagtaataccactaacagaaataaattagtggcaaaagcaaggatttaatacctaatttgagagtttgaaaaagagaagatatataaaatataaagaaagtttatatatatttccaaaattagtaccttaaggtcacaatataacttgaagataaattttgcacaagatttgaatgtaaatttggaatcaagttggatttgggattagagaaaagaaaaaaaaagaaaaagaaaaaggaaaggaatacctgttgggatcgtggcacccaatttggcacacgtaaaatccacaccacgcggcccgtgttgccccgcatccgcgccatccctcttgcgcagtctctggccgaagggccccactggacagcgctcttcccctctcggctgccgatcgctcagctctctggagctc

SEQ ID NO: 46422 - DNA, 237 bp, Zea Mays
ccccccggtcacgcctcgcatgaggtggccactagcaccatgaggggaatacgacgaagctcctaggccagcagttggggtaaggccgatgattcagcctggagctggccacgacgttctctcaccctcccactcatttttctgattctcctccctgagcggcgacaagtcttagtggcgcgactggtggtggccatggactagcggccagtgccttaggtactgtgtggtggagac

SEQ ID NO: 46423 - DNA, 386 bp, Zea Mays
atcaaagtaaaggtaagtaggtaaaggttttgtccagttttatttaggtttcgtcctttagttaacatttcctctgatatcacttctgtcacacctggatttaagggataaagcgggtgcgtctcatatgtgcgccaaagaaaaacatcacatataatgacaaagtgtatagagataaatgtcataagtatcattattacatagcggaagtcttacagaaataaatgagaataataaagcgaactaagtattattccttggcgctatcaagctgactgggagacgccacctagatcaactcgtactcctcgttgtaggtctcctcctagaccacctgttcttctgctgtgggaggggtatatatcgcaagagtgagctcacaaaag

SEQ ID NO: 46424 - DNA, 391 bp, Zea Mays
ggttgtggccgtaactgcaaaaacaacagcgtctacatctgtgtacgattgaagcatcggatgggagatgaagaacagtaatcatggggcccacctgtcatacgacaaaatgaagtggacagaggcttagcgatgggcttggaattagctggccaaggaactaggcggactggcggagcatgcaacgatcgtccattctcttttttttgttttttttcttttttcctttcatagaaacagaatataaatgcaacgatcgtccattctcttttttttttgtttttttatttcttttcctttcatatttcgaaatacatatttaaataaccctaaaatctataataattaaacaaaaattatttataaataaaatatttatttttggactaat

SEQ ID NO: 46425 - DNA, 971 bp, Zea Mays
aaacgattgatgtgacccgagctaaactttagcaggagtaaccaaacatcccctaagatggagatgtctgttcgtactccgtcttcaacagtactggcaacatgttaaaactacttcggagtccggagcgcctagctgatctgcctacggcagcatggcttttagctcactgagcaccaatgtggccgcatgaaagatctgaagcttccgaggagggcttgtgatgcttttgcaatctatacacgctggaaccataaattcatctttctgtttccaaaagtagtggaaaaaagatgatatgtgagtcagcgtatttgctttttaacaattaataagctatatagagcctttattgtgtccactacccacgatgccgcagtgaatcctggactgtggagggtgaggtgagggtccccgtctgcctgtctcgccgcgaactccaccacaacagctagccggccgagcgaccgtgctcttgctccctgcgacgctgcaccagcagcagtctgcgctgacgcctaccgaccactccgccccccgaagaagcaggcgtcggggcatccatccatcgccgtcgactcgtccaaggaaatcttccattctctgcctttctcgagagtacggaccattattccccgtggcgtttgattttgcgttgaagtgcggtagcgaatggcgagtggtttcaggggaaattcgaagtgcgatagcatgtgatgtgcacatctgagcgaaatagccctattcgtacttgagctttcatccaaagctcaaattcatcccttaacaataataaaaaaaaactcgctttcatcctcaatttgtcgttccggttcgatcttaccatgtgcctgacctcgtctgccaccgtgtctcgctttgttggcggctactaatatggaatcggaggttatatgtaagtgagcttatgtgcaaactagcatcttgataaatttaattcttaatccaac

SEQ ID NO: 46426 - DNA, 1567 bp, Zea Mays
atagatatcatgataagaaaacatataagacattaataatctgctagcaatgggaagacaaccataacaacaatgaactgaattaatcagtgcgcacgactagttaaaaacaaacatcctttgacaagaagtttctaattaaatcatggctgtgtctgggcagcattattatgagagtgaaggtggatgtgctgctacttcccactccccttggtgagcaacaagcacctgcattgagtaatgcaagagtgagatgaaacatctcagcaagctaattgttctgacgagatatttaaaccacaaattgaattcatcaacattttaaaagagacacaataaaaaatcagaaatacttgtagatatagaacacagtagtcccactataaccaataccatctcatttcctcgaacaaccacaataggttctataacacttccctgcgtcaacaatacctgcaaatatcacttcaatgtatgcataggaatgcaatgtgtaggtactctatcttcatacctctgggggtataaaaccacatcatctgcaaatatcacttcaatgaatgcatatgaatgcaatgcatatgtcctctgccttcatacctctaagggtatgaagccgcatcgtaccccttctcgggcaacgtacgatgctaagttgtaccggtacggtcggaccataggtcacgacaaaacttcatatgcaaatgagtcatgcaatgtatatggcatgctacatttatcaataaacttcacttccttcagatacaacacaaacctcaaataatacttcatttatcttcagatacaataccaacctcaaataatacttcatttaccttcagatatgtgaattaatctcgtgagtcatactcaaatcataatcatcatcaatatatgattgagcatcagtataatgcaagcaagtaaagaatcaccatagagtccaattatgaaagaatctgatacttctgaatattagagtgtaggcaatagaaataacaggttagaacggaagcaaccaccgctacattcacttgccttcatcgaagaagaagaaatgtactagacatgatctggagtgtagccacctgctagtgggcataaaacttagtacaaatatttcacaaacatttgccatcaatcaacaaaacactcctacacttgaaaccaagacccagtggaaagactcccaccctgaaccacatgccatacaacagcaacgctgtttgttaattttgtatctttaaaattaaaacagcggtgatatcaaacaaatactctaggagtatctacacaaaatactctacaacttcagtattcaatagataattaaattctgccatctacaagttctaaaacatctgacaagataactgactgaatctgttttagacagcagtatggttaactttaaaattcgatatctcccaaactactgaaccaaaaattatgaaattctgctggaagtaagaacttttatccctctacaaaagtctccatagttggaagagccaattcggccatttactagatgaaacccaccagtgaacagacccactcatttttg

SEQ ID NO: 46427 - DNA, 50 bp, Zea Mays
tctccacgttgtggcgtcccaacggacgagagttgcactcaactcctctc

SEQ ID NO: 46428 - DNA, 417 bp, Zea Mays
gtttgaataattgaatttggaataggaaaaaaagggagtgaaaatttcaactgaaccatttattcctcccataaataaataacaaggaaaataataaataataaaattggaaataaaagttgttttgttttcattaggaatatgattgacatttgggaatggggaaatttaaatctgaaatgaattggaaatttggaaaggaaaataaaaaaaaataaaaataaaacaaaaaataaaaaggaaaaaaaatgaatacctcactctgtgcctcgctgggtcgtttttggccagatcggcccacacgcactttttccctgcccccattcccgcggcccaaccaactcacgcgttgacgcactgctgtctctgctttaacgtgtgggccccatggatcggccgttccgcgcgcatgcgctg

SEQ ID NO: 46429 - DNA, 315 bp, Zea Mays
gtgagtttgaataattgaatttggaataggaataaaaaaagggagtgaaaatttcaaataaaccatttattcctcccataaataaataacaaggaaaataataaataataaaattggaaataaaagttgttttgttttcattaggaatatgattgacatttgggaatggggaaagttaaatctgaaatgaattggaaagttggaaaggaaaataaaaaaataaaaataaaacagaaaataaaaaggaaaaaatgaatacctcactctgtgcctcgctaggccggttttggccagatcggcccacccacacttttt

SEQ ID NO: 46430 - DNA, 207 bp, Zea Mays
gcgagagattgcacagcacagcaagttggtgtgtacatcccagcaggtacgtactttaggtaggcggccttcgctctatatacagtacatgaatgggaaggtcagttacgttgcatctcatttcttattttaaactctactctataaacaatataatttatacatatagtataaaaaaattttttgcactgctatattcacttatgg

SEQ ID NO: 46431 - DNA, 541 bp, Zea Mays
cgcggtcacgttggcggctggccagtggccactccctgtctcgtgctcacggcgggcggcagaccgccaggcgccagaccggcaggcggcagtgcaggccgtcacggctcacgggctcacggccggcggcagactgccagaggccaggtcgggagtgcagccgtgcaggcggccggccctctccggctctccctcaggccctcactcccttggaggcggcggcggcaagctgaggttataagtgaagttaaatactcccttgtttgcttgttaatccattctggacgccacgagatcctactcccgcgggcagaatattgaagaatatgcatctccgttcatggacttgttattaatccatttcaagtttttttatttctatttgtaatgtcaactccgggagacagtgcgttcattttatcttagcaaatattgtaatgactcattatatgtttgagacttgtgtttctggatgatcaatgttccttatatgccattatattatatctgtcaaactgttgatacatttagtgaaatgaac

SEQ ID NO: 46432 - DNA, 309 bp, Zea Mays
agcagatagaagttgctgagcaggagctcattgaaggcaagttgtgcccttgatcacttcctttttacccagtcatgttcttattaatcataatgatctgcatatgttaattttgacaggacccaataggtcaccctagtctgtttatcctttttaccttgattacccctgaatcacttgggtagttttgctattgctttatatggttttgggttaatatttcattacatccatgttccaattattctgttatgttatttatgttcatgataatattattatgttaatgggaacatggagaaccacccg

SEQ ID NO: 46433 - DNA, 457 bp, Zea Mays
gtacaactctgcagagtgtaaaactggtatactaaccgtgctcacagtcatgagcgacttggacactcacatgattaatttatgtaacttaaattcaatttgtcatttgcatttgcatgggattatttattaattttgttctattatttattatggtttggtatttacttacacttagtaactactaataaaatttgaccagcttattaaaagcatgctcagctttaacccctattgttgatcaaccttacacatcacatgaattcccacctttggtgagttcatgcccactagtttccccacaacttgttgggctatgatcatgtgtgagctcacccttgctgtctcacaccccgcaaaggagaagaacaggtggttcaagaggagccacacaacgaggagtttgatctgatctaggtggtgtctcccagttgacttattggcgccaaggatggat

SEQ ID NO: 46434 - DNA, 415 bp, Zea Mays
atctcttttggactgcttggccccacacttccgatggactcactcactcggtccgtccgttcccctccgacgagcgaggcgagagcgagacacgctgcgcgcacgacgtcggatccgaagagtgcgagggcgagagcgaccgcggattcccgaaggccatcgattgtttgggcgaggtgggagatcggggaacctaagttaaccttggacggcacacctccccaggtgcacatcgattgtttgctggtggcaggtgcggcgggccccgcgcgtgcctcccgcgcggcaggcaaagcggccgctgcggtggggcccgctgctccccggcccagtggacacagcccgccgctgctcgttcatggtaccgctacagtagtatgagtgagtccctcccgctgcggctgcgccaccgccg

SEQ ID NO: 46435 - DNA, 5712 bp, Zea Mays
tggggacttgttctcaaatgctatgagttaagaacaaggcaacatagaaaatgttaatcgttaaagtccttcgtccttcgaaacattatttccctttgggtataatggtttccggacgaaggttatgaagggtataccttcatacattcattatataatgacgaagggtgaaatgtaaggaatatagatgacaacatgaacaattatgtattgttattaagcataaacagaaatattgttgaattacaagtgtaccttcaactggaaggagatgatagtacaaatgtgacgcaaaaagcgaatgccaagtcagcgtgaacagtacgggggtactgttcacctatttataggcgcgggacacaatccatacaaaattacattcatgccctctacacttgataataattctatagtaatctgtcgaggtccaaatagcctttttatctttaagtcggttcctccttctgctgtcacgccgaagctttcctgcttacaccttcggcgctgcaacaaccttcgtattattctggtttactgtgatgccgacttgagtccgaagatacctgttcacacattatactccagaaatactattaaattctgtttttgaggaccttcggatgccgaaggtccccaacagtagcccctcgcaataaaaatttgtttaaaataataaatttagattgcgacatggacgaaggctttacgccgaaggtccgaaaaaacaccttccctttgctagaatagcaacattcactgacaaacggggtctttcaattttcaacgctcttggcgtataaatagggcgataccgcaaactcatttgacacgctctctggccaatttctcccgctgactcaatttttagctcttgtgcactacgatttgcttaagcttttagtttttaagcttcggctttggaaatagttttttagtgtctccgaagatgtccgaagataagaagactgctgctgagatgaagctgagccttgacgaagagaaaaacttggggtttctcatagcgatgtcaaagaccaacacagaaaaaattaccaaggagattctggaaggtttgtcggaagatactggtgacagcgacagctatgatgtagacagtggtggtgaagactccgaagatcgtccctggcgaccaagccattcagtttatggtaaatcaactattaaagagagtcatcttgtcaacatgagaggaaggtattttcgggatttgtcgattgtgagggccgacgaaggggaaaaaacttgcccacaccctgaagagaatgaagttgtaatataccgaagctttttgaaagctggactgcgatttcctttgagcagcttcgttgtagaggtgctgaaaatattcgaagtctatcttcatcaacttacccccaaggcaattataaggctgaatatcttcgtatgggccgtgagaagccaaggtctgaagcctgacgcaaaaagcttctgtaatatacatgaattatcatatgaaacaaagccttggggtaaggaacagtatcacaataattttggctgctacagtttcgtttcccggtccgggtcaagatgccccgtgccaacctttcggaagagatggcccggagattggatgacagagtggttttatgtgaagaatgatctgacaatacgagaagatatcaaaggtataatcatgcgccctatttggcaaagcttcggccttcggaggccgaaggttgaaatgaatgaagctgccgaagaatgccagagggccttcggcgttatctgttcttttattggaacgagagacttagtacaagagcatattgccttcagggtatggccgctcgcagagaaatgggaaatgcctcaagaaaccgttaaagaggccgacgaaggtggacttatcaggttgaaatacacttttaaatttggagataaattcgttgagccagatgacgactggctaaaaagcattgaaaatttaagtgatgaactgcttggggcttattcgaaggccgaagacactgcaatgtcagcagccttcggaggcagaaaaaagaagaggctgaatcgggtatttgatgcaatcgggtttgtctaccctgactattgctatcccattcgaaggcagaagagaaaaaacacaacctctgcaaaagaagaagctgcaattgctcctagcgagccagaaccaaaaagaaaaaagataaaggtcctcacacatcggccgcgctatattgaaccagcttcggtgcctgagtttaccggagaaacttcttcggccaccgaagctgaaaaatcaaccgagccaaccttgctgccagaagttgtagaatcggccgaagtgccaacaaagatagaattggaacaatcaaagattttgtcatcagaaacgaaagagaaagccgaagcgccgtccacagaaaaaatggaagaggtaaaagaagcaactaagggatccaaaacaccagaagttttgagttctgcagcaaacatcgagacagtaaaaaatcaaaaagtgccagcagtaactccgaaaagaaagagaatggctaatgtgctagatgtactggaaacaatcaaatcttcaagcacgcctccgaagaaggctgctgtcattcgtgaaacaacagctgaaatttctggttctaaagctccagagcaagagactgaagccgaagctgtgccctcagagcccgcaaagaaaaaatccttggaaagtgaggcagacaaaataacaaagccaactttggttgaagaaaccggtgctattgcccccgaagcatccctcaaagttcgtgattatattgttcgtcatgcttcggggaaaaaactatcagaaaaagaagagcaagaggcccagcactatgcccaaaaactgaaatatccaaagggggcgttaatattcaatggcagtggagaagaagacttcttgtattgtctccccgacagcaaggagatttctgtctgtcgggagatgagcaagagcttcggattcccaactttagaagacgggctctcggtgctgtcgaagaacgatctggccgacagcctggcatacaatagcttaaaggtgtaacaaatgaaatccttgtatttttgttgagtccaaaatttttcgtttgtttaaacttattgacacacacatatttctctttgcagggcctgatacttagcaatgccctcagggcacagaaagatgctgaagacgaagggtgttctatagccctgagcaaccttcgttccgaagttattgaactgaggaacgaaggtctcgagaaagataaaatattacactcattgataaataaaataaaggaagacgaagctgcttttaaaggtcaagctgaagctcagaagcgcgaaattgaagatcttcggaaacaactggctagagccaaggaagaacgcatacttgaagagacaaagcgagaactcagcgaccaatgggcagatcacctagaaggaactgttgaagaactttggtcgtccaaaaagagatgctataacaaatctatagaatgtgttaaaaagctgaaggctagcttcgccaaggtcggcgcattttcaagtgaggaaaactttacgagaggcaatcccgaaggccccatcgaatggattgaccacgaagctgaagccttcgaagaaattttaaatagccgtggagatatatgtgccttctctggtgccagaggaattgccaccatcttagagaagaagggctgcgaccatgtaaaaattttagcacaatccgaagctgctttgtcctttgaagatgcaagagatccttcggccgaagctagtataattggtggaaatttttttaccgatatttgggataatggtggccgagaaatggccggagaaattattagaagaagtgaaaaggggattcatgatgctagagaagtagctgaggctgctgaaaagagcgcagaggccgaaggtcaattaggtattaactaacagtttttattgtgttgtaatcttaggctttaagatttgtttgcgatttgtaatagttctgtagccgtatcctatcttacttcagatcttgctaaagcgtcttcgggcccacagccgaaaggagacgacgaaattaaaaagatggctgaagatattatggacgaagtcgtcaatcggctcctgaatgaggctgcagaagtcgttttgagagaagattaagtatttttgtaaaaaacttcggaaatataatatactgtaacattatgtaacctcaaatgtaatatacctatttttgttagtcaattctttacgatgcatgaaactttatacgtaccgcttttgagtctttgacgaaaaaacaccttcccttcttttcatgcgtcgtgaagaagaatttttctttgtcagaacaatatccaatgttctgatgaataatatccaggcttcgtgaagatattttctgaagctacacttccgaagattcatggtgtatctttttgtgactatgatttctcccttttttcaaagcgttcttctgtagattaattatgtgttcacctcttgtgccatatgcaaaatgatgtatgatgcttatgctatgcgaaatgatgcgatgatgttatgttatgtgagatgacgtttattccgaagatacatacgtatccctgcaataaaacacaatcttatataagcctcccttaggagcttcttcgctttttacttcagcggaatcagcgtttatttttcgctgtaagcctcccttaggagcttcttcgccttttactttcagcggtattcgcgttgacttttcgcgcttcgccttttacttaggcggtatcagcgttgacttttcgttgtatgctctgcattccctttggaatgactttggagcagaaaacttacactgcgctccctttggaacgactttcttgtgatttcggtaaacttactctgcgttctttagaacgactttttgttgcttcgaagaattttcgatagttcgaaggtcctttttattatcacaagtctttgaacttcaatcaatttaagcctgtgcagaaaacatattttccttgtaggaatcaacgaaactaattacatggaacctaaacaatgtcctttattacagaaaataaaactgaatgaaaaagattgatattaaggtaggatatttgtcaatagatgtgctttgattctggcacagtgctattgactgtacgggcttcggactgctctctgaagtccctttggtgtggggcatactgactcccttctggctgctggccttgttgcaacggaggtggaggcggaggctgttgccaggaagcttgaggctgactcgccgaagcaacagaaactgcaggatgattgcccacatattctgggatgtagggcgaatgacacgaagctgtatgcatgacctgcttcggctgatcttgttgtgctgctgcttcagctatttccttttgcttctgaatagtaacatggcacattctggtagtatggcctttgttctcaccgcagaataagcaaaagattcttctcggttgatcgccaaatcttcctccaaagcccctggcgcctctgcctcttggagctggtggccggaaggagctttgctgttgccccgaagcttgtgaggaacattgtggcctttgctgttggcttcctctatcatcattttgtgtagagttatgaattgatctcacgtgcctcgggtagaacctccctccgaagcccctggtcatttcagaaaac

SEQ ID NO: 46436 - DNA, 11791 bp, Zea Mays
  misc_feature (11790)..(11791): n is a, c, g, or t
acaagtccttcagcttctgccatgaagtgatcgttcctggtcgaagggaggaataccaggtttgagcaacactcctgacagccataacgaaagatttggccatgactgaagcattgccaccatacgaagatattgttgcttcgtagctcattaaaaactgcttcgggtccgagtggccatcgaatacgggaagctgaggcggcttgtaggacgggggccaaggtgtagcctgcagctcagcggatagaggagaagcatcatcaaaaacaaaattcccatgatggaaattgtcataccagtcatcttcgttgggaaaaccctcctgatgaaggtcttgttgctgaggccttcggtgttgctcatcctgagcaagatgacgaacttcttcagaggcttcgtctatctgcctctgcagttcagctaacctggccatcttttctttcttcctttgtacttgttgatgaagcatctccatatctctgatttcttgatctaactcgtcttctggtggtgtcgggctgacagccttccttttctggcttcgggcctcccgcagggagactgcctcctgattgtggtccagtggttgcagagctgcagccccagtcgctgaagccttcttcggcgccataacgaaagtttatgatcgccgaaggtgttcaaaaaactcagagtggaagtgagttcaccggaggtgggcgccaatgttggggacttgttctcaaatgctatgagttaagaacaaggcaacatagaaaatgttaatcgttaaagtccttcgtccttcgaaacattatttccctttgggtataatggtttccggacgaaggttatgaagggtataccttcatacattcattatataatgacgaagggtgaaatgtaaggaatatagatgacaacatgaacaattatgtattgttattaagcataaacagaaatattgttgaattacaagtgtaccttcaactggaaggagatgatagtacaaatgtgacgcaaaaagcgaatgccaagtcagcgtgaacagtacgggggtactgttcacctatttataggcgcgggacacaatccatacaaaattacattcatgccctctacacttgataataattctatagtaatttgtcgaggtccaaatagcctttttatctttaagtcggttcctccttctgctgtcacgccgaagctttcctgcttacaccttcggcgctgcaacaaccttcgtattattctggtttactgtgatgccgacttgagtccgaagatacctgttcacacattatactccagaaatactattaaattctgtttttgaggaccttcggatgccgaaggtccccaacagtgttcaccatccacacaagaacatcatgacgaccgacaggccgcttgagctactccacatgcacctattcggcccgatagcttacataagcatcggcgggagtaagtattgtcttgtaattgtggatgattattctcacttcacttgggtgttctttttgcaggaaaaatcacaaacccaagagaccttaaagggattcttgagacgagctcaaaatgagttcggcttaagaatcaaaaagattagaagcgacaatgggacggagttcaagaactcacaaatcgaaagctttcttgaggaggagggcatcaagcatgagttttcttctccctacacgccacaacaaaatggtgtagtggagaggaagaatagaaccctattggacatggcaagggccatgcttgatgagtacaagacttcggatcggttttgggccgaggcggtcaacaccgcctgctacgccatcaaccggttatatctacaccgaattctcaagaagacatcgtatgaactcctcaccggtaaaaagcccaatgtttcatattttagagtctttggaagcaaatgctttattcttgttaaaagaggtagaaaatctaaatttctcctaaggctgtagaaggctttttacttggttatgattcaaacacaagggcatatagagtctttaacaagtccactggactagttgaagtttcttgtgacattgtgtttgatgagactaacggctctcaagtggagcaagttgatcttgatgagctagatgatgaagaggctccgtgcgtcgcgctaaggaacatgtccattagggatatgtgtcctaaggaatccgaagagcctccacatgcacaagatcaaccatcttcctcaatgcaagcatctccaccaactcaagatgaggatcaagctcaagatgatgatgaagatcaagaggagccacctcaagaggaggacaatgatcaagagggagatgctaatgatcaagacaaggaagatgatgagggtccaagaccgccacacctaagattccaccaagaaatccaacgagatcaccccgtgaacaccatcctcggcgacattcataatgggggtaaccactcgatctcgtgttgctcatttttgtgaacattactcttttgtttcctctattgagtcacacaggatagaggaagcacttcaagatttggattgggtgctggcgatgcaagaggagctcaacaacttcacgagaaatgaggtatggcatttagttccacgtcctaaccaaaatgttgtaggaatcaagtgggtcttccgcaacaagcaagatgagcatggtgtggtgacaaggaacaaagcccgacttgtggccaagggatattcacaagtcgaaggtttggatttcggtgaaacctatgcacccgtagctaggcttgagtcaattcgtatattacttgcctatgctacttaccatggctttaagctttatcaaatggacgtgaaaagtgccttcctcaatggaccaatcaaggaggaggtctatgttgagcaacctcccggctttgaagacagtgagtaccctaaccatgtctataaactctctaaggcgctttatgggcttaagcaagccccaagagcatggtatgaatgcctaagagattttcttatcgctaatggcttcaaagttggaaaagccgatcctactctcttcactaaaacacttgcaaatgatttgtttgtatgccaaatttatgttgatgatatcatatttgggtctactaacgaatctacatgtgaagagtttagtaggatcatgactcaaaaattcgagatgtcaatgatgggggagttgaagtatttcttaggatttcaagtgaagcaactccaagagggcaccttccttagccaaacgaagtacattcaagacatactcaccaagtttgggatgaaggatgccaagcccatcaagacacccatgggaactaatgggcatctcgacctcgacatgggaggtaaatccatagatcaaaaggtataccggtcgatgataggttctttaatctatttatgtgcatctcgaccggatattatgctttccgtatgcatgtgtgcaagattccaagccgatcctaaggaagttcaccttagggccgtaaaacgaatcttgagatatttagtttatactcctaagtttggcctttggtaccccaggggatccacatttgatttgattggttattctgatgctgattgggcagggtgtaaaattaatagaaagagcacatcagggacttgccagttcttgggaagatctcttgtgtcttgggcttcaaagaagcaaaattctgtcgctctttctactgccgaagccgagtatattaccgcaggccattgttgcgcgcaattgctttggatgaggcaaacccttagggactatggttacaaattaaccaaagttcctcttctatgtgataatgagagtgcaatccgcatggcggataatcccgttgagcatagccgcactaaacacatagccattcggtatcatttcttaagggatcaccaacaaaaggggatatcaagattgcatatgttaacaccaaagaacaattagccaatatctttaccaagccattagatgagcaaacttttaccaaacttagacatgagctaaatattcttgattctaggaattttgattgatattttgcacacattgctcatttatatacctttgatcatatctctttctttgctatgactaatgtggttttcaagtgtatttcaagctaagtcatagattgaaagggaaaaggagtcttcggcgaagacaaggcttccactccactccatcgattattcatccttcgccgtcgctccgcaatacactctccaatttggtataatcttcactcatatgttatttaccataagggagaaagtagttgaaaagggcttatatttcactcaaagtatccgtttttggcgattcatgccaaagggggagaaagtatgagcccaaagcaaaaggaccgcaccaccaccaccaccaatttcaaaaatgtagtctttcaaaattgtgttaagaaaagatttttcaattggtgattttttcaattggtatcttaattgtgatataatttcaaattggtataccctctctcaaaattaatatctaaaaccctcttgaacactaagaggaggttttattaatggggagttttgtttagtcaaaggaaaagcatttaaatagggggagaaaatttcaaaacttgaaaatgcttctcaaaatcttattcatatacctttgactatttgcaaaaagactttgaaaagaatttccaaaactttacaaaacaaaacaagtggtgcaagcatggtccaaaattttaaattagaagaaagccatccatgcatatctagtagaaataattattgatttcattccaagtaacctttgcacttacattatgcaaactagttcaattctacgcttttgtatttgctttggtttgtgttggcatcaatcaccaaaaagggggagattgaaagggaaataggcttacaccttttcctaattgattttggtggttgaattgcccaacacaaataattggactaactagtttgctctagactataagttttacaggtgccaaaggttcacaacaaaccaataaaaagaccaagaaagggttcagacaaagagagcaagagacaaccgaagtatgccctggtctagtgcaccagactgtccggtgtgccaccggacagtgtccggtgcaccagggaattccagtttgaacttgccaccttcgggaattctgggagccgctccgctataattcaccgaactatccggtgtagcatcggactgtccggtgcaccagcggagtaacggctacacagcgccaatggtcgtttgcaggaacaataaatgcgctatagtgtgcgcctgcgcgcgcagaagtcaggacaggcgccagaaggcgcaccggatagtgaacagtgactgtccggtgcaccaccggactgtccgatggcccagaagacagaggctccaacggtcgaaccctaacggtcgggtgacgtggctggcgcaccggactgtccggtgcgccatgcgacagcagcctccactaacggctcgtttggtggttggggctataaatacccccaaccacccaccattcattgcatccaagttttcagccttcacacctcatacaagagctatagcattcaatacaagacacaaactagagatcaaatcctctcccaagtccaaagacaattccaatcaaatagtgactagtgagagagatacttgtgttcatttgagctcttgcgcttggattgcttttcttcttcattctttcttgattccaactcaattgtaaccaaggcaagggacaccaattatgtggtggtccttgtggggacttagtgtcccgtttgattgagaagagaagctcactcggtctaggtgaccgtttgagagagggaaagggttgaaagagacccggtctttgtgaccacctcaacggggagtaggtttgcaagaaccgaacctcggtaaaacaaatcaccgtgtcatccgctcttattcgcttgtgatttgttttccccctctctcttggactcatttatatttctaacgctaaccccggcttgtagttgtgcttaaagtttgtaaatttcagattcaccctattcacccccccatctaggcaactttcagcttccccatcagccaattctcccaagtgtgctatgaattggcttatatgttcgtacgttcttttcccaccttcaccagaaaatttagagaagtatggtatcctagtcccctgtggatacggcacggtgtcgaatcggtggctataaggctcccgatacgattgccctatacttgacacactaacaccgagtttgtcattgaacattccagctacctcatctctgatcgtcttcgccatgtctggcgaccatccattaagtttgtgggtggaaatctcaggttacctgacatcactctgtcagctttcctcccagggatgtctgaggtgtgtgttagatgtcctattaatgtcacgagctcctgccctatacctctcaggctctctagtggccgaacagtattcaaccttgtgtccatgaggtggtcaggcatggttataatgtgttgctggtggggcaccatagtgttgctgtgatgagtgtgggaacggttgtgcagctcttgattctgcatacgcatacccggacggtccggcgtaaggggccggatggtccgcgaccgggccaaatggtctgaaggtgtgtccagactttctagtcgtacatggtgctgcctgggtagtctcgtacccggaccgtccgtcataaagggctggacggtttgcgatcgggtcgaatggtccagggctgtacctggacaattcggtcatatatgggcgacttgggtagtctgcgcgtggactcgtgtagagtcggaaagtccagcgtaatacgccggtcgattcatgccatatccggacggtccggtgtaagatagcggacgatccgctacatatccggacggtccgacctaaggtaccggacggtccgcggcatatccagacggtccggcgtaatgtaccgaacggtctgtgatggggctgatttgttcggggttgtacccggatggtccagccatgcacggtgcgatctgagcattttgtgtgcgggcctgcgtcgggtcaaacggtccggcgaaatacgtcggatggtccgcggtataaccggactgtctgagatgatgcttggacggtccgaccgcgtccagtacttgccgcgtgcctaatggcggtggctgtgatggtgacacaaaagcgtgcatcggcataccatatgatggttgggtcaagggtgacccatttgtagccgatgtgcttggcgcgggtggctctgtattagactcacgcgatggaaaactaggagcggttgatttctcgtatgaacgtaaatgcattttaatagattcatctatgtattgctttaactaatctcctcgttgatccatgaaagttgtaagagatagatctggagtacttatagcaggaccctgaagtggaggtaggagagatttcatatcgatctccccttgacagatgatcttctggtggcgatccaccgtgaagtttgacaaatacttttctgccgcctccttacgccgttcggagagtttatgcagcaattccgcctcctccttgtcacattgttcgttccattgccgcatcacctccttctcatctcgcattatgaggtcctcaaagggtctttgtgaaagggaaatgtgcccttgggccatttctataagtattttggtgattagatgtccaacacatattaagtaagttcttatgtgccaaatgagtgagaagtgtgagatcaagaacaaggtatgtttctagacttagtgaattgtttttgcatactaacatggttatctaagtgctagaaacagtgccaagaaaagaagatttgaattggagaagagctggcaaagtacagccaacaacaactcgggcctggcacaccggactgtcccaggctgatcaacggtgaactggctgctctcggggaaagagaaaggcgatgtggccataattcaccggactgtctggtggtgcaccggactgtccggtgagtcaacagcgccagcggccaatggtcgtccgcgctatcaacacgcgacacgtggttcgcgccaacggttggttgggcacaccggactgtccagtgtgcactggacagtgtgcggtgtgccaaccagtccaaggcccaacggtcggctacgcccgatatggaaggagatcgcgcaccggactgctatagtggttgtccggtggtgcaccagactgtccggtgcaccactcgacagaaggcaagaatagccttccaagttgatctccaacggctcctagctgccttggggctataaaagggacccctaggcgcatggagcaggatataaagcattctctaagcattctaagactcccagactctgcctccatgcatttgatcgattgtgttagtgacttgagcttcgtttgagttgtgaactcactgtgctacgtttcgagctcaagtcttggcctatgtgcgtgtgtgtgctgtggatttgggtattgcgtgtgttgctctcccatccttactcttgtgcttcttgtgatcaaaactttgtaagggcgagaggctccaacttgtagagattcctcgcaaacgggaaaagatctcaaaggaaaagaccatggtattcaagttgatcatcggatcacttgaaaggggttgagtgcaaccctcatccattgggacgccacaacgtggaagtaggcaagtgttacttggccgaaccacgggataaaaatcgcgtgtctcttgtgttgctcttctctgtaattgcttgtgttcgcaagagctcgcttcataaacttgattaactcgcactaacatctttataatcaagtttgtagctatttagtgtttgattttataggatcacctattcaccccccctctaggtgctctcaattggtatcagagtcgtactcttcatctaagggactaaccgcctaaagagatggatcctaagggtaaggggatggtggtcaacgacaaggaaaaggagtccatcttcaacgagccaagagacgacaagcccactgactcaggcttgagtcacaagaagagggaagggaagaagaagaggcgcatcaagaagatcatctactacgacagcgatgcatcttcttcttcaccaagggacgacgacttctcgtccaagaaaaggatggttaatcaaaactattcctttgattattcttgtattccgtataattcgaatgctcatttactttctattccacttggaaaaccaccacactttgatggagaggactactcattttggagttataaaatgtgtagtcatctattttctctccatcctagcatttgggaaattgtggaaaatgggatgcattttgatagtacggataatcctgtgcttattaatgaacaaattcataaaaatgcccaagctactactgtcttgctagtgtcactttgcagggatgagtataataaagtgagtggcttggacaacgctaagcaaatctgggacaccctcaagatgtctcatgagggaaacgacgtcactatgatcaccaagatagaactagtggaaggcgagttggggaggttcgcgatgatcaggggagaggagccaacacagacctacaacaggctcaagaccttggtcaacaaaatccaaagctacgggagcacaagatggacggatcatgacgtcgtctgactcatgcttaggtcatttaccgttattgatccccatcttgtcaaccttattcatgaaaaccccaggtacaccaagatgacgcccgaggagatccttggaaacttcgtgagtgggcgcatgatggtgaaggaggcgcgatacgtggacgatgcgctaaatgatccactacccatctacgagccgcagcccattgttctcaaagcaactagcagcaaggaggcgctaccaagcaatgtagcacaagtggaggcggctgggctcaatgaggatgaaatggcgcttatcatcaagcgtttcaagaccgtgctaaaaggacgcaaggaataccccaacaagaataaaacaaggggaaagcgctcctgcttcaaatgcgataagactggtcatttcatagaacaatgcctcgataacaataatgaccagggacaagaaaagcacaggaagagggagaagaagaagaactaaaggaaggcgaagggcgaggcgcaacttggaaagaaatgggattctgactgctcttcatccgactccgacgatgaaggattggctacctcagcctttgataattcttcgctcttccccaatgaacgccatacttgccttatggctaaggagaagaaggtacgcattcgagatacccccaagtactcttcttctagcgatgaggaatcatctgatgacgaagtaaattacactgatttatttaagggattagatagaggtaaagtagacaaaattaatgaattaattgatgcccttaatgaaaaggatagattactagaaaagcaagaagttatcgtgtatgaggaacatgataaatttgttagtgttcaaaaatctcttgctttagaaattaaaagaaatgaaatgttgtcctctaagctatctgcttgtcatgaatctatctctagtctcaaggatttaaataatgaattaaatgctaaactagaggaagcaaatgcaactagatcatgtgtagaacatgtagtcatttgcaatagatgtaaggaccttaatgttaatgcctatgatgaacatcttgcgtctattgctaaattaaacaatgaggtggcaagtcttaatgctcaacttaagacttgcaaagttgattatgataaactaaaatttgctagggatgcctacattgttggtagacacccctcaattaaggatgggcttggttttcaaaaggaaaccaagaacttaacaagtcaaaggacttccgttctcacaggagaaagggaaggcccctatggctagtagtccccaaaagaatcatgcttatatttatgataggaaacgtactagggatgctcataatcatagatactatgatcatgctgcgattgcttctagctctacttatgattatggtagaaataggcctagacgtaatcatgttgtgtctaatgtgcctaggagagtttgcaatggtcctactactgtttatcatacttgcaatacttcctttgtacttttatgtaagaatccaaaagtagttgctaaaaaattgggatccaaatgcaaggtagagaagacttgtatttgggttccaaaagttattgtgactaaccttgtaggacccaacaagagttggtacctaaaacccaagcttaaattgtcttacaggtttatgcatccgggggctcaagctggattatcgacagcggatgcacaacgcacatgacgggggagaagaaaatgttcacctcctacgtgaaaaacaaggattcccaggattcgatcatctttggagatgggaaccaaggcaaggtcaaaggattgggaaagataaccatcacatccgagcattttatctctaatgtgtttttagttgaatcgctcggatataatttgttatctatgagtcaattatgtaacatgggttataattgtttattcacaaatgtagatgtatctgtctttagaaggagtgatggttcattagcttttaagggtgtattagatggcaagctctatttagttgattttttgaaagaggatgccgatctagatgcatgcttaatcgctaagactaatatgggctggctgtggcatcgccgtctagcacatgttgggatgaagaaccttcataagcttnn

SEQ ID NO: 46437 - DNA, 1553 bp, Zea Mays
ttgcctacttcccgttgtggcgtcccaatggacgagggttgcacgcaacccctttcaagtgatctgatgatcaacttgaataccacggtcttttcctttgagatctttttccgtttgcgaggaatctccacaagttggagcctctcgcccttacaaagttttgatcacaagatgcacaacagtaaggatgggagagcaacacacgcaatacccaaatctgcagcacacacacgcacactggccaagacttgagctcaaaacgtagcacagtgagttcacaactcaaacggagctcaagtcactaacacaatcgatcaaatgcgcggaggcggagtctgggagtcttagaatgcttagagaatgctttgtatcctgctccatgcgcctaggggtcccttttatagccccaaggcagctaggatccgttggagatagccttggaaggctattcttgccttctttcgagtggtgcaccggacaaccactgtagcagtccggtgcgtgatctccttccatattgggcgcagccgaccgttgggcctcgggaccggttggcgcaccgcacactgtccgctgcacaccggacagtccgatgtgcccaaccgaccattggcgcggaccacgtgtcgcgcgttgatagcgcggacgaccgttggccgctggcgccgttgactcaccggacagtctggtgcaccaccggacagtccagtgaattatagccacgtcgcctttctcttttcccgagagcagctagttcaccgttgaccagcctgggggcaccagacactgtccggtgcaccaccggacagtccggtgtgccaggcccgagctgttgttggctgtactttgtcaactcttctccaattcaaatcttctttttcttggcactgtttctagcacttagataaccatgttagtatgcaaaaacaattcactaaatctagaaacataccttgttcttgatttcacactactcactcatttggcacataagaacttacttaatatgtgttggacatctaatcaccaaaatacttatagaaatggccctttcaatctccccctttttggtgatttatgccaacacatcaaaaagcaacaaaagaagtgcaacatcaatgcaaatgaagaccaattccctttttacttaagatttggcatatttggatcactctttgccaccacttggtttgtttttgcaaatcaaattccttttcctatctctaagtcaaacacccttgtttgggcaaatcgagagatattccaagagtaaaattgatcaagtgccaaaaactcccccttttcccataatcaaaattctcccccataaaagaccaaattttgcaataagagtattttgacaaaaaccaaattctaactcctctattttcaaaattcacaagtggttggctgatccattttgctttggccttaatttctccccctttggcattaagcaccaaaacggggtcattcttggccctttaacctcattgcctcaccaaaatgtcaattaagagcagaaaggcaatgagagcacaagtagaacatgg

SEQ ID NO: 46438 - DNA, 1216 bp, Zea Mays
gtcaaagttgtagcacatctcccccctaaacatgtgcatcatttgcatacgaacttgtgaggtccggggatgacttgtataacttgaacaccacaaataaacaataaatgaggtaaaaactcaaagtaacatgaccaaaagcatgaaacacatgtatgctctagatcaatcccaagttacacgaatctaagacatccagctcactacgcaacctgcaataccttttctcatctaaaggcttggtgaagatatcggctagctggttctcagtgctaatgtggtaaacctcgatatctcccttttgctggtggtctctcaggaagtgttgtcggatgtctatgtgcttaatgcggctatgttcaacaagattatccgccatgcagattgcactctcattgtcacataggagtgggactttgctcagattatagccaaagtctcgaagggtttgcctcatccaaagcagttgcacgcaacactgtcctacggcaacgtactcgacctcagcggtggatagggcaacagatgtttgtttcttggaactccaggacaccagggaccttcctagaaattggcacgtccctgatgtgctcttcctatcaaccttgcactcggcatagtcgaagtctgagtatccaattaagtcaaaggtagacccctttggataccaaatcctgaagcaaggcgtagaaactaaatacctaagaattcgcttaacggccacaaggtaacactccttggggtcggattgaaatctagcacacatgcatacactaagcaaaatgtctggtctactagcacaaagataaagtaatgaacttatcatagaccgatatgccttttgatcaacagacttacctcctttgttgaggtcgagatgtccgtcagtccccattggtgccttcgcggacttagcatccttcattccaaatctcttgaaaagatcttgggtatactttgtttgggagatgaaggtgccgtccttgagttgcttcacttggaatcccagaaagtgagtcaactcgcccatcatggacatctcgaacttttgcatcatcaccctgttaaactcctcacaagacttttggttagtagaaccaaatataatgtcattgtcatatatttggcaaacaaatagatcagcatcacaagtctttgtaaaaagagtgggatcagctttcccaaccttgaaagcattagcaattagaaattcgat

SEQ ID NO: 46439 - DNA, 1460 bp, Zea Mays
cgtatacctcctccttgattggcccattgaggaaagcgctcttcacgtcccatttgaaacagcctaaaggaatggtgagcgacataggctaatagaattcgaattgactctagcctagccacaggagcaaaagtctccccgaaatccaaacctgtgacttgagcataaccttttgccacaagtcgagccttgtttcttatcaccaccccgtgctcgtcttgcttgttgcggaacacccacttggttcccacaacgttttgctttggacatggcaccaggctccagacttcattccttttgaagttgttgagctcttcctgcatggccaacacctagtccggatcctgcaaggcttcttctaacctgaaaggctcaatagaagagacaaacgagtaatgctcacaaaagtagctaatcgtgagcgagtggttactcccttgctgatgtcacccaaaatttgaccaacggggtgatgtctttggatcgacgctcggacttgagttggagggatccgtggtgcttcttcctccataacttgttcttcctgtgctcccccttgatcatgcaccagtgtcgaagaagagggttgatcttgttcctgcagttccagtggtcgcacatctcctacctccatcgtgcgcattgcgaccgtcggaacttcatcttcatctatgtcatcaagatcaacttgctctcttggagagccattagtctcatcaaatacaacgtcgctagagacttcaactaatcccgataatttgttaaagaccctatacgcctttgtatttgagtcatatcctagtaaaaaccctaatacacgaaagtaagagacgttgggtttgttaccagtaaggagttcgtaggaggtcttcttgaggaggcgatgcagatagagccggtttatggtgtggcaagttgtgttcacagcttccgaccaaaactgctcgggcatcttgaactctccaagcatcgttctcgccatgttgattagcgtcctgttcttcctctctaccacaccattttgttgtggtgtgtagggagcggagaactcgtgcttgatgccttcctcctcaagaaactcttcgacttgtagatttttgaacttggacccattgtcgcttcttatcttcttcacctttagctcaaattcattttgagctcttcttaggaagcgctttagagtcccttgggtttttgacttatcctgtaaaacgaatacccaagtgaagcgggaaaaatcatcaacaattacaagaccatacttacttccctcgatgctgaggtaggcaacgggtccaaagaggtccatgtgaagaagctccaatggtcttgatgtcgacatcacattcttgctatgatgagtgcttcccacctgtttccctgcttgacatgctgcacaaggtctgtctttctcaaaacagacatcggttagtcctaacacatgatctccctttagaagc

SEQ ID NO: 46440 - DNA, 2402 bp, Zea Mays
gcacaggtgatatttcagggatgcaccaatctgaatacccttgccagcacaccatcccaatcttcatcctattccaaagttggtcacggcaagaaaaactgaacttggtcacttctagcagccaaatatctgatttgtccctttctgtagatagtaaaccaacagataagaattctagtgtgtgcagacttaaatggatccaaactgatatttctaaagggatgaagccactagaactgctgctgtccagcataccccattaaagattcattagatgaggaccccctctcattcactgctcacaaaataggtcaaaatttggatattttttagtagatctgaggccactagatccctggctctggacttcgaccttatacctacccaaacatccaaagaaaccagcagggagaggagataatcttcttcagaaactgtcttcagtcctaaacgaattactgttgcttagctggactgacaggggcctttcaaggtcattcccttacattttccctgtagcaacaccttaatttaatcataggaaacttgctcattgactatagctcttcaacccactacagcattccactgctagaaacacatggatcacaaactataaggttccaaagccaagcacacactctgaaactcttcttcagagagctgaactcaaatgcaaccctttaagtctgacaaggcatattagagagcattttactcacaattccatatgacaacagacccatctcccttaacaagccttattctccaaccataggtcttccactttggtacaacactccaaagctgaaactactcagaattgaagttgtggtgttccaaattatagcagaaacagtcaaacactcggtctcagcttaactgaacagccctcactatttctgacagaggacgttacagctccattatctctcaatctttacataacaacaggaccatctccttgcatgaaacttgtccatctatatctggtatccaacttttctatagaaactatagtctaaaactactcatattgatcacaaaacagctccaaattaagcatcctatactgaaattcaggtttcagagactgaacccaaagcagttggaaccagcctgacagtccaattttgagccacttttactcctttttctgtgtagcaccaaaccaaactcacttaaagaaatttgttctcctatatatggtcttccattttgatatacaactcttggtctaaaaccatatatattaatcacaactgagctccaaacagagcatcattggctgtttttcagagtttcagctctgaaccactaagtcaccaatatactgacagtccatttttaggcaagctttactccaaattttgcatggggtcatgtcaaactcacttaataaaacttgttcaccatcatatggacttcaacttctctataaacaccatagtccaaagttctatggtttagccacaaatgagctccaaacagcatactcaacactgaaactccactcacttcactattcactatctgaaattccatgagtctgtcaacacttctttggaccaccttttctgctggtagcatatacttttaaggcaaagttgcttaacaaattttgtacttcaatagttcctctacaatttctatatagtgacccttagctaaacccttttggattccactctaccacaacccaaagtttgcacaaaatactgaaattcagactgtattttattaagtttgaaccccacactttccagcagctctactttagaccagttcttctccaaattccatatagatttaaggctaggttactcaatcaaagtcacactcctcacatagctttataatttttttacaatgactaccttcaaaatgtttatagatcagaagttataaaggaccaaaacttcctagttgctactattttcagcaattccaatctgagctcaaaactgaactttgatgatttactccaattttcttcacacaacatgggaatctccaaataagaaattcattcactttttcaagctccacaactttgatatatggacttttgtcaaattacttctagattttgaattcctcttttgggctagttttagtgtttcacatgttcttcattttcttcaagtgtttcttccacttgctctacctttgaaaacaaggttgccataaactctaggacttgcctttagcacttgaagtttccaagtcaatttgttatttgctcaagagttgacctactcttgttcttagcttaagccaagtccttaaactaaactctaacaacacacaacatcacactgtttgaaaaaaaattaacctagtgaatgcattctaagtgtaacaagcacattaatgcagatgcttatgatgacatgtcggag

SEQ ID NO: 46441 - DNA, 361 bp, Zea Mays
ctcttacaaggtaggggaggtgttttgttttacttaaccacgatgttgttcaacacctctaaggcagttacctaagctccttcccaaggagtcattcctttagaatggaacatccaatgtggccaagatggttttctagcacgttctggaatacgcactactactcataccatggttgtcctctaagaatagtgtgcgacaacatttctctaagggggaaatcttttattagcatagttcttagcatgatgcatgtataattacagaatcaaccttagttgattcaaccttctatgcattacactcttcctatctggtctttaaaataaactcttcagaaacacttaggtaagaagggaag

SEQ ID NO: 46442 - DNA, 830 bp, Zea Mays
ccattatctctcaatctttacataacaacaggaccatctccttgcatgaaacttgtccatctatatctggtatccaactttgctatagaaactatagtctaaaactactcatattgatcacaaaacagctccaaattaagcatcctatactgaaattcaggtttcagagactgaacccaaagcagttggaaccagcctgacagtccaattttgagccacttttactcctttttctgtgtagcaccaaaccaaactcacttaaagaaatttgttctcctatatatggtattccattttgatatacaactcttggtctaaaaccatatatattaatcacaactgagctccaaacagagcatcattggctgtttttcagagtttcagctctgaaccactaagtcaccaatatactgacagtccatttttaggcaagctttactccaaattttgcatggggtcatgtcaaactcacttaataaaacttgttcaccatcatatggacttcaacttctctataaacaccatagtccaaagttctatggtttagccacaaatgagctccaaacagcatactcaacactgaaactccactccactattcactatctgagattccatgagtctgtcaacacttctttggaccaccttttctgctggtagcatatacttttaaggcaaagttgcttaacaaattttgtacttcaatagttcctctacaatttctatatagtgacccttagctaaacccttttggattccactctaccacaacccaaagtttgcacaaaatactgaaattcagactgtattttattaagtctgaaccccac

SEQ ID NO: 46443 - DNA, 320 bp, Zea Mays
aacgaactcaggcccgtgtttcgttcactgacccagattttcctctcgggcattgctttccccactcgaatcgagccagccccatgcctattaagtatctggccaccatcgcctccatgcatcaccatcgatgtagagagaaaatagggaagagagaaaaccggatgccaccacaccaaagactcgcctaggtcatcgtcctgttctcagtaactagccttggggattcacttggggaagcagaacttgggggaggtgttggtaagcccagagaggcagagatcgtttagggcaacaacgattgctcgccagagaacgag

SEQ ID NO: 46444 - DNA, 55 bp, Zea Mays
gttttttcgcacttcttgtgctagtccggctgcacccttaggcgacttctgcgcg

SEQ ID NO: 46445 - DNA, 583 bp, Zea Mays
ttatgatgtagaaatgaatgtcacatctttactatataataggagttctgtacaatatagctaaataattacatcatatgaagacaacgatcctccgcaaccacaattgactggcagataacgacctagacctctcatggactcatcacagcatccttcatgctccttatcttggcagtacctatccttgacctgggggtgtgagtacaacaagagtgagctcacatacgttcatcgctcaacaagttgtggggaataatgtgcatgagctcacttccggtgggggcccatgtgaagtgtaaggcttatcaacgattaagggttaaggctgagcattgcttttaataagttggtaaaaattttattagcaattactaagtgtaagtagataccatcccaataaaataagagatcacaattaataataaatcccacaactcaatgaaaatgacagattaagtttaattccataagttaatcatgcgagagtcctgagttgctcttaaccgtgagcatggctgatatacccattttacactctacagaggttgcgccctttacccacaagtcgtgtatcccatct

SEQ ID NO: 46446 - DNA, 229 bp, Zea Mays
aaaatacttagaaatggcccaagggcacatttccctttcaagacccgaggctaattattttccccttctctataatatttaatgttttttttgtttttaagttttttgtattgtaataaagatttatttgtttgttatgtatatacttgtcgtctatgtattttgtcatgcatgattattattggcttgaatggtccccgcgtccaccccccctcacacacacacagag

SEQ ID NO: 46447 - DNA, 256 bp, Zea Mays
tgaaagctctcttgtgagttttggtgtttggatgacaactcaattaaaggactaacaagtgtactaagtgttgaacaggtgcttaaggtaaacctagcagggttcaacacaagtgaacaaatgtgatggtccaagaactggattatggatacataatggacatcacaagtaagatggacattgcaaaagtgatactcggatgcgtagctcggagacaactgatcaagccaaggacggaggcaagaagagcttcgag

SEQ ID NO: 46448 - DNA, 4142 bp, Zea Mays
caaacttaaattcatgtgaacctcattctcgcacgtgtgcgcatttgaattgtatatcaccatgtgctaacccctgttgctcaaaagaaagccaatcatggattgagcaacaagttttagggtcacaaaagaaattctgtgggaacaagaagcaaagacaactaaggagaagacacattgctcaactttttcaagatatccacgggcgcgtggtgaagaagcttgagaaaggaaaaactgcagcaagtgttaagctccataagaaggatgttcctaaagatgaggaaatcaacatgagcccggaaaaaggtaaagattcaattaatcatgttgtttgcactaaccttttctctatgtcatccaagaacaaaaagagaaaagggaaaaggaggtgctttaagtgcaacaagtcaggacacctcattgcgtcgtgtccatacaccaacaagggtgaagggataaggagatgcttcggatgcaaatgacaagaaccacacgatcacttcttgtcctctattgacggatcaagcatgtgcagtctccaagatgactctcaccaagaaaaatggcaaacagcaagcattatgtcagagtgagcgacgcttctgctacaagtgtggtgagcagggtcatctatcaaaggtatgttataaaggtaagattcctaagcaagtgaatttgtctcactctcattcgcttaggagacccaaatcatacacttgtgctagatctataacaagatcatctagaactagcacaaaggcaatttgggtaccaaaggcacatttagatgatcattatggacccatcccgagatgggtaccaaactgtgccaaatagatcatgcaggtgccttgagatgaattggagaccatgggagagcttaagacggttaattcaaactctatgcttaggctgtaacttgttttaatgtttgatcatttacccaaggttgaagtattgtgagacactaatctcatattcatctcaagtgaaataagttgtagaagtccttattggtgaatcaagcaaaggacctcgattgcgcatctgtctctccaaaggacggtacctgtgtttcttaagtatcgtgttatctgtccttggagtagttatgctttttgattgcctgtgttaggtaccttttgattaatgattaatgatttccatgttcgtaattatgctcgcttaatcatgagtatgtgctttaaatgttatatctcttgaatcatttaatgggcagtttttcattggatatatccaccatgattagctcttggtgtgttcatgaataaacatgtattcagttgtgagttatgctatatggtttttatgattaacctgtgtgcaaatatgacatattgtttagtttatggtgtgtcttcaatgcactcttttgagctataaggtgcatgaacaaaaggagctctcaattagtatcttggcttaggtgctccttctgtataatgttgattcttttggtgtatctaaggaaccttcttaactatgatgtgcttaaaacatgaacgtgttgtttttcaattggtatatgtgatgcaatgatagttaagtatgaagcatgtctaagttgcgtataaatgttagacttcctgtgagtattcaattggcttagatgctcctgaggcatgcattgttgtatttagtcaacctttcatttagccttcaatttgtattaagtggctttcaattttggtatttaattgatatctctttgggatgaaagtgatagagtatgccttgaccaaggtatgttgtgatcccctctagttctgaggaagctagaatgtgcaaagtgcaagtcattcaaatacttgatgcacaacttgagggggagcacacataacttgtgtcttttgagactaactgtttcttgagcaatcttgtatagtctctaggtggaaaagagaagatgagcaagaaatggagcaatcaggacttgggtacctctgtaagtcaagaaattggtatctcaagttgtgagtaagtgcatatttttagattgctcatgctctataatatctggtgataatagatgcttattcttaaatatcatggagctatgataataaatgaactttgcaattggtatctttcaattggtagccatgatagtttgcttcaattgacatcttttgataatcattagaatagaagtttcttcttgtgcccaatactataacttgttctaagtttggtgtcttagcaacaagaaaaagttaggataaagattcaggcacaagtgtggagaagctctcgagagattaaatactttcaagatgggaagtacactacaacatggtaaaggttcaaaaggaagtattaatctttttccgtatatgtatcttacttaaatgctggtggtgcatatgttcaataagtaagggggagtgttgatagtgtgtttttcctcctaaaacaccctgctgtcccttgacatcatcctatgttcttgcttgagtatagtttttggtgtttgatgtcaaagggggagaatttgtgtattaaagcttatctcaacctgagaggaaagcttatcctaaggggtgatgtgttagtttaagctgtgctagtgtgtaattcatatggttcttgcagtattatatgtgttgcatcatatggactagtgtttccgctgcgataaattatttggcttctatagtgtaatagatagtcatgtggttaatggtgctttaagattaaaggtgctttaagattgctttaaattggtatcttagtttaaattggtatcttaatggtgaatagtggtaggttgatattcctgtgatatatccactaatttgaatgatgtttaactctgattatgtgcatttgtgtgttatagcatcatggtttgattcttgatacaatgcatcctaaaaagttctaaggtgtagaaatgtttcgaattgcctaagtatgtgcaaattggcgtctgaggccaaaatgatgtttttgaagtaagcacatatttagggggagcattctataaacttagagttcaaaaattgtgcttcaaatcttattcttatgtgagctttaattgtgttgccatcaatcaccaaaaagagggagattgaaagctctcttgtgagttttggtgtttggatgacaactcaattaaaggactaacaagtgtactaagtgttgaacaggtgcttaaggtaaatctaacagggttcaacacaagtgaacaaatgtgatggtccaagaactggattatggatacataatggacatcacaagtaagatggacattgcaaaagtgatactcggatgcgtagctcggagacaactgatcaagccaaggacggaggcaagaagagcttcgaggtaccaagtgcacgagagaaggtcaaggaggctgaggaacccaaagccaagggtgaagaagaaggcttgcaaagtcaagggtgatcgagttgagaacagctacggcacatcaaggatcactacataaggacgtgacttacaaccaatgaggtaacagctacaattatgtggtgtaagtcataaggctcaagatcaagctctaagaaggagatcaagatcactagaaggagaacaagtgtcaaaaccaggactggaagcagcccaaaagagctaagttcaccttgatctttagtttgggttgttcctatgtttggagatgttctatgtgacctatgcaggatgttggagctaagaaatgtcaatctagatcaagtcaagcagacttgatgagttatgagtccaacatcaaagctcaagcatatcaaatgctatagatgtaataattaagagaaggtatgtttctagacttagtacattggttttgtggactaatatacttgtctaagtgttagaaacagaaagaagaagaaaaggaaagagggtgcgaaaggcttggctgtgtacaaccaagattcagctcagtctggcacaccggactgtccggtggagcaccggacagtgtctggtgcgccaggttgaactccgtcgaaaaggtcgctctcgggaggagtctggcgacgtacggctataattcaccggactgtccggtggtgcaccggactgtccggtgagccaacggtcggctgggccaacggtcggccgcgcaatccgcgcgtgacgcgtggacgagc

SEQ ID NO: 46449 - DNA, 324 bp, Zea Mays
ggtgtcgagacgagccacagccacggggcggtgtggcccgcggcggatgtgattctccggtgagcaattggtgaagttccagggctcccccaggcttgccgatgcctcgactaggttgcccaccatcaagagcaacccctcgatctaccgcggccaccagaatattagcgcagacgcggaacaacagcggtgtcgtcgagtttccctacctacgcacctcacgccaatggcgtttcgaccctggcagctttatcggagggctcggaacaagagcacggcgaggcttggtctttatacccccaagaccgattcctaacagccacg

SEQ ID NO: 46450 - DNA, 3539 bp, Zea Mays
ccaactatgattatgagtctgtccaaattcaccactgctagggctatctggtctcatctgaaggatcggtttgttcaggacagtggggctcttttacatactcttatgcagcaaactcatgtcattgagcaacaagatatgtccattgatgattactattcagcttttgatcgtcttatgagtgctttgacctccatggtgcctgcttgtacagctgtgccttgcccagcccataagttcattgagaagttctttacctacagatttgttatgggcgttcgacctgaatttgattctcttcgtgcaaggttactacacacttctgatactctcaccatggctcaggcgttgtctgaattacttgctgaagatactcgccttaagtccatgtcttctattactggtgtcagttcgcacagtgtattggctactgctcagaagtccaggagcacctcctttctgccttgtgagcattgtaagaagaccactcatcggtctgagaactgctttactaagtatccagagaagctggctgattttcgtgtccgtcgtgctactcgtggtcgtggtacaggaccatctcctagaggctcagttgctgttgctgctacttcatctgctggtgctttgtcatctacttgggttctggactctggagcttcatttcatgtgacatctgatcagtcacgcctggcttctactgcacctgtcaccgagggtacttctgttcagactgctgatggtacattatgtcatgtcacccacaagggttctctttccaattcaaactttactgtcccaaatattttctttgtacctgaattatccatggatctttttatcagttggtcaaattaccgatcacaattgctttgttggatttgatgactcatcttgttttgtacaggatcggctcacaggggatgtgattgggactggccgtcgccgtaaatcttcgcctcgcctttacatcttggacacattgcgtctcccttcccatcatgcctctacagctcgtgtgcttgccgcttccggtcccgcactgtcgtttgcccagtggcatcatcgtcttggtcacttatgtgggtctcgtctgtctactctaataaagtcaggatgtttaggtcctacacatgttgagtctagttttcattgtaaaggttgtcatcttggcaaacaagtacaacttccatactttactagtgattctcattctgcaaaaccttttgatcttattcattctgatgtttggggtccagctccttttgtttccaaaggtggtcataaatattatgtcatttttattgatgatcattctcgttatacttggatttactttatgaaacgccgctcagaattgccttctatttacaagtctttttctcgcatgattcacacccagttttctgccactattaaaatttttcgttctgattctggtggtgaatttttatctgataattttcgccagatattgtccttagaaggcactttagctcaactttcttgccctggtgctcatgccccaaaatggtgttgctgaacgcaaacaccgtcatattattgagagtgctcgtactcttttgatatcttcttttgttccttcacatttttggagtgaagttgtttcccactgccgtgtatctcattaatagacaaccatcctcaaaactttctggcaaaacaccgggtgaaattctttttgggacatctccacgatatgatcatcttcgtgtgtttggctgtctatgttatgtcctgttaccaccacgtgaacggactaaattgactgctcaatctgttgagtgtgtctttcttggatacagtcctgaacacaaaggctatcgttgttatgatccatctactcgtcgtattcgaatttctagagatgtgagtttcaatgaaaatcgccctttttttacaacaagtccactcacccctcatattatcccacagaatccacttctttcatgtgtcttccttccgttcctgatttttcatctgaaccatcatctttcacaaccacacctgatgttcttattcccataacaccaccttccatctccacatcatcttactattccaaaccacctatcacccaaacctacattcgtcgttcctgctctattcctacggctggtcctgatactgatcctgtacctgattcttgtgctaacaatactgagtctaatgatgtttttaatcagggatatcgtcttcgtgaccgtggtaccattgaacctccagatcgctatggttttccacgagctagtgtggcaattgttgaaccaactacttatcaggaggcttctgggattcttgagtggcagcttgctatggttgatgaattagctgctcttgaacgcactggcacatgggatatagttcctttaccctcacatgttgttcctatcacttgtaaatgggtcttcaaagttaagacaaaatcagatggttctattgagaggtataaagctcgtcttgtggctcgtggtttccaacagactcaaggacttgactatgatgagacttttgcaccagttgcccatatgaccactgtacgaaccttgattgcagttgcagcctcatcttcttggactatctcccagatggatgtcaagaatgcttttctcaatggtgatctacatgaagaagtttatatgcatccccctccgggtgttaatactccctcagggcatgtttgtcgtcttcgtcgcgcattgtatggtctgaaacaagctcctcgtgcttggtttcagagattcatctctgtcatcacagctgctggattttcttcgagtgaacatgatcctgcattgtttgttcatgtctctccaaaaggccgcactttacttctattatatgtggatgatatgctgattacaggtgacaactcagaccatatttctcatgtcaagaagcaccttagtaaggaatttcagatgtctgatttgggtcctcttagctatttcttgggtattgaagttcaacagactccaaaaggattttatttatctcagtccaaatatatacaagatctacttgatcgctctggacttactgatacacgcacagttgcgacaccaatggatattcatttacaacttcgtccgaaggatggtacaccactagcagacccaactcgatatcgccatattgtgggtagccttgtttatctcaccatcaccagacctgatattgctcatgatgttcatattttgagccaatttgtatccacaccgacctcagttcattatggtcatttgcttcgtgtgcttagatacttacgcgggacaagatcaagatgtttactctatgcctctgatagcccacttcagcttcatgcatattccgatgccacatgggcaagtgatactgttgaccgttcttctactacaggttactgtattcttcttggatcctcacctattgcctggaaatccaagaagcaagcagccatatctcgttctagtgctgaagccgagctccgggctcttgctactaccactgctgaaattatttggttgcgctggctcctg

SEQ ID NO: 46451 - DNA, 479 bp, Zea Mays
ccaaccctatatccagtgtctcgtgtgtttcctctgtcgtgcttatgggaagggagacgagttctctacatcttcttgcgcctctactgctgacggaagggaagggagcggatctggtgatccatggtaacgtagttctcaacacgttatcagcacgctctacctcgacgttgctgcgagatcagatctgcatcaactctccgtcaagccggcaggtccccggcctagccgaactgtcctacgcgacagtcttcgattactcctctacgcaatcgaacggtataattgttttttaatctaatgttggtggaatctcgtcatcgcccaccatgtccagtggggctcctctcgatctgccccgagcaccattgttcgtgctcgccttggagtcacgaccgcgcgtcggacctgcaccgctcgtccgcacatcagagatactcacgtcgcgtcgaaagtcgtgcgcctgagctgtggccgcg

SEQ ID NO: 46452 - DNA, 50 bp, Zea Mays
tgtaggaactaaaaattagtccctagaaaccaaacaccctcttagctaac

SEQ ID NO: 46453 - DNA, 785 bp, Zea Mays
tctcttctctaatcaaagccgggaacaaaacttccccgcaagggccaccacacaattggtgcctcttgccttgattacaatggagttgtgatctcaagaacaagtgagaaagaaaagaagcaatccaagcgtaagagctcaaatgaacacggcaaatcactctctctagtcactagagttttgtgtggaattggagaggatttgatctctttgaatgtgtctagaattgaatgcctagctcttgtaagtggttgagaagtggaaaacttggatgcaatgaatggggggtggttggggtatttatagccccaaccaccaaaagtgaccgttggctggaggcgtctgctcgatggcgcaccggacagtccggtgcacaccggacagtccggtgcccctgccacgtcatcactgccgttggattctagccgttggagcttctgacttgtgggcccgcctgggtgtccggtgcacaccggacatgcactgtttgatgtccggtgcaccggtatgggcgattctgacttctgcgcgcgctgcgcgcgcatttaatgcaccgcagggagccgttggtgccgcagggagccgttgctccgctggcacaccggacagtccggtgtacaccggacagtccggtgaattatagcggagcggctgccgcgcgaacccgaggctggcgagttcaggaggctgagcttccttggagcaccggacatgtccggtgcacaccggacagtccggtgaattatagcgcgccgtcttccgagaaatcccgagggtgaagagtt

SEQ ID NO: 46454 - DNA, 253 bp, Zea Mays
caggtttgaaaccctaatccccccttcttatcttctatcccaaaactcccttagatttttgccatcatatgcatacactttgtttgatcacaagcacctcactttgattttattttccaacacctagattatccactaaatgatttgttcaaaaagaaaagaaacaaaaatagaaatgagttgttaaaaataaaaaggaaaaagaaaaaaactcttcttccccctgctgggccaattctggcccatgtcgcgg

SEQ ID NO: 46455 - DNA, 939 bp, Zea Mays
ctcatatatagactttttatttttttgaggccactaagatcacggaaaactggtatgaacagaaactgtcgaatctgccattctgcagaaattaaattcgaaatcaaaacctaaccccacacctaatccaacctctaatccttcaatccacatgatccacaacctccaaaagcacataattatagggagaaacaaggatcccatccttacctagggttttccctaagaaaaatctgcaagagatgggggtagcacatctccttgatcctctcttcctcttcaatccatcttgttcctcctcttctcgatccttgttgcgtggggggagatttagggaggaagaagtattggagggctgctgcaatggggggagagggggcgaccagccaagggggaaaagtgaggcggccaagaaaggggagggggtggcggccaagaaggggaagagggtggccacctagggtttattttgtgggagaaaagaagtgacgcctcatatgacttctaatgcagcatccaacggcccacaaccctttttctaatatccactcaccgaagatcaacttttgggtcaaaatttttttgggatattacactctactcccttaaaaagaattcgtcctcgaattcaaccactccaaccaaaacatccaaggtaccccatatagcaccaccattcaaaacatgggtccattattggtcttaattaacacaagaacttctaccttggactaattgtttaaggaaactacacgacctgacatcaagcatgaaacaacatgcaatgaagctcaaagcaagtcatagatgcaatcaacactacaatttcacaccatcgaatttggatgcaactatacatcaacatcaatgtcttaagacaacactcttttatgaaggggtaatatgcactaagcacaacccttaccaacttcaacaatt

SEQ ID NO: 46456 - DNA, 203 bp, Zea Mays
gttttccctaagaaaaatctgcaagagatgggggtagcacatctccttgatcctctcttcctcttcaatccatcttgttcctcctcttcttgatccttgttgcgtgggggggagatttagggaggaagaagtattggagggctgctgcaatggggggagagggggcgaccagccaagggggaaaagtgaggcggccaagaaag

SEQ ID NO: 46457 - DNA, 174 bp, Zea Mays
ataaatttcacaataacatcatagtacttattacattgcggaagtcttacaaaataaaggataaatataaaacgaactaaggatcatccttggcgccataaagtcaactgggagacgccacctagatcagatcgaactcctcgctgtgtggctcctcttgaaccacatgttttc

SEQ ID NO: 46458 - DNA, 322 bp, Zea Mays
aagcagattaatgttttacctactaaaactaattcattatcttatggtggtacatgctaagatgtccatttataatatctcaatcaatcaaagaagcaaatcaggcatttatcatcagaacaatcaaccaacatttttaaatagagaaaatagttttaattttgtcttaggtctcctatctcttaagaaggtcataaatgtaggattccaaagtgtgaaacccatcttgtcttagagtagaaaaggtaagaacaatcagagtagaacagtagaaggtgagacaggatcaagataagtttaggaagaatcagagtaaggtaag

SEQ ID NO: 46459 - DNA, 230 bp, Zea Mays
gcggcggtggctgggaacaggcaggcgcgtggttagggttaatggtagttgggcccctagtgggccaactagggttaggtttagttttttttcttttttttttcgaaatgaacttttaaagagctaaaaaattctcaggaattcaccaaaattatttataaatacaatatttatttttagactaataattattttattatttaattatcatattaattactaggattttc

SEQ ID NO: 46460 - DNA, 681 bp, Zea Mays
attgggcctttccctgagttgggtgtgcttaatgaactgttgggctccgggcaaccctaatttgttgggcctcggccaaccccacctgggctgggtgcatcatctggtatcagagctagggcccattttaagaaggtgggaatgatgaggacatcctccactattacccgttggcaaagacgcaattggcccagttggcccaattgtagtcggacggtgaccgtgtgagcctcagaattatcccacctcgcttaacttgggaggaggaagccactttaaaagggagagtcacccttcccccattgggctagtcttttggggcgattgggcctttccctgagttgggtgtgcttaatgaactgttgggcttcgggcaaccctaatttgttgggcctcggctgccttaataagtactagagatatagggaacgtatctgttgcaaaccaacccctctgtgcaaccgtgcaaacttttaatatgaaccacatgatgttgatcacaccttttcaaatccccacttccacttctccgtacgtccccttggatcaacattatgtgattcagattagaagtttgcacggagaggttggtttgcaccagatacattcctatatatattcttcatgattctcttcggtgtacgtaataagtatcataaaattaatagtataaaatatttt

SEQ ID NO: 46461 - DNA, 150 bp, Zea Mays
cacagttattctacagacaggagaagcacagatcttatgagtatgcaaatgtaaaagcacagcggattaaaattctacatcatatagcgtgctccaagtgcttggaaacaacaacagtattcattttataattcttgagttatagaaatc

SEQ ID NO: 46462 - DNA, 430 bp, Zea Mays
aaaaacaacttgtttattgtattttatggagattgtcttacttacatacaattattacccaacaaagtggtcactaaatgtcaaaaccaactagataccaggtgactttatacctgatcaaggtcggaggtgaccaagcgacggggagagacaccgaaaccgtggagacttcgactcgatctccgaacgaccgcagaatcacaaccggagctaattcacacaatgcgaggcagccgtactgcaactcacaaggcacgaactagtggatcccagaggaatctcttcacaagtccaggagaacaaggaagaacaggggtagagtaaacactcagcaacttggctgcggtactcacttggattatcaaatcatcaaatgttatcaaaagttgttttacatcatagacatagggggtatttatactagtgaaag

SEQ ID NO: 46463 - DNA, 217 bp, Zea Mays
ctaaaatgttagcatttggatgtgcctcagtctaaagaagtgacactttatgataagagcttgaggattgtgattttcactaaataaatttgtcttgattatgttatgtagtgtccacatagtttaaagagttgtaattgcaggatgggactgaaaaggtgcttggagcaaatggccccgaccttgactggtgtgatagtgttcaagaggatgaggt

SEQ ID NO: 46464 - DNA, 248 bp, Zea Mays
tttttttttctcgaaaaaacacgtttagacccctgaataacttaatgttgttttttaactctttgcttgacgtcgtaggccattgtgccgagataacacaacttagtgccacaacctatggcgacgagatatgtgacccattgatggcgtagcggtgggacgccgacgagggagcaccaatgggaagggggccagcgatgagggagcaccggcagaaggggtgtcgtcggcgaggacgaacaggggag

SEQ ID NO: 46465 - DNA, 337 bp, Zea Mays
gagagagggaggggagcgcggagcagctgcgcgcgtgggaacgggccgactattgggccgaaagggggaagcgcaggcgtgagggggaggggaggtggccgcggcatgggccagattcagcccagcaggggggaggagagctttctttttttctttttattttctaattcccatttccatttttgtttctttttgttttgaacaatttatttagtagataatctaggtgctggaaaataaaatctaagtgaggtgttcggaatcaaacaaagtttatgcatatgatgggaagaatctaagggagttttgggatggataaaaagaagagggggttagg

SEQ ID NO: 46466 - DNA, 713 bp, Zea Mays
ctcaaagccatcctttgctgtgctctggctgactcatgaaccactgtatttgcccctgttgttcagtgccttaggtctgagcttagtggagttttctccctgtcctcgagtctgaccggtgttcatcacttgagggacatagctcttgagttcaagtcggtgtaaacccactccacagccacccaacatgatgtattttgtgcatcgagtgccaatggcgaccacagcagcagttctcaccctcaccgtggacatgattcctcggaggttgtctcggccatgtggtgcttgtcccttactccttgcagatcagtgaagctcacaccatttactgcttgaactctaccactgtttgttgcctagaactaggtgtgaaatttgctcaaagataggctgtcaggtttctagatcctaaacttagtgcataaggctaaaactaggttttagtgttttgagctcaactttggagctctgttgcacccagtctatttggttttaggataaagtttctgtatcaagtttgaagaccgtagtaagatgaacaaaattactaaaaggagatggcctaggtcctacaaaaaattgggagtaattaatgtccaaactatctctgtcagacatgtgcaatgcagaccagattcagttgctgtaactatggttcagtgtttttctctagattttggagctcttttgtgtttgcttggtgaggtttt

SEQ ID NO: 46467 - DNA, 1881 bp, Zea Mays
ctagagagtagaacttgcacaacacgataaccacaaagagatcaacacagagatggcacaatggtttatcccgtggttcggccaagtccaacacttgcctactccacgttgtggcatcccaacggacgaggattgcaatcaacccctttcaagcggtccaaagacccacttgaataccacggtgttttgctttcactttactatatcccgcttgcgaggaatctccacaacttggagcctctcgcccttacactttgaagttcacaaagaagcacggagtaagggagggatgagcaacgcacacaagacacgaaatcagagtaccaacacgcacacaagtcacaacaagagctcacaacacaaccgacgagttcacaactcaaatggagctctagttgctttcacaaagaatcaaatgcgcggaatcgaagtcttggtgcttaggaatgcttagagaatgcttggtgttctcctccatgcgcctaggggtcccttttatagccccaaggcagctaggagccgttgagagcatttcaagaaggcaattcttgccttctgtcgcctggcgcaccggacactatccggtgcggatctctttccttatttggcgaagccgaccgttgcagtcttggagccgttggcgcatcggacactgtccggtgcacaccgggcagttcggtgccccaaccgaccgttggcacttgccacgcgtcgcgcgcggattctgcgaccgaccgttggcccgactgactgttggctcaccggacagtccggtgaattttagccgtacgccgccgacgaagtcctgagagcagctagttgaccgatgccagcctggtgcaccggacactgttcggtgcaccaccggacagtccggtgcacccagactgagcagactcttggctgcttcgcgccactctttttcaattgcattttctctgattctaacacttagacaaacatgttagtacacaaaaaccaatgtactaagtctggaatcatacctttgtattgatttgcaccttatccatcatttggcatagtttatcacttaagcacttgtgttggacactaaatcaccaaaatacttagaaatggcccaaggacacatttccctttcaatctccccctttttggtgatttatgccaacacaaaataaaccaactaaaagaggtgtaacatcaattcaaatgagaacacaaatttgttttgaatcaaatttggcatatatggatcattctttgccaccacttggtttgtttttgcaaatcaacctaaatttcctatctctaaatcaaacacacttgttgagacataagagaggtattccaagagaaattgatcaaagattcaaaaactcccccttttcccataatcatccattctccccacaagagaccaacttttgacaaaagagacaataaaagagttttgacaaaccaacaactctattctactattttcaaaattctcaagtggtagctgatccatttcttgctttagccttattttctccccctttggcatcaagcaccaaaacgggatcaatcttggcttttaaacctcattgcctcaccaaaatcttcaaataagagtacaaaggcaataagaatatggagatgaacttggagtgagttaccctctcatcggagtgcagtggaagtcttgcatggtccaagttcacctttccctttcaatccacctttaagactaaatcaagtaaactcaagcacacagttagtctcaaaaggtcaagctgtagcatgcctccccctaaataagtgcatcacttgcaattggacttgtgaggtccggggatcatgagtacaacttgagcaccataaataaacaacaaaatgcataagggaacatgatcaaag

SEQ ID NO: 46468 - DNA, 242 bp, Zea Mays
caaaatctggtcgacgggatgatccctttgaatcatcgctcagacttgagttggaggtgccggttgtgcttcttcctccatcacatgatcatcttgtgctcccccttgatcatacgcctcctcttgatgaacctgttcatcgtcttgagttgggggatgcaccattgttgaggaagaaggttgatcacgctcattttgttcctgtggccgcacatctccaatcgccatggtgcgtattgcgg

SEQ ID NO: 46469 - DNA, 1589 bp, Zea Mays
tcactagaatgtagcatttactcccaaaaactcggaaatacgaaacattgggtttgttaccggttagtagctcatgcgaagtcttcttgaggaggcgatgaaggtagacccggttgatggcgtggcaagccgtgttcacggcttccgaccaaaagcgctcgggggtcttgaactctccaagcatcgtcctcgccatgtctataagtgtcctgttcttcctctctaccacaccattttgctgtggtgtgtagggagcggagaactcgtgcttgattccttcctcctcaagatactcctccacttgaaggttcttgaactcggacccattctcgctccttatcttcttcaccttgagctcaaactcgttttgagctctctttaggaagcgcttgagggtcccttgggtttcagatttatcctgcaaaaagaatacccaagtgaagcgggaaaagtcatcaactataacaagaccatacttacttcctcctatgcttagataggcgacgggtccgaagaggtccatatgaagtaactccaagggtctttgtgacagccctcccaagttatcaggcccacatgcaccaacccttgccattgacgacctcagatggctgtgcacgtgtaccgggtaacttaacaaggctatcgagttcaccaactcgaactcatcatcccaaggatctcccacattcatgcatattacagtaatcacactcgatacacacacttcggagatagagcggaagactttacaaaacatattttacatttccaaagctcaagttttacaacataagaagaatggtaattattacaagtcctgatagtacccaaagtgcataacttattttaataattggaagggtgaagcctttccataagagatacacataacattctaagcttcaaggcctccacatgaagtaactaaccaaaagataagggaataaaacttctcctgcaaaaacaacaggggataaaaccctgagtacgcaattactcagcaagacttacccgactaaagaaaagactctcaagggtatgctagttgattgggaatcaaggtaaggtttatcaatgatcaaagactccttttgcagaaaagcttgctaccagttgatccttaagccaagttttatttcactagttaggttattacctgaatctatatttgcctagtctagttaaagcacttggcctatactagctgcattttattcattctcatatttcacttgctaactacgatgatggtcaccaggatgagtctccataaccgaggagcaacgacgattcgaaccgattatacccagctggggatctctaaccacacgacatatgtagcacttaacccttgcatatgtcaacttttcccacggagtcctccactacatgaacaggtccgcgccacccgagagcacattacctaccaggcgtgcgctgtgccaggagggtacatgctactctcgccatctctccactctcagtgcatgattgtctcttcacatatggaatagccgggttcaagcttaccctgtcccataccagggtatgtggctagttgcaaagtctcaaccacaacaggccag

SEQ ID NO: 46470 - DNA, 1554 bp, Zea Mays
caactagccacataccctggtatgggacagggtaagcttgaacccggctattccatacgtgaagagacaatcacgcactgggagtggagagatggcaagagtagcatgtaccctcctgtcacagcgcacacctggtaggtaatgtgctctcgggtggcgcggacctgttcatgtagtggaggactccgtgggaacagttgacatatgcaagggttaagtgctacatatgtcgtgtggttagagatccccagctgggtataatcggttcgaatcgtcgttgctcctcggttatggagactcatcccggtgaccatcatcgtagttagcaagtgaaatatgagaatgaataaaatgcagctagtataggccaagtgcttgaactagactaggcaaatatagattcaggtaataacctaactagtgaaataaaacttggcttaaggatcaactggtagcaagcttttctgcaaaaggagtctttgatcattgataaaccttaccttgattcccaatcaactagcatacccttgagagtcttttctttagtcgggtaagtcttgctgagtaattgcgtactcagggttttatcccctgttgtttttgcaggagaagttttattcccttatcttttggttagttacttcatgtggaggccttgaagcttagaatgttatgtgtatctcttatggaaaggcttcacccttccaattattaaaataagttatgcactttgggtactatcaggacttgtaataattaccattcttcttatgttgtaaaacttgagctttggaaatgtaaaatatgttttgtaaagtcttccgctctatctctgaagtgtgtgtgtatcgagtgtgattactgtaatatgcatgaatgtgggagatccttgggatgatgagttcgagttggtgaactcgatagccttgttaacttacccggtacacgtgcacagccatctgaggccgttaatggcaagggttggtgcatgtgggcctgataacttgggagggctgtcacagcgtggtatcggagcgatcccccattagcatggatattatagtaatcctttgataaacttcaaaatgattttgagtctaaatgatttttataaacttaagaatctataatcaaggcctgatagtagaagtgcaaataatatgtggttaaaactaaggactatcaggtggcttagtttaagatgctaaccactaacccacaacctgggaagggtaatgcatacatgtgtaatgttatttttagtgccattcagttttgaatggatcgacgctcaggtaaaggtgagttgtgagagcatgaccgaacaaacgtcggtctaggggagtgcttaaatgtggcactagactatatacatattctacatatgtatatatgaaggttgcaatgtggagtaattacttttctaggattcaataccccatggatgtgtatgggtatacaaacatgggagtgctgagaagtgtaatgcatagttaccacaatgggctgccctgtggctaaagtgtggcagcggcgcctatacgtggctcggcg

SEQ ID NO: 46471 - DNA, 408 bp, Zea Mays
gcaagaggctggacggttgtaatacccaaaaatgtatacaatgataatatggttgatctccttgtgtgatttgccatctacttcttgagacatgtgactaaacctaattaaaagagaataattctttactaaaacaaaaaaagccatacatcatgatggagttttgtttgtgcatttgattaaatgatgagactaataaaaaattacatagtaatgatttgaaaataaaatagaaattacaaaagaaaaataaaaaaaggaaaaaaaaacacacctgggcagattctagcactctcgacccaaaccccaccgcggcccatccagccgagcacaaatcacgttgggtcaccaacaggcgggacccacacgtcagacaaaccaaccatgcgccaaccaccccgcttgcgc

SEQ ID NO: 46472 - DNA, 3144 bp, Zea Mays
ctgcactgctgtagctagtcgacaggtatgaagtgggctgacttggttaagcggtccaccactacccaaatggaatcgtagccggctcgagtgcgaggcaatccgattatgaattccatcccgatttcatcccatttccactgaggaattcgcaacggctgcaacaacccagctggcttctgatgctctaccttgatcctttgacaactatcacatatagccacatgctctgcaatctcccttttcattccgtaccacctgaatttatttttcagatcctgatacatcttctcacttccagggtgtatggaataaactgtctcatgagcttccttgaggatcaattcccgaatagactggacattgggaacatacaagcggtccttgaaccataccacaccttctgcatcttccctaaaatctttgcctcttccttctagaatcagttgctggatttcactgatcttctcatcatccttctgtgcctctttgatttcccgctctaaggtgggttctaactcaactgttactcctcgcatggtattcaggaatcggagactcaatatgtcaaattctttagccaactcataaggcatcggatgagcgaccatcatattgacttgactttttctgcttaaagcatctgctaccacgttcgttttgcctggatggtaatgaatttccaattcatagtatttcatcaattctaaccatcttctttgtctcatattcagctctgactgagtgaatatgtacttcagactcttgtggtatgtgtagacatcacatttctgcccgtacaaataatgcctccatgtcttcagagcatgaaccactgctgccaaatctagtgtaatacccaatttgtaattgtaagagctaatataggagggataaacaatttcactttttctatgtgtgagtttgacctttttgtaccatcacatgtgaacaccatatttaaaaacaaataattataaagtatatgccactaaattatgcatcatgttggactttatttttgtgtgcattttgtgacaatatgaaaatagtgtaaaaagaaatatattaaaatccaactttggagatttaaccctaatttgcatattagagtctagagaaaagtaaggataaatgctactcaaaagtaaataaaacatatataaaataattaggccttccatattttgttcaattggtatatttaaaataactgcaagttcacatttaaaactggattcaaaatttgaattctagaaattaaaagagaaagaaaaggaaaacaaaatataaaagaaaaagaaaaaggggaaaccacatacggggccaattcggactttacttttggcccaccaggaaaacccaccaccacgacccattcgttctcccacgcagctctgtgtgttggacggcgccgacacgcgggccacctagatcagtcgcatacgagcctccctccttccctttttcaccgacgcgtgggcctcggttgtaagcgctcgccttcaaccgtcctgccgcgcatggcggagcttcgctgtggacttcggagctggtggttgcgtgcgcctgggccagtccgggcggatttaagtacggagtaaccggggctttgatctctctcatcaccatgccgcaatcgacctcgtcggggctcgggtttgggggagaataggtgtgggaagggagacttagaccgccgacgtgccttcccatccttgcgtggtcgccggaggccgtaggagggatcggggaccatcaccggggtaccccgaatatgtgcgtgggatccgtgggcatcgttggaggaagcactgctgggaattgctcgccggagtaagacaaccgcgccgcgccgaagttcattgcggactggcctcctgaacgcgccattctcggtgagtatttgctcctccatttcgttttgcttagcgctatttgatgcaaccaatcaattggaagatagcgcgttaggatgggtgatcgttgtggccggtgatggcgccgccgggcgcgagtgaccagagaaagggctcggggaggggaatgcgtctgtgctcggatcctggccatccgattgtgatggacggttccgatgagttatgggtttgcaatcatatggattagatctgtaccgttgagatgtgatatgaggggtgatcgtcgatcgcgacctcaactgttgatttccgatccaacgtgcgtcgttagggctagtctagtggcgcacatcgaggatttgggccaccggtttctaatcggactgtcataggcccacgataccccttcgtaggtcagattgacacatgagcccctctgttttaaggaataaacccgcagtccatagattctattccttgagtctaggaaatatttgtagaccagcccctgtgtttcggtttaattgaagctcggtccagagaacatataaaataggtaaataaatacagaaattgattttcaatgtataaataagtgctagaacttgtaaaattcatagaaaattcatctttagtccaaattaatccattccagtttctaaaattttgtaatattattgtctatcacttagagtctctgttctaacatgaaaacagtaaaaaaattatttcccacttaatcccattttaagcacataaaacctttggaaattcatatcttaaaatctataactccaaaattaatgattcctgttcctaggattttattttaatgtgtaaattattattatgtattttggttacatgtttggtgtgatgttaattttctctatatactgtgcttgtttgtattgtggcgagtagaagaacctgtgactgaggatcctggtgccgagcagatagaagtagctgagcaggagctcgttgaaggcaagttgtgcccttgaccacttttgttacccaataatgttctttattatcactattcaatgcataggtttaattttgatgggacccaataggttaccctagtctgtttatccagattaccttgttatccctgaatcacttgggtagttttgctattgctttacatggttttgggataatatttcattatatccatgttccaattattttgttattttatttatgttcatgtcaagatcattaatgttaattggaacatggagcttaacttgag

SEQ ID NO: 46473 - DNA, 382 bp, Zea Mays
aaacaagtaggaggagcacatcacaccaaaaatgtgatgaccacatcaagacctttggagatgcttcacttggacctcttcggacccgtcgcctatctaagtataggaggaagtaagtatggtcttgttatagttgatgatttttcccgcttcacttgggtattctttttgtaggataaatctgaaacccaagggaccctcaagcgcttcctaaggagagctcaaaacgagtttgagctcaaagtgaagaagataaggagcgacaatgggtccgaattcaagaaccttcaagtagaggagtaccttgaggaggaagggatcaagcatgagttctctgctccctacacaccacagcaaaatggtgtggtagagaggaagaaca

SEQ ID NO: 46474 - DNA, 818 bp, Zea Mays
caagttcatctcatgtactcttattgcctcttactcttagttgaagattttggtgaggcaatggggttaaagggccaagcttgatcccgttttggtgcttgatgccaaagggggagaaaataaggccaaaacaataaatggatcagctacttctggagaaaaattttgaaaataatagaatagagcttttgttttgtcaaaatactcttattggctctttttgtcaaaagttggcttcttgtggggagaagtgttgattatgggaaaaagggggaatttttgaaatcttgaatcaatttctcttggaacaactctcttcatgtcttaacaagtgtgtttgacttagagatagaaatttgagtttgatttgcaaaaacaaaccaagtggtggcaaagaatgatccatatatgccaaatttgaatcaaaacaattttgagttctcatttgcattgatattgcacttgttctagttgctttatgttgtgttggcataaatcaccaaaaagggggagattgaaagggaaatgagcccttgggccatttctaagtattttggtgattgagtgccaatgcaagtgctttcgtgttaatctatgcaaagtggtggacaaaatgcaaatcatgtcaaaaggtatgtttctcagacttagtacattgttttagagactaatgtattgtgtataagtgctggaaacaggaaaaattgaattgaaaatgagatggctaagttctgtcaaagttagagcagtctgggtgcaccggactgtccggtggtgcaccggacagtgtccggtgcgccaggctggctcgagcgaac

SEQ ID NO: 46475 - DNA, 445 bp, Zea Mays
gttcagggtgggagtctttccactgggtcttggtttcaagtgtaggagtgttttgttgattgatggcaaatgtttgtgaaatatttgtactaagttttatgcccactagcaggtggctacactccagatcatgtctagtacatttcttcttcttcgatgaaggcaagtgaatgtagcggtggttgcttccgttctgacctgttatttctattgtctacaatctaatattcagaagtattggattcttttataattggactctatggtgatgctttacttgcttgcattgtactgatgctcaatcatatattgatgatgattatgattcgagtatgactcatgagattaattcacacccctgaaggtaaatgaagtattatttgaggttggtattgtatctgaaggtaaatgaagtattatttgaggtttgtgttgtatctgaagg

SEQ ID NO: 46476 - DNA, 517 bp, Zea Mays
tcgtgacctatggtccgaccgtaccggtacaacttagcatcgtacgttgcccgagaaggggtacgatgcggcttcatacccttagaggtatgaaggcagaggacatatgcattgcattcatatgcattcattgaagtgatatttgcagatgatgtggttttatacccccagaggtatgaagatagagtacctacacattgcattcctatgcatacattgaagtgatatttgcaggtattgttgacgcagggaagtgttatagaacctattgtggttgttcgaggaaatgagatggtattggttatagtgggactactgagttctatatctacaagcatttctgatttttaattgtgactcttttaaaatgttgatgaattcaatttgtggtttaaatatctcgtcagaacaattagcttgctgagatgtttcatctcactcttgcattactcaatgcaggtgcttgttgctcatcaaggggagtgggaagtagcagcacatccaccttcattctcat

SEQ ID NO: 46477 - DNA, 57 bp, Zea Mays
gatggggcgcgaacttcgatgaggctccacagatggcgaacggcgtgcaagcacggg

SEQ ID NO: 46478 - DNA, 2255 bp, Zea Mays
tcggcatccgaataaccaatcaaatcaaatgtggatccccgagggtaccaaagcccaaacttaggtgtgtaagccaaatatctcaagattcgttttacggccgtaaggtgtgattccttagggtcggattgaaatcttgcacacatgcaaacggaaagcataatgtccggtcgagatgcacataaataaagcaatgaaccaatcatcgaccggtataccttttgatccacggacttacctcccgtgtcgaggtcgagatgcccattagttcccatgggtgtcttgatgggtttggcatccttcatcctaaacttagcaagaatgtcttgagtgtacttcgtttggctaatgaaggtgccctcttggagttgcttgacttggaatcctagaaaatacttcaactcccccatcatcgacatctcgaatttctgtgtcatgatcctactaaactcttcacaagtagactcgttagtagacccaaatataatatcatcaacataaatttggcatacaaacaagtcattttcaagagttttagtaaagagtgtaggatcggctttgccaactttgaagccattagaaataaggaaatctcttaggcattcataccatgctcttggggcttgcttgagcccataaagcgccttagagagcctatagacatggttagggtactcactgtcttcaaagccgggaggttgctcaacatagacctcttccttgatcggtccgttgaggaaggcacttttcacatccatttgatagagcttaaagccatggtaagtagcataggccaataatatgcgaattgactcaagcctagctacgggtgcataggtttcaccgaaatccaaaccttcgacttgtgaatatcctttggccacgagtcgagctttgttccttgtcaccacaccatgctcatcttgcttgttgcggaagacccatttggttcctacaacattttggttaggacgtggaactaaatgccatacctcatttctagtgaagttgttgagctcctcttgcattgccaccacccaatccgaatcttggagagcttcctctaccctgtgtggctcaatagaggaaacaaaagagtaatgttcacaaaaatgagcaacccgagatcgagtggttacccccttatgaatgtcgccgaggatggtgtcgacggggtgatctcgttggattgcttggtgaactcttgggtgtggcggtcttggttcttccttatcctccttttcttgatcatttgcatctcccccttgattattgctatcatcttgaggtggctcgtcttcttcatcattttgagcctcatccttattttgagttggtggagatgcttgcatggaggaggatggttgatcttgtgcatttggaggctcttcggattccttaggacacacatccccaatggacatgttccttagcgtgatgcatggagcctcttcattacctatctcatcaagatcaacttgctctacttgagagccgttagattcatcaaacacaacgtcacatgagacttcaactagtccagtggacttgttaaagaccctatatgcccttgtgtttgagtcataaccaagtaaaaagccttctacagttttaggagcaaatttagattttctacctcttttaacaagaataaagcatttgctaccaaaaactctaaagtatgaaatgttgggctttttaccggttaggagttcatatgatgtcttcttgaggattcggtgaagatataaccggttgatggcgtagcaggcggtgttgaccgcttcggcccaaaaccggtccggtgtcttgtactcatcaagcatggttcgtgccatgtccaatagagttcgattcttcctctccactacaccattttgttgaggtgtgtagggagaagagaactcatgcttgatgccctcctcctcaaggaagccttcaatttgagagttcttgaactccgtcccattgtcgcttcttattttcttgatccttaggccgaactcattttgagcccgtctcaagaatccctttaaggtctcttgggtttgagatttttcctgtaaaaagaatacccaagtgaagcgagaataatcatccactattacaagacaatacttactcccgccgatgcttatgtaagcgatcgggccgaatagatccatgtggagtagctcaagcggcctatcggtcgtcatgatgttcttgtgtggatgatggactccaacttgcttccccgcctggcatgcgctaca
